United States Patent Application Publication US 2007/0015145 A1 - sequence listing, part 2

SEQ ID NO: 2499 - DNA, 7025 bp, Rattus norvegicus
  ref <308>: DATABASE ACCESSION NUMBER: EMBL / J03754
  ref <309>: DATABASE ENTRY DATE: 2000-03-04
cgcagggccgggccgggccgggcgcgcagcaggggcggcggcagcggcagcggcagcggcggcggcggcatcatcgccccggagcgggcgcagggtttgccaccctcggagtgtggactaacagcagccgaggagacagagctgaacttggtcacgcagtccctagagtcagcaagacatgggttccattgtgcagctcctgacacctctgatgtaaccagatgacgtggaggggagctgtcccgaccatgtagatgccagccccagggatgatcagcatgggccccactgaatggagactcctgggtcagcattcctgagcctcttcggcccctggacctcaccccactcctggggacactcctcagagctctccagtgctgtcgccagcccacctcagccatcgcctcctcctgggactggaagttggcctcctggagctaataccctctggtgagggtgtactgaggacagccacacacagccatcacccacaggccccttttccagtgctgaccctcaggcccagcctgagcagaaacttcagcaaacatgggtgatatgaccaacagcgacttttactccaaaaaccaaagaaatgagtcgagccatgggggcgagttcgggtgcagcatggaggagctgcgctccctcatggagctgcggggcactgaggctgtggtcaagatcaaggagacatatggggacactgaatccatctgccggcgcctcaaaacctctcctgttgaaggtttgccaggcaccgctccagacctggaaaagaggaaacagattttcgggcaaaacttcatacctccaaagaaaccaaaaaccttcctgcagctggtgtgggaagcactacaggacgtgacgctcatcatcctggagatcgcggccatcatctccctgggactgtccttctaccacccacccggagagagcaatgaaggatgtgccacggcccaaggtggggcagaagatgaaggtgaagcagaagcaggctggatcgagggggctgccatcctgctgtcagtcatctgtgtggtcctcgtcacagccttcaatgattggagtaaagagaaacagttccggggcctgcagagccgaattgagcaggaacagaagttcaccgtagtccgggctggccaggtggtccagatccctgtggccgagattgtggttggggacattgcccagatcaaatacggtgacctccttcctgctgatggcctcttcatccagggcaatgacctcaagatcgatgaaagctcgctcacaggggagtctgaccaggtgcgcaagtctgtggataaggaccctatgttgctgtcaggaactcatgtgatggaaggctcaggacggatggtggtgactgctgtgggtgtcaactctcaaactggcatcatatttaccctgcttggggctggtggtgaagaggaagagaagaaagacaaaaaagccaagcagcaggatggggcagctgctatggaaatgcagcctctgaagagtgcggagggcggtgatgcagatgacaagaagaaagccaacatgcacaagaaagagaagtcggtgcttcagggcaagctcaccaagctggctgtgcagataggcaaggcgggcctggtgatgtcggccatcacggtgatcatcctggtgctctacttcaccgtggacaccttcgtggtcaacaagaagccgtggctgacggagtgcacaccggtctacgtgcagtacttcgtcaagttcttcatcattggtgtgacggtgctggtggtcgctgtgcccgagggcctccctctggctgtcaccatctcactggcctattccgtgaagaaaatgatgaaggacaacaacctggtccgtcacctggacgcctgtgagaccatgggtaacgccacagccatctgctcagacaagacaggcacgctgaccaccaaccgcatgaccgtggtgcaggcctatgtcggtgatgtccactacaaggagatccctgatcccagctccatcaatgccaagacattggagctgctggtcaacgccattgccatcaacagcgcctacaccaccaagatcctccccccagaaaaagagggcgccctgccccggcaggtgggcaacaagacagagtgtggcctgctgggcttcgtgctggacctgaggcaggattacgagccggtacgcagccagatgccagaggaaaagctgtataaggtgtacaccttcaactctgtgcgcaagtccatgagcaccgtcatcaagatgcctgacgagagcttccgcatgtacagcaaaggtgcttcggagattgtgctcaaaaagtgctgcaagattctcagtggggcaggggagccccgtgtcttccggccccgtgacagggatgagatggttaagaaggtgatcgagcccatggcctgtgacgggctccgtaccatctgtgtggcctatcgtgacttccccagcagccctgagcctgactgggacaatgagaatgacattctcaatgaactcacctgcatctgcgtggtgggcatcgaagacccagtgcgacctgaggtcccagaagccatccgcaagtgccagcgggccggtatcacagtccgcatggtcaccggtgacaacatcaacacagcccgggccatcgccatcaagtgtggcattatccaccctggagaggacttcctgtgcctggaaggcaaagaattcaatcggaggatccgcaacgagaagggggagattgagcaggagcggattgacaagatctggccaaagctgagggtgctggctcgatcctcgcccacggataagcacaccctggtcaaaggcatcatcgacagcacacacactgagcagcggcaggtggtggctgtgacaggggatgggaccaacgatgggcctgctctcaagaaggcagatgtgggcttcgcgatgggcatcgcaggcacggatgtggccaaggaggcctcagacatcatcctgacagacgacaacttcagcagcatcgttaaggcagtgatgtggggccgtaatgtctatgacagcatatccaaattcctgcagtttcagctgactgtcaatgtggtggctgtgatcgtggccttcacgggtgcctgcattacacaggactcccctctcaaggcggtgcagatgctctgggtgaacctcatcatggacacatttgcttccctggccctggcaacagagccacccaccgagactctgctcctgaggaaaccttacggccgcaacaagccgctcatctcgagaaccatgatgaagaacatcctgggccacgccgtctaccagctaaccctcatcttcaccctgctcttcgtgggtgagaagatgttccagattgacagcggaaggaacgccccgctgcactcgccaccctcggagcactacaccatcatcttcaacaccttcgtcatgatgcagcttttcaacgagatcaacgcccgtaagatccacggcgagcgtaacgtcttcgacggaatcttccggaaccccatcttctgcaccatcgttctcggcacttttgccatccagatagtgattgtgcagttcggcggcaaacccttcagctgctccccactccagctggaccagtggatgtggtgcatcttcataggcctgggagagctcgtctggggccaggtcattgccaccatccctaccagcaggctcaagtttctgaaagaggcagggcggctaacacagaaggaggagatccccgaggaagagttaaatgaggatgtggaagagatagaccacgcagagcgggagcttcgccgaggccagatcctatggttccggggcctgaatcggatccagacacagatccgcgtcgtgaaggcgttccgtagctctctctatgaagggttagaaaaacccgagtctcgaacctccatccataacttcatggctcatcctgaattccggatcgaagattcccagccccacatccccctcatcgatgacaccgacctggaagaagatgccgcgctcaagcagaactcgagcccgccgtcctcgctcaacaagaacaatagcgccatcgacagcgggatcaacctgacgaccgacacgagcaaatcagctacctcttcaagtccagggagccccatccacagcctggagacgtcgctttagctgaggcccctgtcgcctggccatgctcatggacccaccgccacccgcctccaggcgcacacccttccaggcaccaactccccgacgcagcaaggagcaatgggcggaacccacacagcggagagagaacccgtttccacacacagaccctttctctggctgccatgctgtttgaactctttttcactccttaggccatgggcggggttgcccccggggtcatctggagcagagagtggcgtggattgttttttttttttttccaaaacataaaaaaataataacgaattaatttttaaaaaaaagagcccttccaggctccagcccagacacggaccagccatgcacccgccagccactgcgtccccagcatgaatgtacctggacacttttaatcccctccctcgattggttcttggagggttagggaggggagttttttgtttgttttcttaggcgggaactgcaaacaggaactgcgaacagactgctgttcattcagtccactggtctatgaggtttcaaatgcttgcccagcatggtctcaaatgtctagattaatttaataactttttgaaatcacagagtaggtttgcaccaatgaaacccaagaactccacagacactcatgaggttatatccgtttctttgtatctatatcaacgtatacttcttgaagactgtatacgtgcgtatagataagtagatattatatatatatatacatatatatacatggatatataaagttcctttgccggcatgttgccttgtttctgcttaaattgctctattttaacttatgtcctaaaagaagaatgtaatttgtttacaaacctgtagataatgtctttggctatttgtgtggtttaagaacactggtggccgagatgcttacaaacagcttggcccaacagacacatcccctggattgcatccttgaagttttacgatagccatgctctgattttttgcctgctatttccgttcaataacgttactactgtgggaagctcaggcagaaagccaacagctcccaaggatccaccctgaggagctacgcaacatgctccaccgtagacaagggagaagaggagagaaggtggttcccccgggctggcaacatggctgtccaggtcccatgacgtcagtagtgcacccggagaaggaaggcttttctctcaatgaaactcgcttgagtttacagagagcatttcagaactgagttgtctttggcactgtctttgtgagtcaaggtagtgttcagatatcacagatgctattgtgttgattttttttttttttttagttagtagtttagaagtttctttccttataaacagcagcatagatactgctgacatactggatgagggttggtacggcttgctgctttcggtttttctttttgaagaatagccttttttctctgcactatttagatccgaatgaaccttatgatgtgtacattgagatgtattcagtgtgatttttaaaccaaattgtcttcctgtagttacaacatatactgtagccttttaacagcaagtcctgctttcccagacagaaagccattccgattatcttcccatatcacaggtgagaaaaggtggctatcccctcccccaacaataacagcactagtaatcccaactcaataagagcttgtctgtcggcctctgactgctaagcactttgtgggtctcagctttttttcataaaagaacttttgtatttaatacaaagtttgctttgagacttttcagcatacaatctttttccataaacttgtacagtgcaaaaagacattttgaataccatgaccggtggtgtcccgtgctttgaggaaaaccaaacactttccgcctcacttgtgaactccatccttcactctctcccttctcacaatcgctcctcgctcttcagcctggtccccagccctcctccaggcccagagacctcttcactaaacaagatgacagccacttgggaaaagagccatagtccgctgggagggcccacgtctggatggctgtgaaaaacttgagtgattggtttggggttcaaagtctgcccgtcccacctggccacaatctctctgtaaggaagaatatctctgaaggattctgaatgtatccaggagagagagagctgcctctccagcaggtggaccagccctagatatactcactggattccagtacagactccaccagaggcagcccacagtacccctccaagggagggaaggaaaccccggggctgccttcaaacaggataggtttttctttgggttttttgttgttgtttgattggtttgggggttttttggttttgttttttttgggggggggtttgttttttgttttttttttttttggtggggagtcctttgtcacatttttcatcctaccctcctccattcaaccatgcatctatgacctcaacctcattccatgccaccagggttcttgtgcttacaaaccagggtccttgggctttggaaccaagcctcaagggcaaagaggaaggggttctctgagcagagccaggttctcagacagggagcagaggaagctagcaaggaggcctgacattagcgctggcttcccggcgtcaggaatgagggatagcctatgctccagcccctcgttctcacactcttccatacacacctacataggagatggttggttggtcagaactcactgtagtacacaaagcttgcacttccgcgtcctatatctagcagcatgggatacgtttggcagttcaccccattagggggtcaataatttatgaccattcatctgtttttatgaatttttttatctagacaataattgtaaataaagaattcaccgtctctgctcatt

SEQ ID NO: 2500 - protein, 1243 aa, Rattus norvegicus
  ref <308>: DATABASE ACCESSION NUMBER: SWISS-Prot / P11506
  ref <309>: DATABASE ENTRY DATE: 2002-06-15
MGDMTNSDFYSKNQRNESSHGGEFGCSMEELRSLMELRGTEAVVKIKETYGDTESICRRLKTSPVEGLPGTAPDLEKRKQIFGQNFIPPKKPKTFLQLVWEALQDVTLIILEIAAIISLGLSFYHPPGESNEGCATAQGGAEDEGEAEAGWIEGAAILLSVICVVLVTAFNDWSKEKQFRGLQSRIEQEQKFTVVRAGQVVQIPVAEIVVGDIAQIKYGDLLPADGLFIQGNDLKIDESSLTGESDQVRKSVDKDPMLLSGTHVMEGSGRMVVTAVGVNSQTGIIFTLLGAGGEEEEKKDKKGVKKGDGLQLPAADGAAPANAAGSANASLVNGKMQDGSADSSQSKAKQQDGAAAMEMQPLKSAEGGDADDKKKANMHKKEKSVLQGKLTKLAVQIGKAGLVMSAITVIILVLYFTVDTFVVNKKPWLTECTPVYVQYFVKFFIIGVTVLVVAVPEGLPLAVTISLAYSVKKMMKDNNLVRHLDACETMGNATAICSDKTGTLTTNRMTVVQAYVGDVHYKEIPDPSSINAKTLELLVNAIAINSAYTTKILPPEKEGALPRQVGNKTECGLLGFVLDLRQDYEPVRSQMPEEKLYKVYTFNSVRKSMSTVIKMPDESFRMYSKGASEIVLKKCCKILSGAGEPRVFRPRDRDEMVKKVIEPMACDGLRTICVAYRDFPSSPEPDWDNENDILNELTCICVVGIEDPVRPEVPEAIRKCQRAGITVRMVTGDNINTARAIAIKCGIIHPGEDFLCLEGKEFNRRIRNEKGEIEQERIDKIWPKLRVLARSSPTDKHTLVKGIIDSTHTEQRQVVAVTGDGTNDGPALKKADVGFAMGIAGTDVAKEASDIILTDDNFSSIVKAVMWGRNVYDSISKFLQFQLTVNVVAVIVAFTGACITQDSPLKAVQMLWVNLIMDTFASLALATEPPTETLLLRKPYGRNKPLISRTMMKNILGHAVYQLTLIFTLLFVGEKMFQIDSGRNAPLHSPPSEHYTIIFNTFVMMQLFNEINARKIHGERNVFDGIFRNPIFCTIVLGTFAIQIVIVQFGGKPFSCSPLQLDQWMWCIFIGLGELVWGQVIATIPTSRLKFLKEAGRLTQKEEIPEEELNEDVEEIDHAERELRRGQILWFRGLNRIQTQIRVVKAFRSSLYEGLEKPESRTSIHNFMAHPEFRIEDSQPHIPLIDDTDLEEDAALKQNSSPPSSLNKNNSAIDSGINLTTDTSKSATSSSPGSPIHSLETSL

SEQ ID NO: 2501 - DNA, 4421 bp, Homo sapiens
  ref <308>: DATABASE ACCESSION NUMBER: EMBL / L00620
  ref <309>: DATABASE ENTRY DATE: 2000-03-08
gcaaggaccgcagcaaacatgggtgacatgaccaacagcgacttttactccaaaaaccaaagaaatgagtcgagccatgggggcgagttcgggtgcacaatggaggagctccgctccctcatggagctgcggggcactgaggctgtggtcaagatcaaggagacttatggggacaccgaagccatctgccggcgcctcaaaacctcacctgttgaaggtttgccgggcaccgctccagacctggaaaagagaaagcaaatttttgggcaaaactttatacctccaaagaagccaaaaaccttcctgcagctcgtgtgggaggcgctgcaggacgtgacgctcatcatcctggagattgccgccatcatctccctggggctgtccttctaccaccgccccggcgagggcaacgaaggatgtgcgacggcccagggtggggcagaggatgaaggagaggcagaggcaggttggatcgagggggccgccattctcctctcagttatctgtgtggtcctggtcacggccttcaatgactggagcaaagagaaacagttccggggcctgcagagccgcatcgagcaggaacagaaatttaccgtggtccgggctggccaggtggtccagatccctgtggctgagatcgtggttggggacatagcccaggtcaaatatggtgacctcctccctgccgacggactcttcatccagggcaatgacctcaagattgatgaaagctccctaactggagagtctgaccaggtgcgcaagtccgtggacaaggaccccatgctgctgtcaggaacccacgtgatggagggctcaggacggatgttggtgactgctgtgggtgtgaactctcagactggcatcatctttaccctcctgggggctggtggtgaagaggaagagaagaaagacaaaaaagccaaacagcaggacggggcagccgccatggagatgcagcccctcaagagtgccgagggcggcgacgctgacgacaggaagaaggccagcatgcacaagaaggagaagtccgtgctgcagggcaagctcaccaagctggctgtgcagatcgggaaggcgggcttggtgatgtcagccatcacggtgatcatcctggtgctctacttcactgtggacaccttcgtggtcaacaagaagccgtggctgcctgagtgcacgcccgtctacgtgcagtactttgtcaagttcttcatcattggcgtgacggtgctggtggtcgccgtgcccgaggggctccctctggccgtcaccatctcgttggcctattcggtgaagaaaatgatgaaggacaacaacctggtacgccacctggatgcctgtgagaccatgggcaatgccacagccatctgctcagacaagacaggcacgctgaccaccaatcgcatgacagtggtacaggcctatgtcgacgacgtccactataaagagatccccgaccccagctccatcaacaccaagactatggagctgctgatcaatgccatcgccatcaacagcgcctacaccaccaagattctgcccccagagaaggagggcgccctgcctcggcaggtgggcaacaagacggagtgcggcctgctgggcttcgtgctggacctgaagcaggactacgagcccgtgcgcagccagatgccagaggagaagttgtacaaagtgtacaccttcaactccgtgcgcaagtccatgagcactgtcatcaagctgcccgacgagagcttccgcatgtacagcaagggggcttctgagatcgtgctcaagaagtgctgcaaaatcctcaatggggcgggagagcctcgtgtcttccggccccgcgaccgggacgagatggtaaagaaggtgattgagcccatggcttgcgatgggctccgcactatctgcgtggcctaccgcgacttccccagcagcccggagccggactgggacaatgagaatgacatcctcaacgaactcacctgcatctgcgtggtgggcatcgaggacccggtgcggccagaggtcccagaagccatccgcaagtgccagcgggcaggcatcacggtccgcatggtcactggcgacaatatcaacacggctcgggccatcgccatcaagtgtggcatcatccatcctggggaggactttctgtgcctcgagggcaaggagttcaacaggaggatccgcaacgagaagggggagattgagcaggagcgaattgacaagatctggccaaagctgcgggtgctggctcgctcctccccaacggacaagcataccctggttaaaggcatcatcgacagcacacacactgagcagcggcaggtggtggccgtgacgggggacgggaccaacgacgggcctgcactcaagaaggccgacgtgggcttcgccatgggcatcgcaggcactgacgtggccaaggaggcctcagacatcatcctgacagacgacaatttcagcagcatcgtcaaggcagtgatgtggggccgcaacgtctatgacagcatctccaaattcttgcagttccagctcaccgtcaacgtggtggccgtgattgtggccttcacaggcgcctgcatcacgcaggactcccctctgaaggccgtgcagatgctctgggtgaacctcatcatggacacgtttgcctcgctggcactggccactgagccgcccacggagaccctgctgctgaggaagccgtacggccgcaacaagccgctcatctccaggaccatgatgaagaacatcctgggccatgctgtctaccagcttgccctcatcttcaccctgctctttgttggcgagaagatgttccagatcgacagcgggaggaacgcgcccctgcattcgccaccctcagaacattacaccatcatcttcaacaccttcgtcatgatgcagctcttcaacgagatcaacgcccgcaagatccacggcgagcgcaatgtctttgacggcatcttccggaaccccatcttctgcaccatcgtgctgggcacctttgccatccagatagtgatcgtgcagtttggagggaagccattcagctgctctccactgcagctggaccagtggatgtggtgcatattcattgggttaggagagctcgtttggggccaggtcatcgccaccatcccgaccagcagactcaagttcctcaaggaggcaggcaggctcacacagaaggaggagatcccggaggaggagctcaacgaggacgtggaggagatcgaccacgcagagcgggagctgcggcggggccagatcctgtggttccgaggcctgaatcggatccagacacagatccgcgtcgtgaaggcgttccgtagctctctctatgaaggtttagaaaagcctgaatctcgaacctccatccataacttcatggctcatcctgaattccggatcgaagattcccagccccacatccccctcattgatgacaccgacctggaagaagatgccgcgctcaagcagaactcgagcccgccgtcatccctcaacaagaacaacagcgccatcgacagtgggatcaacctgacgaccgacacaagcaaatcagctacctcttcaagtccagggagccccatccacagcctggagacgtcgctttagctgaggaccctgtcgcctgcccgcccgccctcatggaccccgctgtcacccgctttccgggcacccatccatccaggcacccaactcacccaagcagcaacgagcaacaatcggaaaccaaatactggagagaaaaccaacgtttccacccacagaccctttctctggctgcgatgctgtttgaactctttttcacttcaaggcaaggggcgggatctccactgggggcttacgggagtgagcggttttcccaaaacaagcccttcctggctcccacccagacatggaccagccatgcacccgcccagtcaccacgtcccccgcatgaatgtactgtacactttcaatcctccccttgtttggtttttgggggttggggaggggtttttgtttgtttgtttgttttcttaggcgggaactgcaaacagactcttttctgagactatttatccaatccactggtctgtgagtttttgaaacgcttgcacagcatggtctcagttgtatagattaatttaataactttttgaaattgcagagcttaactcgcctagtagatttgcaccaatggaaccgaagaacttcatagacactcacaaggttatatccatttctttgtatctatatcaacgtatacttttccgagactgtatacgtccatatagataggtagatatatatatatatatataaatatatatacatggatatataaagtttctttgccggcatgttgccttgtttccgcttaaattgctctattttaacttatttatgtcctaaaagaagaatgtaatttgtttaca

SEQ ID NO: 2502 - protein, 1243 aa, Homo sapiens [sequence omitted]

SEQ ID NO: 2503 - DNA, 7025 bp, Rattus norvegicus; identical to SEQ ID NO: 2499
  ref <308>: DATABASE ACCESSION NUMBER: EMBL / J03754
  ref <309>: DATABASE ENTRY DATE: 2000-03-04

SEQ ID NO: 2504 - protein, 1243 aa, Rattus norvegicus; identical to SEQ ID NO: 2500
  ref <308>: DATABASE ACCESSION NUMBER: SWISS-Prot / P11506
  ref <309>: DATABASE ENTRY DATE: 2002-06-15

SEQ ID NO: 2505 - DNA, 4421 bp, Homo sapiens; identical to SEQ ID NO: 2501
  ref <308>: DATABASE ACCESSION NUMBER: EMBL / L00620
  ref <309>: DATABASE ENTRY DATE: 2000-03-08

SEQ ID NO: 2506 - protein, 1243 aa, Homo sapiens [sequence omitted]

SEQ ID NO: 2507 - DNA, 1529 bp, Rattus norvegicus
  ref <308>: DATABASE ACCESSION NUMBER: EMBL / J03773
  ref <309>: DATABASE ENTRY DATE: 2000-03-04
gctgctgccggaccatgggatgtcggcaaagctcagaggaaaaagaggcagcgcggcggtcgaggagaattgaccgccacctgcgctcggagagccagcggcagcgccgtgagatcaaacttctcctgctgggcaccagcaactcgggcaagagcaccatcgtcaagcagatgaaaatcatccacagcggtggtttcaacctggaggcctgcaaggagtacaagcccctcatcatctacaacgccatcgactcgctgacccgcatcattcgggccctggctgccctgaagattgatttccacaaccctgaccgtgcctacgacgccgtgcagctctttgccctgactggcccggcagagagcaagggtgagatcacgcccgagctgctgggtgtcatgcgacggctctgggctgaccccggggcccaggcctgcttcggccgctccagcgagtaccacctggaggacaacgccgcttactacctgaatgacctggagcgcatcgcggcgcccgactatatccccacggtggaggacatcctgcgctctcgggacatgaccacgggcattgtggaaaacaagttcaccttcaaggagcttaccttcaagatggtggatgtgggagggcagaggtcagagcgcaaaaaatggatccactgctttgagggcgtgacggccatcatcttctgtgtggagctcagtggctatgacctgaagctttatgaggacaaccagacgagccgaatggcggagagcctgcgtctttttgactccatctgcaacaacaactggttcatcaacacctccctcatcctcttcctgaacaagaaggacctcctgtcggagaagattcggcgtatcccgctcagcgtctgcttccccgagtacaagggtcagaacacgtacgaggaagccgcggtctacatccagcgtcagttcgaggacctaaaccgaaacaaggagaccaaggagatctactcgcactttacctgtgccaccgacaccagtaacatccagtttgtcttcgacgcagtgacagatgtcatcatacagaacaatctcaagtacattggcctttgctgaggagccgggcgcagcctgcttgcctgcggtgaaaacccacggggtgtcacaccccacacctcatgctggagaggcccgacccaggggcaggaaacggggggagtggcttgaagagtgtgtccccacccccagcctctctcgcctccttggccccacgtctctgcaaacataaatatatttggatagattgctaggtaggtagacacacagacacacgcacacgcacacgcacacgcgcacgcacgtctggagacggcaacgctctccggcggtcaaggtttcctgaaattttcagaagctgctgtcacaatttcattctgaggccatcttgcccccccaccccccatccactctgagtcggcccccgctctgcacgggagggagggtccacgtttgactgccgaggaggggccggcggggctggggccagggccggccagctgtgcc

SEQ ID NO: 2508 - protein, 354 aa, Rattus norvegicus
  ref <308>: DATABASE ACCESSION NUMBER: SWISS-Prot / P19627
  ref <309>: DATABASE ENTRY DATE: 2002-06-15
GCRQSSEEKEAARRSRRIDRHLRSESQRQRREIKLLLLGTSNSGKSTIVKQMKIIHSGGFNLEACKEYKPLIIYNAIDSLTRIIRALAALKIDFHNPDRAYDAVQLFALTGPAESKGEITPELLGVMRRLWADPGAQACFGRSSEYHLEDNAAYYLNDLERIAAPDYIPTVEDILRSRDMTTGIVENKFTFKELTFKMVDVGGQRSERKKWIHCFEGVTAIIFCVELSGYDLKLYEDNQTSRMAESLRLFDSICNNNWFINTSLILFLNKKDLLSEKIRRIPLSVCFPEYKGQNTYEEAAVYIQRQFEDLNRNKETKEIYSHFTCATDTSNIQFVFDAVTDVIIQNNLKYIGLC

SEQ ID NO: 2509 - DNA, 2679 bp, Homo sapiens
  ref <308>: DATABASE ACCESSION NUMBER: EMBL / J03260
  ref <309>: DATABASE ENTRY DATE: 2000-03-04
gagaccaggaccatgggatgtcggcaaagctcagaggaaaaagaagcagcccggcggtcccggagaattgaccgccacctgcgctcagagagccagcggcaacgccgcgaaatcaagctgctcctgctgggcaccagcaactcaggcaagagcaccatcgtcaaacagatgaagatcatccacagcggcggcttcaacctggaggcctgcaaggagtacaagcccctcatcatctacaatgccatcgactcgctgacccgcatcatccgggccctggccgccctcaggatcgacttccacaaccccgaccgcgcctacgacgctgtgcagctctttgcgctgacgggccccgctgagagcaagggcgagatcacacccgagctgctgggtgtcatgcgacggctctgggccgacccaggggcacaggcctgcttcagccgctccagcgagtaccacctggaggacaacgcggcctactacctgaacgacctggagcgcatcgccgcagctgactatatccccactgtcgaggacatcctgcgctcccgggacatgaccacgggcattgtggagaacaagttcaccttcaaggagctcaccttcaagatggtggacgtgggggggcagaggtcagagcgcaaaaagtggatccactgcttcgagggcgtcacagccatcatcttctgtgtggagctcagcggctacgacctgaaactctacgaggataaccagacaagtcggatggcagagagcttgcgcctctttgactccatctgcaacaacaactggttcatcaacacctcactcatcctcttcctgaacaagaaggacctgctggcagagaagatccgccgcatcccgctcaccatctgctttcccgagtacaagggccagaacacgtacgaggaggccgctgtctacatccagcggcagtttgaagacctgaaccgcaacaaggagaccaaggagatctactcccacttcacctgcgccaccgacaccagtaacatccagtttgtcttcgacgcggtgacagacgtcatcatacagaacaatctcaagtacattggcctttgctgaggagctgggcccggggcgcctgcctatggtgaaacccacggggtgtcatgccccaacgcgtgctagagaggcccaatccaggggcagaaaacagggggcctaaagaatgtcccccaccccttggcctctgcctccttggccccacatttctgcaaacataaatatttacggatagattgctaggtagatagacacacacacatgcacacacacacatctggagatggcaaaatcctctaaaatgtcgaggtctcttgaagacttgagaagctgtcacaaggtcactacaagcccaacctgccccttcactttgccttcctgagttggccccactccacttgggggtctgcattggattgttagggataggcagcagggctgaggcaaggtaggccaactgcacccctgtcacctggaggagggccggctcgctgcccgagctctggcctagggaccttgccgctgaccaagagggaggaccagtgcagggtctgtgcaccttccctgctggcctgcacacagctgctcagcaccatttcattctggacctgggaccttaggagccgggtgacagcactaaccagacctccagccactcacagctctttttaaaaaacagcttcaaaatatgcagcaaaaaccaatacaacaaaacgagtggcacgatttatttcaaactaggccagctgggattccagcttttcttctactagtctgatgttttataaatcaaaacctggttttccttctctggcatttttttttgttttttgttttttggttttttttttttttttggccaaatctcgtggtgtttcgcagaaaaaaatccagaaaatttcaaatgcagttgagtattcttttttaaatgcagattttcaaaacatattttttttcaggtggtcttttttgtgtctggcttgctgagtgtaaaagttgttatctggacgatctgtctctctgctccaaagaaattttggagtgagtggcagtcctgcgccagcctcgcgggacacgtgttgtacataagcctctgcagtgtcctcttgttaatggtggggttttctgctttgtttttatttaagaaaataaacacgacatatttaaagaaggttctttcacctgggagcaaatgaacaatagctaagtgtcttggtatttaaagagtaaattatttgtggctttgctgagtgaaggaaggggagcaaggggtggtgcccctggtcccagcatgccccgcgcctgagactggctggaaatgctctgactcctgtgaaggcacagccagcgttgtggcctgagggaggccctgctgggaccctgatctgggccttcctgtcccagggcctatgggcaactgcgttgaaaggacgttcgccaagggccgtgtgtaaatacgaactgcgccatggagaggagaggcactgccggagcccttgccagatctccctccctctctctgtgcagtagctgtgtgtccgaggtcagtgtgcggaatcacagccaaggacgtgaagagatgtacgggggaaagagaagctggggattggatgaaagtcaaaggttgtctactttaagaaaataaaataccctgaatgg

SEQ ID NO: 2510 - protein, 354 aa, Homo sapiens
  ref <308>: DATABASE ACCESSION NUMBER: SWISS-Prot / P19086
  ref <309>: DATABASE ENTRY DATE: 2002-06-15
GCRQSSEEKEAARRSRRIDRHLRSESQRQRREIKLLLLGTSNSGKSTIVKQMKIIHSGGFNLEACKEYKPLIIYNAIDSLTRIIRALAALRIDFHNPDRAYDAVQLFALTGPAESKGEITPELLGVMRRLWADPGAQACFSRSSEYHLEDNAAYYLNDLERIAAADYIPTVEDILRSRDMTTGIVENKFTFKELTFKMVDVGGQRSERKKWIHCFEGVTAIIFCVELSGYDLKLYEDNQTSRMAESLRLFDSICNNNWFINTSLILFLNKKDLLAEKIRRIPLTICFPEYKGQNTYEEAAVYIQRQFEDLNRNKETKEIYSHFTCATDTSNIQFVFDAVTDVIIQNNLKYIGLC

SEQ ID NO: 2511 - DNA, 1348 bp, Rattus norvegicus
  ref <308>: DATABASE ACCESSION NUMBER: EMBL / J03867
  ref <309>: DATABASE ENTRY DATE: 2000-03-04
tagaacggtgccaccactgtcttcttcgccaccatgggggcccagctgagcacgttgagccgagtggtactctccccggtctggttcgtctacagcctcttcatgaagctgtttcagcgctcctcaccggccatcaccctcgagaaccccgacatcaagtaccctctgcggctcatcgacaaggagattatcagccatgacactcggcgcttccgatttgcactcccttcgccccagcacatcctgggccttcctatcggccagcacatctacctctccaccaggatcgatggcaacttggtcattcgtccctacacccctgtgtctagtgatgatgacaagggccttgtggacttggtggtcaaggtttacttcaaggacacgcatcccaagtttccagctggagggaaaatgtctcagtacctggaaaacatgaatattggagacaccattgaattccggggccccaatgggctactggtctaccagggcaaagggaagttcgccatccgtgcagacaagaagtccaaccctgttgtcaggacggtgaagtctgtaggcatgattgcaggagggacaggcatcaccccaatgctgcaggtgatccgagccgtcttgaaggacccgaacgaccacactgtgtgctatctgctcttcgccaaccagtccgagaaagacatcctgctgcggcctgagctggaggaactgaggaacgaacattcttctcgcttcaagctctggtacacagtggacaaagcccccgatgcctgggactatagccaaggcttcgtgaatgaggagatgatcagggaccatcttccacctcctggggaggagacactgatactgatgtgtggacccccaccgatgatccagtttgcctgtttgccaaacctggagcgtgtgggccatcccaaggagcgatgcttcaccttctgatggctggatgctggccactcccatgcctgctgctcacgcactcaccacaaccaccttccaccccttccttccccactactgtcctttaccctgacatatgcccacatccatgctggggcctgggttcagcctggcctgcccagccctggtcatccagctgtactggcccctgaggggcccctttgggagcaggcctgtgtatcaggtggcttctgttgaccactttctgaataggcttctgtctggtactaactggccattaccagagatggtccatgaccacccctttatacacacacacatacacatacagagacagagagacagagagacagagatagacagagatagacagagagacagatacagacatagagacagagagagaagagagagagaggagagagag

SEQ ID NO: 2512 - protein, 300 aa, Rattus norvegicus; identical to SEQ ID NO: 1548
  ref <308>: DATABASE ACCESSION NUMBER: SWISS-Prot / P20070
  ref <309>: DATABASE ENTRY DATE: 2002-06-15

SEQ ID NO: 2513 - DNA, 1783 bp, Homo sapiens
  ref <308>: DATABASE ACCESSION NUMBER: EMBL / M16462
  ref <309>: DATABASE ENTRY DATE: 2000-03-04
cggtggccccgcgccgcgctcgctctcgagagcccggacatcaagtacccgctgcggctcatcgaccgggagatcatcagccatgacacccggcgcttccgctttgccctgccgccaccccagcacatcctgggcctccctgtcggccagcacatctacctctcggctcgaattgatggaaacctggtcgtccggccctatacaccaatctccagcgatgatgacaagggcttcgtggacctggtcatcaaggtttacttcaaggacacccatcccaagtttcccgctggagggaagatgtctcagtacctggagagcatgcagattggagacaccattgagttccggggccccagtgggctgctggtctaccagggcaaagggaagttcgccatccgacctgacaaaaagtccaaccctatcatcaggacagtgaagtctgtgggcatgatcgcgggagggacaggcatcaccccgatgctgcaggtgatccgcgccatcatgaaggaccctgatgaccacactgtgtgccacctgctctttgccaaccagaccgagaaggacatcctgctgcgacctgagctggaggaactcaggaacaaacattctgcacgcttcaagctctggtacacgctggacagagcccctgaagcctgggactacggccagggcttcgtgaatgaggagatgatccgggaccaccttccacccccagaggaggagccgctggtgctgatgtgtggccccccacccatgatccagtacgcctgccttcccaacctggaccacgtgggccaccccacggagcgctgcttcgtcttctgagggccgggcaccggtcacacggccaccgcccccgcgcaccccacgccctgttcacgctcacccagtcacctccccacatcgcacactggggccccgggttcagcctggcctgcccgtgccctggtgaatcacctggctgagcagttcccctggagccccttcgggagcagggctgtgtcccagatgggccacggctgagccttcagagtacgtcctgcctggcacttactggtccttaccagagacgcccagccccatccctgtcctcatgacccctcgtccaccccccacacacactataaggctgagggctgccagcagccccgtctgcccaccattcccggccgtggaccatagtcgggatgtcagcagacacacatggcaggcccaaagctgcaggtcccagggcccaccccagccacgcctgtcacccccactcccgcctcagggccaggcccaggcctcaccacctgacgctgcatgagacattgacaccagaaagccctcttgggggcactgctccctaccccagggccctggccagccgggagcttggctctcctctggctagagtgggaagagggggctggccatggggccctcccagaacctcagcatttccttccagcccatccaaacactgaggcagccttggggaaccccgagctggggggttggcagcccactgcaccgcctcagggttttggggtcctgggctggggccacatccctgatggcagaactcccacaaccacatgtatttattcctctgtcctaaaccgtcccctccttccctcacccccagcacagggggattctgagcagtgcctcttgtctgagggacatatcagtgacctcgacgttgcctttagactacagttgtgttagcctcttgcgtattggctttttcagagtcatttatgagcagaaaaaaaaaaagtaaaactttgctaatatt

SEQ ID NO: 2514 - protein, 300 aa, Homo sapiens; identical to SEQ ID NO: 1550
  ref <308>: DATABASE ACCESSION NUMBER: SWISS-Prot / P00387
  ref <309>: DATABASE ENTRY DATE: 2002-06-15

SEQ ID NO: 2515 - DNA, 2799 bp, Rattus norvegicus
  ref <308>: DATABASE ACCESSION NUMBER: EMBL / J03886
  ref <309>: DATABASE ENTRY DATE: 2000-03-04
ggtcgaccagctagaacgccttgagttcagacacgcagaagcacacgcctacctacctcatggctacagaaaacggagcagttgagctgggaacccagagtctgtcaacagaccacccacctacagacgcagcaggtgatggatctccagcttcagagaaagaacccagcctcccagacacagagaaagacctgggccccactaacacgaagaaagaccctggcgcgccggatccaaagaaaaatccagatccaccctccctgaagaaaactcccgaagcccctggtccagagaaaaagggtgactcggccccagcttcagccagcaaccagggcccttcaggagagggtgatggaggtgggggccctgctgaaggcggtacggggcctcctgcagtcttgccccagcccactgccacagctgatgccagcatccagaagctggacgccacgcaagcgccctcgggcaaccaggaatctggagaggccaaggcaggcaagaaggcagcagaatgccgagaagcaggacgaaggggctcacccgcctttcttcacagccctagctgccccgcgatcatctcctgttctgagaagacactggccatgaagcccttaagcgagacaacagagctcatctttgcaggggtgtctgaaacccctgatccccaagatcctggtccagctaaggacgaaggagggacgaacacgctggcagacgggaaagaagaggcagaggcaggccaggctgagcaggctaaggtgcaaggggacacctcccagaggatcgggttccaggctgttccctcagagagagcagaggtggggcaggccctctgtctcacggccaaggaggaagactgcttccaaattctggatgattgtccaccacccccagcccccttcccacacaggatcgtggagctgaggaccggaaatgtcagcagtgaattcagcatgaactcaaaggaggcattgggaggtggcaagtttggagctgtgtgcacctgcacggagagatccacaggcctcaagctggcagccaaggtcatcaagaaacagacccccaaggacaaggaaatggtgttgctggagatcgaggtcatgaaccagctgaaccaccgcaatttgatccagctgtactcagccattgagacctctcacgagatcatcctgttcatggagtacattgagggcggcgagctctttgagaggatcgtggatgaggactaccaactgacggaagtggataccatggtgttcgtcaggcagatctgcgacgggatcctcttcatgcacaagatgagggtcctgcacttggacctcaagccagagaacatcctgtgtgtgaataccaccgggcacttggtgaagataattgacttcggcctggcaagaaggtataaccccaatgagaagctgaaggtgaattttgggaccccggagttcctgtcaccagaggtggtgaactatgaccagatctctgacaagacggacatgtggagtcttggggtgatcacctacatgctactgagtggcctctctcccttcctgggcgacgatgacacggagaccctaaacaacgtcctgtctgccaactggtactttgatgaggagacttttgaagctgtgtcagacgaggccaaagacttcgtttccaatcttatcacgaaggaccagagtgccagaatgagtgctgagcagtgcctcgcccacccctggctcaacaacctggcagaaaaagccaagcgctgcaaccgtcgtctcaagtcccagatcctgcttaagaaatacctcatgaagaggcgctggaagaaaaacttcattgctgtcagcgcacgcaatcgcttcaagaagatcagtagctcgggggcactgatggctttgggggtctgaaccccaggcgactaaaagcctggatgcactcgcatggtcaaggctgaaaccagagagagccggccagatctctagagcaggctggtcaggacaaatctgcaccaggcccagaggcttggggctccgcaggtccttaggcttaccgcttcccctacgtgaacatggagtgtggcctggaatccatctgtgaccgcctcctcagcaggctgtgtgaccgcttccccctacgtgaacatggagtgtggcctggaatccactctgtgaccgcctcctcagcaggctgtgcctgtcagccccaccagactccaaggacagccaggccaggccattcctagtctctccctagcttgcccctttgaactgctgccccgtaacctttttttcctgcacctggggcactcttgccctggagcgggatggccgggggtccagcaggtgggctgctgtagtggtggtggtggatgggagattctaggagggtagaaatgcagtcagctgcaggggagacagagcaggctttgtgtgagaggacctccatgccctgcctcacactcccaacagatacaaccttgcacacaccatctggctcctggctcccaccttctgtttgtgaccaccaacacataggaacttgtgagagaaagccagcccaggcctggagaggtggtggtggtagcggagagaagtctgggaggcctgagaaccacccccctaagtttacttgaggaccgagtcttccatcctggctactctgtacccatcccaggggcatctgaaaaccccaaataacaggatgaactggccacaaggagtatgaaagccgtcggggcagacccccaaccgctctcagcttgtgccttataaataaacacacaggttggaggcagcctccttcctctgcgcatgc

SEQ ID NO: 2516 - protein, 609 aa, Rattus norvegicus
  ref <308>: DATABASE ACCESSION NUMBER: SWISS-Prot / P20689
  ref <309>: DATABASE ENTRY DATE: 2002-06-15
ATENGAVELGTQSLSTDHPPTDAAGDGSPASEKEPSLPDTEKDLGPTNTKKDPGAPDPKKNPDPPSLKKTPEAPGPEKKGDSAPASASNQGPSGEGDGGGGPAEGGTGPPAVLPQPTATADASIQKLDATQAPSGNQESGEAKAGKKAAECREAGRRGSPAFLHSPSCPAIISCSEKTLAMKPLSETTELIFAGVSETPDPQDPGPAKDEGGTNTLADGKEEAEAGQAEQAKVQGDTSQRIGFQAVPSERAEVGQALCLTAKEEDCFQILDDCPPPPAPFPHRIVELRTGNVSSEFSMNSKEALGGGKFGAVCTCTERSTGLKLAAKVIKKQTPKDKEMVLLEIEVMNQLNHRNLIQLYSAIETSHEIILFMEYIEGGELFERIVDEDYQLTEVDTMVFVRQICDGILFMHKMRVLHLDLKPENILCVNTTGHLVKIIDFGLARRYNPNEKLKVNFGTPEFLSPEVVNYDQISDKTDMWSLGVITYMLLSGLSPFLGDDDTETLNNVLSANWYFDEETFEAVSDEAKDFVSNLITKDQSARMSAEQCLAHPWLNNLAEKAKRCNRRLKSQILLKKYLMKRRWKKNFIAVSAANRFKKISSSGALMALGV

SEQ ID NO: 2517 - DNA, 1658 bp, Homo sapiens
  ref <308>: DATABASE ACCESSION NUMBER: EMBL / BC007753
  ref <309>: DATABASE ENTRY DATE: 2001-06-08
ggaggggtctgtgcacacagcatcgagggcggagagctcttcgagaggattgtggatgaggactaccatctgaccgaggtggacaccatggtgtttgtcaggcagatctgtgacgggatcctcttcatgcacaagatgagggttttgcacctggacctcaagccagagaacatcctgtgtgtcaacaccaccgggcatttggtgaagatcattgactttggcctggcacggaggtataaccccaacgagaagctgaaggtgaactttgggaccccagagttcctgtcacctgaggtggtgaattatgaccaaatctccgataagacagacatgtggagtatgggggtgatcacctacatgctgctgagcggcctctcccccttcctgggagatgatgacacagagaccctaaacaacgttctatctggcaactggtactttgatgaagagacctttgaggccgtatcagacgaggccaaagactttgtctccaacctcatcgtcaaggaccagagggcccggatgaacgctgcccagtgtctcgcccatccctggctcaacaacctggcggagaaagccaaacgctgtaaccgacgccttaagtcccagatcttgcttaagaaatacctcatgaagaggcgctggaagaaaaacttcattgctgtcagcgctgccaaccgcttcaagaagatcagcagctcgggggcactgatggctctgggggtctgagccctgggcgcagctgaagcctggacgcagccacacagtggccggggctgaagccacacagcccagaaggccagaaaaggcagccagatccccagggcagcctcgttaggacaaggctgtgccaggctgggaggctcggggctccccacgcccccatgcagtgaccgcttccccgatgtgagccgcctcggagtgtggcctggatccatcctgctagcacctccccagacagggctccagcctgtcggccacaccccagactccaggcccccgttgaagccgctcccggttccctccccagctcctcgtctttgaactgccgccgccgtggtgacccctgctttgccccactgggagagtccttagcctgggcctcctcctagctggagtgccatggctggggggtctcagcatgtagggcttctgtggttgtggatgggaggctcctggtggggcagaaaggctgcaacgctgattcctaaggcccagctgccagggaagacagagcaggctttgtgagagaggacctccatgcccccgccacctccccactccagcagataaggccgagcccacaccatctggtccaggctggcccccacccaccttccttgcgaccaccaacacacaggaactctgtgtgagagagagggcgcccagcccaggcctggtggagggggaggggagaagccaagggacacaggagaccacccccgagcttgcctcagggccaagccggcccaacccaaccactcggggcccccatcttgggggtcacccatggcctcagatgatggggtcagcaggcccaggagaattaggaaggccatggggcagcctccagtctgctctcagcttgtgccttgtaaataaatgtacaggttggatgtggaaaaaaaaaaaaaaaaaaaaaaaaaaaaaaaaaaaaa

SEQ ID NO: 2518 - protein, 596 aa, Homo sapiens
  ref <308>: DATABASE ACCESSION NUMBER: Refseq / NP_149109
  ref <309>: DATABASE ENTRY DATE: 2001-12-18
MATENGAVELGIQNPSTDKAPKGPTGERPLAAGKDPGPPDPKKAPDPPTLKKDAKAPASEKGDGTLAQPSTSSQGPKGEGDRGGGPAEGSAGPPAALPQQTATPETSVKKPKAEQGASGSQDPGKPRVGKKAAEGQAAARRGSPAFLHSPSCPAIISSSEKLLAKKPPSEASELTFEGVPMTHSPTDPRPAKAEEGKNILAESQKEVGEKTPGQAGQAKMQGDTSRGIEFQAVPSEKSEVGQALCLTAREEDCFQILDDCPPPPAPFPHRMVELRTGNVSSEFSMNSKEALGGGKFGAVCTCMEKATGLKLAAKVIKKQTPKDKEMVLLEIEVMNQLNHRNLIQLYAAIETPHEIVLFMEYIEGGELFERIVDEDYHLTEVDTMVFVRQICDGILFMHKMRVLHLDLKPENILCVNTTGHLVKIIDFGLARRYNPNEKLKVNFGTPEFLSPEVVNYDQISDKTDMWSMGVITYMLLSGLSPFLGDDDTETLNNVLSGNWYFDEETFEAVSDEAKDFVSNLIVKDQRARMNAAQCLAHPWLNNLAEKAKRCNRRLKSQILLKKYLMKRRWKKNFIAVSAANRFKKISSSGALMALGV

SEQ ID NO: 2519 - DNA, 1232 bp, Rattus norvegicus
  ref <308>: DATABASE ACCESSION NUMBER: EMBL / J03969
  ref <309>: DATABASE ENTRY DATE: 2000-03-04
gttttccgtccggcttctctcacactcaagtgcgcgcctccacctcatggaagactcgatggacatggacatgagccctcttaggcctcagaactaccttttcggttgtgaactaaaggctgacaaagattatcactttaaagtggataatgatgaaaatgagcaccagttatcattaagaacggtcagtttaggagcaggggcaaaagatgagttgcacatcgtagaggcagaagcaatgaactatgaaggcagcccaattaaagtaacactggcaactttgaaaatgtctgtacaaccaacagtttcccttgggggcttcgaaattacaccacctgtggtcttgaggttgaagtgtggttctgggcctgtgcacataagtggacagcacctagtagctgtagaggaagatgcagagtcagaagatgaagatgaggaagatgtaaaactcttaggcatgtctggaaagagatctgctcccggaggtggtaacaaagtcccacagaaaaaagtaaaacttgatgaagatgatgatgaggatgatgaagatgatgaggatgatgaagatgatgatgatgatgattttgatgaagaggaaactgaagaaaaggttccagtgaagaaatctgtacgagataccccagccaaaaatgcacaaaaatcaaaccaaaatgggaaagatttaaaaccatcaacaccaaggtcaaagggtcaagagtccttcaaaaaacaggaaaaaactcccaaaacacccaaaggacctagctctgtagaagacattaaggcaaaaatgcaagcaagtatagaaaaaggtggttctcttcccaaagtggaagccaagttcattaattatgtgaagaattgtttccggatgactgaccaggaggctattcaagatctctggcagtggaggaagtctctttaagaaaatggtttaaacagtttgaaataattctgtcttcatttctgtaatagttgctatctggctgtcctttttataatgcaaagtgagaactttccctactgtgtttgataaatgttgtccaggttcaattgccaagaatgtgttgtctaaaatgcctgtttagttttcaaggatggaactccgccctttacttggttttaagtatgtatggaatgttatgataggacatagtagtagtggtggtcagatgtggaaatggtagggagacaaatatacatgtgaaataaactcagtattttaataaagt

SEQ ID NO: 2520 - protein, 292 aa, Rattus norvegicus
  ref <308>: DATABASE ACCESSION NUMBER: SWISS-Prot / P13084
  ref <309>: DATABASE ENTRY DATE: 2000-05-30
MEDSMDMDMSPLRPQNYLFGCELKADKDYHFKVDNDENEHQLSLRTVSLGAGAKDELHIVEAEAMNYEGSPIKVTLATLKMSVQPTVSLGGFEITPPVVLRLKCGSGPVHISGQHLVAVEEDAESEDEDEEDVKLLGMSGKRSAPGGGNKVPQKKVKLDEDDDEDDEDDEDDEDDDDDDFDEEETEEKVPVKKSVRDTPAKNAQKSNQNGKDLKPSTPRSKGQESFKKQEKTPKTPKGPSSVEDIKAKMQASIEKGGSLPKVEAKFINYVKNCFRMTDQEAIQDLWQWRKSL

SEQ ID NO: 2521 - DNA, 467 bp, Homo sapiens
  ref <308>: DATABASE ACCESSION NUMBER: EMBL / AL135691
  ref <309>: DATABASE ENTRY DATE: 2000-02-20
gaaaaaggtggttctcttcccaaagtggaagccaaattcatcaattatgtgaagaattgcttccggatgactgaccaagaggctattcaagatctctggcagtggaggaagtctctttaagaaaatagtttaaacaattttttaacaaattttcctgtgtttagcttgttgaaatgttttgcatctgtcaattaaggaaaaaaaaaatcactctatgttgccccactttagagccctgtgtgccaccctgtgttcctgtgattgcaatgtgagaccgaatgtaatatggaaaacctaccagtggggtgtggttgtgccctgagcacgtgtgtaaaggactggggaggcgtgtcttgaaaaagcaactgcagaaattccttatgatgattgtgtgcaagttagttaacatgaaccttcatttgtaaattttttaaaatttcttttataatatgctttccgcagtcctt

SEQ ID NO: 2522 - protein, 294 aa, Homo sapiens
  ref <308>: DATABASE ACCESSION NUMBER: Refseq / NP_002511
  ref <309>: DATABASE ENTRY DATE: 2002-04-08
MEDSMDMDMSPLRPQNYLFGCELKADKDYHFKVDNDENEHQLSLRTVSLGAGAKDELHIVEAEAMNYEGSPIKVTLATLKMSVQPTVSLGGFEITPPVVLRLKCGSGPVHISGQHLVAVEEDAESEDEEEEDVKLLSISGKRSAPGGGSKVPQKKVKLAADEDDDDDDEEDDDEDDDDDDFDDEEAEEKAPVKKSIRDTPAKNAQKSNQNGKDSKPSSTPRSKGQESFKKQEKTPKTPKGPSSVEDIKAKMQASIEKGGSLPKVEAKFINYVKNCFRMTDQEAIQDLWQWRKSL

SEQ ID NO: 2523 - DNA, 1211 bp, Rattus norvegicus
  ref <308>: DATABASE ACCESSION NUMBER: EMBL / J04035
  ref <309>: DATABASE ENTRY DATE: 2000-03-04
tcccctgctgcagctgctaaggctgccaaatatggtgctgctggccttggaggtgtcctaggagccaggccattcccaggcggaggagtggcagcaagacctgggtttggactttctcctatctacccaggtggtggtgctgggggcctgggagttggtggaaaacccccgaagccctatggaggagcccttggagccctgggatatcaaggtgggggctgctttgggaaatcttgtggccggaagagaaagtgatcttctggggacccctgactcgcgacctcatcaacgttggtgctactgcttggtggagaatgtaaaccttctatgaccaccccccctactccatccccccgacccccacctgggaggggacaacaggccagtggccttggaaaacccacaggacaaggaaatcagacagcagcagccacgtacccctaactagaaacccccccacatatcagaggccagggcgggtgtcccatctcttcccacccaggagctcccccacacagtatccatctccaagagaaattggtgctacatgttggtgcttcttctttgtggggggagggaggagggaagggtatcccaggagggactcccccttccctgaagcccctctattaagatggtgcacaccttcgctgggcagtcctgcctccccctgcccaccaggagccattcctggctgcatcccattggtacccaagtaccagaagcctcgacattagatttggtaacacgatccctctctctctttgggtcccctgtccctgactcccattaacaatagctacttcccacacctgggacaccttgaagtccgacgacttctcacactgggaatagctcccttgttcttgtggaatccacctgccaaccacccatccacggactcatccatccttccatccgtcatccatccatccgtccgtccgtccgtcctgactgcctagtgccactgtctggctaggcacacccactatcaacctggttcacctgtcatggcagcctgtacccacccccgccacacaccccgacgctggcctatggtgcaaagggttgtgcgggctggtccttcccacatgcagtactgtaatccccgtccctcctggagccactctattacagagcatgtctcaccaaccccacctctttgtgtttcgctgtgatagatcaataaaatattttattttttgtcctgg

SEQ ID NO: 2524 - protein, 864 aa, Rattus norvegicus
  ref <308>: DATABASE ACCESSION NUMBER: SWISS-Prot / Q99372
  ref <309>: DATABASE ENTRY DATE: 2001-10-16
AVPQPGVLLILLLNLLHPAQPGGVPGAVPGGVPGGLPGGVPGGVYYPGAGIGGGLGGGALGPGGKPPKPGAGLLGAFGAGPGGLGGAGPGAGLSYASRPGGVLVPGGGAGAAAAYKAAAKAGAGLGGIGGVPGGVGVGGVPGAVGVGGVPGAVGGIGGIGGLGVSTGAVVPQLGAGVGAGGKPGKVPGVGLPGVYPGGVLPGTGARFPGVGVLPGVPTGTGVKAKVPGGGGGAFSGIPGVGPFGGQQPGVPLGYPIKAPKLPGGYGLPYTNGKLPYGVAGAGGKAGYPTGTGVGSQAAVAAAKAAKYAGAGGGGVLPGVGGGGIPGGAGAIPGIGGITGAGTPAAAAAAKAAAKAAKYGAAGGLVPGGPGVRVPGAGIPGVGIPGVGGIPGVGGIPGVGGIPGVGGPGIGGPGIVGGPGAVSPAAAAKAAAKAAKYGARGGVGIPTYGVGAGGFPGYGVGAGAGLGGASQAAAAAAAAKAAKYGAGGAGTLGGLVPGAVPGALPGAVPGALPGAVPGALPGAVPGVPGTGGVPGAGTPAAAAAAAAAKAAAKAGQYGLGPGVGGVPGGVGVGGLPGGVGPGGVTGIGTGPGTGLVPGDLGGAGTPAAAKSAAKAAAKAQYRAAAGLGAGVPGLGVGAGVPGFGAGAGGFGAGAGVPGFGAGAVPGSLAASKAAKYGAAGGLGGPGGLGGPGGLGGPGGFGGPGGLGGVPGGVAGGAPAAAAAAKAAAKAAQYGLGGAGGLGAGGLGAGGLGAGGLGAGGLGAGGLGAGGVIPGAVGLGGVSPAAAAKAAKYGAAGLGGVLGARPFPGGGVAARPGFGLSPIYPGGGAGGLGVGGKPPKPYGGALGALGYQGGGCFGKSCGRKRK

SEQ ID NO: 2525 - DNA, 1448 bp, Homo sapiens
  misc_feature (1)..(1448): n=a, c, g or t
  ref <308>: DATABASE ACCESSION NUMBER: EMBL / M17282
  ref <309>: DATABASE ENTRY DATE: 2002-03-12
agccgaaactgagaggggccggactcacagtgatgtgcacctcctcccgtccaggtggggcctgcctggggaaagcttgtggccggaagagaaaatgagcttcctaggacccctgactcacgacctcatcaacgttggtgctactgcttggtggagaatgtaaaccctttgtatccccatcccatgcccctccgattccccaccccaggagggaacgggcaggccgggcggcttgcagatccacagggcaaggaaacaagaggggagcggccaagtgccccgaccaggaggccccctacttcagaggcaagggccatgtggtcctggccccccaaccccatcccttcccacctaggagctccccctccacacagcctccatctccaggggaacttggtgctacacgctggtgctcttatcttcctggggggagggaggagggaagggtggcccctcggggaaccccctacctggggctcctctaaagatggtgcagacacttcctgggcagtcccagctccccctgcccaccaggacccaccgttggctgccatccagttggtacccaagcacctgaagcctcaaagctggattcgctctagcatccctcctctcctgggtccacttggccgtctcctccccaccgatcgctgttccccacatctggggcgcttttgggttggaaaaccaccccacactgggaatagccaccttgccccttgtaagaatccatccgcccatccgtccattcatccatcggtccgtccatccatgtcccagttgaccgccggcaccattagctggctgggtgcacccaccatcaacctggttgacctgtcatggccgcctgtgccctncctnanccccatcctacantcccccagggcgtgcggggctgtgcagactggggtgccaggcatctcnnncccacccggggtntccccanatgcagtactgtatannccccatccctccctcggtccactgaacttcagagcagttcccattcctgccccgnccatctttttgtgtctcgctgtgatagatcaataaatattttattttttgtcctggatatttggggattatttttgattgttgatattctcttttggttttattgttgtggttcattgaaaaaaaaaagataatttttttttctgatccggggagctgtatccccagtagaaaaaaaattttaatcactctaatatacctctggatganncanacctttttttttattaagaaaagagatttaactgcttcagaaatgactaataaatgaaaaccctttaaaggaaactgtgtcttngcttccttggtatgatttaatctgccttcaactgttggcctggntggggnnangggctctgcttcagggaacctccaccacccaaattgtatttgagaggttgcccaaccaaaagcccctgctgcctggcttc

SEQ ID NO: 2526 - DNA, 1728 bp, Rattus norvegicus
  ref <308>: DATABASE ACCESSION NUMBER: EMBL / J04063
  ref <309>: DATABASE ENTRY DATE: 2000-03-04
tgactgtgcaccgccgcgtccgcccgcccgccagtatggccaccaccgccacctgcacccgcttcaccgacgactaccagcttttcgaggagctcggcaagggtgccttctcggtggtccggaggtgcgtgaagaaaacgtcgacgcaggagtatgcagcaaaaatcatcaataccaagaagttgtctgcccgagatcatcagaaactagaacgagaggcccggatatgccgacttctgaaacatccaaacatcgtgcgtctccatgacagtatttctgaagaagggtttcactacctcgtgtttgaccttgttacgggaggggagttgtttgaagacatcgtggccagagaatactacagcgaagctgatgccagccactgtatacatcagatcctggagagcgtcaaccacatccaccagcatgacatcgtccaccgggacctgaagcccgagaacttgctgctggcgagtaaatgcaagggtgctgcggtcaagctagctgattttggcctggccatcgaagtgcagggagagcagcaggcttggtttggttttgctggcaccccaggttacttgtcccctgaggtcttgaggaaagatccctatggaaaacctgtggatatctgggcctgcggggtcatcctgtatatcctcctggtgggctaccctcccttctgggatgaggatcagcacaagctctatcagcagatcaaagctggagcctacgatttcccatcaccagaatgggacacagtcactcctgaagctaagaacttgatcaaccagatgttgaccataaaccctgcaaagcgtatcacagctgaccaggctctcaagcacccatgggtctgtcaacggtcaacagtggcatccatgatgcatcgccaagagacagtggagtgcttacgcaagttcaacgcccggagaaaactgaagggtgccatcctcacaaccatgcttgtctccaggaacttttcagttggcaggcagagctccgcccccgcctcgcctgccgcgagcgccgccggcctggccgggcaagctgccaagagcctattgaacaagaagtcagatggcggcgtcaagaaaaggaagtcgagttccagcgtgcacctaatggagccacaaaccaccgtggtacataatgctacagatgggatcaagggctccacagagagctgcaacaccaccacagaagacgaagatctcaaagtgcgaaaacaggagatcattaagatcacagaacagctgatagaagccatcaacaatggggactttgaggcctacacgaagatttgtgacccaggcctcacttcctttgagccagaagcccttggtaacctcgtggaggggatggatttccataagttttactttgagaatctcctgtccaagaacagcaagcctatccacaccaccatcctaaacccacatgtccatgtcatcggcgaggacgcagcttgcatcgcctacatccggctcacccagtacatcgatgggcagggtcggcctcgcaccagtcagtcagaggagacccgggtgtggcaccgccgggatggcaagtggctcaatgtccactatcactgctcaggagcccctgctgcaccgctgcagtgagctcaggcacaggggcattaggagattccagctggaggctgaaccttcgaagtcagtgactctggagggcctgagtgacagccgcggtcctgtccatttgaggtttaaa

SEQ ID NO: 2527 - protein, 527 aa, Rattus norvegicus
  ref <308>: DATABASE ACCESSION NUMBER: SWISS-Prot / P11730
  ref <309>: DATABASE ENTRY DATE: 2002-06-15
MATTATCTRFTDDYQLFEELGKGAFSVVRRCVKKTSTQEYAAKIINTKKLSARDHQKLEREARICRLLKHPNIVRLHDSISEEGFHYLVFDLVTGGELFEDIVAREYYSEADASHCIHQILESVNHIHQHDIVHRDLKPENLLLASKCKGAAVKLADFGLAIEVQGEQQAWFGFAGTPGYLSPEVLRKDPYGKPVDIWACGVILYILLVGYPPFWDEDQHKLYQQIKAGAYDFPSPEWDTVTPEAKNLINQMLTINPAKRITADQALKHPWVCQRSTVASMMHRQETVECLRKFNARRKLKGAILTTMLVSRNFSVGRQSSAPASPAASAAGLAGQAAKSLLNKKSDGGVKKRKSSSSVHLMEPQTTVVHNATDGIKGSTESCNTTTEDEDLKVRKQEIIKITEQLIEAINNGDFEAYTKICDPGLTSFEPEALGNLVEGMDFHKFYFENLLSKNSKPIHTTILNPHVHVIGEDAACIAYIRLTQYIDGQGRPRTSQSEETRVWHRRDGKWLNVHYHCSGAPAAPLQ

SEQ ID NO: 2528 - DNA, 1653 bp, Homo sapiens
  ref <308>: DATABASE ACCESSION NUMBER: EMBL / BC021269
  ref <309>: DATABASE ENTRY DATE: 2002-05-29
ggcacgaggcgacttctgaaacatccaaacatcgtgcgcctccatgacagtatttctgaagaagggtttcactacctcgtgtttgaccttgttaccggcggggagctgtttgaagacattgtggccagagagtactacagtgaagcagatgccagccactgtatacatcagattctggagagtgttaaccacatccaccagcatgacatcgtccacagggacctgaagcctgagaacctgctgctggcgagtaaatgcaagggtgccgccgtcaagctggctgattttggcctagccatcgaagtacagggagagcagcaggcttggtttggttttgctggcaccccaggttacttgtcccctgaggtcttgaggaaagatccctatggaaaacctgtggatatctgggcctgcggggtcatcctgtatatcctcctggtgggctatcctcccttctgggatgaggatcagcacaagctgtatcagcagatcaaggctggagcctatgatttcccatcaccagaatgggacacggtaactcctgaagccaagaacttgatcaaccagatgctgaccataaacccagcaaagcgcatcacggctgaccaggctctcaagcacccgtgggtctgtcaacgatccacggtggcatccatgatgcatcgtcaggagactgtggagtgtttgcgcaagttcaatgcccggagaaaactgaagggtgccatcctcacgaccatgcttgtctccaggaacttctcagctgccaaaagcctattgaacaagaagtcggatggcggtgtcaagccacagagcaacaacaaaaacagtctcgtaagcccagcccaagagcccgcgcccttgcagacggccatggagccacaaaccactgtggtacacaacgctacagatgggatcaagggctccacagagagctgcaacaccaccacagaagatgaggacctcaaagtgcgaaaacaggagatcattaagattacagaacagctgattgaagccatcaacaatggggactttgaggcctacacgaagatttgtgatccaggcctcacttcctttgagcctgaggcccttggtaacctcgtggaggggatggatttccataagttttactttgagaatctcctgtccaagaacagcaagcctatccataccaccatcctaaacccacacgtccacgtgattggggaggacgcagcgtgcatcgcctacatccgcctcacccagtacatcgacgggcagggtcggcctcgcaccagccagtcagaagagacccgggtctggcaccgtcgggatggcaagtggctcaatgtccactatcactgctcaggggcccctgccgcaccgctgcagtgagctcagccacaggggctttaggagattccagccggaggtccaaccttcgcagccagtggctctggagggcctgagtgacagcggcagtcctgtttgtttgaggtttaaaacaattcaattacaaaagcggcagcagccaatgcacgcccctgcatgcagccctcccgcccgcccttcgtgtctgtctctgctgtaccgaggtgttttttacatttaagaaaaaaaaaaaagaaaaaaagattgtttaaaaaaaaaaaaaaaaaaaaaaaaaaaaaaaaaaaa

SEQ ID NO: 2529 - DNA, 2259 bp, Rattus norvegicus
  ref <308>: DATABASE ACCESSION NUMBER: EMBL / J04187
  ref <309>: DATABASE ENTRY DATE: 2000-03-04
ctggctactatgctggacacaggactgctcctggtggtcatactggcctccctaagtgtcatgttcttggtgtccctctggcagcagaaaatcagggagagattgcctccaggacccactcctttgcctttcattggaaattatctgcagctgaatatgaaagacgtatacagttccatcacacagctcagtgagcgctatggtcctgtgttcaccattcaccttgggcctcgacggattgttgtgctttatggatacgatgcagtcaaagaggctttggtggaccaagctgaggagttcagtggacgtggcgaactgcctacctttaatatactcttcaaaggctatggtttttcattgagcaatgtggaacaggccaagcgtatcaggcgcttcaccatagccacattgagagattttggtgtgggcaagcgtgatgtacaggagtgtatcctggaggaggcaggctatttgatcaagacgttgcagggcacttgtggagcccccattgacccttccatctacctgagcaaaacagtctccaatgtcattaactccattgtcttcgggaaccgcttcgactatgaggacaaagagttcttgtcactgttggagatgatcgatgaaatgaatatatttgcagcctcagccacagggcagctctatgacatgttccattcagtgatgaagtacctgcctggaccacagcaacagatcatcaaggttactcagaaactggaagacttcatgatagagaaagtgaggcagaaccatagtaccctggaccccaattccccaaggaacttcattgactcctttctcatccgcatgcaagaggagaaatatgttaattcagaattccacatgaacaacctagtgatgtcatcattaggcctcctctttgctgggactgggtcagtcagctccacgctataccatggtttcctgctactcatgaagcatccagatgtggaagccaaggtccatgaggaaattgagcgagtgatcggcaggaaccgacagcctcagtatgaggaccacatgaagatgccctacacccaggctgtgatcaatgagatccaaagattttctaacttggctcccttgggcattcctcgaaggattatcaagaacacaaccttccgtggcttcttcctccccaagggcaccgatgtattccctataataggttctctgatgacagaaccaaagttcttccctaaccacaaagacttcaacccccagcacttcctggatgacaagggacagttgaagaagaatgctgcatttctccctttttccattggaaagcgattctgcttgggagatagcctggctaaaatggagctcttcctgctgctcaccaccatcttgcagaacttccgttttaagttcccaatgaatctagaagacatcaacgagtaccccagtcccatagggtttaccaggatcataccaaattacaccatgagcttcatgcccatctgattctgagttgaatcaaggtggggcaagagggagggagagcctgaagtggggccagggtgcaggtggagagaacagagaagatgaagatgagggttaagaagggaccacacccatggaagaaacacaaaagacttctcagtttggtaaaattgtaacagtcctaataaaaagaaagaaacacccagtaggcagcagtaacaacaactgagactcatggggcaaaggtggctcacctctgcagaagctgtcctgcccttctctcactcagtcctctacacaagagcagcatgtccccaagcccaacgtacaggttcaaaagatagaacttaaaaaatttgaacctaaactgaggtggaaaagacacagttagctaggattgacacattggactctatcaccagcattcaggagggagggaacatggctccctaggaggcctgccagaattacaaagtgaaactcatctcaaaaaaggaacaacagaaaataaaatttcaaattgatttctcttagaccataagagtccagatctgtatccaaagctatttggttatattttttgttattgttgttttgtttacacattgtgtttttctttcggtttgtaagtctgtttgggatatttaatttacatttactgattagtgtgggtggtagggcataccatggctcaaatgtggaaaccaaagaaaagcttttggaagtgtcatctcccttacaatacgtgtgtccaagaactcaaattcagacaataaagcttgatagcaagca

SEQ ID NO: 2530 - protein, 492 aa, Rattus norvegicus
  ref <308>: DATABASE ACCESSION NUMBER: SWISS-Prot / P15149
  ref <309>: DATABASE ENTRY DATE: 2002-06-15
MLDTGLLLVVILASLSVMFLVSLWQQKIRERLPPGPTPLPFIGNYLQLNMKDVYSSITQLSERYGPVFTIHLGPRRIVVLYGYDAVKEALVDQAEEFSGRGELPTFNILFKGYGFSLSNVEQAKRIRRFTIATLRDFGVGKRDVQECILEEAGYLIKTLQGTCGAPIDPSIYLSKTVSNVINSIVFGNRFDYEDKEFLSLLEMIDEMNIFAASATGQLYDMFHSVMKYLPGPQQQIIKVTQKLEDFMIEKVRQNHSTLDPNSPRNFIDSFLIRMQEEKYVNSEFHMNNLVMSSLGLLFAGTGSVSSTLYHGFLLLMKHPDVEAKVHEEIERVIGRNRQPQYEDHMKMPYTQAVINEIQRFSNLAPLGIPRRIIKNTTFRGFFLPKGTDVFPIIGSLMTEPKFFPNHKDFNPQHFLDDKGQLKKNAAFLPFSIGKRFCLGDSLAKMELFLLLTTILQNFRFKFPMNLEDINEYPSPIGFTRIIPNYTMSFMPI

SEQ ID NO: 2531 - DNA, 8778 bp, Homo sapiens; identical to SEQ ID NO: 2401
  ref <308>: DATABASE ACCESSION NUMBER: EMBL / U22028
  ref <309>: DATABASE ENTRY DATE: 2000-03-04

SEQ ID NO: 2532 - protein, 494 aa, Homo sapiens; identical to SEQ ID NO: 2402
  ref <308>: DATABASE ACCESSION NUMBER: SWISS-Prot / Q16696
  ref <309>: DATABASE ENTRY DATE: 2002-06-15

SEQ ID NO: 2533 - DNA, 1482 bp, Rattus norvegicus
  ref <308>: DATABASE ACCESSION NUMBER: EMBL / J04486
  ref <309>: DATABASE ENTRY DATE: 2000-03-04
gatcacaggcttggacactccattctttccaactccccacctaaaagtggccttaactacttactagactgattggctggagacctagcccccaagggaggatttggccagggtgatgcctggcccacttagaggacacaagtgcttttgccccttagctgcattgtccaggaaatcaagacgacaaaaggcgtctcccgcgctcgccagggccgtgccacctgcccgctagctcgccgcgctacggtttcccactagccaacatgctgccgagattgggcggccccgcgctgccgctgctcctgccgtcgctgctcttgctgctgctgttgggcgcgggcggttgcggtcctggggtgcgcgccgaggtgctgttccgctgcccaccctgcacgcccgagcgtctggccgcctgcggacccccacccgacgcgccctgcgccgagctggtgcgagagcccggctgcggttgctgctccgtgtgcgcacgacaggagggcgaagcttgcggcgtctacatcccgcgctgcgcccagacgttacgctgttaccccaacccgggctccgagctgcccctgaaggcactggtcaccggcgcgggtacctgtgaaaagagacgcgtgggcgccaccccacagcaggttgcagacagtgaggatgaccactcggagggaggcctggtggagaaccatgtggacggaaccatgaacatgttaggaggcagcagtgctggccggaagccccctaagtcaggcatgaaggaactggctgtgttccgggagaaggtcaacgagcagcaccggcagatgggcaaaggtgccaaacacctcagcctggaggagcccaagaagctgcgcccacctcctgccaggaccccttgccagcaggagctggaccaggtcctggagcgcatctccaccatgcgccttccggatgatcggggtcctctggaacatctctactccctgcatatccccaactgtgacaagcatggcctgtacaacctcaaacagtgcaagatgtctctgaatggacagcgtggggagtgctggtgtgtgaaccccaataccgggaagccaatccagggagctcccaccatccggggagaccccgagtgccatctcttctacaacgagcagcaggagaatgatggggttcacgcccaaagggtgcagtaaaccacagccagtcggtgcctggcttccccaccccaaacaccagcagaaatggagggtgtcagggtgatgggtgtggaggatttcccagttttgacacatgtatttatatttggaaagagaccaacactgagctcagaagcccccctgcgccccccagtggcagttaacctgtacctctgttcctgcttctaatagagagggtggtggcactggggatactgggtacaggcttgggaatggggaaagaaatttttatttttgaacccctgtgtctcttttacttaagattaaaggaaggaaaaat

SEQ ID NO: 2534 - protein, 304 aa, Rattus norvegicus
  ref <308>: DATABASE ACCESSION NUMBER: SWISS-Prot / P12843
  ref <309>: DATABASE ENTRY DATE: 2002-06-15
MLPRLGGPALPLLLPSLLLLLLLGAGGCGPGVRAEVLFRCPPCTPERLAACGPPPDAPCAELVREPGCGCCSVCARQEGEACGVYIPRCAQTLRCYPNPGSELPLKALVTGAGTCEKRRVGATPQQVADSEDDHSEGGLVENHVDGTMNMLGGSSAGRKPPKSGMKELAVFREKVNEQHRQMGKGAKHLSLEEPKKLRPPPARTPCQQELDQVLERISTMRLPDDRGPLEHLYSLHIPNCDKHGLYNLKQCKMSLNGQRGECWCVNPNTGKPIQGAPTIRGDPECHLFYNEQQENDGVHAQRVQ

SEQ ID NO: 2535 - DNA, 1387 bp, Homo sapiens
  ref <308>: DATABASE ACCESSION NUMBER: EMBL / M35410
  ref <309>: DATABASE ENTRY DATE: 2000-03-04
gtgccacctgcccgcccgcccgctcgctcgctcgcccgccgcgccgcgctgccgaccgccagcatgctgccgagagtgggctgccccgcgctgccgctgccgccgccgccgctgctgccgctgctgccgctgctgctgctgctactgggcgcgagtggcggcggcggcggggcgcgcgcggaggtgctgttccgctgcccgccctgcacacccgagcgcctggccgcctgcgggcccccgccggttgcgccgcccgccgcggtggccgcagtggccggaggcgcccgcatgccatgcgcggagctcgtccgggagccgggctgcggctgctgctcggtgtgcgcccggctggagggcgaggcgtgcggcgtctacaccccgcgctgcggccaggggctgcgctgctatccccacccgggctccgagctgcccctgcaggcgctggtcatgggcgagggcacttgtgagaagcgccgggacgccgagtatggcgccagcccggagcaggttgcagacaatggcgatgaccactcagaaggaggcctggtggagaaccacgtggacagcaccatgaacatgttgggcgggggaggcagtgctggccggaagcccctcaagtcgggtatgaaggagctggccgtgttccgggagaaggtcactgagcagcaccggcagatgggcaagggtggcaagcatcaccttggcctggaggagcccaagaagctgcgaccaccccctgccaggactccctgccaacaggaactggaccaggtcctggagcggatctccaccatgcgccttccggatgagcggggccctctggagcacctctactccctgcacatccccaactgtgacaagcatggcctgtacaacctcaaacagtgcaagatgtctctgaacgggcagcgtggggagtgctggtgtgtgaaccccaacaccgggaagctgatccagggagcccccaccatccggggggaccccgagtgtcatctcttctacaatgagcagcaggaggctcgcggggtgcacacccagcggatgcagtagaccgcagccagccggtgcctggcgcccctgccccccgcccctctccaaacaccggcagaaaacggagagtgcttgggtggtgggtgctggaggattttccagttctgacacacgtatttatatatggaaagagaccagcaccgagctcggcacctccccggcctctctcttcccagctgcagatgccacacctgctccttcttgctttccccgggggaggaagggggttgtggtcggggagctggggtacaggtttggggagggggaagagaaatttttatttttgaacccctgtgtcccttttgcataagattaaaggaaggaaaagtaaagtgtg

SEQ ID NO: 2536 - protein, 328 aa, Homo sapiens
  ref <308>: DATABASE ACCESSION NUMBER: SWISS-Prot / P18065
  ref <309>: DATABASE ENTRY DATE: 2002-06-15
MLPRVGCPALPLPPPPLLPLLPLLLLLLGASGGGGGARAEVLFRCPPCTPERLAACGPPPVAPPAAVAAVAGGARMPCAELVREPGCGCCSVCARLEGEACGVYTPRCGQGLRCYPHPGSELPLQALVMGEGTCEKRRDAEYGASPEQVADNGDDHSEGGLVENHVDSTMNMLGGGGSAGRKPLKSGMKELAVFREKVTEQHRQMGKGGKHHLGLEEPKKLRPPPARTPCQQELDQVLERISTMRLPDERGPLEHLYSLHIPNCDKHGLYNLKQCKMSLNGQRGECWCVNPNTGKLIQGAPTIRGDPECHLFYNEQQEARGVHTQRMQ

SEQ ID NO: 2537 - DNA, 1482 bp, Rattus norvegicus; identical to SEQ ID NO: 2533
  ref <308>: DATABASE ACCESSION NUMBER: EMBL / J04486
  ref <309>: DATABASE ENTRY DATE: 2000-03-04

SEQ ID NO: 2538 - protein, 304 aa, Rattus norvegicus; identical to SEQ ID NO: 2534
  ref <308>: DATABASE ACCESSION NUMBER: SWISS-Prot / P12843
  ref <309>: DATABASE ENTRY DATE: 2002-06-15

SEQ ID NO: 2539 - DNA, 1387 bp, Homo sapiens; identical to SEQ ID NO: 2535
  ref <308>: DATABASE ACCESSION NUMBER: EMBL / M35410
  ref <309>: DATABASE ENTRY DATE: 2000-03-04

SEQ ID NO: 2540 - protein, 328 aa, Homo sapiens; identical to SEQ ID NO: 2536
  ref <308>: DATABASE ACCESSION NUMBER: SWISS-Prot / P18065
  ref <309>: DATABASE ENTRY DATE: 2002-06-15

SEQ ID NO: 2541 - DNA, 1602 bp, Rattus norvegicus
  ref <308>: DATABASE ACCESSION NUMBER: EMBL / J04503
  ref <309>: DATABASE ENTRY DATE: 2000-03-04
tgcccggccgccgtcgccaccgccgccccggccgaccgagggacccgcccgcccgcggctgctccggatctagaggatcaagtcataatgggagcatttttagacaagccaaagatggaaaagcataatgcccagggccaggggaacgggttgcgatacggcctaagcagcatgcaaggttggcgagttgaaatggaggatgcacatacggctgtgatcggtttgccaagtggacttgagacatggtcattctttgctgtatatgatgggcatgctggttctcaggttgccaaatactgctgtgagcacttgttagatcacatcaccaataaccaggattttaaaggctctgcaggagcaccctctgtggaaaacgtaaagaacggaatcagaacaggttttctggagattgatgaacacatgagagttatgtcagagaagaaacacggtgcagatagaagtgggtcaacagctgtgggtgtcttaatttctccccaacatacttatttcattaactgtggggactcaagaggtttactttgtagaaatagaaaagttcacttcttcactcaagaccataaaccaagtaatcctctggaaaaagaacgaattcagaatgcagggggctctgtgatgattcagcgtgtcaatggctctctggctgtatcaagagctcttggggattttgattacaaatgtgtccatggaaaaggtcccacagagcagcttgtctcgccagagcctgaagtccatgatattgaaaggtctgaagaagatgaccagttcatcattcttgcatgtgatggcatctgggacgtcatgggcaacgaagagctctgtgactttgtgagatccagacttgaagtcactgatgaccttgagaaagtttgcaatgaagtagtcgacacctgtttgtataagggaagtcgagacaacatgagtgtgattttgatctgctttccaaacgcgcctaaagtctcagcagaggcggtgaagaaggaggcagagctggacaagtacctggagaacagagtagaagaaatcataaagaagcagggggaaggcgtccctgacttagtccatgtgatgcgcacgttagccagtgagaacatccccagcctcccaccagggggtgaactggcaagcaagcggaatgtaattgaagccgtttacaatagactgaacccttacaaaaacgacgacactgattctgcgtcaactgatgatatgtggtaaagctgctcatctagccatggtttcacctttgcctggaagagagagagagatcagcgcatccttgctgagcctttaacatccatcaccgacttaaggaaggggtccgacatgggtgagggactacagcttcagcgatggaacagccagcccagaatggatttttttttttattgtaaatttgagacttatgtaagcgtgatttcaaaccgtaattcatgttgtaaatcagactccagcaatttttgttgtatgattttggttttttgtaaagtgtaattgtccttgtacaaagtgctcatatttaattatgaactgctttaaaatcactatcaatgataaaggaaatttggcttgttgtgtggcaca

SEQ ID NO: 2542 - protein, 382 aa, Rattus norvegicus
  ref <308>: DATABASE ACCESSION NUMBER: SWISS-Prot / P20650
  ref <309>: DATABASE ENTRY DATE: 1999-07-15
MGAFLDKPKMEKHNAQGQGNGLRYGLSSMQGWRVEMEDAHTAVIGLPSGLETWSFFAVYDGHAGSQVAKYCCEHLLDHITNNQDFKGSAGAPSVENVKNGIRTGFLEIDEHMRVMSEKKHGADRSGSTAVGVLISPQHTYFINCGDSRGLLCRNRKVHFFTQDHKPSNPLEKERIQNAGGSVMIQRVNGSLAVSRALGDFDYKCVHGKGPTEQLVSPEPEVHDIERSEEDDQFIILACDGIWDVMGNEELCDFVRSRLEVTDDLEKVCNEVVDTCLYKGSRDNMSVILICFPNAPKVSAEAVKKEAELDKYLENRVEEIIKKQGEGVPDLVHVMRTLASENIPSLPPGGELASKRNVIEAVYNRLNPYKNDDTDSASTDDMW

SEQ ID NO: 2543 - DNA, 2346 bp, Homo sapiens
  ref <308>: DATABASE ACCESSION NUMBER: EMBL / S87759
  ref <309>: DATABASE ENTRY DATE: 2000-03-04
cggaacgtggttggggaggggggggtgggggggactctagacagctgaggcgcgaaagcatgagtcctcggctcttcctcctccttctccgggacccgctctctgcctccctctccaacgcccggatgatctgagccgcgagggcgccgacagccgggggcccggacgcagcccggctcctcccctcctccgccccttccccagcctgacctggcccgccgctgcagcggtgacccctcccccggctgccgccgtcgccgccgcggtgaccccctccccggctgccgccgccgccgcctcggccgaccagggacctgcccgcctgcggctgctccggacctagaggatcaagacataatgggagcatttttagacaagccaaagatggaaaagcataatgcccaggggcagggtaatgggttgcgatatgggctaagcagcatgcaaggctggcgtgttgaaatggaggatgcacatacggctgtgatcggtttgccaagtggacttgaatcgtggtcattctttgctgtgtatgatgggcatgctggttctcaggttgccaaatactgctgtgagcatttgttagatcacatcaccaataaccaggattttaaagggtctgcaggagcaccttctgtggaaaatgtaaagaatggaatcagaacaggttttctggagattgatgaacacatgagagttatgtcagagaagaaacatggtgcagatagaagtgggtcaacagctgtaggtgtcttaatttctccccaacatacttatttcattaactgtggagactcaagaggtttactttgtaggaacaggaaagttcatttcttcacacaagatcacaaaccaagtaatccgctggagaaagaacgaattcagaatgcaggtggctctgtaatgattcagcgtgtgaatggctctctggctgtatcgagggcccttggggattttgattacaaatgtgtccatggaaaaggtcctactgagcagcttgtctcaccagagcctgaagtccatgatattgaaagatctgaagaagatgatcagttcattatccttgcatgtgatggtatctgggatgttatgggaaatgaagagctctgtgattttgtaagatccagacttgaagtcactgatgaccttgagaaagtttgcaatgaagtagtcgacacctgtttgtataagggaagtcgagacaacatgagtgtgattttgatctgttttccaaatgcacccaaagtatcgccagaagcagtgaagaaggaggcagagttggacaagtacctggaatgcagagtagaagaaatcataaagaagcagggggaaggcgtccccgacttagtccatgtgatgcgcacattagcgagtgagaacatccccagcctcccaccagggggtgaattggcaagcaagaggaatgttattgaagccgtttacaatagactgaatccttacaaaaatgacgacactgactctacatcaacagatgatatgtggtaaaactgctcatctagccatggagtttaccttcacctccaaaggagagtacagctcaactttgttgaaacttttaacatccatcctcaactttaaggaaggggatatgacatgggtgagaatgattacatcagagaacttcagcagtacaacagctagcccagaactgattttttttttttttttttttgtaaatttgagacttatgtaagcgtgatttcaaaccataattcgtgttgtaaatcagactccagcaatttttgttgtatgattttgtttttttgtaaagtgtaattgtccttgtacaaaatgctcatatttaattatgaactgctttaaatcactatcaaagttacaagaaatgtttggcttattgtgtgatgcaacagatatatagccctttcaagtcatgttgtgtttggacttggggttggaacagggagagcagcagccatgtcagctacacgctcaaatgtgcagatgattatggaaaataacctcaaaatcttacaaagctgaacatccaaggagttattgaaaactatcttaaatgttcttggtaggggagttggcattgttgataaagccagtcccttcatttaactgtctttcaggatgttccttcgttgtttccatgagtattgcaggtaataatacagtgtgttccataagaatctcaatcttggggctaaatgccttgtttctttgcacctcttttcaagtccttacatttaattactaattgataagcagcagcttcctacatatagtaggaaactgccacatttttgctatcatgattggctgggcctgctgctgttcctagtaagatattctgaattc

SEQ ID NO: 2544 - protein, 382 aa, Homo sapiens
  ref <308>: DATABASE ACCESSION NUMBER: SWISS-Prot / P35813
  ref <309>: DATABASE ENTRY DATE: 2002-06-15
MGAFLDKPKMEKHNAQGQGNGLRYGLSSMQGWRVEMEDAHTAVIGLPSGLESWSFFAVYDGHAGSQVAKYCCEHLLDHITNNQDFKGSAGAPSVENVKNGIRTGFLEIDEHMRVMSEKKHGADRSGSTAVGVLISPQHTYFINCGDSRGLLCRNRKVHFFTQDHKPSNPLEKERIQNAGGSVMIQRVNGSLAVSRALGDFDYKCVHGKGPTEQLVSPEPEVHDIERSEEDDQFIILACDGIWDVMGNEELCDFVRSRLEVTDDLEKVCNEVVDTCLYKGSRDNMSVILICFPNAPKVSPEAVKKEAELDKYLECRVEEIIKKQGEGVPDLVHVMRTLASENIPSLPPGGELASKRNVIEAVYNRLNPYKNDDTDSTSTDDMW

SEQ ID NO: 2545 - DNA, 1602 bp, Rattus norvegicus; identical to SEQ ID NO: 2541
  ref <308>: DATABASE ACCESSION NUMBER: EMBL / J04503
  ref <309>: DATABASE ENTRY DATE: 2000-03-04

SEQ ID NO: 2546 - protein, 382 aa, Rattus norvegicus; identical to SEQ ID NO: 2542
  ref <308>: DATABASE ACCESSION NUMBER: SWISS-Prot / P20650
  ref <309>: DATABASE ENTRY DATE: 1999-07-15

SEQ ID NO: 2547 - DNA, 2346 bp, Homo sapiens; identical to SEQ ID NO: 2543
  ref <308>: DATABASE ACCESSION NUMBER: EMBL / S87759
  ref <309>: DATABASE ENTRY DATE: 2000-03-04

SEQ ID NO: 2548 - protein, 382 aa, Homo sapiens; identical to SEQ ID NO: 2544
  ref <308>: DATABASE ACCESSION NUMBER: SWISS-Prot / P35813
  ref <309>: DATABASE ENTRY DATE: 2002-06-15

SEQ ID NO: 2549 - DNA, 2153 bp, Rattus norvegicus
  ref <308>: DATABASE ACCESSION NUMBER: EMBL / J04791
  ref <309>: DATABASE ENTRY DATE: 2000-03-04
cggccgggtgcgccttggggtttagtggcggcttctccatgggtccagccagccgcttccctgtgctgtgaggagacagcattcagagttgaccttgtgagagctggccataatttaattccatctctaggttttctgtaggcacatcgagaaccaaccatgggcagctttactaaggaagagtttgactgccatatcctcgatgaaggtttcactgctaaggacattctggaccaaaaaatcaatgaagtttcttcctctgatgataaggatgctttctatgttgcggacctcggagacgttctaaagaagcatctgaggtggctgaaagctcttccccgtgttactcccttctatgctgtcaagtgtaatgacagcagagccatagtgagcaccctggctgccattgggacaggatttgattgtgcaagcaagactgaaatacagttggtgcaggggcttggggtgcctccagagaggattatctatgcaaatccttgtaagcaagtgtctcagatcaagtatgctgccagtaatggagtccagatgatgacttttgacagtgaaattgagttgatgaaagttgccagagcacatccaaaggcaaagttggttttgcggattgccactgatgattccaaagcagtttgtcggctcagtgttaagtttggtgccacactgaaaaccagcaggcttctcttggaacgggcaaaagagctaaatattgatgtcattggtgtcagcttccatgtgggcagtgggtgtactgaccctgagaccttcgtgcaggcagtgtcagatgcccgctgtgtctttgacatgggaacagaagttggtttcagcatgtatctgcttgacattggtggtggctttcctgggtctgaagacacgaagcttaaatttgaggagatcaccagtgtaatcaacccagctctggacaagtacttcccatcggactctggagtgagaatcatagctgagccaggcagatactacgtcgcatcagctttcacacttgcagtgaatatcattgccaaaaaaaccgtgtggaaggagcagaccggctcggacgatgaagatgagtcaaacgagcaaactttgatgtattacgtgaatgatggagtgtatgggtcatttaactgcattctttatgaccatgcacatgtgaaggccctgctgcagaagagacccaagccagatgagaagtattactcatccagcatctggggaccaacatgtgatggccttgatcggatcgtcgagcgctgtagcctgcctgaaatgcatgtgggtgattggatgctgtttgagaacatgggtgcatacactgttgctgctgcttctactttcaatgggttccagaggccaaacatctactacgtaatgtcacggtcaatgtggcaactcatgaagcaaatccagagccatggcttcccgccagaagtggaggagcaggatgttggcactctgcccatgtcttgtgcccaggagagcgggatggaccgtcaccctgcagcctgtgcttctgctagtatcaatgtatagatgccattcttgtagctcttacctgcaagtttagcttgagttcacggcatttggggggaccatttaacttaattactgctagtttggaatgtctttgtaagagtagggttggcaccaatgcagtatggaaagactaggagatgggggtcacacttactgtgttcctatggaaactttgaatattttatatggatttttattcacttttcagacctgatactaatgagtgcccctcggctgctgagcaagcatttgtagcttgtacattggcagaatgggctaaaagcttatgttgtgacccattttgaaaataaagtatcttgaaatgattggacattggagaatgtgtgcaagtatcccttacagaaggcacaaacttctgcacaggctgtgtgttacagcagtgagtctagcccagcagagatgtggatgatacaaagctgtgccccctctgtacagcatcaatgtgcttagcccatctcaagtgtttactgtgaacttggtgcccaaagtctcttaagagtgtcatctgcctagtggcctcttgacttggccacttcctaaggagagggcatctgaggctctttgaaccttgcctgcagaaaccc

SEQ ID NO: 2550 - protein, 461 aa, Rattus norvegicus
  ref <308>: DATABASE ACCESSION NUMBER: Refseq / NP_036747
  ref <309>: DATABASE ENTRY DATE: 2002-11-14
MGSFTKEEFDCHILDEGFTAKDILDQKINEVSSSDDKDAFYVADLGDVLKKHLRWLKALPRVTPFYAVKCNDSRAIVSTLAAIGTGFDCASKTEIQLVQGLGVPPERIIYANPCKQVSQIKYAASNGVQMMTFDSEIELMKVARAHPKAKLVLRIATDDSKAVCRLSVKFGATLKTSRLLLERAKELNIDVIGVSFHVGSGCTDPETFVQAVSDARCVFDMGTEVGFSMYLLDIGGGFPGSEDTKLKFEEITSVINPALDKYFPSDSGVRIIAEPGRYYVASAFTLAVNIIAKKTVWKEQTGSDDEDESNEQTLMYYVNDGVYGSFNCILYDHAHVKALLQKRPKPDEKYYSSSIWGPTCDGLDRIVERCSLPEMHVGDWMLFENMGAYTVAAASTFNGFQRPNIYYVMSRSMWQLMKQIQSHGFPPEVEEQDVGTLPMSCAQESGMDRHPAACASASINV

SEQ ID NO: 2551 - DNA, 2062 bp, Homo sapiens
  ref <308>: DATABASE ACCESSION NUMBER: Refseq / NM_002539
  ref <309>: DATABASE ENTRY DATE: 2001-11-28
gtcagtccctcctgtagccgccgccgccgccgcccgccgcccctctgccagcagctccggcgccacctcgggccggcgtctccggcgggcgggagccaggcgctgacgggcgcggcgggggcggccgagcgctcctgcggctgcgactcaggctccggcgtctgcgcttccccatggggctggcctgcggcgcctgggcgctctgagattgtcactgctgttccaagggcacacgcagagggatttggaattcctggagagttgcctttgtgagaagctggaaatatttctttcaattccatctcttagttttccataggaacatcaagaaatcatgaacaactttggtaatgaagagtttgactgccacttcctcgatgaaggttttactgccaaggacattctggaccagaaaattaatgaagtttcttcttctgatgataaggatgccttctatgtggcagacctgggagacattctaaagaaacatctgaggtggttaaaagctctccctcgtgtcacccccttttatgcagtcaaatgtaatgatagcaaagccatcgtgaagacccttgctgctaccgggacaggatttgactgtgctagcaagactgaaatacagttggtgcagagtctgggggtgcctccagagaggattatctatgcaaatccttgtaaacaagtatctcaaattaagtatgctgctaataatggagtccagatgatgacttttgatagtgaagttgagttgatgaaagttgccagagcacatcccaaagcaaagttggttttgcggattgccactgatgattccaaagcagtctgtcgtctcagtgtgaaattcggtgccacgctcagaaccagcaggctccttttggaacgggcgaaagagctaaatatcgatgttgttggtgtcagcttccatgtaggaagcggctgtaccgatcctgagaccttcgtgcaggcaatctctgatgcccgctgtgtttttgacatgggggctgaggttggtttcagcatgtatctgcttgatattggcggtggctttcctggatctgaggatgtgaaacttaaatttgaagagatcaccggcgtaatcaacccagcgttggacaaatactttccgtcagactctggagtgagaatcatagctgagcccggcagatactatgttgcatcagctttcacgcttgcagttaatatcattgccaagaaaattgtattaaaggaacagacgggctctgatgacgaagatgagtcgagtgagcagacctttatgtattatgtgaatgatggcgtctatggatcatttaattgcatactctatgaccacgcacatgtaaagccccttctgcaaaagagacctaaaccagatgagaagtattattcatccagcatatggggaccaacatgtgatggcctcgatcggattgttgagcgctgtgacctgcctgaaatgcatgtgggtgattggatgctctttgaaaacatgggcgcttacactgttgctgctgcctctacgttcaatggcttccagaggccgacgatctactatgtgatgtcagggcctgcgtggcaactcatgcagcaattccagaaccccgacttcccacccgaagtagaggaacaggatgccagcaccctgcctgtgtcttgtgcctgggagagtgggatgaaacgccacagagcagcctgtgcttcggctagtattaatgtgtagatagcactctggtagctgttaactgcaagtttagcttgaattaagggatttggggggaccatgtaacttaattactgctagttttgaaatgtctttgtaagagtagggtcgccatgatgcagccatatggaagactaggatatgggtcacacttatctgtgttcctatggaaactatttgaatatttgttttatatggatttttattcactcttcagacacgctactcaagagtgcccctcagctgctgaacaagcatttgtagcttgtacaatggcagaatgggccaaaagcttagtgttgtgacctgtttttaaaataaagtatcttgaaataattaggc

SEQ ID NO: 2552 - protein, 461 aa, Homo sapiens
  ref <308>: DATABASE ACCESSION NUMBER: SWISS-Prot / P11926
  ref <309>: DATABASE ENTRY DATE: 2002-06-15
MNNFGNEEFDCHFLDEGFTAKDILDQKINEVSSSDDKDAFYVADLGDILKKHLRWLKALPRVTPFYAVKCNDSKAIVKTLAATGTGFDCASKTEIQLVQSLGVPPERIIYANPCKQVSQIKYAANNGVQMMTFDSEVELMKVARAHPKAKLVLRIATDDSKAVCRLSVKFGATLRTSRLLLERAKELNIDVVGVSFHVGSGCTDPETFVQAISDARCVFDMGAEVGFSMYLLDIGGGFPGSEDVKLKFEEITGVINPALDKYFPSDSGVRIIAEPGRYYVASAFTLAVNIIAKKIVLKEQTGSDDEDESSEQTFMYYVNDGVYGSFNCILYDHAHVKPLLQKRPKPDEKYYSSSIWGPTCDGLDRIVERCDLPEMHVGDWMLFENMGAYTVAAASTFNGFQRPTIYYVMSGPAWQLMQQFQNPDFPPEVEEQDASTLPVSCAWESGMKRHRAACASASINV

SEQ ID NO: 2553 - DNA, 7780 bp, Rattus norvegicus
  ref <308>: DATABASE ACCESSION NUMBER: EMBL / J04792
  ref <309>: DATABASE ENTRY DATE: 2000-03-04
ggatcccggcatccgggcttggaaaggggttttagttgagaattaacaaaccattaacagcgtgtacatagtaacaagttggagttactcctaagtcttcccaatactgaatatgtaagtaaccagtcagtcccacttattctttaacaatgtaactttggtgggggctggggatttagctcagtggtagagcgcttacctaggaagcgcaaggccctgggttcggtccccagctccaaaaaaaaaaaaaaccaaaaaaaaaaaaacaaaaaaacaatgtaactttggtggatacaaattcactgcccagactcttttccggtccagacttctcaaagtgacttagttgtagctaccctgaaagatttaacagaataagggacagctgttggcttgaaacccctcaacctcttccctaacatgcgactcttgcttagataaaaggcattatcttagcatgcaactggtgcctagaatctagttggaagctaccaacgtaaaacggagtggctctccagcctctgctggcttgtctctcagcaagttttcaggcataggcacacagggtggtgaagcagggtcaatctacaccacgaagtctagtctacgtggcccgcacacaactcaaggcccatccatcctcggctcgcacctgcgatcccgccagggaataaatactacgcgctgaatgcaaagccgaggaagagttttgctagtcttccaggccagggctcagccgttaggacccggggagagactgcgtgattgaaccggttgcaagacggacgaccaagcgcctgtgcgcatgcaccggccgaatcccgcctgctgcccataggaccctgcggcaagctggtagtcaggactggtggtgtggtgcgcgtgcgcgggcctgccgcagggagtgtccggcacgaggccgggcggggagcgcgggcggatgggcggggggctgggcacgcgcggcgccccgccccactgacgcgccgggcccgcgcctcccgcctccggcgtcgggaaccgggttggccgccaaggagtccccgcccctcccccgcgcctcccggccggaaccgatcggggctggtttgagctggtgcgtctccatgacgacgtgctccgcctataagtagcggcgcgtcgcaccgtcgggctttgtcagtccctgcagccgccgccgccggccgccttcagtcagcagctcggcgccacctccggtcggcgactgcggcgggctcgacgaggcggctgacggggcggcggcgggaagacggccgggtgcgccttggggtttagtggcggcttctccatgggtccagccagccgcttccctgtgctgtgaggtaagcggggcgcgggaggattgtgcggccacgtgtcgcgaggcccggactgcggtcgccggcaggggacacgtggccggaggctggtgaccttgcgagcctccgccctgaaggcagcagctgttcctggcccttgctgcaagccctcggatcgccccatgggagcccgcatcgtgtcagccgggctcggcgctccacttgcccgggcggtgatggagggcaggtgcaggggagcccggccgctagcagccgccctgcagtttcctgctttctttagttttgctacgtgtacagagcagagctgatgactcgaagtggaagtcgatagacctaatttagtcagggagtccctgctaatgaatactcaccggctgtgacttggatttagaactgaactctttgaatgacttaggggtttacgggaaaccggattcccggctgtcttggaagcccgactcagaatcctcaataactggtagaactggggagcagatcctgtcaggaatgtctgggagaggacaaaagaatgcagtggcttgttttattcaaacctaacatcgggcagaatttgactggagttcatttttgttttaattggcttgtatctcatccagatttaacttcttgtgctaattgtttaacaggatttagctgcttcccatgccaaagtgttagcattttttttcttttatcttttttttctttttctttttttttttttttttttttttgtattgaggcaaagatagggaaaggcaaaataagtggtatttcaatgaaagttttccaggtttaagccggaaggctgcctggaaaatacttaacaagacctaaaattacaaagttactgccaaagcccattcatcagttctaagtgatatacaactgagttggctggcgctggtctgtagtcttcacttaagagaggtttatgcagctaacgaagttgaccagtgccaaaagtctccttaaagcttaaagtgtgctttatcatgcatggatttggatttatgacaggctcatccccgtgggcctctcatagtgtcccgtgctagagcaaactggctcctaaccattgcccagccttggtgcatgtaggctgctggcactgaagtgggtcacacaatggaaaaaagttttacctggccacttgctgctggtgtccatttcataagacccaggcaggagcttttattaagcgtggtgatcttgcttatttttgttagtaaaaaagttggccaaaaatttcttccatatggttattatccataagtggatattagaaggcacttgaggactgttggattcccagaagtgcgcatttggtaggcaatccaggctctagaatactgatgtttcataacagtaacaatatactgtgaattgaatttttttaaatgctagtactgcataaaagttagggaagttttggtggattgcacactaacattgagtgctctggatacctgatatactgtattcactaagtcattcagcataactctgcaagtgggagaaaaagaccttttcaggactgcatgttactgtatgcccattaaagtttttgaagagctggaatggctcaaatgaagcagataggaacatgtaataatgccagtaattagactgttaactccgttccgttttggagaggggcagggattgagatgttctatgtgtatagagctgtggcattcagttttgaacagtgtggaatctatttgaggtattggagatatttggggggggggtcttcacgtagttctgacctcacagttgatcttcctgtactgtgtactctctggtatactgttgcagtgtgtaacctttaatggtaagatttcaagggagatagcaacatgttgtgtttctactcactagtgtttccaccactccaggagacagcattcagagttgaccttgtgagagctggccataatttaattccatctctaggttttctgtgtaagtatcagtttatacttgtgaatttgtgttgaagcagtgctaagactttgagtgcattcacttattatctgcttattgtcagcttattgtttcagaggcacatcgagaaccaaccatgggcagctttactaaggaagagtttgactgccatatcctcgatgaaggtttcactgctaaggacattctggaccaaaaaatcaatgaagtttcttcctgtgtaagtacgggaagcccacagccacaactcaaaagttccataaaagagcatgccttgccagagaatctagaatttgactgactgggctgtctagtgagtgtccatgtcagtactgctaacagggataggattttgttagggaagggggaaaaagatcttcagtgtggccaggtgcaagactgttaatgaggtccctgaacccactcactctcattccaggatgataaggatgctttctatgttgcggacctcggagacgttctaaagaagcatctgaggtggctgaaagctcttccccgtgttactcccttctatgctgtcaagtgtaatgacagcagagccatagtgagcaccctggctgccattgggacaggatttgattgtgcaagcaaggtaagactgcttatctcaccccaaaagggttatcagttgatgtgcttttgtttgtcaaactccgtctatatatactgatcttctctttcagactgaaatacagttggtgcaggggcttggggtgcctccagagaggattatctatgcaaatccttgtaagcaagtgtctcagatcaagtatgctgccagtaatggagtccagatgatgacttttgacagtgaaattgagttgatgaaagttgccagagcacatccaaaggcaaagtaagtcttctgattgagcacaaaaaggctgggcttgctaggcagactataatcttggttccttattcctatacatagtaagaaccaggctaaaccctgggttagaatcagacccacaagcagtagtgcctagacaggctgattggatgaacgtgtacagagtgcttacttggtgcatgcacttgtttctgtccacctaggttggttttgcggattgccactgatgattccaaagcagtttgtcggctcagtgttaagtttggtgccacactgaaaaccagcaggcttctcttggaacgggcaaaagagctaaatattgatgtcattggtgtcaggtgaggtctcagtgatagttacagactgagacattaaattttaaggcccttttttcctctgagaactagtcaaagaacagcatcttgtttttatttcagcttccatgtgggcagtgggtgtactgaccctgagaccttcgtgcaggcagtgtcagatgcccgctgtgtctttgacatgggagtaagtacatgactcctggaggagggctgtcttgattgaaataaccaaaccactgaatctagaatttgcctcttgtagaagctgtctgcataacagattttaaaaccatctgtcctgtgcatttaaacttgtgaatctagcaatttgacttccaaattttcttgattctagacagaagttggtttcagcatgtatctgcttgacattggtggtggctttcctgggtctgaagacacgaagcttaaatttgaggaggtaattattacaacattaacctacagacggtgagatatgtatttaccattgtggtgtttttactgattaaaggagccaacatgcctggtgttttgttctcactacttgttatttgcaactgtagcccaggctggccttgaactttcagttctcctgcctgtttcccatattttaatgtttagctcagtgcttatcactattgtactatgaagtagacagggtggaaggagttatatcttgttggcatgtattcagaattcagcatttggcccctcttgtaatccattttgtgctattttattaaatattaatataaactattcataatgtgttagaaagagatggtcctgaggggagtgggaagtggtgtatgtacagactagtttccagagaggtttgttgcttctgttgcctgatgacagacctgctatgctaggtcatgtcctgttcttacacacagcagtgtgatctttctcctcaactataacaaatggctgctcccttctctcacttagatcaccagtgtaatcaacccagctctggacaagtacttcccatcggactctggagtgagaatcatagctgagccaggcagatactacgtcgcatcagctttcacacttgcagtgaatatcattgccaaaaaaaccgtgtggaaggagcagaccggctcggacggtatgtggtggcaggatgagtgagtcatgtgggataacagttgatatgctgggtggtaattagggtgatctgtttttctagatgaagatgagtcaaacgagcaaactttgatgtattacgtgaatgatggagtgtatgggtcatttaactgcattctttatgaccatgcacatgtgaaggccctgctgcagaaggtgagttctgagcgcatgctctagcagtgagtgatgcataggatagagagaacattgggccgagagatggctcagcagttaagagcactgactgcttccagaggccctgagttcaatcccagcaacaacatggtggctcaccaccatctgtatgtaatgatgccctcttctggtgtgtctgaagaatagctacagtgtatttataatctttaaaaaaaaacaaacaaaaaacaaacattgtctttatacagagacccaagccagatgagaagtattactcatccagcatctggggaccaacatgtgatggccttgatcggatcgtcgagcgctgtagcctgcctgaaatgcatgtgggtgattggatgctgtttgagaacatgggtgcatacactgttgctgctgcttctactttcaatgggttccagaggccaaacatctactacgtaatgtcacggtcaatgtggtgagtggggctgtgcctgctcatgctcttttggttgctcagtgtaatgtttgcctactgtgagccagaagcctgggttatgcctgatgcacacacacacacatactatggggggaaggcagtatgtgctgaggggaaggatcacctgacctgtctcaaagggactgaatttgtgcttgctttttatgtttgataagttttttttttaccttgagctaaatacagaaatggagtttttccaagtaattactgctcatcttcagatatttactactaggagaggtcttacaagtaagccattagattcttttgcaactaaaatattcaagttagcatatgtgacctgtgggttccttaataatgaaattttacattggattgtttcctggtatagtgacagggtgaggtgtcaggagatctcttgggaggctgcccaatttggagggatttgggttttgaatatgccatatatgcctttgtttttcaggcaactcatgaagcaaatccagagccatggcttcccgccagaagtggaggagcaggatgttggcactctgcccatgtcttgtgcccaggagagcgggatggaccgtcaccctgcagcctgtgcttctgctagtatcaatgtatagatgccattcttgtagctcttacctgcaagtttagcttgagttcacggcatttggggggaccatttaacttaattactgctagtttggaatgtctttgtaagagtagggttggcaccaatgcagtatggaaagactaggagatgggggtcacacttactgtgttcctatggaaactttgaatattttatatggatttttattcacttttcagacctgatactaatgagtgcccctcggctgctgagcaagcatttgtagcttgtacattggcagaatgggctaaaagcttatgttgtgacccattttgaaaataaagtatcttgaaatgattggacattggagaatgtgtgcaagtatcccttacagaaggcacaaacttctgcacaggctgtgtgttacagcagtgagtctagcccagcagagatgtggatgatacaaagctgtgccccctctgtacagcatcaatgtgcttagcccatctcaagtgtttactgtgaacttggtgcccaaagtctcttaagagtgtcatctgcctagtggcctcttgacttggccacttcctaaggagagggcatctgaggctctttgaaccttgcctgcagaaaccctgactgctccctcaacccttggcctcagctgcatcaccacctagtaacagttgaagtatcgaacagcacttggcagtcaacttcctgtaataaattcaacaacagcaactactgtgttgtaaatttttaccttgacctttcatattatagtcctgctcagtttatacacctattgcatccccaaagaaatgccagactcttaacctagttagtattgaagacctgtaggtcaggaggaagggatcc

SEQ ID NO: 2554 - protein, 461 aa, Rattus norvegicus; identical to SEQ ID NO: 2550
  ref <308>: DATABASE ACCESSION NUMBER: SWISS-Prot / AAA66286
  ref <309>: DATABASE ENTRY DATE: 2002-06-15

SEQ ID NO: 2555 - DNA, 2062 bp, Homo sapiens; identical to SEQ ID NO: 2551
  ref <308>: DATABASE ACCESSION NUMBER: Refseq / NM_002539
  ref <309>: DATABASE ENTRY DATE: 2001-11-28

SEQ ID NO: 2556 - protein, 461 aa, Homo sapiens; identical to SEQ ID NO: 2552
  ref <308>: DATABASE ACCESSION NUMBER: SWISS-Prot / P11926
  ref <309>: DATABASE ENTRY DATE: 2002-06-15

SEQ ID NO: 2557 - DNA, 4487 bp, Rattus norvegicus
  ref <308>: DATABASE ACCESSION NUMBER: EMBL / J04793
  ref <309>: DATABASE ENTRY DATE: 2000-03-04
agcgggtggggagaagagaggagatacagcagggaaaggagggatgctagaatggtttcgaacactgtgacttggggctctctctcctcatctcagaggaggggtctggctgggggctcagatcaccacaataaattccaggttcaccagtaaaattcacgtggagagtggcagcagactcatgttaggcccagaataggcacggctgtggaactgggaagaggtcccagcccaggggatgtggaaggagtgggtctggcttcctgaggctccctgaaagtagtacggtagggcctgagcagagggccacatcccaggtgatactaattggctcttgggttttcagctcttcccacagagcaaacagccacagactacatccccaccagtacctccacatcgcacccaagctccagtcaggtctatgtagagctgcaggaactgatgatggaccagaggaaccaggaactacagtgggtggaggcggcacactggatagggctggaggaaaaccttcgagaggatggtgtgtggggtcgtccacatctctcttacctcaccttctggagccttctagaactgcagaaggtcttctcaaaaggcaccttccttctggatctggcagagacatccctggctggggtggccaataaacttctagacagtttcatctatgaggatcaaattcggcctcaagaccgagatgagctgctccgggctctgctactcaaacgcagccacgctgaggacctaaaggatctggagggagtgaagcctgccgtcctgacccgctctggggccccttctgaacctcttcttcctcaccagccatcgctggagaccaagctgtactgtgcacaggcagaggggggctcagaagaaccctcgccatctgggattctgaagatcccccccaattcagaaaccacattggtgctagtgggccgggctagtttcctggtgaagcctgtgctgggcttcgtgagactgaaggaagctgtgccgctggaggacctggtgttgccggagcctgtgagcttccttctagttcttctcggacctgaggctccgcacatcgactacacccagctgggcagggctgcagcaactctcatgacagaaagagtgttccgcgttaccgcctccctggcgcagagccgaggggagctgctgagctccctggatagctttctggactgtagcctggtgctgccgcccacagaggccccttcagagaaagctctgctcaacctggtgcccgtgcagaaggagttgcttaggaagcggtacttgcccagacctgccaagccagaccccaacttgtacgaggcattagacgggggaaaggagggccccggtgacgaagacgaccctctaaggcgcaccggccggatctttggaggcctgatccgtgatatccggcgccggtatccttactacctgagtgacatcaccgatgcgctcagtccccaggtgctggctgctgtcatcttcatctactttgctgccttgtcacctgcggtcaccttcggcggtctcctgggagaaaagacccggaacctgatgggggtgtcagagctgctcatctccacagcagtgcaaggaattctctttgctctcctgggggcacagcccctgcttgtgctcggcttctcaggacccctgctggtgtttgaagaagccttctactcgttctgtgaaagcaataacctggagtacatcgtgggccgcgcgtggatcggcttctggcttatcctgctggtggtgttggtggtggcctttgaaggcagcttcctggtccaatacatctcccgctacactcaggagatcttctccttcctcatctccctcatcttcatctatgagactttctctaagctgatcaagattttccaggactacccgctacaagagagctatgcccctgttgtgatgaagcccaaacctcagggccccgtgcccaacacagccctcctctcccttgtgcttatggttggtaccttcctacttgccatgatgctacgaaagttcaagaacagcacctacttccccggcaagctacgcagagtcattggggactttggggtccccatctccatcctgataatggtcctggtggataccttcatcaagaacacctacacgcagaaactctcggtgcctgatggccttaaagtgtccaactcctccgcccggggctgggtcatccatcccctgggtctgtataaccatttccccaagtggatgatgtttgcttctgttctacccgctctgcttgtcttcatccttatattccttgagtctcagatcaccacgctgattgtcagtaaacctgagcggaagatgatcaagggctccggcttccacctggacttgctgctggttgttggcatgggcggggtggccgccctctttgggatgccttggctcagcgccaccactgtgcgttctgttacccatgccaacgccctcacagtcatggggaaggccagtggtccaggggctgcagcccagatccaagaggtcaaggaacagcggatcagtgggctcctggtctctgtgctcgtgggactgtccattctcatggaacccatcctgtcccgcatccccctggctgtactgtttggcatcttcctgtacatggggatcacatccctcagtggcatccagctctttgaccgcatcttgctcctgttcaagccacccaagtaccacccagatgtgccctttgtcaagagggtgaagacctggcgtatgcacctcttcacgggcatccagatcatctgcctggctgtgctgtgggtggtgaagtccacgccagcctcgctggccctgccctttgtcctcatcctcaccgtgcccctgcgtcgtctcctcctgccgctcatcttcagagagctagaactccagtgtctggatggtgatgatgccaaagtgacctttgacgaggcggaagggctggatgagtatgacgaagtgcccatgcctgtgtgaggggcaggcccaggcccccaaccactccactttcccaccctcctgggaagaccattcatgggcatgtcatggctgtgggtggggaaggagaggttgtctaggaaactctctacataaggtatacgggattttctggctggagacgaccagaagttatatcagggaattggggtcacagtctcttgcgactgtacgggtcccatgtggcatagttataaatagcaaaggggagacacttttcaagttcctgctggctgtgtggccttaagtaagtcccttgacctctctggcctctgccccctactctatagaatgtatgcattggtaataatacccatgttaccggctgctgaggaccaagagcaaatgtctaagaactattacagtcttcattgttctcagagcctgcccagatcacacagccccctcccccccacccggggccacacagcagggacctgagcctcctgacctggaggctacagctctgtcctccgtcttcccagtcatgcccagaaatacccctaatgtcttccattttctgtcccacccccaccccaagtctcccttctctgcatctagagagatattctgatgagagtaagatacaggtgagggactgaggctcgtattcctaagtacttgctctctctcaccaggtgttcattcattcattcattcattcattcattcatacattccatagccatctactaaaggccctagacctagtggacacagaggggctggttcaagcttcttttgcggggtgaggccaatacataagtctgctctggacatggatggggatagcgggaggatgggagggttgtaatttattaactgtgtattttctgagtgcttcttccgtgccttggttttgcccacacactcagccctcatgagagacttgctgtgtccaaccccagctaaactgagtcttgggggagcgaaacccaagttttgacccattggagtaggagacagtagcttgttcaaaatatggataaacaactatttttatttttgacaaagcaatatattttttaaaaaaaaaaaaaagttgaaagaaccagaacttgagagaagaaacagaagatctgagtgatcaggcagcagggggcttccagtggaagatgctgggggggggggatttgagagcccatgtttgcctcccaggactgcctcaccacagactcttgttccctcatcatagaaatagggacaaggatgcacctaccttgtagggagttggaaggattgaccgacaccgtataagaaaagcatttgcagagcacacagccttccttgtggggagttgctgatgtgaccacgccgctgggcacacccctatcctctcctgcctttcctactccttgaacattaccaaagagagtggggatcctgctgcccactctccagcgcccttccccaccgccgtgcttgggaataggttttgccaataaatgtgtctgtgttaaaaaaaaaaaaaa

SEQ ID NO: 2558 - protein, 927 aa, Rattus norvegicus
  ref <308>: DATABASE ACCESSION NUMBER: SWISS-Prot / AAA40800
  ref <309>: DATABASE ENTRY DATE: 2002-06-15
MGDMQDHEKVLEIPDRDSEEELEHVIEQIAYRDLDIPVTEMQESEALPTEQTATDYIPTSTSTSHPSSSQVYVELQELMMDQRNQELQWVEAAHWIGLEENLREDGVWGRPHLSYLTFWSLLELQKVFSKGTFLLDLAETSLAGVANKLLDSFIYEDQIRPQDRDELLRALLLKRSHAEDLKDLEGVKPAVLTRSGAPSEPLLPHQPSLETKLYCAQAEGGSEEPSPSGILKIPPNSETTLVLVGRASFLVKPVLGFVRLKEAVPLEDLVLPEPVSFLLVLLGPEAPHIDYTQLGRAAATLMTERVFRVTASLAQSRGELLSSLDSFLDCSLVLPPTEAPSEKALLNLVPVQKELLRKRYLPRPAKPDPNLYEALDGGKEGPGDEDDPLRRTGRIFGGLIRDIRRRYPYYLSDITDALSPQVLAAVIFIYFAALSPAVTFGGLLGEKTRNLMGVSELLISTAVQGILFALLGAQPLLVLGFSGPLLVFEEAFYSFCESNNLEYIVGRAWIGFWLILLVVLVVAFEGSFLVQYISRYTQEIFSFLISLIFIYETFSKLIKIFQDYPLQESYAPVVMKPKPQGPVPNTALLSLVLMVGTFLLAMMLRKFKNSTYFPGKLRRVIGDFGVPISILIMVLVDTFIKNTYTQKLSVPDGLKVSNSSARGWVIHPLGLYNHFPKWMMFASVLPALLVFILIFLESQITTLIVSKPERKMIKGSGFHLDLLLVVGMGGVAALFGMPWLSATTVRSVTHANALTVMGKASGPGAAAQIQEVKEQRISGLLVSVLVGLSILMEPILSRIPLAVLFGIFLYMGITSLSGIQLFDRILLLFKPPKYHPDVPFVKRVKTWRMHLFTGIQIICLAVLWVVKSTPASLALPFVLILTVPLRRLLLPLIFRELELQCLDGDDAKVTFDEAEGLDEYDEVPMPV

SEQ ID NO: 2559 - DNA, 3637 bp, Homo sapiens
  ref <308>: DATABASE ACCESSION NUMBER: Refseq / NM_000342
  ref <309>: DATABASE ENTRY DATE: 2002-11-05
cagcggctgcaggacttcaccaagggaccctgaggctcgtgagcagggacccgcggtgcgggttatgctgggggctcagatcaccgtagacaactggacactcaggaccacgccatggaggagctgcaggatgattatgaagacatgatggaggagaatctggagcaggaggaatatgaagacccagacatccccgagtcccagatggaggagccggcagctcacgacaccgaggcaacagccacagactaccacaccacatcacacccgggtacccacaaggtctatgtggagctgcaggagctggtgatggacgaaaagaaccaggagctgagatggatggaggcggcgcgctgggtgcaactggaggagaacctgggggagaatggggcctggggccgcccgcacctctctcacctcaccttctggagcctcctagagctgcgtagagtcttcaccaagggtactgttctcctagacctgcaagagacctccctggctggagtggccaaccaactgctagacaggtttatctttgaagaccagatccggcctcaggaccgagaggagctgctccgggccctgctgcttaaacacagccacgctggagagctggaggccctggggggtgtgaagcctgcagtcctgacacgctctggggatccttcacagcctctgctcccccaacactcctcactggagacacagctcttctgtgagcagggagatgggggcacagaagggcactcaccatctggaattctggaaaagattcccccggattcagaggccacgttggtgctagtgggccgcgccgacttcctggagcagccggtgctgggcttcgtgaggctgcaggaggcagcggagctggaggcggtggagctgccggtgcctatacgcttcctctttgtgttgctgggacctgaggccccccacatcgattacacccagcttggccgggctgctgccaccctcatgtcagagagggtgttccgcatagatgcctacatggctcagagccgaggggagctgctgcactccctagagggcttcctggactgcagcctagtgctgcctcccaccgatgccccctccgagcaggcactgctcagtctggtgcctgtgcagagggagctacttcgaaggcgctatcagtccagccctgccaagccagactccagcttctacaagggcctagacttaaatgggggcccagatgaccctctgcagcagacaggccagctcttcgggggcctggtgcgtgatatccggcgccgctacccctattacctgagtgacatcacagatgcattcagcccccaggtcctggctgccgtcatcttcatctactttgctgcactgtcacccgccatcaccttcggcggcctcctgggagaaaagacccggaaccagatgggagtgtcggagctgctgatctccactgcagtgcagggcattctcttcgccctgctgggggctcagcccctgcttgtggtcggcttctcaggacccctgctggtgtttgaggaagccttcttctcgttctgcgagaccaacggtctagagtacatcgtgggccgcgtgtggatcggcttctggctcatcctgctggtggtgttggtggtggccttcgagggtagcttcctggtccgcttcatctcccgctatacccaggagatcttctccttcctcatttccctcatcttcatctatgagactttctccaagctgatcaagatcttccaggaccacccactacagaagacttataactacaacgtgttgatggtgcccaaacctcagggccccctgcccaacacagccctcctctcccttgtgctcatggccggtaccttcttctttgccatgatgctgcgcaagttcaagaacagctcctatttccctggcaagctgcgtcgggtcatcggggacttcggggtccccatctccatcctgatcatggtcctggtggatttcttcattcaggatacctacacccagaaactctcggtgcctgatggcttcaaggtgtccaactcctcagcccggggctgggtcatccacccactgggcttgcgttccgagtttcccatctggatgatgtttgcctccgccctgcctgctctgctggtcttcatcctcatattcctggagtctcagatcaccacgctgattgtcagcaaacctgagcgcaagatggtcaagggctccggcttccacctggacctgctgctggtagtaggcatgggtggggtggccgccctctttgggatgccctggctcagtgccaccaccgtgcgttccgtcacccatgccaacgccctcactgtcatgggcaaagccagcaccccaggggctgcagcccagatccaggaggtcaaagagcagcggatcagtggactcctggtcgctgtgcttgtgggcctgtccatcctcatggagcccatcctgtcccgcatccccctggctgtactgtttggcatcttcctctacatgggggtcacgtcgctcagcggcatccagctctttgaccgcatcttgcttctgttcaagccacccaagtatcacccagatgtgccctacgtcaagcgggtgaagacctggcgcatgcacttattcacgggcatccagatcatctgcctggcagtgctgtgggtggtgaagtccacgccggcctccctggccctgcccttcgtcctcatcctcactgtgccgctgcggcgcgtcctgctgccgctcatcttcaggaacgtggagcttcagtgtctggatgctgatgatgccaaggcaacctttgatgaggaggaaggtcgggatgaatacgacgaagtggccatgcctgtgtgaggggcgggcccaggccctagaccctcccccaccattccacatccccaccttccaaggaaaagcagaagttcatgggcacctcatggactcaggatcctcctggagcagcagctgaggccccagggctgtgggtggggaaggaaggcgtgtccaggagaccttccacaaagggtagcctggcttttctggctggggatggccgatggggcccacattagggggtttgttgcacagtccctcctgttgccacactttcactggggatcccgtgctggaagacttagatctgagccctccctcttcccagcacaggcaggggtagaagcaaaggcaggaggtgggtgagcgggtggggtgcttgctgtgtgaccttgggtaagtcccttgacctttccaggcctatatttcctcttctgtaaaatgggtatattgatgataatacccacattacaggatggttactgaggaccaaagatacatgtaaaatagggctttgtaaactccacagggactgttctatagcagtcatcatttgtctttgaacgtacccaaggtcacatagctgggatttgaactgagccgtgcagctgggatttgaaccaggccttctgatttcaaggtccgagctctgtcctctgtcagtcatgcgtccactttcccttcccctgtgactcctcccttccccactctgctcccagcccctaccttgagaccctcttctctgggcccagagagaggcgtcctgggtgaaggaaggtacaggcaggatgatccagggattgggctg

SEQ ID NO: 2560 - protein, 911 aa, Homo sapiens
  ref <308>: DATABASE ACCESSION NUMBER: SWISS-Prot / P02730
  ref <309>: DATABASE ENTRY DATE: 2002-06-15
MEELQDDYEDMMEENLEQEEYEDPDIPESQMEEPAAHDTEATATDYHTTSHPGTHKVYVELQELVMDEKNQELRWMEAARWVQLEENLGENGAWGRPHLSHLTFWSLLELRRVFTKGTVLLDLQETSLAGVANQLLDRFIFEDQIRPQDREELLRALLLKHSHAGELEALGGVKPAVLTRSGDPSQPLLPQHSSLETQLFCEQGDGGTEGHSPSGILEKIPPDSEATLVLVGRADFLEQPVLGFVRLQEAAELEAVELPVPIRFLFVLLGPEAPHIDYTQLGRAAATLMSERVFRIDAYMAQSRGELLHSLEGFLDCSLVLPPTDAPSEQALLSLVPVQRELLRRRYQSSPAKPDSSFYKGLDLNGGPDDPLQQTGQLFGGLVRDIRRRYPYYLSDITDAFSPQVLAAVIFIYFAALSPAITFGGLLGEKTRNQMGVSELLISTAVQGILFALLGAQPLLVVGFSGPLLVFEEAFFSFCETNGLEYIVGRVWIGFWLILLVVLVVAFEGSFLVRFISRYTQEIFSFLISLIFIYETFSKLIKIFQDHPLQKTYNYNVLMVPKPQGPLPNTALLSLVLMAGTFFFAMMLRKFKNSSYFPGKLRRVIGDFGVPISILIMVLVDFFIQDTYTQKLSVPDGFKVSNSSARGWVIHPLGLRSEFPIWMMFASALPALLVFILIFLESQITTLIVSKPERKMVKGSGFHLDLLLVVGMGGVAALFGMPWLSATTVRSVTHANALTVMGKASTPGAAAQIQEVKEQRISGLLVAVLVGLSILMEPILSRIPLAVLFGIFLYMGVTSLSGIQLFDRILLLFKPPKYHPDVPYVKRVKTWRMHLFTGIQIICLAVLWVVKSTPASLALPFVLILTVPLRRVLLPLIFRNVELQCLDADDAKATFDEEEGRDEYDEVAMPV

SEQ ID NO: 2561 - DNA, 431 bp, Rattus norvegicus
  ref <308>: DATABASE ACCESSION NUMBER: EMBL / J04807
  ref <309>: DATABASE ENTRY DATE: 2000-03-04
agcctaagtgaccagctacagtcggaaaccatcagcaagcaggtcattgtccctgtggatccgcttcctgcccctgctggccctgctcatcctctgggagccccgccctgcgcaggcttttgtcaaacagcacctttgtggttctcacttggtggaagctctctacctggtgtgtggggagcgtggattcttctacacacccatgtcccgccgcgaagtggaggacccacagtggcacaactggagctgggtggaggcccgggggcaggtgaccttcagaccttggcactggaggtggcccggcagaagcgcggcatcgtggatcagtgctgcaccagcatctgctctctctaccaactgcagaactactgcaactaggcccaccactaccctgtccacccctctgcaatgaataaaacctttgaaagagc

SEQ ID NO: 2562 - protein, 110 aa, Rattus norvegicus
  ref <308>: DATABASE ACCESSION NUMBER: Refseq / NP_062003
  ref <309>: DATABASE ENTRY DATE: 2002-11-14
MALWIRFLPLLALLILWEPRPAQAFVKQHLCGSHLVEALYLVCGERGFFYTPMSRREVEDPQVAQLELGGGPGAGDLQTLALEVARQKRGIVDQCCTSICSLYQLENYCN

SEQ ID NO: 2563 - DNA, 450 bp, Homo sapiens
  ref <308>: DATABASE ACCESSION NUMBER: Refseq / NM_000207
  ref <309>: DATABASE ENTRY DATE: 2000-10-31
gctgcatcagaagaggccatcaagcacatcactgtccttctgccatggccctgtggatgcgcctcctgcccctgctggcgctgctggccctctggggacctgacccagccgcagcctttgtgaaccaacacctgtgcggctcacacctggtggaagctctctacctagtgtgcggggaacgaggcttcttctacacacccaagacccgccgggaggcagaggacctgcaggtggggcaggtggagctgggcgggggccctggtgcaggcagcctgcagcccttggccctggaggggtccctgcagaagcgtggcattgtggaacaatgctgtaccagcatctgctccctctaccagctggagaactactgcaactagacgcagcccgcaggcagccccccacccgccgcctcctgcaccgagagagatggaataaagcccttgaaccagc

SEQ ID NO: 2564 - protein, 110 aa, Homo sapiens
  ref <308>: DATABASE ACCESSION NUMBER: SWISS-Prot / P01308
  ref <309>: DATABASE ENTRY DATE: 2002-06-15
MALWMRLLPLLALLALWGPDPAAAFVNQHLCGSHLVEALYLVCGERGFFYTPKTRREAEDLQVGQVELGGGPGAGSLQPLALEGSLQKRGIVEQCCTSICSLYQLENYCN

SEQ ID NO: 2565 - DNA, 1164 bp, Rattus norvegicus
  ref <308>: DATABASE ACCESSION NUMBER: EMBL / J04943
  ref <309>: DATABASE ENTRY DATE: 2000-03-04
gtgtctgttctgcggaacagtaggcagttgttttccgtccggcttctctcacactcaagtgcgcgcctccacctcatggaagactcgatggacatggacatgagccctcttaggcctcagaactaccttttcggttgtgaactaaaggctgacaaagattatcactttaaagtggataatgatgaaaatgagcaccagttatcattaagaacggtcagtttaggagcaggggcaaaagatgagttgcacatcgtagaggcagaagcaatgaactatgaaggcagcccaattaaagtaacactggcaactttgaaaatgtctgtacaaccaacagtttcccttgggggcttcgaaattacaccacctgtggtcttgaggttgaagtgtggttctgggcctgtgcacataagtggacagcacctagtagctgtagaggaagatgcagagtcagaagatgaagatgaggaagatgtaaaactcttaggcatgtctggaaagagatctgctcccggaggtggtaacaaagtcccacagaaaaaagtaaaacttgatgaagatgatgatgaggatgatgaagatgatgaggatgatgaagatgatgatgatgatgattttgatgaagaggaaactgaagaaaaggttccagtgaagaaatctgtacgagataccccagccaaaaatgcacaaaaatcaaaccaaaatgggaaagatttaaaaccatcaacaccaaggtcaaagggtcaagagtccttcaaaaaacaggaaaaaactcccaaaacacccaaaggacctagctctgtagaagacattaaggcaaaaatgcaagcaagtatagaaaaagcgcattgaacattcctgggcactactggtaaattaagcccaaagatggggaaagaggaaaaggagaaacaaatatagtaccatcaacaatccagactgaagtcttctattttaatctcaatcccctttcctgattggccatccattcccccttgcaggctggaagcaatcgaaaacctaaagcatttttctttttcactcgggtgatgcagaaaacttgactgcttttctataccacttgtgcatatgccttaactctgaccatgttttaattttaacctttgtatccttagctgctcgaaataaatttttgaatgaaccaat

SEQ ID NO: 2566 - protein, 292 aa, Rattus norvegicus; identical to SEQ ID NO: 2520
  ref <308>: DATABASE ACCESSION NUMBER: SWISS-Prot / P13084
  ref <309>: DATABASE ENTRY DATE: 2000-05-30

SEQ ID NO: 2567 - DNA, 467 bp, Homo sapiens; identical to SEQ ID NO: 2521
  ref <308>: DATABASE ACCESSION NUMBER: EMBL / AL135691
  ref <309>: DATABASE ENTRY DATE: 2000-02-20

SEQ ID NO: 2568 - protein, 294 aa, Homo sapiens; identical to SEQ ID NO: 2522
  ref <308>: DATABASE ACCESSION NUMBER: SWISS-Prot / AAH12566
  ref <309>: DATABASE ENTRY DATE: 2002-06-15

SEQ ID NO: 2569 - DNA, 4507 bp, Rattus norvegicus
  ref <308>: DATABASE ACCESSION NUMBER: EMBL / J05022
  ref <309>: DATABASE ENTRY DATE: 2000-03-04
cctgtagcaggtgctcattcccgggagcagcgcggactgcagccgcctctgcggggaaagatgctgcgggagcggaccgtacggctgcaatacgggagccgcgtggaggcggtgtacgtgctgggcacgcagctctggaccgatgtctacagtgcagcgcctgctggggccaaaaccttcagcctgaagcactcggagggtgtgaaagtagaggtcgtgcgcgatggagaggcagaggaggtagtcaccaacggcaagcagcgttgggccctgtcacccagcaccacactgcgactcagcatggcccaggccagcaccgaggccagcagcgacaaggtcaccgtcaactactatgaagaggatggcagtgcccctattgaccaggctgggctcttcctcactgccattgagatctcactggatgtggacgcagaccgggacggagaagtggagaagaataatcctaagaaggcatcctggacctggggtcctgagggccagggggccatcctgctggtgaactgtgaccgagacacaccctggttgcccaaggaggactgcagtgatgaaaaggtctacagcaaacaagaccttcaggacatgtctcagatgatcctgaggaccaaaggccctgaccgcctgcccgccgggtatgaaatagtcctctacatttctatgtcggactcggacaaagtgggcgtgttctacgtggagaacccgttctttggccagcgctacatccacatcctgggccggcagaagctctaccacgtggtgaagtacaccggtggctctgcagagttgctgttcttcgtggaaggcctccgtttcccagacgagagtttctcaggcctggtttccatccacgtcagtctgctggagtatatggccgaggacatcccattgacacccatcttcacagacaccgtgacgttccggattgccccatggattatgacacccaacatcctgcctcccgtgtcagtgtttgtgtgctgcatgaaggacaattacctgttcctgaaagaggtgaagaacctggtggagaaaaccaactgcgagctgaaagtttgtttccagtacatgaatcgtggcgaccgctggatccaggatgaaattgagtttggctacattgaggcacctcacaaaggcttcccagtagtgctggactcccctcgagatggaaacctgaaggacttccccattaagcaactcctgggcccagatttcggctatgtgacccgggagcccctctttgagactgtcaccagccttgactccttcgggaatctggaggtcagtcccccagtgaccgtgaatggcaaggcatacccgcttggccggatcctcatcgggagcagtttccctctgtctggaggcaggaggatgaccaaggtggtgcgtgacttcctgcaggcccagcaggtgcaggcgcccgtggaactctactcggattggctgactgtgggccacgtcgatgagttcatgaccttcgtccccatcccaggcaaaaaggaatttcggctgctcatggccagcacctcagcctgctaccagctcttcagagaaaagcagaaggaaggccacggggaggccattatgttcaagggtctggggggcatgagcagcaaacgaatcaccatcaataagatcctgtccaatgagagcctcacgcaggaaaaccagtactttcagcgctgtctggattggaaccgtgacatccttaagaaggagctggctctgactgagaaggacatcattgacctgcctgctctcttcaagatggatgaagaccgtcaggccagggctttcttccctaacatggtgaacatgatcgtgctagacaaggacctgggtatccccaagcctttcgggccccaggtcgaggaggagtgctgcctggagacacatgttcgaggcctgctggagcccctgggccttgcctgcaccttcattgatgacatctctgcataccacaagtttctgggagaggttcactgtggcaccaacgtgcgcaggaagcccttcaccttcaagtggtggcacatggtgccctgactgccaggggccctggccttccttccttccctgcgatctccaggtccttcctgtgtccccaagtccttcccctacaagaagcgggtgggattgggattgtgccttgctgtcccctggagaaggactttagtgtccattgaagccaccccgagtaagtccaaccgttccctacccctgaaaatagctagacatgtggttagtgtgcagaactttggaagggaaaaccagacttcaacaaatcatgtagtcgcactgtcccccaaagaattctcagcctctactccagatcagaaggaggggagagagaagggagactctgaggtcattggctcgcccagcacccatctgacattcaagatagaccaggaggaccagggccagggtcctggcgtacctcggatggtaccatcttttcaagcttacctaccttggggcctcctggtcggatccttcgcccattcattccttaaggcttcccatacacactgtgtccccaccccacccccaccccctgagggtccaatcattcagcttagaatcatccggaaatgggtcttagcagaggagaggtcttcactttctgtggattcgggctgcccaattttgggaggacggggaggtctcggactagcatccgatgtccaaagttcagtagacaaagatgcacctgtgtatcgacactatttctgttctctcccccggtcctcagttctctggccagtccgtgagcctctctttccattgttcttctgtttctgacactggccttcctattctggatgttgcccctccagcagctacagtttcttcaccaccagccagattcaggcctcccgagggcctgagaagtagccaatcccactgtccaaggatgctgaggatgctggcaatgccccagcctcactgatcacttcccggctagctactgctccagaggcagaattttccagcacactttccgaaggccttccatccagatacaggcaaatggatcccccctcccccaacctgcttcatttagaaaggcctccaggagctgtagagatggctcggcagttaaaaatgctccctgctcttcaaggggacccaagttcagttcccaacacccacggtgctctgtaactccagatccagaggatccaatacccttttctggtctctgagggcacttcacgcatgtgcacaaacccatagacataaatcaatgtttgagagtctggagagatggcccagtggttaaaagcacttgctgctcttgcggaggacctgggttcagttctcagcacccagttggtggctcacaaccaactataactctagtcccagggggtccgatgctctcctctgacctccataggcttctgcacacaggtggttcacatacacaccctcaagcacacatacaagtaaagtaaagtaaacgatgcttaaaaaatagaaacaaggaaaatatgtctcttaaaatagagaaggtccttttaaggccaagaaggtaggaaatggtaattctgctttggagggttaaacggtcccattttatagctgaagaaaagggttacacccacattcttaggggaacaagatttttaccttgcattatttcctcagtaggttgtatgctactgagtagtgggcacagacttggacgctgataacacaagctagccatagactcgcttgtcccaacagacaaaacccacgtctgcatagccaccctccgcccttgctgtggtaacactacccagtatattcaagaagcattcaggacaacagtcactgccttcaacaattaggaggtgtcctcttttctgtccagctggcctaatgcaccatgccaggtcaggccccagagcctccaaagctgtcatcctctgtctctggggacagaggttcctgcccttgagggcaaagccccaaatcctgtctcctgctccagagtggaaaacacaggcacctctctgagggaggtggtctggggatgtggcggtttgtcgtgtgtggtgttccgttaaagtggcttttactgcttttatttttatctgcgttaagaggaagtgagccctccccacgtggaggccacgacgtgtcttttgtaggttgtgttggtgtttggggaatttctggaactccaggactccgcctgtcccatctcacttactcacccagtgtgaccccctcaagtgtggacgccccatcccgaggactccttgctcttctccacctccattgtttgttggtgttttttttttttaaacttatgcccagaggcttctgggctatgccagttcctgtttcaatgttaattttgaaatgctctgctgagggtgggggtaacggcaggaagatggcgggaatggggcagtatgaacttcctggaaaaaaagccaagatggagtctgaggagtgtctgggggaagagccaaaataaagagcaataaaataagccgtc

SEQ ID NO: 2570 - protein, 665 aa, Rattus norvegicus
  ref <308>: DATABASE ACCESSION NUMBER: SWISS-Prot / P20717
  ref <309>: DATABASE ENTRY DATE: 2002-06-15
MLRERTVRLQYGSRVEAVYVLGTQLWTDVYSAAPAGAKTFSLKHSEGVKVEVVRDGEAEEVVTNGKQRWALSPSTTLRLSMAQASTEASSDKVTVNYYEEDGSAPIDQAGLFLTAIEISLDVDADRDGEVEKNNPKKASWTWGPEGQGAILLVNCDRDTPWLPKEDCSDEKVYSKQDLQDMSQMILRTKGPDRLPAGYEIVLYISMSDSDKVGVFYVENPFFGQRYIHILGRQKLYHVVKYTGGSAELLFFVEGLRFPDESFSGLVSIHVSLLEYMAEDIPLTPIFTDTVTFRIAPWIMTPNILPPVSVFVCCMKDNYLFLKEVKNLVEKTNCELKVCFQYMNRGDRWIQDEIEFGYIEAPHKGFPVVLDSPRDGNLKDFPIKQLLGPDFGYVTREPLFETVTSLDSFGNLEVSPPVTVNGKAYPLGRILIGSSFPLSGGRRMTKVVRDFLQAQQVQAPVELYSDWLTVGHVDEFMTFVPIPGKKEFRLLMASTSACYQLFREKQKEGHGEAIMFKGLGGMSSKRITINKILSNESLTQENQYFQRCLDWNRDILKKELALTEKDIIDLPALFKMDEDRQARAFFPNMVNMIVLDKDLGIPKPFGPQVEEECCLETHVRGLLEPLGLACTFIDDISAYHKFLGEVHCGTNVRRKPFTFKWWHMVP

SEQ ID NO: 2571 - DNA, 1626 bp, Homo sapiens
  ref <308>: DATABASE ACCESSION NUMBER: EMBL / BC009701
  ref <309>: DATABASE ENTRY DATE: 2001-10-25
cgcacctgctgcaggtgctcccggccgccccggaccagcgagcgcgggcactgcggcggggaggatgctgcgcgagcggaccgtgcggctgcagtacgggagccgcgtggaggcggtgtacgtgctgggcacctacctctggaccgatgtctacagcgcggccccagccggggcccaaaccttcagcctgaagcactcggaacacgtgtgggtggaggtggtgcgtgatggggaggctgaggaggtggccaccaatggcaagcagcgctggcttctctcgcccagcaccaccctgcgggtcaccatgagccaggcgagcaccgaggccagcagtgacaaggtcaccgtcaactactatgacgaggaagggagcattcccatcgaccaggcggggctcttcctcacagccattgagatctccctggatgtggacgcagaccgggatggtgtggtggagaagaacaacccaaagaaggcatcctggacctggggccccgagggccagggggccatcctgctggtgaactgtgaccgagagacaccctggttgcccaaggaggactgccgtgatgagaaggtctacagcaaggaagatctcaaggacatgtcccagatgatcctgcggaccaaaggccccgaccgcctccccgccggatacgagatagttctgtacatttccatgtcagactcagacaaagtgggcgtgttctacgtggagaacccgttcttcggccaacgctatatccacatcctgggccggcggaagctctaccatgtggtcaagtacacgggtggctccgcggagctgctgttcttcgtggaaggcctctgtttccccgacgagggcttctcaggcctggtctccatccatgtcagcctgctggagtacatggcccaggacattcccctgactcccatcttcacggacaccgtgatattccggattgctccgtggatcatgacccccaacatcctgcctcccgtgtcggtgtttgtgtgctgcatgaaggataattacctgttcctgaaagaggtgaagaaccttgtggagaaaaccaactgtgagctgaaggtctgcttccagtacctaaaccgaggcgatcgctggatccaggatgaaattgagtttggctacatcgaggccccccataaaggcttccccgtggtgctggactctccccgagatggaaacctaaaggacttccctgtgaaggagctcctgggcccagattttggctacgtgacccgggagcccctctttgagtctgtcaccagccttgactcatttggaaacctggaggtcagtcccccagtgaccgtgaatggcaagacatacccgcttggccgcatcctcatcgggagcagctttcctctgtaagagaagccaggctggggctaggggctgtgggagtggggaagtcactgtttctcttttggggtggcctgggttgctcacacatggagcaagtggctgggggaattattccctcccacgacttcctgttaagaggccgacactcttggaaagaaaatcaagctagcctttatatctttgtgtgatttaggatctaatatataactaaataaacaactcttttccccaagtgaaaaaaaaaaaaaaaaaaa

SEQ ID NO: 2572 - protein, 665 aa, Homo sapiens
  ref <308>: DATABASE ACCESSION NUMBER: SWISS-Prot / Q9Y2J8
  ref <309>: DATABASE ENTRY DATE: 2002-06-15
MLRERTVRLQYGSRVEAVYVLGTYLWTDVYSAAPAGAQTFSLKHSEHVWVEVVRDGEAEEVATNGKQRWLLSPSTTLRVTMSQASTEASSDKVTVNYYDEEGSIPIDQAGLFLTAIEISLDVDADRDGVVEKNNPKKASWTWGPEGQGAILLVNCDRETPWLPKEDCRDEKVYSKEDLKDMSQMILRTKGPDRLPAGYEIVLYISMSDSDKVGVFYVENPFFGQRYIHILGRRKLYHVVKYTGGSAELLFFVEGLCFPDEGFSGLVSIHVSLLEYMAQDIPLTPIFTDTVIFRIAPWIMTPNILPPVSVFVCCMKDNYLFLKEVKNLVEKTNCELKVCFQYLNRGDRWIQDEIEFGYIEAPHKGFPVVLDSPRDGNLKDFPVKELLGPDFGYVTREPLFESVTSLDSFGNLEVSPPVTVNGKTYPLGRILIGSSFPLSGGRRMTKVVRDFLKAQQVQAPVELYSDWLTVGHVDEFMSFVPIPGTKKFLLLMASTSACYKLFREKQKDGHGEAIMFKGLGGMSSKRITINKILSNESLVQENLYFQRCLDWNRDILKKELGLTEQDIIDLPALFKMDEDHRARAFFPNMVNMIVLDKDLGIPKPFGPQVEEECCLEMHVRGLLEPLGLECTFIDDISAYHKFLGEVHCGTNVRRKPFTFKWWHMVP

SEQ ID NO: 2573 - DNA, 1440 bp, Rattus norvegicus
  ref <308>: DATABASE ACCESSION NUMBER: EMBL / J05029
  ref <309>: DATABASE ENTRY DATE: 2002-09-02
cggccgtccgtcccgccatggctgcgcgcctgctcctccgctcccttcgtgtcctgagcgcccgctcggcgacactcccgccgccctccgcccgatgttctcattctggagcagaagcacgtctagaaactccttctgctaaaaaattaactgatattggaatcagaagaatcttttcctcagagcatgacattttccgggagagtgtaaggaagttttttcaagaagaagtgattccctaccacgaagaatgggagaaagccggagaagtgagtagagagctctgggaaaaagctggcaagcaaggcctgcttggcatcaacattgcagagaaacatggcggcatcggtggggacttgttgtcaacagcagttacttgggaagagcaagcatactcaaattgcacaggccctggtttcagcctccattcagatattgtcatgccctatattgcaaattacggcacaaaagaacagatcgagcagtttatcccccagatgacggcgggcaagtgtattggtgccatagccatgacagagcctggggctggaagtgacttacaaggagtaagaacaaatgccaaaaggtctgggagtgattggattctcaatggaagcaaggtgttcatcactaatggctggttaagtgatctcgtgatcgtagtggccgtcaccaatcgtgaagctcgatcgcccgctcatggcattagcctctttttggtggagaatggaatgaaaggatttattaagggcaagaagctacataagatgggaatgaaagcccaggacacagcagaactattctttgaagatgttcgattgccagctagtgccctacttggggaagagaataaaggcttctactacctcatgcaagagctcccacaggaaaggcttttaattgctgatttggcaatttctgcctgtgagttcatgtttgaagaaaccaggaactacgtgagacaaagaaaggcttttggaaaaacagtcgcacacatccagactgtgcagcacaaactagcagaattgaagacgaacatatgtgttaccagagcttttgtggacagctgcctacagctgcatgaaaccaaacgtctggactccgcctccgcttccatggcgaaatattgggcatctgaattacaaaacactgtagcttatcagtgtgttcaactccatggaggctggggttacatgtgggaatacccgattgcaaaagcctacgtggatgctcgagttcagccgatctacggtggtaccaacgaaatcatgaaagagctgatcgcaagacagatcgtcagtgacagctagacatctgcctacatcctgaaatcctactacatcacagctaatccggattcaaatatacttgagataaagtggaacctggaagggggggggggtagtaaagctggttttatgtatgattgttacagagaaa

SEQ ID NO: 2574 - protein, 430 aa, Rattus norvegicus
  ref <308>: DATABASE ACCESSION NUMBER: SWISS-Prot / P15650
  ref <309>: DATABASE ENTRY DATE: 2002-06-15
MAARLLLRSLRVLSARSATLPPPSARCSHSGAEARLETPSAKKLTDIGIRRIFSSEHDIFRESVRKFFQEEVIPYHEEWEKAGEVSRELWEKAGKQGLLGINIAEKHGGIGGDLLSTAVTWEEQAYSNCTGPGFSLHSDIVMPYIANYGTKEQIEQFIPQMTAGKCIGAIAMTEPGAGSDLQGVRTNAKRSGSDWILNGSKVFITNGWLSDLVIVVAVTNREARSPAHGISLFLVENGMKGFIKGKKLHKMGMKAQDTAELFFEDVRLPASALLGEENKGFYYLMQELPQERLLIADLAISACEFMFEETRNYVRQRKAFGKTVAHIQTVQHKLAELKTNICVTRAFVDSCLQLHETKRLDSASASMAKYWASELQNTVAYQCVQLHGGWGYMWEYPIAKAYVDARVQPIYGGTNEIMKELIARQIVSDS

SEQ ID NO: 2575 - DNA, 2217 bp, Homo sapiens
  ref <308>: DATABASE ACCESSION NUMBER: EMBL / M74096
  ref <309>: DATABASE ENTRY DATE: 2000-03-04
cggacatggccgcacgccttctccgagggtccctacgcgtcctgggcggccaccgtgcgccgcgccagctgcccgccgcgcgatgttctcattccggaggggaagaacgtctagaaactccttctgctaaaaaattaacagatataggaattcgaagaatcttttctccagagcatgacattttccggaaaagtgtaaggaagtttttccaagaagaagtgattcctcatcactcagaatgggagaaagctggagaagtaagtagggaggtttgggaaaaagctggaaaacaaggactgcttggtgtcaatattgcagagcatcttggtggaattggaggggatctgtactccgcagctattgtctgggaggagcaagcttattcaaattgttcaggcccaggttttagtattcattcaggtattgtcatgtcctatattacaaaccatggctcagaagaacagattaagcactttattccccagatgactgcaggcaaatgtattggtgcaatagcaatgacagagcctggagctggaagtgacttacagggaataaaaacaaatgctaaaaaggatggaagtgactggattctcaatggaagcaaggtgttcatcagtaatgggtcattaagtgatgttgtgattgtagttgcggtcacaaatcatgaagctccctcccctgcccatggtattagcctttttctggtggaaaatggaatgaaaggatttatcaagggacgaaagctacataaaatgggattaaaagcccaggataccgcagaactattctttgaagatatacggttgccagctagtgccctacttggagaagagaataaaggcttctattacatcatgaaagagcttccacaggaaaggctgttaattgctgatgtggcaatttcagctagtgaattcatgtttgaagaaaccaggaactatgttaaacaaagaaaagcttttggcaaaacagttgctcacctacagacagtgcaacataaattagcagaattaaaaacacatatatgtgtaacccgagcatttgtggacaactgtctccagctgcatgaagcgaaacgtttggactccgccactgcttgcatggcgaaatattgggcatctgagttacaaaatagtgtagcttacgactgtgtacagctccatggaggttggggatacatgtgggagtacccaattgcaaaagcttatgtggatgccagagttcagccaatctatggtggtacaaatgaaataatgaaggagctgattgcaagagagattgtctttgacaagtagacatctgcccacatcctggagtcctattacagctaatctcgttttaaatctgctcaagataaaatgtaacttggaaagcgaggaaacactaaacatgtttttacctgctctctctatagagaaggaaataaaatataaatataagattaacacagtggaaggacaaatctttgaagccaaaattctagttttccaatataaggtttaacttacagttttttatgtagccaaaggtaaacggttttctgaatcttgcctaggtgtttcatttatctctaaaattctaaaaagcataaatcattcaaatcttcaaaccaaggcagaaataattttatgtcgctatagtataaaaacattaataagatagcacattgacttttaaagggaaaagtaaatataacttagcatgtaaactcatttcggctaccatttgctccaaattccctagaacagtggtttttaccactgtactccaaccccgtttttaagcaatggaactctttcttcaaacaaaagcttatgcagaacatctctgtgaaacgctgctgagtgagaactgctttcattgaagctggaagccatcataccttactgccttgaaacccctaggactcagctaagtatttgcctaaccctgaccagggaatgccttggttctgtcaattgctgacatctgagaacacagaataatccatcatttttaatttcaagatattggtacattttataggtatcaaagcaatggcttttcttttgcaacagttaatgtatttattaacttaataattactttatgtcttctataaaccaggctgttaatacaatgatgacaaacaaaactggcaagatcactaaaaaataagtgaataaacaaataagtagtaaaataaggtaagaagtaaatatgtaaaagagataa

SEQ ID NO: 2576 - protein, 430 aa, Homo sapiens
  ref <308>: DATABASE ACCESSION NUMBER: SWISS-Prot / P28330
  ref <309>: DATABASE ENTRY DATE: 2002-06-15
MAARLLRGSLRVLGGHRAPRQLPAARCSHSGGEERLETPSAKKLTDIGIRRIFSPEHDIFRKSVRKFFQEEVIPHHSEWEKAGEVSREVWEKAGKQGLLGVNIAEHLGGIGGDLYSAAIVWEEQAYSNCSGPGFSIHSGIVMSYITNHGSEEQIKHFIPQMTAGKCIGAIAMTEPGAGSDLQGIKTNAKKDGSDWILNGSKVFISNGSLSDVVIVVAVTNHEAPSPAHGISLFLVENGMKGFIKGRKLHKMGLKAQDTAELFFEDIRLPASALLGEENKGFYYIMKELPQERLLIADVAISATEFMFEETRNYVKQRKAFGKTVAHLQTVQHQLAELKTHICVTRAFVDNCLQLHEAKRLDSATACMAKYWASELQNSVAYDCVQLHGGWGYMWEYPIAKAYVDARVQPIYGGTNEIMKELIAREIVFDK

SEQ ID NO: 2577 - DNA, 2104 bp, Rattus norvegicus
  ref <308>: DATABASE ACCESSION NUMBER: EMBL / J05031
  ref <309>: DATABASE ENTRY DATE: 2002-09-02
tggtatacagcggagatggcgactgcagtccggctgctggggcggcgagtttccagttggagactgcggcctttaccgtcgccccttgctgtcccgcagcgggcccactcgatgttgcctgtggatgatgatatcaacgggctaaacgaggagcagaagcagcttcgtcatacgatatctaagttcgttcaagagaacctggcccccaaggcccaagagattgatcaaagcaatgacttcaagaacctgagagagttctggaagcagctgggaagcctgggagtcctgggcatcacagcccccgttcagtatggtggctctggcctgggctacctagaacatgtgttggtgatggaagagatatcccgggcttcagcagctgtggggctcagctatggcgctcactccaacctctgcatcaaccagattgtccgcaatgggaatgaggcacagaaagagaaatatcttcccaagctcatcagtggtgagttcatcggagccctggccatgagtgagcccaacgctggctctgacgttgtctccatgaggctgaaagcagagaagaaaggagatcactacgttctgaatggcaacaagttctggatcaccaatggccctgacgctgatgtcctagttgtctatgccaagacagacttgactgctgtgcctgcgtctcggggcatcacagccttcattgtggaaaaggatatgcctggtttcagcacctcgaagaagctggacaagctaggcatgaggggctccaacacctgtgagctagtctttgaagactgcaaggttcctgctgctaacatcctgagccaagagagtaagggtgtctacgtactgatgagcgggctggacctagaacgcctggtgctggcaggtggaccccttgggatcatgcaggctgtcctggaccacaccattccctatttgcatgtgagggaagcctttggccagaagatcggccaattccagctgatgcagggaaagatggctgacatgtacacccgcctcatggcatgtcgacagtatgtctacaatgtcgccagggcctgtgacgagggccacatcactgccaaggactgtgctggtgtgattctgtatacagccgagtgtgccacacaagtagccctggatggcattcaatgtttaggtggaaatggctacatcaatgacttccccatgggccgctttcttcgagatgccaaactgtacgagatcggaggtgggaccagtgaggtgaggcggctagtcattggcagagctttcaacgcagacttccgctagcctggggccatcaccctgctcccagcagcaggaggcctttggaagcagagacgtggcagccctctgacttggctaaggaagctctgctgctcaactgccctcttgccagccctctgctcttcgtgaagtcggattctccagccgtgccagccagtcaatcaagaaagcctaaaattcggtccccagctccgaaaaaaaaaaaaaaaaaaaagaaccaaaagaaagcctaaaatggctgctaaaaggactttggcttttctggggtttgcagggagggtaacagtgtctgcgcccttgttctctacttctgaatgtagtaacctcaccctctggggtagcatatgacaggtacccaactccttttcgtgggcaagcctctggcaggggagctctttctgttgcaatgtaacagaggcattgcctctttcaattgtcagatacttgtggtctcttttcttgaggaaaaggcaaaaaccatgtccttcttagctgtttccccaagagctagctagacagttccagaatgcctgtgtggcagacccatgaagggcagagtccacagtctagccaagacaacttggagattggctccctggtgtggctgagtgtctacatcactccgtcacaggctagcactgggcctgctcacgtgaccttctgcagctgcctgactccggtggcccagcttaggttgcctggctcaactccagccttgctgtctatgtatatttctctagacgccctgtggctaattttgttacaaccacacaggctctgctgccattttgtattaaacatactgcaaagtaaaaaa

SEQ ID NO: 2578 - protein, 424 aa, Rattus norvegicus
  ref <308>: DATABASE ACCESSION NUMBER: SWISS-Prot / P12007
  ref <309>: DATABASE ENTRY DATE: 2002-06-15
MATAVRLLGRRVSSWRLRPLPSPLAVPQRAHSMLPVDDDINGLNEEQKQLRHTISKFVQENLAPKAQEIDQSNDFKNLREFWKQLGSLGVLGITAPVQYGGSGLGYLEHVLVMEEISRASAAVGLSYGAHSNLCINQIVRNGNEAQKEKYLPKLISGEFIGALAMSEPNAGSDVVSMRLKAEKKGDHYVLNGNKFWITNGPDADVLVVYAKTDLTAVPASRGITAFIVEKDMPGFSTSKKLDKLGMRGSNTCELVFEDCKVPAANILSQESKGVYVLMSGLDLERLVLAGGPLGIMQAVLDHTIPYLHVREAFGQKIGQFQLMQGKMADMYTRLMACRQYVYNVARACDEGHITAKDCAGVILYTAECATQVALDGIQCLGGNGYINDFPMGRFLRDAKLYEIGGGTSEVRRLVIGRAFNADFR

SEQ ID NO: 2579 - DNA, 2562 bp, Homo sapiens
  ref <308>: DATABASE ACCESSION NUMBER: EMBL / AK022777
  ref <309>: DATABASE ENTRY DATE: 2002-08-06
gttgtgccatgctgctctgtcatgtttggtacgtgaatcgtccctttgtgcagcctatctatgctatgtgggctacctgcccgttagtagtcacctagggtatccaatcagctgtcctgatatcagagtgcctgtgttcaagtaactcttattttgctcagtggccccagattgcaagagtagtgatgctggcatgtcataatagttctattttagtatttgttattattgttgatctgttactatgcctagctcataaattaaactttctcataagtatgtatgtatagggaaaaaaacaacatatatatgggtttcggttctatctacggtttcaggcatccactggggtcttggaatgtatcctccaaggataaggaaggactagtgtattccccacacccctccctcttgctaccttttgctgcttttctttaatcaccctctcctcctgtggcctgtttctatatacttggcattctgtttgctttctttgttttgtcaatcacttcctttcttctctgcccaaaccctggttgcaggtggcaatggctacatcaatgactttcccatgggccgctttcttcgagatgccaagctgtatgagataggggctgggaccagcgaggtgaggcggctggtcatcggcagagccttcaatgcagactttcactagtcctgagacccttcgcccccttttcctgcacctagtggcctttcttgggaagtagagatgtggcggctttcccaccctgcccacagcaggccctcctgcccagctgctcttgtcagccctctggcctctggatgaggttgagttctccacaacagctcccaagcatcatgggcctcgcagccgggcctgtgccacggctagtgttgtgtgatttaaaatggactcagcaggaagcatattgtctggggattgttgggacaagttttggtgactctgtgcccttgctctctaacttctgagcccacctcccagggtaggcacctgggggcatgcaggtgcccacctcccagggtaggcacctgggggcatgcaggtacccacctctttctcttgggtgaggctctggcaaggagatctctctgctcaagcacagcagaatcatggcccctctccatgaattggaacttggtacaggttaagtatccctaatcctgaaatctgaaacacttgtggttccaagcattttggataaggcaaattcaactttcagtctcttttctgggggaaaaaaataataaacctagcctagccaggcgtggtggctcatgcttgtaatcccagcacttcaggaggctgagatgggtggatcacctgaggtcaggagttcaagaccagcctggccaacatgtggaaacctcgcctcaactaaaaatagaaaaaaattagttgggcatggtggtgggcacctgtaatcccagctacttcaggaggctgaggcaggagaattacttgaacccaggaggcggaggttgcagtgagccgagcttgtgccattgcactccagcctgggcgacaagggcaaaactcttcaaaaaacaaaacaaaacaaaaaaaccctggcccttgtttcttccagtttctagaggtatcagctcctagcagcttatgaacacatatgcttgcttggccaggcaaggtggtgtgtgcctgtaatcccagcactttgggaggccaaggcaggtggatcacttgcagtcaggagttcaagaccagcctgtccaacgtggtgaaaccccatctctactaaaaatacaaaaattagccaggggtggtggtgcacgtctgtaatcccagctactcaggaggctgaggcaggagaatcacttgaacccgggaggtggaggttgcaatgagccaatatgacaccgctgcagtccagcctgggccatagagtgagactctgtctcaaaaaaggaaagaaaaataggctgggcacagtgactcatgcctgtaatcccaacactttgggaggccgaggcaggtggatcacgaggtcaggagttcaagaccagcctggccaagatggtaaaacctcgtctctactaaaaatacaaaaattagccaggtgtggtggcaggctcctgtaatcccagttacacagaagactgaggcaggagaatcgcttgaacgcaggaggcagaggttgcaggagctgagatcgcgccattgcactccagcctgggcaacagagtgagactctgtctcaaaaaataataataaaataaatgaacacacatgctgctgagtccgcaggggggcagagcagaggacagcgtgcttttgtgtactgttggaagactggctcctcctgtacagcacctctgagcccttgtgcaccgccctgccacgggcaccatccagtcctggccgtgtgaccacccacagctgactgggcagcaggcacaggccctacccgagcaggccggagttggctcgcatgactccagctgaggctgcctgtgtacatttctccagataccctatggctaattttgttataactgcacagtggctgctgccattttgtattaaatatattgtgaaac

SEQ ID NO: 2580 - protein, 423 aa, Homo sapiens
  ref <308>: DATABASE ACCESSION NUMBER: SWISS-Prot / P26440
  ref <309>: DATABASE ENTRY DATE: 2002-06-15
MATATRLLGWRVASWRLRPPLAGFVSQRAHSLLPVDDAINGLSEEQRQLRQTMAKFLQEHLAPKAQEIDRSNEFKNLREFWKQLGNLGVLGITAPVQYGGSGLGYLEHVLVMEEISRASGAVGLSYGAHSNLCINQLVRNGNEAQKEKYLPKLISGEYIGALAMSEPNAGSDVVSMKLKAEKKGNHYILNGNKFWITNGPDADVLIVYAKTDLAAVPASRGITAFIVEKGMPGFSTSKKLDKLGMRGSNTCELIFEDCKIPAANILGHENKGVYVLMSGLDLERLVLAGGPLGLMQAVLDHTIPYLHVREAFGQKIGHFQLMQGKMADMYTRLMACRQYVYNVAKACDEGHCTAKDCAGVILYSAECATQVALDGIQCFGGNGYINDFPMGRFLRDAKLYEIGAGTSEVRRLVIGRAFNADFH

SEQ ID NO: 2581 - DNA, 2104 bp, Rattus norvegicus; identical to SEQ ID NO: 2577
  ref <308>: DATABASE ACCESSION NUMBER: EMBL / J05031
  ref <309>: DATABASE ENTRY DATE: 2002-09-02

SEQ ID NO: 2582 - protein, 424 aa, Rattus norvegicus; identical to SEQ ID NO: 2578
  ref <308>: DATABASE ACCESSION NUMBER: SWISS-Prot / P12007
  ref <309>: DATABASE ENTRY DATE: 2002-06-15

SEQ ID NO: 2583 - DNA, 2562 bp, Homo sapiens; identical to SEQ ID NO: 2579
  ref <308>: DATABASE ACCESSION NUMBER: EMBL / AK022777
  ref <309>: DATABASE ENTRY DATE: 2002-08-06

SEQ ID NO: 2584 - protein, 423 aa, Homo sapiens; identical to SEQ ID NO: 2580
  ref <308>: DATABASE ACCESSION NUMBER: SWISS-Prot / P26440
  ref <309>: DATABASE ENTRY DATE: 2002-06-15

SEQ ID NO: 2585 - DNA, 2470 bp, Rattus norvegicus
  ref <308>: DATABASE ACCESSION NUMBER: EMBL / J05035
  ref <309>: DATABASE ENTRY DATE: 2000-03-04
acctcagctatggagttggatgagctgtgcctgctcgacatgctggtctacttggaaggtttcatggccttcgtgtccattgtggggctccggtcggttggctctccgtacggccgctactcgccgcagtggcccggcatccgagtgcccgcgcgacctgcctggttcatacaggagctgccctcgatggcctggccgctgtacgagtacattcgtcctgcagccgcgcgactgggcaacctgcctaaccgcgtcctgctggctatgtttctgatccactacgtgcaaaggacgctggttttcccggttctgatcaggggagggaagcccaccctcctggtcacctttgtcttggccttcctgttctgcaccttcaacggctatgtacagagcagatacttgagccagtttgcggtttatgctgaagactgggtgacccatccctgtttcctgacaggctttgccctgtggttagtgggcatggtgataaatatccactcagaccacatcctgaggaatctgagaaaaccaggggaaactggatacaagatacccaggggaggcctgtttgaatacgtatctgcagccaactattttggggagctcgtggagtggtgtggctttgcactggccagctggtccctccagggtgtagtgtttgcactgttcacactcagcacactgctcaccagagcgaagcagcaccatcagtggtaccatgagaagtttgaagattaccccaagtcaagaaaaatactgattccatttgtgctttagtgctctgttagcgctgttgcctcccatgagctgagtctgtctgtctccctggtgactttgctctgagcacttacgaatgaattgttttccttaattctcctgcagcccctttctcaggaaaggctgggggtgggggggtgtcgtcccctggtaaaggacaaagccaatgataaactaatccaccacatgcagttaggggctacactgcctgctggatccgaagcaggtagccctgagtcattatggcgctctctgacttcagcaatcagcagcccttacaatcctgcaagattccacccaagtcagcagcagtcacgggcctccttcactgatgtgtgttctgcctgctcagcccctgccacagaggcctggaggtgtgggagtgtggcctaagcacagtctgccatccttgaccgcagacctcttggacccacccccactccctccagacactggtaagagaagccttcctgcaacatgtcctgtcctcaggaggtgagacagcagagtgcttccattcactcgatgaccccatttttgctcttcctttgggctagaattcattaaggtccttaaaaacaaaacaaaactttttcttaatagtacaaaacaaaatatcaaaacaaaatttgttattttgaatgcacccaaggaccaatcatgtcacacaaagaaagctcagggctagcctgggctgtgtagggagaccctgtttgggaaaaaaaaaatgaagataacaaccagctaactgtccaaagaagtgaccgcagtaataaaagacgccgcccacacaggcaccagcttgggagaaagatgtgcgcctgggattgtaaacccactgttgctctgggcaggctgaggcccactggtgaagagccattcccaccggacccatgcacactgcctcggggcagcgtctgcactcacctctcacccgctgccaccacagctaaagaacagaacggatagaactgtgtgctctgaacccagtgaagatgctgcatgaagacctgcaggcacacctgatggcgtgcacggtgcccaccactcgcctgactcggaccatctctgtgtgcccgctgccacctctgtgtgccctttccagctggctttcccatcagggcttcctcagctcttctgctctcagacagaaactattctctgttcctctggttcgcagaatgtctagatttgacccagaaaacttcatgacacagctacttcattttaacaaagagcagtgtttaatggggaactacccttcaatcctttaccctccccttttctggccaagtaactgcttgaaaacctaaagcactaaacattgtaggtctcctctcaaaacctcaggcctgtctggtgtgttctgaaacgtttgtgtggaaggagatattcagctgagaccctgggaatgtttgctgtgaacttgacctcccttggagggcatggtgctagataaacttggaacctaggactccaggttgctaggcggatgccctgacactaagccacatcacacattagctctgtgatgcctctttctttatgaaggaccaagctgcccacatactaagtgagattaatttaagaggaatcctgtcctaacactgtatacttcattccctacaactcaacttacttgtatgaaccatgattgttaaggaaattaataaactacatttataagtaaaaa

SEQ ID NO: 2586 - protein, 259 aa, Rattus norvegicus
  ref <308>: DATABASE ACCESSION NUMBER: SWISS-Prot / P24008
  ref <309>: DATABASE ENTRY DATE: 2002-06-15
MVPLMELDELCLLDMLVYLEGFMAFVSIVGLRSVGSPYGRYSPQWPGIRVPARPAWFIQELPSMAWPLYEYIRPAAARLGNLPNRVLLAMFLIHYVQRTLVFPVLIRGGKPTLLVTFVLAFLFCTFNGYVQSRYLSQFAVYAEDWVTHPCFLTGFALWLVGMVINIHSDHILRNLRKPGETGYKIPRGGLFEYVSAANYFGELVEWCGFALASWSLQGVVFALFTLSTLLTRAKQHHQWYHEKFEDYPKSRKILIPFVL

SEQ ID NO: 2587 - DNA, 2222 bp, Homo sapiens
  ref <308>: DATABASE ACCESSION NUMBER: Refseq / NM_001047
  ref <309>: DATABASE ENTRY DATE: 2000-10-31
gagtcccggcagtgcgggactccggtagccgcccctccggtagccgcccctcctccccccgcgccgccgccctatatgttgcccgccgcggcctctggggcatggagcacgctgcccagccctggcgatggcaacggcgacgggggtggcggaggagcgcctgctggccgcgctcgcctacctgcagtgcgccgtgggctgcgcggtcttcgcgcggaatcgtcagacgaactcagtgtacggccgccacgcgctgcccagccacaggctccgagtgccggcgcgggccgcctgggtggtgcaggagctgccctcgctggccctgccgctctaccagtacgccagcgagtccgccccgcgtctccgcagcgcgcccaactgcatcctcctggccatgttcctcgtccactacgggcatcggtgcttaatttacccgtttctgatgcgaggaggaaagcctatgccactgttggcatgtacaatggcgattatgttctgtacctgtaacggctatttgcaaagcagatacttgagccattgtgcagtgtatgctgatgactgggtaacagatccccgttttctaataggttttggcttgtggttaacaggcatgttgataaacatccattcagatcatatcctaaggaatctcagaaaaccaggagatactggatacaaaataccaaggggaggcttatttgaatacgtaactgcagccaactattttggagaaatcatggagtggtgtggctatgccctggccagctggtctgtccaaggcgcggcttttgctttcttcacgttttgttttttatctggtagagcaaaagagcatcatgagtggtacctccggaaatttgaagagtatccaaagttcagaaaaattataattccatttttgttttaagtgcgtttttcatgaaattatcttcaacttgaagctttccaatggcgcttctctatggactttgtaaataagttatatctttgtaattttcctgctactttatcattttcaagatgtcctctaggaattttttttctagtaattttgcaatctacctaataagtacctaaatacgctgaaatggaggttgaatatcctactgtgtaacaggtcagaatttcaagctctgggtaataactgctgatattttttctaatttcaaatttacctcttttggctatgtcttgccaagtgtgtatgagactagactttacaactgtctttgatggcattttcagaacaataaatgtcacaatcccttctatagccccctacagtgatctcttcaaggtcaactgcagtgttgcttccctccccctatagggctggaatctgtctaggagccctctctcggaggccatagaggctgggggtagccattgtgcagtcatggcccgggggaaacttgccaaccttcgtgtcaggtgctgtgtataagtggagaacttggggatagaggaggaagctcctcgtggcccttccaaggtgaggcaaaggcatctggacttgttccagcccagcccaccgggtgacatcaccgggcagggaggggtgctggtggtggttcatacggagtaagctgctctgcctgtgtgagtggctcctgggccctaaacaggcacctttaggccatgggtcactcaccgtgagccatcaatgtgctctggtctgacatggtttctctctgtcttctagtctagacctagtttttttgttctgttccccacgtatggatatagtagagattgttgtctgtgaaatttctcttttgtagattttgagttttcccttgtagtgtaaagaatgatcactttctgtaacaataacaagaccactttttaagatttatcctgtttgttctttgttgattgaaacataataattgttaaaattctctacagccttctttttcttccatagctaatcttccttctaatagtttttgctttctgttttgctgttgttgctttgcaaagctttcccctcatagcctgtacctgttatcaatataaaataatcttcctgttgaatgcttcatgacttgaattctactttgataaaaacattgccatactgctttttatcttgatgaattcatctggcattgctttgccttatcatctcatctggagtttttaaatgccatttgtttcagttgtctttaacaacataataaatagactttgccatttaaaaaaaaaaaaaaaaaaaaaaa

SEQ ID NO: 2588 - protein, 259 aa, Homo sapiens
  ref <308>: DATABASE ACCESSION NUMBER: SWISS-Prot / P18405
  ref <309>: DATABASE ENTRY DATE: 2002-06-15
MATATGVAEERLLAALAYLQCAVGCAVFARNRQTNSVYGRHALPSHRLRVPARAAWVVQELPSLALPLYQYASESAPRLRSAPNCILLAMFLVHYGHRCLIYPFLMRGGKPMPLLACTMAIMFCTCNGYLQSRYLSHCAVYADDWVTDPRFLIGFGLWLTGMLINIHSDHILRNLRKPGDTGYKIPRGGLFEYVTAANYFGEIMEWCGYALASWSVQGAAFAFFTFCFLSGRAKEHHEWYLRKFEEYPKFRKIIIPFLF

SEQ ID NO: 2589 - DNA, 2470 bp, Rattus norvegicus; identical to SEQ ID NO: 2585
  ref <308>: DATABASE ACCESSION NUMBER: EMBL / J05035
  ref <309>: DATABASE ENTRY DATE: 2000-03-04

SEQ ID NO: 2590 - protein, 259 aa, Rattus norvegicus; identical to SEQ ID NO: 2586
  ref <308>: DATABASE ACCESSION NUMBER: SWISS-Prot / P24008
  ref <309>: DATABASE ENTRY DATE: 2002-06-15

SEQ ID NO: 2591 - DNA, 2222 bp, Homo sapiens; identical to SEQ ID NO: 2587
  ref <308>: DATABASE ACCESSION NUMBER: Refseq / NM_001047
  ref <309>: DATABASE ENTRY DATE: 2000-10-31

SEQ ID NO: 2592 - protein, 259 aa, Homo sapiens; identical to SEQ ID NO: 2588
  ref <308>: DATABASE ACCESSION NUMBER: SWISS-Prot / P18405
  ref <309>: DATABASE ENTRY DATE: 2002-06-15

SEQ ID NO: 2593 - DNA, 2470 bp, Rattus norvegicus; identical to SEQ ID NO: 2585
  ref <308>: DATABASE ACCESSION NUMBER: EMBL / J05035
  ref <309>: DATABASE ENTRY DATE: 2000-03-04

SEQ ID NO: 2594 - protein, 259 aa, Rattus norvegicus; identical to SEQ ID NO: 2586
  ref <308>: DATABASE ACCESSION NUMBER: SWISS-Prot / P24008
  ref <309>: DATABASE ENTRY DATE: 2002-06-15

SEQ ID NO: 2595 - DNA, 2222 bp, Homo sapiens; identical to SEQ ID NO: 2587
  ref <308>: DATABASE ACCESSION NUMBER: Refseq / NM_001047
  ref <309>: DATABASE ENTRY DATE: 2000-10-31

SEQ ID NO: 2596 - protein, 259 aa, Homo sapiens; identical to SEQ ID NO: 2588
  ref <308>: DATABASE ACCESSION NUMBER: SWISS-Prot / P18405
  ref <309>: DATABASE ENTRY DATE: 2002-06-15

SEQ ID NO: 2597 - DNA, 2470 bp, Rattus norvegicus; identical to SEQ ID NO: 2585
  ref <308>: DATABASE ACCESSION NUMBER: EMBL / J05035
  ref <309>: DATABASE ENTRY DATE: 2000-03-04

SEQ ID NO: 2598 - protein, 259 aa, Rattus norvegicus; identical to SEQ ID NO: 2586
  ref <308>: DATABASE ACCESSION NUMBER: SWISS-Prot / P24008
  ref <309>: DATABASE ENTRY DATE: 2002-06-15

SEQ ID NO: 2599 - DNA, 2222 bp, Homo sapiens; identical to SEQ ID NO: 2587
  ref <308>: DATABASE ACCESSION NUMBER: Refseq / NM_001047
  ref <309>: DATABASE ENTRY DATE: 2000-10-31

SEQ ID NO: 2600 - protein, 259 aa, Homo sapiens; identical to SEQ ID NO: 2588
  ref <308>: DATABASE ACCESSION NUMBER: SWISS-Prot / P18405
  ref <309>: DATABASE ENTRY DATE: 2002-06-15

SEQ ID NO: 2601 - DNA, 5084 bp, Rattus norvegicus
  ref <308>: DATABASE ACCESSION NUMBER: EMBL / J05087
  ref <309>: DATABASE ENTRY DATE: 2000-03-04
caccaccagctccctccctcccccaccccttcctccctccctccgcgctcagagctgcggctggagtcgagcgcgcgcgtcgcccgccgccgccggtgcggagcgtggggagcactcggccacagccctcgcctggccgcggagggtcctgctccgcactgctggccaggccgcccagtgcccgggcctttccgtccttggagcggatcgttgctcgcagggagctctcctgcagcaacagcgaaagctacagcagaggccgcggtggcggctgtgcccatgccgggcagccaagagtcactcaaaagggcctcccctcaactgatgccctctatctgtcctgtggcctgttgggtgaatgaagatgaggaaagtttgagtagccacaccttctggcttcatgctgtgcaggatagtgctgctaccttccagagctccaagattttcccctctgtgaaccaggcctcattcactaatttctccagccccatcgtcatctgggatagatcactcagtgcatttttggcaattcagtggtcaacaatgtgtctcaaagagttaaggatgcaggtgttcacacttagcttctttcccaccaccaccttgcctcacctcagcactgggatcataggtggccacccgtccctagctattactgagctgaggctacacctgtgagaaggctgacagacaggatgggtgacatggcgaacagttccattgagttccaccccaaaccccagcagcagcgggaagtgcctcatgtgggtggctttggatgcacgctggcagaactacgcagcctcatggagctccgaggtgctgaggcactgcagaagatccaagaagcctatggggatgtcagtgggctgtgtaggagactaaagacctcacctactgaaggcctggcagacaacaccaatgacttggagaaacgcaggcagatctatgggcagaacttcatccctccaaagcagcccaagaccttcctgcagctggtgtgggaagccctgcaggacgtgactctcatcatcctggaggtggctgctatcgtctccctgggcctctccttctatgcaccacctggagaggaaagtgaagcctgtgggaatgtgtctggtggggcagaagacgaaggagaggccgaggctggctggatagagggggctgccatcctactctctgtcatctgtgtggtgctggtcacagccttcaatgactggagcaaggaaaagcagttccgaggtcttcagagccgaattgagcaggaacagaagtttactgtcatccgaaatgggcagctcctccaggtccctgtggcagccctggtggtaggggacattgcccaggtcaaatacggagatcttctgcctgccgatggtgtgctcatccaaggcaatgacctcaagatcgacgagagctccctgaccggcgagtcggaccatgtgcgcaaatcagcagacaaagatcctatgctgctctcaggcactcatgtcatggaaggttctggaagaatggtagtaacagctgttggtgtgaactcccagacaggcatcatctttacattgcttggggcaggtggagaggaggaggagaagaaagacaagaaagctaagaagcaggatggggctgttgccatggaaatgcagcccctgaagagtgccgagggtggggaaatggaggagcgggaaaagaagaaagccaacgtacccaagaaggagaagtcagtcctgcaagggaagctcacaaaactggctgtgcagattgggaaagcaggattggtgatgtctgctatcactgtcatcattctggtcctctactttgtgattgagaccttcgttgtggatggccgggtgtggctggcagagtgcacaccagtgtatgtgcagtactttgtgaagtttttcattattggagtcactgtgttggttgtggctgtccctgagggcctgcctcttgctgttactatctccttggcttactctgttaagaaaatgatgaaggacaataacctggtacgccacctggatgcctgtgagaccatgggcaatgccacagccatctgttctgacaagacaggcacactcaccaccaaccgtatgacagtggttcagtcctacctaggagacacccactacaaagagattccagctcccagcgccctgacccccaagatcctcgaccttctggttcatgccatctccatcaacagtgcctacaccaccaaaattctacctccagagaaagaaggcgctctcccacgccaagtgggcaacaaaacagagtgtgctcttttgggcttcatcttggacctgaaacgtgacttccaacctgtacgggaacagataccagaagatcagctttacaaagtgtacaccttcaactcagttcgcaagtccatgagcacagttatccgaatgcctgatggtggcttccgcctcttcagcaagggagcctcagagatcctgctcaaaaagtgtacaaacatcttaaacagcaatggtgaactccgaggatttcgtcctcgggaccgggatgacatggtaaagaagatcattgagcctatggcttgtgatggcctccgcaccatatgcatcgcctacagggacttctctgctatccaggaaccggactgggacaatgagaatgaggtggtgggtgaccttacctgcatagctgtcgtgggcatcgaggaccctgtgcgacctgaggtccctgaagccattcgaaaatgccagcgtgctggcattacagtccgtatggtaactggagataacatcaacactgcccgggctattgcagctaagtgtggcatcatccagccaggggaggatttcctgtgcctggaggggaaggaattcaacagaaggattcgaaatgagaaaggcgagatagaacaggagaggctggacaaggtgtggcccaagcttcgggtgcttgcccggtcatctcccactgataaacatactctggtcaaaggcataattgacagcacaactggtgagcagcggcaggtggtggctgtgaccggggatggcaccaatgatggaccagccctcaaaaaggcagatgtgggcttcgccatgggcatcgcaggcactgatgtggccaaggaggcctctgacatcattctgactgatgacaacttcaccagcattgtcaaggcggtcatgtggggccgcaatgtctatgacagcatttccaagttcctgcagtttcagttgacagtcaatgtggtagctgtgatcgtggccttcacgggtgcctgcattactcaggactctcctctcaaagctgtgcagatgttgtgggtgaacttgatcatggacacatttgcctcacttgccctggcaacggaacccccaactgagtcactgctgctgcggaagccatatggccgggacaagcctctcatctcacgcaccatgatgaagaacatccttggacatgctgtttaccagcttaccatcatctttactctgctatttgttggagagcttttctttgacattgacagtggaaggaatgcacctctgcactcgccgccctcagagcactacaccatcatcttcaacacatttgtcatgatgcagcttttcaatgagatcaatgctcgaaagatccatggtgagaggaatgtctttgatggcatcttcagcaaccccatcttctgtaccattgtcctgggcacctttggaattcagattgtcattgtccaatttggagggaagcccttcagctgttccccactgtccacagaacagtggctctggtgtctttttgttggtgttggggagctggtctggggacaggtcattgccactatccccaccagccagctcaagtgcctgaaggaagcagggcatgggcctgggaaggatgagatgactgatgaagagttggcggaaggggaagaagaaattgaccatgctgagcgagagctccgcagaggccagatcctctggtttcggggcctcaaccggatccagacacagatggaggtagtgagtaccttcaagagaagcgggtcatttcagggtgctgtgcgccggcggtcttcggtcctcagccagctccatgacgtaaccaatctttctacccctactcacgtaactctctctgccgccaagcccaccagcgctgctggcaatccgagtggtgaaagcattccgtagctcgctttatgaaggcctggagaaaccagaatccaagagttgcatccataacttcatggcaacacccgagtttttgatcaatgactacacccacaatattccgctcatcgatgacacagatgtggatgagaatgaagagcgcctgagggccccacctcccccaccccctaaccagaacaacaacgccatagacagcggcatctacctgaccacgcatgccaccaagtcagctacctcttcagcattctcttccaggcctgggagcccactccacagcatggagacatccctctaaccagaacttctctcagtgtgcgcgtgcgcgcgcgcacacacacacacacacacacacacacacactctcacacacacacacatattctctctcacacacacacatacacatacatgcatgcatgcacatacattctctctctttctcttacacacacacacacacacacacacacgcgcgcgcgcacagtcacatgcacccagagaggggaacccgtgcacctgccaaagagggaaatgactaacatggctaaagactttacttatgtggtatttgcaagaagccaattgcattcaataagaggacagcccactaggctttttactaggttcccagaaggtgggggaaggagaaaaaaggaaaagagagggaggttctttacccgatgtgaaggaaaaagagagcatgagacaagatacacttcccaccatttttctactgatgcttctttttttaatgaacactagttccaccatgtgttcactatttgggctgtgcaatgcggtaggggctagctgagcctatttggagctttgctatacccataacaaaaaaaaagaaaagaaaaagaaagaaagagagaaagaaagaaagaaagaaagaaagaaagaaag

SEQ ID NO: 2602 - protein, 1258 aa, Rattus norvegicus
  ref <308>: DATABASE ACCESSION NUMBER: SWISS-Prot / AAA69667
  ref <309>: DATABASE ENTRY DATE: 2001-10-16
MGDMANSSIEFHPKPQQQREVPHVGGFGCTLAELRSLMELRGAEALQKIQEAYGDVSGLCRRLKTSPTEGLADNTNDLEKRRQIYGQNFIPPKQPKTFLQLVWEALQDVTLIILEVAAIVSLGLSFYAPPGEESEACGNVSGGAEDEGEAEAGWIEGAAILLSVICVVLVTAFNDWSKEKQFRGLQSRIEQEQKFTVIRNGQLLQVPVAALVVGDIAQVKYGDLLPADGVLIQGNDLKIDESSLTGESDHVRKSADKDPMLLSGTHVMEGSGRMVVTAVGVNSQTGIIFTLLGAGGEEEEKKDKKGKQQDGAMESSQTKAKKQDGAVAMEMQPLKSAEGGEMEEREKKKANVPKKEKSVLQGKLTKLAVQIGKAGLVMSAITVIILVLYFVIETFVVDGRVWLAECTPVYVQYFVKFFIIGVTVLVVAVPEGLPLAVTISLAYSVKKMMKDNNLVRHLDACETMGNATAICSDKTGTLTTNRMTVVQSYLGDTHYKEIPAPSALTPKILDLLVHAISINSAYTTKILPPEKEGALPRQVGNKTECALLGFILDLKRDFQPVREQIPEDQLYKVYTFNSVRKSMSTVIRMPDGGFRLFSKGASEILLKKCTNILNSNGELRGFRPRDRDDMVKKIIEPMACDGLRTICIAYRDFSAIQEPDWDNENEVVGDLTCIAVVGIEDPVRPEVPEAIRKCQRAGITVRMVTGDNINTARAIAAKCGIIQPGEDFLCLEGKEFNRRIRNEKGEIEQERLDKVWPKLRVLARSSPTDKHTLVKGIIDSTTGEQRQVVAVTGDGTNDGPALKKADVGFAMGIAGTDVAKEASDIILTDDNFTSIVKAVMWGRNVYDSISKFLQFQLTVNVVAVIVAFTGACITQDSPLKAVQMLWVNLIMDTFASLALATEPPTESLLLRKPYGRDKPLISRTMMKNILGHAVYQLTIIFTLLFVGELFFDIDSGRNAPLHSPPSEHYTIIFNTFVMMQLFNEINARKIHGERNVFDGIFSNPIFCTIVLGTFGIQIVIVQFGGKPFSCSPLSTEQWLWCLFVGVGELVWGQVIATIPTSQLKCLKEAGHGPGKDEMTDEELAEGEEEIDHAERELRRGQILWFRGLNRIQTQMEVVSTFKRSGSFQGAVRRRSSVLSQLHDVTNLSTPTHIRVVKAFRSSLYEGLEKPESKSCIHNFMATPEFLINDYTHNIPLIDDTDVDENEERLRAPPPPPPNQNNNAIDSGIYLTTHATKSATSSAFSSRPGSPLHSMETSL

SEQ ID NO: 2603 - DNA, 4398 bp, Homo sapiens
  ref <308>: DATABASE ACCESSION NUMBER: Refseq / NM_001682
  ref <309>: DATABASE ENTRY DATE: 2000-10-31
ggccaaaggtcaagatacttctctgggaaatgttgctgctgatgctgctttacaaagtcatacaatgagtgtttggtttaagaaagattttcatacttaaaagattttcatcttggaaatacatcaagtgaaaattaaattcttttgggaaacattttccttctgatatattatacttgtaatgggcgacatggcaaacaactcagttgcttacagtggtgtgaaaaactctttgaaggaagctaatcatgatggagactttggaattacgctcgcagagctgcgggctctcatggagctcaggtccacagatgcattacgaaaaatacaggaaagctatggagatgtctatggaatttgcaccaaattgaaaacatctcccaatgaaggtttaagtggaaaccctgcagatttagaaagaagagaagcagtgtttggaaagaattttatacctcctaaaaagccaaaaacctttcttcaattagtatgggaagcattacaagatgtcactttaattatattagaaattgcagccatagtatcattgggcctttctttttatcagcctccagaaggggataatgcactttgtggagaagtttctgttggggaggaagaaggtgaaggtgaaactgggtggattgaaggagctgcaatcctcttgtctgtagtgtgtgtggtgttagtaacagctttcaatgactggagtaaggagaaacagtttagaggtttgcagagccgaattgaacaagaacagaagttcactgtcatcaggggtggtcaggtcattcagatacctgtagctgacattactgttggagatattgctcaagtgaaatatggtgatcttcttccagctgacggcatacttattcaaggcaacgatcttaaaattgatgaaagctcattgactggtgaatcagatcatgttaaaaagtctttagataaggatcccttacttctatcaggtactcatgtaagggaaggctctggaagaatggtagttacagctgtaggtgtaaattctcaaactggaattatctttaccttacttggagctggaggtgaagaggaagagaagaaagatgagaagaaaaaggaaaagaaaaataagaaacaagatggagctattgagaatcgcaacaaagcaaaagcccaggatggtgcagccatggaaatgcagccattgaagagtgaagaaggtggagatggtgatgaaaaagataaaaagaaagcaaatttgccaaaaaaggaaaaatctgttttacaagggaaacttacaaaactggctgttcagattggcaaagcaggtctgttgatgtctgccatcacagttatcattctagtattatattttgtcattgacaccttctgggttcagaaaagaccatggcttgctgagtgcacaccaatttatatacaatactttgtgaagttcttcattattggagttacagttttagtggtcgcagtgccagaaggtcttccacttgcagtcacgatctcactggcttattcagtcaaaaaaatgatgaaagataataacttagtaaggcatctggatgcttgtgaaaccatgggaaatgctacagctatttgttcagataaaacaggaactttgacaatgaacagaatgacagtcgttcaagcttacataaatgaaaaacattataaaaaggttcctgaaccagaagctattccaccaaatattttgtcctatcttgtaacaggaatttctgtgaattgtgcttatacatcaaaaatattgccaccagagaaagagggtggattacctcgtcacgttggtaataaaactgaatgtgccttgttgggacttcttttggatttaaaacgggattatcaggatgttagaaatgaaataccagaagaagcactgtacaaagtctacaccttcaattctgttaggaagtccatgagtactgtcctgaaaaattcagatggaagttatcgaatattcagcaagggtgcatctgagataattctgaaaaagtgtttcaaaatcttgagtgctaatggtgaggcaaaagtattcagaccaagggaccgtgatgatattgtaaaaactgtgattgaaccgatggcatcagaaggcttgagaaccatatgtcttgcattcagagattttccagcaggagaaccagaaccagagtgggataatgaaaatgatattgtcaccggccttacatgcattgctgttgtggggattgaagatcctgtgagacctgaggtgccagatgcaattaaaaagtgtcagagggctggaattactgtgcggatggtcactggtgataatattaatactgctcgggccattgctaccaaatgtggtattttacatcctggggaagattttctgtgcctagaaggtaaagattttaacagaagaatacgaaatgaaaaaggagagattgagcaagagaggatagacaagatttggccaaaacttcgagtacttgcaagatcatctcctactgataagcatacactggttaaaggtataattgacagcactgtctcagaccaacgccaggttgtagctgtaactggtgatggtacaaatgatggcccagcactaaagaaagcagatgttggatttgcaatgggtattgctggaactgatgtagctaaagaagcatccgatattattctcacagatgacaactttacaagcattgttaaagcagttatgtggggacgaaatgtctatgacagcatctcaaaattccttcagttccaacttactgttaatgtagtagcagtgattgttgcttttacgggcgcctgcattactcaagactcaccgcttaaggctgtgcagatgctgtgggtaaacctcataatggatacactcgcttccctggctctggcaacggaaccacccactgagtctctcttgcttcggaaaccttatggtagaaataagcctctcatctcacgtacaatgatgaagaatattttgggtcatgcattctatcaacttgtagtagtctttacactcttatttgctggagaaaagttttttgacattgatagtggaagaaatgctcctttgcatgctcctccttcagaacattatactattgtttttaatacctttgtgctgatgcaacttttcaacgaaataaatgcccggaaaattcatggtgaaagaaatgtattcgaaggaatctttaacaatgccatcttctgcacaattgttttaggcacttttgtggtacagataataattgtgcagtttggtggaaaacctttcagttgttcagaactttcaatagaacagtggctatggtcaatattcctaggaatgggaacattactctggggccagcttatttcaacaattccaactagccgtttaaaattcctcaaagaagctggtcatggaacacaaaaggaagaaatacctgaggaggaattagcagaggatgttgaagagattgatcacgctgaaagggagttgcggcgtggccaaatcttgtggtttagaggtctgaacagaatccaaacacagattcgagtggtgaatgcatttcgtagttctttatatgaagggttagaaaaaccggaatcaagaagttcgattcacaactttatgacacatcctgagtttaggatagaagattcagagcctcatatcccccttattgatgacactgatgccgaagatgatgctcctacaaaacgtaactccagtcctccaccctctcccaacaaaaataacaatgctgttgacagtggaattcaccttacaatagaaatgaacaagtctgctacctcttcatccccaggaagcccactacatagtttggaaacatcactctgattgtaagctgaatgttaacacactagctgcattgtaaagaaacaaattgaaactgggtcttttcacatattgtgatggacaagctagtattcttgtctttggacttcaacagaagacacacttgtacgaatgtagatttatttttttaaaaaaaaaaaagcaaagctttctgccagactgagggtgctttttggggggtgggagaaatgaactgacagataaacagtaactcagcgtaagtgacctgtggatcatcagtagtacccaagcatggtcctgaacagtgtattagcagagctttagtttatctcagtcctggatgggagagagagggaggagtaaaactgggcaagacaaagagccctggatcgttgaattgatagtttaatttctgctgttggctgttaataatttggattatttatgtttataaatgatacagatctgtttacaaggtttgtagatactttttttgttcctgttcatagatgggaagcttccttataactgatgcagagaaaaattagtccttcaaatactgctgtattttcagg

SEQ ID NO: 2604 - protein, 1258 aa, Homo sapiens
  ref <308>: DATABASE ACCESSION NUMBER: SWISS-Prot / P20020
  ref <309>: DATABASE ENTRY DATE: 2002-06-15
MGDMANNSVAYSGVKNSLKEANHDGDFGITLAELRALMELRSTDALRKIQESYGDVYGICTKLKTSPNEGLSGNPADLERREAVFGKNFIPPKKPKTFLQLVWEALQDVTLIILEIAAIVSLGLSFYQPPEGDNALCGEVSVGEEEGEGETGWIEGAAILLSVVCVVLVTAFNDWSKEKQFRGLQSRIEQEQKFTVIRGGQVIQIPVADITVGDIAQVKYGDLLPADGILIQGNDLKIDESSLTGESDHVKKSLDKDPLLLSGTHVMEGSGRMVVTAVGVNSQTGIIFTLLGAGGEEEEKKDEKKKEKKNKKQDGAIENRNKAKAQDGAAMEMQPLKSEEGGDGDEKDKKKANLPKKEKSVLQGKLTKLAVQIGKAGLLMSAITVIILVLYFVIDTFWVQKRPWLAECTPIYIQYFVKFFIIGVTVLVVAVPEGLPLAVTISLAYSVKKMMKDNNLVRHLDACETMGNATAICSDKTGTLTMNRMTVVQAYINEKHYKKVPEPEAIPPNILSYLVTGISVNCAYTSKILPPEKEGGLPRHVGNKTECALLGLLLDLKRDYQDVRNEIPEEALYKVYTFNSVRKSMSTVLKNSDGSYRIFSKGASEIILKKCFKILSANGEAKVFRPRDRDDIVKTVIEPMASEGLRTICLAFRDFPAGEPEPEWDNENDIVTGLTCIAVVGIEDPVRPEVPDAIKKCQRAGITVRMVTGDNINTARAIATKCGILHPGEDFLCLEGKDFNRRIRNEKGEIEQERIDKIWPKLRVLARSSPTDKHTLVKGIIDSTVSDQRQVVAVTGDGTNDGPALKKADVGFAMGIAGTDVAKEASDIILTDDNFTSIVKAVMWGRNVYDSISKFLQFQLTVNVVAVIVAFTGACITQDSPLKAVQMLWVNLIMDTLASLALATEPPTESLLLRKPYGRNKPLISRTMMKNILGHAFYQLVVVFTLLFAGEKFFDIDSGRNAPLHAPPSEHYTIVFNTFVLMQLFNEINARKIHGERNVFEGIFNNAIFCTIVLGTFVVQIIIVQFGGKPFSCSELSIEQWLWSIFLGMGTLLWGQLISTIPTSRLKFLKEAGHGTQKEEIPEEELAEDVEEIDHAERELRRGQILWFRGLNRIQTQMDVVNAFQSGSSIQGALRRQPSIASQHHDVTNISTPTHIRVVNAFRSSLYEGLEKPESRSSIHNFMTHPEFRIEDSEPHIPLIDDTDAEDDAPTKRNSSPPPSPNKNNNAVDSGIHLTIEMNKSATSSSPGSPLHSLETSL

SEQ ID NO: 2605 - DNA, 781 bp, Rattus norvegicus
  ref <308>: DATABASE ACCESSION NUMBER: EMBL / J05122
  ref <309>: DATABASE ENTRY DATE: 2000-03-04
tgtggatctttccagaacagcagttgcaatcactatgtctcaatcctgggtacccgccgtgggcctcactctggtgcccagcctggggggcttcatgggagcctactttgtgcgtggtgagggcctccgctggtatgctagcttgcagaaaccctcctggcatccgcctcgctggacactcgctcccatctggggcacactgtattcggccatggggtatggctcctacataatctggaaagagctgggaggtttcacagaggaggctatggttcccttgggtctctacactggtcagctggctctgaactgggcatggccccccatcttctttggtgcccggcagatgggctgggctttggtggacctcatgcttgtcagtggggtggcaaccgccactaccctggcttggcaccgagtgagcccaccggctgcccgcttgctgtatccttacctggcctggctggcctttgccaccatgctcaactactatgtatggcgtgataactctggtcggcgagggggctcccggctcacagagtgaggacacctagccatcaggaatgcagccctgccagccaggcatcatgggttgaggtcatcctgctttcatgaccattgggcctgctggtctacctggtcttagtccaggaagccaccaggtaggtcaaggtggtcagtgctaagtcccatgcggggacagttgtacctgcttttctgcactgctgcaggcgtgccctaggagcatggggcctttaaagctaaataaagtctttaactt

SEQ ID NO: 2606 - protein, 169 aa, Rattus norvegicus
  ref <308>: DATABASE ACCESSION NUMBER: SWISS-Prot / P16257
  ref <309>: DATABASE ENTRY DATE: 2001-10-16
MSQSWVPAVGLTLVPSLGGFMGAYFVRGEGLRWYASLQKPSWHPPRWTLAPIWGTLYSAMGYGSYIIWKELGGFTEEAMVPLGLYTGQLALNWAWPPIFFGARQMGWALVDLMLVSGVATATTLAWHRVSPPAARLLYPYLAWLAFATMLNYYVWRDNSGRRGGSRLTE

SEQ ID NO: 2607 - DNA, 4057 bp, Rattus norvegicus
  ref <308>: DATABASE ACCESSION NUMBER: EMBL / J05166
  ref <309>: DATABASE ENTRY DATE: 2000-03-04
aaaagagttgggagaagttgggagcggcgggggcgcgccccggggtgggcaccgggaaatcgtcgggagcgcgcgagggttccggaggatcaggggagacccggagacccccgggacacgaaatctagagctagcgggttatgcctccaccttgttgccctgaaagccgaagcgacagtgagaagggctaagatttggccatgagcagcgcccccaggcgccccgcctcgggcgcagattctttgcacacgccagagccagagagcctgagccccggaacacctgggttccctgagcaagaggaggaagatgaacttcgtaccttaggtgtggagcggttcgaggagatcctccaggaagctggatccagaggaggagaagagccaggccgcagctatggggaggaagactttgaataccaccgccagtcctcccaccatatccatcatccactctccacccacctgcctcctgacgcccgccgtcgcaagactccccagggcccaggacggaaacctcggaggcgccctggagcctctcccactggagagacccccactattgaggaaggggaggaagatgaggatgaagtcggtgaagctgaagggttcagagctcccccgcaacaaccatctcctgcctcttcaccctctgcagttcagttttttctccaagaggatgaaggtacagataggaaggcagagagaaccagcccatctccccctacacagacgccccaccaggaagcagctccccgggccagcaaaggggcacagacaggaactctggtggaggagatggtggccgtggccagcggcacggctggaggtgacgacggaggtgctgcagggcgccccctgaccaaagcccagcctggacatcgaagttacaaccttcaggagagaaggcgaattggcagtatgacaggggtggagcaggccctgctgcccagggtccctactgatgagagtgaggctcagacgctggccacagctgacctcgacctcatgaaaagtcaccggtttgaggacgttccgggggtacggcgacatttggtgaggaagaatgccaaagggtctacacaggctgcccgggaaggccgagagcctggccccacacctcgggcacgaccacgggccccccataagcctcatgaggtgttcgtagagctgaatgaattgcagttggacaaaaaccaggagcctcagtggcgggagacagcccggtggataaaatttgaggaggacgtggaagaggagactgagcgctggggcaagcctcacgtggcatcactgtccttccgcagcctcctggagctccgcaggacactggcccatggagctgtgctcttggacctcgatcagcagaccctgcctggggtggcccatcaggtggtcgagcagatggttatctctgaccagatcaaagcagaggacagagccaatgtgctacgagcccttctgctgaaacacagccacccaagtgatgagaaagaattctccttcccccggaacatctcagcgggctctctgggctctctcctggggcatcaccacgcccaggggactgagagtgatcctcacgtcactgagcctctcatcggtggtgttcctgagacccggctggaggtggatagagagcgtgagctgccgcccccagccccacctgcaggtattacccgctccaagtccaagcatgagctgaagctgctggagaagatccctgagaatgcagaggccacagtggtcctcgtgggctgtgtggagttcctctcccgccccaccatggcctttgtgcgcctgcgggaggctgtggaactggatgcagtactggaggtgcctgtgcctgtgcgcttcctcttcctgctgctggggcccagcagcgccaacatggactaccatgagattggccgatccatctccaccctcatgtctgacaagcaattccacgaggcagcctacctggcagatgaacgggatgacttgctgactgctatcaatgccttcctggactgcagtgttgtgctaccgccttctgaagtgcagggcgaggagctgctgcgttctgttgcccatttccagcgccagatgctaaagaagcgagaggagcagggccgcctgctgccccctggtgctgggctagagcccaagtctgcccaagataaggcactcctgcagatggtagaggtggcaggtgcagctgaagatgatccccttcggaggacaggccggccctttggggggctgatccgtgacgtgcggcggcgctacccgcactacctgagtgacttccgagatgcactagacccccagtgcctggctgctgtcattttcatctactttgccgccctgtcgcctgccatcacttttggggggctactgggggagaagacacaggacctgataggagtgtcagagctgatcatgtccacagcgctccagggagtgatcttctgcctgctgggcgcccagccactgctggtgatcggcttctcggggcctctgctggtcttcgaggaggccttcttctcgttctgcaagagcaaccagttggagtacttggtgggccgagtttggattggcttctggctggtgctcctggccctgctcatggtggctctggaggggagcttcctggtccgctttgtctcccgattcacccaggagatctttgccttcctcatatcactcatcttcatctatgagaccttctataagctgatcaagatctttcaggagcaccccctccatggctgctcagtctccaacgactcagaggcagacagcagcagtaacaatatgacttgggcagcaaccacactggcaccagacaacagcagtgcgtctgggcaggagaggccccggggccagcctaacactgccttgctatcactggtgctgatggccggcactttcttcatcgccttcttcctgcgcaaattcaagaacagccggttcttccctggccggatccggcgggtaattggggactttggggtgcccatcgcgatcctcatcatggtgcttgtggattacagtattgaggatacctacacccagaagctaagtgtgcccagtgggttctcagtgacagccccagacaagcggggctgggtcatcaacccccttggagagaagactcctttccctgtgtggatgatggtggccagcctgttgcctgccgttctggtgttcatcctcatcttcatggagacacagatcaccacgttgatcatctccaagaaagagcggatgcttcagaagggctctggcttccaccttgatctgttgctcattgtagccatgggtggcatctgtgccctctttggcctgccttggttggctgctgccactgtccgctctgtcactcatgccaatgcactcactgtcatgagcaaggctgtggcacctggtgacaaacccaagattcaggaagtcaaggagcagcgggtgaccgggctgctggtggccctgcttgtgggactctccatggtcattggggacctactgcggcagatccccctggctgtgctctttggcattttcttatacatgggagttacttcccttaatgggatccaattctacgagcggttgcacctgctactcatgccgcccaaacaccacccagatgttacctatgtcaagaaggttcggaccatgcggatgcacctgttcactgccttgcagctgctctgtctggccctgctttgggcggtcatgtccacagctgcttccctggccttccccttcatcctcatcctcacagtgcctttgcgcatggtggtacttacccggatcttcactgagcgagaaatgaaatgtctggatgctaatgaggcagagccagtgtttgatgagtgtgaaggtgtggacgagtacaacgagatgcccatgcctgtgtagctgctgtccagaggcatagcagagggactaaggggcaggggctggggggctggggagctggggctcccctcctcctgtccctcctcatttttatttaagtgaataatttaaagcccccttgtccccaccctgcagtaaagtgcttcaacccc

SEQ ID NO: 2608 - protein, 1234 aa, Rattus norvegicus
  ref <308>: DATABASE ACCESSION NUMBER: SWISS-Prot / P23347
  ref <309>: DATABASE ENTRY DATE: 2002-06-15
MSSAPRRPASGADSLHTPEPESLSPGTPGFPEQEEEDELRTLGVERFEEILQEAGSRGGEEPGRSYGEEDFEYHRQSSHHIHHPLSTHLPPDARRRKTPQGPGRKPRRRPGASPTGETPTIEEGEEDEDEVGEAEGFRAPPQQPSPASSPSAVQFFLQEDEGTDRKAERTSPSPPTQTPHQEAAPRASKGAQTGTLVEEMVAVASGTAGGDDGGAAGRPLTKAQPGHRSYNLQERRRIGSMTGVEQALLPRVPTDESEAQTLATADLDLMKSHRFEDVPGVRRHLVRKNAKGSTQAAREGREPGPTPRARPRAPHKPHEVFVELNELQLDKNQEPQWRETARWIKFEEDVEEETERWGKPHVASLSFRSLLELRRTLAHGAVLLDLDQQTLPGVAHQVVEQMVISDQIKAEDRANVLRALLLKHSHPSDEKEFSFPRNISAGSLGSLLGHHHAQGTESDPHVTEPLIGGVPETRLEVDRERELPPPAPPAGITRSKSKHELKLLEKIPENAEATVVLVGCVEFLSRPTMAFVRLREAVELDAVLEVPVPVRFLFLLLGPSSANMDYHEIGRSISTLMSDKQFHEAAYLADERDDLLTAINAFLDCSVVLPPSEVQGEELLRSVAHFQRQMLKKREEQGRLLPPGAGLEPKSAQDKALLQMVEVAGAAEDDPLRRTGRPFGGLIRDVRRRYPHYLSDFRDALDPQCLAAVIFIYFAALSPAITFGGLLGEKTQDLIGVSELIMSTALQGVIFCLLGAQPLLVIGFSGPLLVFEEAFFSFCKSNQLEYLVGRVWIGFWLVLLALLMVALEGSFLVRFVSRFTQEIFAFLISLIFIYETFYKLIKIFQEHPLHGCSVSNDSEADSSSNNMTWAATTLAPDNSSASGQERPRGQPNTALLSLVLMAGTFFIAFFLRKFKNSRFFPGRIRRVIGDFGVPIAILIMVLVDYSIEDTYTQKLSVPSGFSVTAPDKRGWVINPLGEKTPFPVWMMVASLLPAVLVFILIFMETQITTLIISKKERMLQKGSGFHLDLLLIVAMGGICALFGLPWLAAATVRSVTHANALTVMSKAVAPGDKPKIQEVKEQRVTGLLVALLVGLSMVIGDLLRQIPLAVLFGIFLYMGVTSLNGIQFYERLHLLLMPPKHHPDVTYVKKVRTMRMHLFTALQLLCLALLWAVMSTAASLAFPFILILTVPLRMVVLTRIFTEREMKCLDANEAEPVFDECEGVDEYNEMPMPV

SEQ ID NO: 2609 - DNA, 8277 bp, Homo sapiens
  ref <308>: DATABASE ACCESSION NUMBER: EMBL / U76667
  ref <309>: DATABASE ENTRY DATE: 2000-03-10
gtaggcggagaggtggtggcgggggacggccagggccgcagagggaggaagggagggggaaggagaggggggaactcgggactcgagcggggagggagtggaagtggaggaaagggcggagactggggcgcggggaaccgcggtcttggggagaaggatggggaggcggatggagtgctggtcggaagcgggcattccggggtccccttctcagagttccctaaagccagggtgccgcgccccctgccaccaggagggggtagtctccccgaggcgccgccggccctcccactccccggctggctccagaccacccctcccctccggcccccccgcatagtccttcagtcccgtccggggcgcccagactgggggttgcccggggcccccatccccaatctccgggttgagaggcgaagccaggaaaggcgggtggcgggtaaggtcgggacaaggggtcagacagaagagggagcagctgggtgggaatgggaaagatgagcccggagagttggacctgactcccggggtcggtttgtccaggcggggagttctgtgctgggtgtgagaggcggcactgcctgaaacccagggtctactttatcccccttcgtttcccccgccagccccacatggaagagctgcggaatttacgagttcacttggggggtggttaatgcccaagtgggggtccgaggtgctaatcccttggtcaaggggagagatactaatcctctgggccggtcggggctggtcccgggaatgtgcccctacccggattatcggcaccgatgctctggacagaagctgctttgtgttctgggacagcaggggagggggtgcagaggagtgtggaggagcgcgacgagggcacagcctgaggtgggagtgggcgcctgcaggtgctctgggcggactctccccacacccttcccagactgggtgcactcacgctcacccacaccacccgccctggctgaaggcctgctgagggggaggggaagagcgtggttagccaagttggagtgcttgccaagaatgtgttgccaggctccccatcctgggtgacccccccagacctatattgtttgacgctacactgacttgtcttactcctaagtcaggcacccccagtccccagcaacacactgggagcatgggttgctgggtaccgtcactttttgccagtcttgggtgccccctgtgctgacccgctaggaatgcgccccctatttgcagggattgggctccctcctgcagctccttctctgcccccaccacacagtgtcctccccagactccctacagtcacagtcaggagggtggcagcactgccactcagattttcctggctccaggctctagaggggcgggatccagactgcccctcagaggcagaacctcaaggttgcggtgcccaccccctcccagcccatcacatgcccctcccccattataaagctctgcccagcccatgcccaccttctgtgccttcctctctctcagtgagtgagtggagttgagctcctgccctccacccagccagcctgcttccctcctgccggtccccaaggacctgggggagggaagcctcctgccggcctgtactggggagggggcaccccctccctgcaggggcatcttgggctctctccagagttcttccattcgtctgcttcctgtctcggcagcccggccccggctccacggggtgtctcaccctccccaccacaccctctctggtctcaggcacctctggtgggtgccctgaccctgcgaggctccgttgtctgcctgggccttcactcccctctttccccagctcattatcactccctccctcatctttgttgctttctctccgggcctgggccttgactcctttctccctcatttttcttgcggcctttcccacctcctctctcctcctccctctactcagcctctcggcccttttcggcccccctcgcctcagtcctctcctgtctccttgttcttctcttttcttcctataaataactctcctctgtgctgtggctgccgctaagggccactctgaggcccttcatactccaggaggatccccagcagcgcagcctgcgcgtggtggctcctgccctcccagggctctcgatggtgatcaggcctctcccccatccaggttatgcctccgcctcgttgccctgaaagccgcagcgacagcgaaaagggctaagattcggccatgagcagcgcccctcggcgccccgccaagggcgcagattctttctgtacggtgagtgtggcccccaggtcgccagcccaaccttccctccctgggcagccttgggtgctccggccaagggtcctcgccaaccaggggtgtgagcgtggagactgggaggatgctgccatccctaccctgactttgcatgatggtcgtagggggggatgggtagtgggggtatcagacgtcttccagtcctggggagggagttgaggctgttacctgaagacctaggtagcttagcctcagcggttgaggaactttgagaaccctgggtctctcacccagcaacccgtctcagacccggctggccttagaggcgcaggtcaagtctgcacgcgggccagggttctgggcggagctcgcctgccacgactggccacgccccctgcccacgtgccacccaggcccgcccctccctgcccccacgtggccaccgctccacatggccccctttggattttcctaaggagtcttaatgattaaccccgtgccacaatcagctccgctattggtcacactggcccagaggggcacgtgactgggaaggggcacaggctggtcccctccccctccttctcaggttcacccctgccggccatggacttcctcctgcggcctcaggtgcgaggggtctgcgaccctctctccccatggcggcaagctccctgcgcctctccccgtcccctcgtcccacggggctgcttctggtgggagtggggctgggcgcttaggggagccaggagatggacaggagccttcctcacagaggggagaagccagccccctggcccgctcaccttctcttatccggtgttctgccagtcccagctgctccagtccccacctcgcccctaagacccgcccttcaccccagccctccccgcgctcttccttgttctggctgctggcaccgctatggagggggctgcatacccccgcccttggagatcccgatgcccttcaggtccagaagctcttgagcaaatatttggcggcgcctggagctgagaccgtgggtgggtggggggctggaccaaggctgcctggccaggcggctgccgcttagctgggctgagctcttacaagcgccgcattccctgccggctgtgccggccggccgctgctccgcgcccgcaggatgactcaggtgggggctgtgggggtggggtgaggggtggggctagggacctggcccagggctcgggccgggggcctgggggctgggggagctctcctgggggctgaagggcatccattccggtccctgcggggctgggtttgtttgactcggacaggctctgggtcggttagcttggcgccgccagaagttactttttgggctcagcagttgtcctcaggccaactggagtttcttcactatctgtcatgtgaacttcccggttcacacgccctccctccaggctgcagatgggctggacacacgggatttcttccacctgccctgaactgactacacagccaagggggctgggctgggatgagggtagctcagaacccaggggacagctgctggggggactgggtctctgcatctgagggggcagactgctggggggacactgggtcactgtgtttgaagggatgtctactggtagggtgactggcttcctgcatttgagggggcagactgcttgggaggactgggtccctatatttgtttcctttttttttgtttttgttttgagacggagtctcactctgtcacccaggctggagtgcagtggcacgatcttggctcactgcaacctccgcctcccaggttcaagtaattctcctgcctcagcctcctgagtagctgggattactggtgtccgccaccacgcctggctaatttttgtgtttttagtagagatggggtttcaccatgttggtcaggctggtcttgaactcctgacctccagcaatccacccacctcagcctcccaaagtgctgggattacaggtgtgagccactgtgcctggcctgggtccctatatttaagggacagctgctggggggatatagagccaccagcattagaggagatagctgctggcgggggagggttcctgggtctctggcactgggaagggtgaggtttcggggtacaattcccagtgagccctgtgtgttttctctctgccttcttcctcacagccagagccagagagcttgggccctgggacgcctgggttccccgagcaggaggaagacgaacttcaccgcaccctgggcgtggagcggtttgaggagatcctacaggaggccgggtctcgtggaggggaggagccaggccgcagctatggggaggaagactttgagtgtgagggggcaggcaggggagggggaggtggggggatcaggtttgactgtccagcaaagaagggactggggtcctagtgggaggagtggggctagggggcaggatggcaggggagggacactgtgcctgccacagccaagtccccctcctccctgcagaccaccgccagtcctcccaccacatccatcacccactgtccacccacctgcctccggatgcacgccgccgcaagacaccccagggcccaggacggaagcctcgaaggcgcccgggagcctccccgactggagaaaccccgaccattgaggagggggaggaagatgaggatgaggccagcgaggctgagggggcccgggctctcactcagccgtcccctgtctccacaccctcctcggtgcaggtgcgctgggtgcgggctcctagggaatgtcggcagggccctggcctggtcactcctgcccatgtgggtccctgttacagttctttctccaagaggatgacagtgctgaccggaaggcagagaggaccagtccatcttcccctgcaccactgccccaccaggaggcgactcctcgggcctccaaaggggcccaggctgggtaagtacaccccaatcaacagtgtccccaacagacacttcccctgctaggatagtgaggtgatgctggaacaaagcatgagccttggaatcaccaggccagggttcaaatcccaggcccgcactcactggctgggcaagtaacttaattaagctctccaagccccaggttcctcatcagaaaccaagcataacagaacgtttctcactgggcggctgtagggattaagggtggtgtgaattaaagttctaagtatggtttagcctggcagagaacacgcgctgcctaagctgcctcccacccctgacccgtctcccacccctgcctgtggtgtagtgggagcaatagccagcactggctcaggtactggactggtgacctcccagcacttgctggaggccccagggttcaagaggcaaaggagaccccctctccttggggcactgccaacacacgctggttggaaaccagatgttatcatgtgagatggcatcagcatgttgtcactgcacccagtggctggttcaggcaaagtgtcagtaccagtggatgattggcatttgggggaaggcttcctggagaaaatgactttgaactaggtctcaaggtcactactatcacggacctgttgttttctgggtgccaggcagcgtgaagggctgcgggaagtgaagggcatgttgtcccctctgggagcgcataacctgctgggaccgtggcacagatgcgggcggcgggttacagcggccttaggggcgccaggatggcagggaggaggctggggcttccgagaaagcctggcatcaggaaagggtcggatttgtgggccagggcacgtgggggctaggagagcctggtcatgggaggggactctgatgttgagtcagagcttggagctctgggggcccttgatgttgagagagaggggtaggaccacgtggcagggccctggccacccagtgtggcagagagaagggagagagcagaagctggcgtctgtgaagcctgaggcttacccctcctcccagggcaggaagctgtctgccatctccaaggcccggtgccacggactttattcctcttgattaaacataggcccctgtgaacctctgagtcccatgtctagggatgtgccagggggtgagggggcagggggatgaatgctgactgtcaggaagcagcgtcctgagctccttttctgcaccaggacctgcactgggacttttccaaaatctcacccctcatggcaccgcaaaggctggtctcagccctggctgctgaggagcagttgacgttcgcagtggccgttcagaggggcctcggggtgaccgtttggggctgcacagccagaaaagggtggagcttggggttcggatgctggcagtctgcatccagaatcctccccgtccccgtgcccgcacctcccgggagtgggagctaggagggcctggagtccgatgtgggtcccctccccaccgcctgcgtgggtgctgggcgtcggggaggaggccaggtttctcgggctcacggccattctgtctgcctagaacccaggtggaggaggcggaggcggaggcggtggcggtggccagtggcacagcagggggtgacgacgggggtgcctcggggcgccccctgcccaaagcccagcctgggcaccgcagctacaaccttcaggagaggaggcgcatcgggagcatgactggggctgagcaggcactgctgccccgggtccccacggatgagattgaggcccagacgctggccacggccgacctagacctcatgaagagtaagtgctgggccttggccaagcccggcactggtgggcaaaggagtgagagaaagggggagcccaaccttggtcctctgcccccacaggtcaccggtttgaggacgttcctggggtgcggcggcacttggtgcggaagaatgccaaaggttccacacagagtggccgagaagggcgggagcctggccccacacctcgggcccgaccccgggccccccacaagccccatgaggtaccatgctctgcttcatgctcttccatcaacttcccacacgaccctgcccctacctctcagaccagctgtaatctcaagcctcagggttgccactgttgttttgttgttgtttgagacagtctcgctctgttgcccaggatggagtgcagtggtgtgatctcagctcactgcaacctctgcctcctgggtttaagcgattctcctgcctcagcctcctgagtagctgggattacaggcacctgctacgcccagctaatttttgtatttttagtagagatgcagttttaccatgttggccaggctgttctccaactcctagcctctaggaatccgcccgcctcggcctcccaaagtgctgggattacaggcatgagctgccgcgccgggcccagggatgccacctttggttgtgaaggttgtacactgcacaagagtgcagtatacacatcttagagcttattgacttgggcactgtgattatcctccccatggtggatgtcgttgatttgagtattgtggttataattcacgtctgttaaaaggcctgcaaaacgccattgctttcatatacagtggccatttctcaagtgctcactctgaggcacgtagcgtgccatgtgcttttccttttcatccttctgacagttctttgaggtgggtattattcccatttgacagatgagggaaactgcgtctcattggttagtcagttgtccagggtcccagctggctgtgggactggtgcgcctgtgcaccacccactgtgctcgtgctctccagggtcacttggctccctctgacaccactcacctgtgacacccaccccagggctcgctccggctctgtaccctgaaatgccttctcttctctccccaaggtgtttgtggagctgaatgagttgctcctggacaaaaaccaggagccccagtggcgggagacagctcgctggatcaaatttgaagaggacgtggaggaggagaccgagcgctgggggaagccccacgtggcctccctctccttccgcagtctcctggagctccgcaggaccctggcccatg

SEQ ID NO: 2610 - protein, 1241 aa, Homo sapiens [sequence omitted]

SEQ ID NO: 2611 - DNA, 4057 bp, Rattus norvegicus; identical to SEQ ID NO: 2607
  ref <308>: DATABASE ACCESSION NUMBER: EMBL / J05166
  ref <309>: DATABASE ENTRY DATE: 2000-03-04

SEQ ID NO: 2612 - protein, 1234 aa, Rattus norvegicus; identical to SEQ ID NO: 2608
  ref <308>: DATABASE ACCESSION NUMBER: SWISS-Prot / P23347
  ref <309>: DATABASE ENTRY DATE: 2002-06-15

SEQ ID NO: 2613 - DNA, 4057 bp, Rattus norvegicus; identical to SEQ ID NO: 2607
  ref <308>: DATABASE ACCESSION NUMBER: EMBL / J05166
  ref <309>: DATABASE ENTRY DATE: 2000-03-04

SEQ ID NO: 2614 - protein, 1234 aa, Rattus norvegicus; identical to SEQ ID NO: 2608
  ref <308>: DATABASE ACCESSION NUMBER: SWISS-Prot / P23347
  ref <309>: DATABASE ENTRY DATE: 2002-06-15

SEQ ID NO: 2615 - DNA, 8277 bp, Homo sapiens; identical to SEQ ID NO: 2609
  ref <308>: DATABASE ACCESSION NUMBER: EMBL / U76667
  ref <309>: DATABASE ENTRY DATE: 2000-03-10

SEQ ID NO: 2616 - protein, 1241 aa, Homo sapiens [sequence omitted]

SEQ ID NO: 2617 - DNA, 4057 bp, Rattus norvegicus; identical to SEQ ID NO: 2607
  ref <308>: DATABASE ACCESSION NUMBER: EMBL / J05166
  ref <309>: DATABASE ENTRY DATE: 2000-03-04

SEQ ID NO: 2618 - protein, 1234 aa, Rattus norvegicus; identical to SEQ ID NO: 2608
  ref <308>: DATABASE ACCESSION NUMBER: SWISS-Prot / P23347
  ref <309>: DATABASE ENTRY DATE: 2002-06-15

SEQ ID NO: 2619 - DNA, 4269 bp, Rattus norvegicus
  ref <308>: DATABASE ACCESSION NUMBER: EMBL / J05210
  ref <309>: DATABASE ENTRY DATE: 2000-03-04
taagctggtgcttacggacagagagccacactcgggctttctcgaagaggtaaaccaggtccctctgcagccatgtcagccaaggcaatttcagagcagaccggcaaagaactcctttacaagtacatctgtaccacctcagccatccagaaccggttcaagtatgcccgggttactcccgacacagactgggcccatctcctgcaggaccacccctggctgcttagccagagcttggtagtcaagccggaccagctgatcaaacgtcgaggaaagcttggtctagtcggggtcaacctctctctggatggagtcaaatcctggctgaaacctcgactgggacatgaggccaccgtcggcaaggccaaaggcttcctcaagaactttctgattgagcccttcgtcccccacagtcaggcggaggagttctacgtgtgcatctatgctacccgggaaggagactacgtcctgttccaccatgaagggggtgtggatgtgggcgatgtggacaccaaagcccagaagctgcttgtgggtgtggacgagaaactgaacgctgaagacattaagagacacctgttggtccacgcccccgaagacaagaaagaaatcctggccagcttcatctccggcctattcaatttctacgaagatctttacttcacctaccttgagatcaacccccttgtggtgaccaaagatggtgtctacatccttgacctggcggccaaggtggacgccactgctgactacatctgcaaagtcaagtggggtgatatagagttccctcccccctttgggcgtgaggcatacccagaggaagcctacattgcagacctggatgccaaaagtggggcgagcttgaagctgaccttgctgaaccccaaggggcggatctggaccatggttgccgggggtggcgcctctgtcgtgtacagtgataccatctgtgatcttggaggtgtcaacgaactggcgaattacggggagtactctggtgcccccagtgaacaacagacctatgactacgccaagaccatcctctcacttatgactcgagagaagcacccggatggcaagatcctcatcattggaggcagcattgcaaacttcaccaacgtggccgccaccttcaagggcattgtgagagcaattcgagattaccagggttccctgaaggagcacgaggtcaccatctttgttcgaagaggtggcccgaactatcaagagggattacgagtgatgggagaagttgggaagaccactggaatccccatccatgtctttggcacagaaactcacatgacggccattgtgggcatggcctgggcaccggccattcccaaccagccacccacagcggctcacactgccaacttcctccttaatgccagtgggagcacatcgacaccagcacccagcaggacagcgtctttttccgagtccagagctgacgaggtggcccctgcaaagaaagccaagccagccatgccccaagattcagtcccaagtccaagatccctgcaaggaaagagtgccaccctcttcagccgacataccaaggctatcgtatggggcatgcagacccgggctgtgcaaggcatgctggactttgactacgtgtgctcccgagatgagccttcagtggctgctatggtctacccgttcacgggggatcataagcagaagttttactggggacacaaggaaatcctgatccctgtcttcaagaacatggctgacgccatgaaaaagcatccggaggtagacgtgctgatcaactttgcatctctgcgatcggcttatgacagcaccatggagaccatgaactatgcacagatccggaccatagccatcatagcagaaggcatccctgaggctctcacacggaagctcatcaagaaggcagaccagaagggcgtgaccatcattgggccagccacggttgggggcatcaagcctggatgctttaagattgggaatactggtgggatgctggacaacatcctggcctccaaactgtatcgcccaggcagtgtggcctacgtctcgcgttcaggaggcatgtctaacgaactcaataatatcatctctcggaccacagatggtgtctacgagggtgttgccatcggcggggacaggtaccctgggtccacattcatggatcacgtgctgcgttaccaagacactccaggagtcaagatgattgtagttcttggggagatagggggtacagaagaatataagatctgccggggcatcaaggagggccgcctcaccaagccagtggtctgctggtgcatcgggacctgtgccaccatgttctcttctgaggtccagtttggccacgctggggcttgtgccaaccaggcttctgaaacggcagtagccaagaaccaggccttgaaggaagcgggagtgtttgtgccccgaagctttgatgagctcggagaaatcattcagtccgtgtatgaagatcttgtggccaaaggcgccattgtacctgctcaggaagtgccacctccaacagtacccatggactactcttgggccagggagctgggtttaatccgaaaacctgcctcattcatgaccagcatctgtgacgagcgggggcaggaactcatttatgcgggcatgcccatcaccgaggtcttcaaggaagagatgggcattggtggtgtcctgggcctcctctggttccagagaaggttgcccaagtattcctgccagttcattgagatgtgtctcatggtcaccgctgatcacgggccagctgtctccggggcccataacactatcatctgtgctcgggctgggaaggacctggtctccagcctcacctcagggctgctcaccattggggaccggtttgggggtgccttggacgcagcagcgaagatgttcagtaaagcctttgacagcggcattattcccatggagtttgtgaacaagatgaagaaggaggggaaactgatcatgggcatcggccatcgagtcaaatcgataaacaacccagacatgcgagtgcagatcctcaaagactttgtcaaacagcacttccccgccaccccgctgctcgactatgcactggaagtggagaaaatcaccacctcaaagaagccaaatcttatcctgaacgtggatggtttcatcggcgttgcgtttgtggacatgcttaggaactgtggctccttcacccgggaggaagctgacgagtatgttgacattggagccctcaatggcgtctttgtgctgggaaggagtatgggcttcatcgggcactatcttgaccagaagaggctgaagcaagggctgtatcgtcacccctgggacgacatttcctatgttctcccggaacacatgagcatgtaaccgagccagcagccctaccgtagaaaaaggaagacaaaaactccctcctcgacaatatagcggacagacagctggaaacagagcccgttatgggctgggcctggaatggaaatagccattgatgtgcaggcatggaaagccaacaccacaggcccattcagtccacacagagaagcttagtatttttttttatatatatatctatatatatataagcatagaaatttaaaaccaagccaatacttgtgacgtttgcgctgctacctgctgtatctattacatggaagactgtaagcaagcgctgtcagaataatgttcttctagggccttatgatgttgctttctttttttaattagttgaaaatttatttttcctctagaactagtggatccgacttttaagacttcaggatactatctgtttgtaggaccactgtctggtatcccacctcccactcatcttcacaccacatgaagaacactgtattaatctgattttttaggatctttttttttttttttgtgttatgtgttaagggtttatttagtatcccactgaaacgttctgtgtttcggaccaatgtctacttatgtcaaggggaggagggttggggccattgtacccttagccatcgtcacacatgtggagtagtaacttaaatgtaaagttgtaacatacaagtgtttaaaatggaaaccgcaaagcaaaaagctgtgaaacgtctcgtgtcttgtgttctctgtgttcatgcagctgacttgtctgttactgaagtgtgggtccaaagactcacatctgttccgcatctgtaacccacagagattctggcagctgccacctcagtctcttctctgtattatcatgtttggtttaaataaactagatagtaaaaa

SEQ ID NO: 2620 - protein, 1100 aa, Rattus norvegicus
  ref <308>: DATABASE ACCESSION NUMBER: SWISS-Prot / P16638
  ref <309>: DATABASE ENTRY DATE: 2002-06-15
MSAKAISEQTGKELLYKYICTTSAIQNRFKYARVTPDTDWAHLLQDHPWLLSQSLVVKPDQLIKRRGKLGLVGVNLSLDGVKSWLKPRLGHEATVGKAKGFLKNFLIEPFVPHSQAEEFYVCIYATREGDYVLFHHEGGVDVGDVDTKAQKLLVGVDEKLNAEDIKRHLLVHAPEDKKEILASFISGLFNFYEDLYFTYLEINPLVVTKDGVYILDLAAKVDATADYICKVKWGDIEFPPPFGREAYPEEAYIADLDAKSGASLKLTLLNPKGRIWTMVAGGGASVVYSDTICDLGGVNELANYGEYSGAPSEQQTYDYAKTILSLMTREKHPDGKILIIGGSIANFTNVAATFKGIVRAIRDYQGSLKEHEVTIFVRRGGPNYQEGLRVMGEVGKTTGIPIHVFGTETHMTAIVGMAWAPAIPNQPPTAAHTANFLLNASGSTSTPAPSRTASFSESRADEVAPAKKAKPAMPQDSVPSPRSLQGKSATLFSRHTKAIVWGMQTRAVQGMLDFDYVCSRDEPSVAAMVYPFTGDHKQKFYWGHKEILIPVFKNMADAMKKHPEVDVLINFASLRSAYDSTMETMNYAQIRTIAIIAEGIPEALTRKLIKKADQKGVTIIGPATVGGIKPGCFKIGNTGGMLDNILASKLYRPGSVAYVSRSGGMSNELNNIISRTTDGVYEGVAIGGDRYPGSTFMDHVLRYQDTPGVKMIVVLGEIGGTEEYKICRGIKEGRLTKPVVCWCIGTCATMFSSEVQFGHAGACANQASETAVAKNQALKEAGVFVPRSFDELGEIIQSVYEDLVAKGAIVPAQEVPPPTVPMDYSWARELGLIRKPASFMTSICDERGQELIYAGMPITEVFKEEMGIGGVLGLLWFQRRLPKYSCQFIEMCLMVTADHGPAVSGAHNTIICARAGKDLVSSLTSGLLTIGDRFGGALDAAAKMFSKAFDSGIIPMEFVNKMKKEGKLIMGIGHRVKSINNPDMRVQILKDFVKQHFPATPLLDYALEVEKITTSKKPNLILNVDGFIGVAFVDMLRNCGSFTREEADEYVDIGALNGVFVLGRSMGFIGHYLDQKRLKQGLYRHPWDDISYVLPEHMSM

SEQ ID NO: 2621 - DNA, 4297 bp, Homo sapiens
  ref <308>: DATABASE ACCESSION NUMBER: EMBL / X64330
  ref <309>: DATABASE ENTRY DATE: 1992-03-19
cccggattttgcggggttcgtcgggcctgtggaagaagccccgccacggacttcggcagaggtagagcaggtctctctgcagccatgtcggccaaggcaatttcagagcagacgggcaaagaactcctttacaagttcatctgtaccacctcagccatccagaatcggttcaagtatgctcgggtcactcctgacacagactgggcccgcttgctgcaggaccacccctggctgctcagccagaacttggtagtcaagccagaccagctgatcaaacgtcgtggaaaacttggtctcgttggggtcgacctcactctggatggggtcaagtcctggctgaagccacggctgggacaggaagccacagttggcaaggccacaggcttcctcaagaactttctgatcgagcccttcgccccccacagtcaggctgaggagttctatgtctgcatctatgccacccgagaaggggactacgtcctgttccaccacgaggggggtgtggacgtgggtgatgtggacgccaaggcccagaagctgcttgttggcgtggatgagaaactgaatcctgaggacatcaaaaaacacctgttggtccacgcccctgacgacaagaaagaaattctggccagttttatctccggcctcttcaatttctacgaggacttgtacttcacctacctcgagatcaatccccttgtagtgaccaaagatggagtctatgtccttgacttggcggccaaggtggacgccactgccgactacatctgcaaagtgaagtggggtgacatcgagttccctccccccttcgggcgggtggcatatccagaggaagcctacattgcagacctcgatgccaaaagtggggcaagcctgaagctgaccttgctgaaccccaaagggaggatctggaccatggtggccgggggtggcgcctctgtcgtgtacagcgataccatctgtgatctagggggtgtcaacgagctggcaaactatggggagtactcaggcgcccccagcgagcagcagacctatgactatgccaagactatcctctccctcatgacccgagagaagcacccagatggcaagatcctcatcattggaggcagcatcgcaaacttcaccaacgtggctgccacgttcaagggcatcgtgagagcaattcgagattaccagggccccctgaaggagcacgaagtcacaatctttgtccgaagaggtggccccaactatcaggagggcttacgggtgatgggagaagtcgggaagaccactgggatccccatccatgtctttggcacagagactcacatgacggccattgtgggcatggcctgggcaccggccatccccaaccagccacccacagcggcccacactgcaaactttctcctcaacgcccagcgggagacatcgactccagcccccagcaggacagcatctttttatgagtccatggtcgatgaggtcagggccgatgaggtggcgcctgcaaagaaggccaagcctgccatgccacaagattcagtcccaagtccaagatccctgcaaggaaagagcaccaccctcttcagccgccacaccaaggccattgtgtggggcatgcagacccgggccgtgcaaggcatgctggactttgactatgtctgctcccgagacgagccctcagtggctgccatggtctatcctttcactggggaccacaagcagaagttttactgggggcacaaagagatcctgatccctgtcttcaagaacatggctgatgccatgaggaagcacccggaggtagatgtgctcatcaactttgcctctctccgctctgcctatgacagcaccatggagaccatgaactatgcccagatccggaccatcgccatcatagctgaaggcatccctgaggccctcacgagaaagctgatcaagaaggcggaccagaagggagtgaccatcatcggacctgccactgttggaggcatcaagcctgggtgctttaagattggcaacacaggtgggatgctggacaacatcctggcctccaaactgtacccccaggcagctgtggcctatgtctcacgttccggaggcatgtccaacgagctcaacaatatcatctctcggaccacggatggcgtctatgagggcgtggccattggtggggacaggtacccgggctccacattcatggatcatgtgttacgctatcaggacactccaggagtcaaaatgattgtggttcttggagagattgggggcactgaggaatataagatttcccggggcatcaaggagggccgcctcactaagcccatcgtctgctggtgcatcgggacgtgtgccaccatgttctcctctgaggtccagtttggccatgctggagcttgtgccaaccaggcttctgaaactgcagtagccaagaaccaggctttgaaggaagcaggagtgtttgtgccccggagctttgatgagcttggagagatcatccagtctgtatacgaagatctcgtggccaatggagtcattgtacctgcccaggaggtgccgcccccaaccgtgcccatggactactcctgggccagggagcttggtttgatccgcaaacctgcctcgttcatgaccagcatctgcgatgagcgaggacaggagctcatctacgcgggcatgcccatcactgaggtcttcaaggaagagatgggcattggcggggccctcggcctcctctggttccagaaaaggttgcctaagtactcttgccagttcattgagatgtgtctgatggtgacagctgatcacgggccagccgtctctggagcccacaacaccatcatttgtgcgcgcaccgcggtggagctggtctccagcctcacctcggggctgctcaccatcggggatcggtttgggggtgccttggatgcagcagccaagatgttcagtaaagcctttgacagtggcattatccccatggagtttgtgaacaagatgaagaaggaagggaagctgatcatgggcattggtcaccgagtgaagtcgataaacaacccagacatgcgagtgcagatcctcaaagattacgtcaggcagcacttccctgccactcctctgctcgattatgcactggaagtagagaagattaccacctcgaagaagccaaatcttatcctgaatgtagatggtctcatcggagtcgcatttgtagacatgcttagaaactgtgggtcctttactcgggaggaagctgatgaatatattgacattggagccctcaatggcatctttgtgctgggaaggagtatggggttcattggacactatcttgatcagaagaggctgaagcaggggctgtatcgtcatccgtgggatgatatttcatatgttcttccggaacacatgagcatgtaacagagccaggaaccctactgcagtaaactgaagacaagaactcttcccccaagaaaaagtgtcagacagctggcagtggagcctgctttatttagcaggggcctggaatgtaaacagccactggggtacaggcaccgaagaccaacatccacaggctaacaccccttcagtccacacaaagaagcttcatattttttttataagcatagaaataaaaaccaagccaatatttgtgactttgctctgctacctgctgtatttattatatggaagcatctaagtactgtcaggatggggtcttcctcattgtagggcgttaggatgttgctttctttttccattagttaaacatttttttctcctttggaggaagggaatgaaacatttatggcctcaagatactatacatttaaagcaccccaatgtctctctttttttttttttttacttcccttgcttcttccttatataacatgaagaacattgtattaatctgatttttaaagactttttgtatgttacgtgttaagggcttgtttggtatcccactgaaatgttctgtgttgcagaccagagtctgtttatgtcagggggagggggccattgcatccttagccattgtcacaaaatatgtggagtagtaacttaatatgtaaagttgtaacatacatacatttaaaatggaaatgcagaaagctgtgaaatgtcttgtgtcttatgttctctgtatttatgcagctgatttgtctgtctgtaactgaagtgtgggtccaaggactcctaactactttgcatctgtaatccacaaagattctgggcagctgccacctcagtctcttctctgtattatcatagtctggtttaaataaactatatagtaacaggaattcctgca

SEQ ID NO: 2622 - protein, 1101 aa, Homo sapiens [sequence omitted]

SEQ ID NO: 2623 - DNA, 4269 bp, Rattus norvegicus; identical to SEQ ID NO: 2619
  ref <308>: DATABASE ACCESSION NUMBER: EMBL / J05210
  ref <309>: DATABASE ENTRY DATE: 2000-03-04

SEQ ID NO: 2624 - protein, 1100 aa, Rattus norvegicus; identical to SEQ ID NO: 2620
  ref <308>: DATABASE ACCESSION NUMBER: SWISS-Prot / P16638
  ref <309>: DATABASE ENTRY DATE: 2002-06-15

SEQ ID NO: 2625 - DNA, 4297 bp, Homo sapiens; identical to SEQ ID NO: 2621
  ref <308>: DATABASE ACCESSION NUMBER: EMBL / X64330
  ref <309>: DATABASE ENTRY DATE: 1992-03-19

SEQ ID NO: 2626 - protein, 1101 aa, Homo sapiens [sequence omitted]

SEQ ID NO: 2627 - DNA, 1269 bp, Rattus norvegicus
  ref <308>: DATABASE ACCESSION NUMBER: EMBL / J05405
  ref <309>: DATABASE ENTRY DATE: 2000-03-04
gataagtctggctatttctctccaggcacggagtgttggggtgtgccatctccccctttgggaccaccttgggttgccctcttagcaaagttggccttaccaaggagcagtcatcttggattatataatttgaatgagccaaggaccgaagtgagggcagcacaaacaactcagcaacaatgtcttcagaggtggagacctcggagggcgtcgatgagtcagagaacaactctacggcaccagaaaaggaaaaccataccaaaatggcagacctttctgagctcctgaaggaagggaccaaggaagcacatgaccgggcagaaaatacccagtttgtcaaagacttcttgaaaggaaacattaagaaggagctatttaagctggccaccactgcactttacttcacatactcagcccttgaggaggaaatggatcgcaacaaggaccacccagccttcgcccccttatatttccccacggaactacaccggaaggaagcactgatcaaggacatggagtatttctttggtgaaaactgggaggagcaggtgaagtgctccgaggctgcccagaagtatgtggatcggattcactacgtaggacagaatgagccagagctgctggtggcccatgcttacactcgttacatgggggacctttcgggaggccaggtgctgaagaaggtggctcagcgggcactaaaactccccagcactggggaagggacccagttctacctgttcgagcatgtggacaatgcccagcaattcaagcagttctaccgcgccaggatgaatgccttggacctgagtatgaagaccaaagagaggattgtggaggaggccaacaaagcctttgaatataatatgcagatattcagtgaactggaccaggctggctccatgctaacaaaagaaaccctggaggatgggctcccagtacatgatgggaaaggagatgtacgtaaatgccccttttatgctgctcagccagacaaaggtaccctgggaggcagcaactgccccttccggacagccatggctgtgctgaggaagcctagcctgcagctcattctggctgccagtgtggccttggtagctggactcttggcctggtactacatgtgaaggacctgtcatgttgtttgcatcctatcccaagtgacctcttccatccccatctccacctctgcccaaaactaccacctcaggtgacttttctaatgctgggtttgagaaaacaagcaaccaataaaagccagacactagc

SEQ ID NO: 2628 - protein, 315 aa, Rattus norvegicus
  ref <308>: DATABASE ACCESSION NUMBER: SWISS-Prot / P23711
  ref <309>: DATABASE ENTRY DATE: 2002-06-15
MSSEVETSEGVDESENNSTAPEKENHTKMADLSELLKEGTKEAHDRAENTQFVKDFLKGNIKKELFKLATTALYFTYSALEEEMDRNKDHPAFAPLYFPTELHRKEALIKDMEYFFGENWEEQVKCSEAAQKYVDRIHYVGQNEPELLVAHAYTRYMGDLSGGQVLKKVAQRALKLPSTGEGTQFYLFEHVDNAQQFKQFYRARMNALDLSMKTKERIVEEANKAFEYNMQIFSELDQAGSMLTKETLEDGLPVHDGKGDVRKCPFYAAQPDKGTLGGSNCPFRTAMAVLRKPSLQLILAASVALVAGLLAWYYM

SEQ ID NO: 2629 - DNA, 977 bp, Homo sapiens; identical to SEQ ID NO: 906
  ref <308>: DATABASE ACCESSION NUMBER: EMBL / D21243
  ref <309>: DATABASE ENTRY DATE: 1999-01-21

SEQ ID NO: 2630 - protein, 316 aa, Homo sapiens; identical to SEQ ID NO: 907
  ref <308>: DATABASE ACCESSION NUMBER: SWISS-Prot / P30519
  ref <309>: DATABASE ENTRY DATE: 2002-06-15

SEQ ID NO: 2631 - DNA, 1269 bp, Rattus norvegicus; identical to SEQ ID NO: 2627
  ref <308>: DATABASE ACCESSION NUMBER: EMBL / J05405
  ref <309>: DATABASE ENTRY DATE: 2000-03-04

SEQ ID NO: 2632 - protein, 315 aa, Rattus norvegicus; identical to SEQ ID NO: 2628
  ref <308>: DATABASE ACCESSION NUMBER: SWISS-Prot / P23711
  ref <309>: DATABASE ENTRY DATE: 2002-06-15

SEQ ID NO: 2633 - DNA, 977 bp, Homo sapiens; identical to SEQ ID NO: 906
  ref <308>: DATABASE ACCESSION NUMBER: EMBL / D21243
  ref <309>: DATABASE ENTRY DATE: 1999-01-21

SEQ ID NO: 2634 - protein, 316 aa, Homo sapiens; identical to SEQ ID NO: 907
  ref <308>: DATABASE ACCESSION NUMBER: SWISS-Prot / P30519
  ref <309>: DATABASE ENTRY DATE: 2002-06-15

SEQ ID NO: 2635 - DNA, 2296 bp, Rattus norvegicus
  ref <308>: DATABASE ACCESSION NUMBER: EMBL / J05470
  ref <309>: DATABASE ENTRY DATE: 2000-03-04
cctgcttgctcaggaactccctcagccgccgcgttctctagccgccgttgctgcccgggacgatgatgccgcgcctgctgtttcgtgcctggccccgctgcccctcgcttgtcctgggagcccctagtaggcccttaagtgctgtctcggggccggacgattatctgcagcacagcatcgtgcccaccatgcactaccaggacagcctgcccaggctgcctatccctaaacttgaagacaccatgaagagatacctcaatgcacagaagcctctcttggatgacagccagttcaggagaacagaagcgttgtgtaagaattttgagactggcgttgggaaggagctgcatgcccacctgcttgctcaggataagcagaataagcacaccagctacatctcaggcccctggttcgatatgtatttaactgctcgagactctatcgttttaaactttaatccatttatggcattcaatccggacccaaagtctgagtataatgaccagcttaccagggcaaccaacttgactgtttctgcagtccggtttctgaagacacttcaggctggccttttagaaccagaagtgttccacttgaacccttccaaaagtgacacagacgccttcaaaagactcattcgctttgttcctccctctctgtcctggtatggagcctacctggtcaacgcatatcccctggatatgtcccagtatttccggcttttcaattcaactcgtatacccagacccaatcgtgatgaactctttactgacaccaaggctagacacctcctggtcctaagaaaaggacatttctatgtctttgatgtcctcgatcaagatgggaacattgtgaatcccttagagattcaggcacatctaaagtacattctctcagacagcagccctgtgcccgagtttcctgtggcatatctgaccagtgagaaccgagatgtctgggcagagctcagacagaagttgatttttgatggcaatgaggaaaccctgaagaaagtggactctgctgtcttctgcctctgcctagatgacttcccgatgaaggatcttattcacttgtcacacaccatgctgcacggcgatggcacaaaccgctggtttgataagtcctttaacctcattgtagccgaggacggcactgctgcagtccacttcgagcactcgtggggggatggggtggcagtgcttaggtttttcaatgaagtgttcagagacagcactcagacccctgccatcactccccagagccagcctgccgccaccaactcctctgcgtctgtggagacgctcagcttcaacctcagcggtgctctcaaggctggcatcactgctgccaaggagaagttcgacaccacggtgaaaaccctcagcattgactccattcagttccagagaggtggcaaggagttcctgaagaagaagcagctgagccccgatgcggtggcccagctggccttccagatggccttcctgagacagtatggccagacggtggctacctatgagtcctgcagcactgcagccttcaagcacggccgcacagagactatccgcccagcctccatctttactaagagatgctccgaggcgtttgtcagggacccctccaagcacagtgtgggcgagcttcagcacatgatggctgagtgttccaaataccatggccagctgaccaaagaagcagcgatgggccagggctttgaccgacacttgtatgctctgcgctatctggcaacggccagaggactcaacctacctgagctctatctggatcctgcataccagcagatgaaccacaacatcctgtccaccagcactctgaacagcccagcagtgagccttgggggctttgcccctgtggtccctgatggctttggcattgcatatgctgttcacgatgactggataggctgcaatgtctcctcctactcaggacgcaatgcccgagagtttctccactgtgtccagaagtgcttggaagacattttcgatgctctagaaggcaaagccatcaaaacttagcttcctagtcgctgaaaagcctccattcttcctcatgaacatggatgttcatgtagctggaaggtgccatcttgtgcccaacaaaactaatcccaaggtgcttccacagccagtgctgcaggctgagctggaagagcccaactgaaggtagtgagaggtcgcagctgtaaagccctctttgttcaggagatagggtttggaaaactaactcagctgtatttattgtttaaatagaaataaaacctggtgttgcttag

SEQ ID NO: 2636 - protein, 658 aa, Rattus norvegicus
  ref <308>: DATABASE ACCESSION NUMBER: SWISS-Prot / P18886
  ref <309>: DATABASE ENTRY DATE: 1999-07-15
MMPRLLFRAWPRCPSLVLGAPSRPLSAVSGPDDYLQHSIVPTMHYQDSLPRLPIPKLEDTMKRYLNAQKPLLDDSQFRRTEALCKNFETGVGKELHAHLLAQDKQNKHTSYISGPWFDMYLTARDSIVLNFNPFMAFNPDPKSEYNDQLTRATNLTVSAVRFLKTLQAGLLEPEVFHLNPSKSDTDAFKRLIRFVPPSLSWYGAYLVNAYPLDMSQYFRLFNSTRIPRPNRDELFTDTKARHLLVLRKGHFYVFDVLDQDGNIVNPLEIQAHLKYILSDSSPVPEFPVAYLTSENRDVWAELRQKLIFDGNEETLKKVDSAVFCLCLDDFPMKDLIHLSHTMLHGDGTNRWFDKSFNLIVAEDGTAAVHFEHSWGDGVAVLRFFNEVFRDSTQTPAITPQSQPAATNSSASVETLSFNLSGALKAGITAAKEKFDTTVKTLSIDSIQFQRGGKEFLKKKQLSPDAVAQLAFQMAFLRQYGQTVATYESCSTAAFKHGRTETIRPASIFTKRCSEAFVRDPSKHSVGELQHMMAECSKYHGQLTKEAAMGQGFDRHLYALRYLATARGLNLPELYLDPAYQQMNHNILSTSTLNSPAVSLGGFAPVVPDGFGIAYAVHDDWIGCNVSSYSGRNAREFLHCVQKCLEDIFDALEGKAIKT

SEQ ID NO: 2637 - DNA, 2255 bp, Homo sapiens
  ref <308>: DATABASE ACCESSION NUMBER: EMBL / M58581
  ref <309>: DATABASE ENTRY DATE: 1999-07-02
cctgacgcagtgtcttgggcgctaacggcggcggcggccttgtgtttagactccagaactccccacttgccgcgttctcgccgccgcaggctcccgggacgatggtgccccgcctgctgctgcgcgcctggccccggggccccgcggttggtccgggagcccccagtcggcccctcagcgccggctccgggcccggccagtacctgcagcgcagcatcgtgcccaccatgcactaccaggacagcctgcccaggctgcctattcccaaacttgaagacaccattaggagatacctcagtgcacagaagcctctcttgaatgatggccagttcaggaaaacagaacaattttgcaagagttttgaaaatgggattggaaaagaactgcatgagcagctggttgctctggacaaacagaataaacatacaagctacatttcgggaccctggtttgatatgtacctatctgctcgagactccgttgttctgaactttaatccatttatggctttcaatcctgacccaaaatctgagtataatgaccagctcacccgggcaaccaacatgactgtttctgccatccggtttctgaagacactccgggctggccttctggagccagaagtgttccacttgaaccctgcaaaaagtgacactatcaccttcaagagactcatacgctttgtgccttcctctctgtcctggtatggggcctacctggtcaatgcgtatcccctggatatgtcccagtattttcggcttttcaactcaactcgtttacccaaacccagtcgggatgaactcttcactgatgacaaggccagacacctcctggtcctaaggaaaggaaatttttatatctttgatgtcctggatcaagatgggaacattgtgagcccctcggaaatccaggcacatctgaagtacattctctcagacagcagccccgcccccgagtttcccctggcatacctgaccagtgagaaccgagacatctgggcagagctcaggcagaagctgatgagtagtggcaatgaggagagcctgaggaaagtggactcggcagtgttctgtctctgcctagatgacttccccattaaggaccttgtccacttgtcccacaatatgctgcatggggatggcacaaaccgctggtttgataaatcctttaacctcattatcgccaaggatggctctactgccgtccactttgagcactcttggggtgatggtgtggcagtgctcagattttttaatgaagtatttaaagacagcactcagacccctgccgtcactccacagagccagccagctaccactgactctactgtcacggtgcagaaactcaacttcgagctgactgatgccttaaagactggcatcacagctgctaaggaaaagtttgatgccaccatgaaaaccctcactattgactgcgtccagtttcagagaggaggcaaagaattcctgaagaagcaaaagctgagccctgacgcagttgcccagctggcattccagatggccttcctgcggcagtacgggcagacagtggccacctacgagtcctgtagcactgccgcattcaagcacggccgcactgagaccatccgcccggcctccgtctatacaaagaggtgctctgaggcctttgtcagggagccctccaggcacagtgctggtgagcttcagcagatgatggttgagtgctccaagtaccatggccagctgaccaaagaagcagcaatgggccagggctttgaccgacacttgtttgctctgcggcatctggcagcagccaaagggatcatcttgcctgagctctacctggaccctgcatacgggcagataaaccacaatgtcctgtccacgagcacactgagcagcccagcagtgaaccttgggggctttgcccctgtggtctctgatggctttggtgttgggtatgctgttcatgacaactggataggctgcaatgtctcttcctacccaggccgcaatgcccgggagtttctccaatgtgtggagaaggccttagaagacatgtttgatgccttagaaggcaaatccatcaaaagttaacttctgggcagatgaaaagctaccatcacttcctcatcatgaaaactgggaggccgggcatggtgctcatgcctgtaatcccagcattttgagaggctgaggcgggtggatcacttgaggtcaggagtttgagaccaacctggccaacatggtgaaaccttgtctctactaaaaatg

SEQ ID NO: 2638 - protein, 658 aa, Homo sapiens
  ref <308>: DATABASE ACCESSION NUMBER: SWISS-Prot / P23786
  ref <309>: DATABASE ENTRY DATE: 2001-10-16
MVPRLLLRAWPRGPAVGPGAPSRPLSAGSGPGQYLQRSIVPTMHYQDSLPRLPIPKLEDTIRRYLSAQKPLLNDGQFRKTEQFCKSFENGIGKELHEQLVALDKQNKHTSYISGPWFDMYLSARDSVVLNFNPFMAFNPDPKSEYNDQLTRATNMTVSAIRFLKTLRAGLLEPEVFHLNPAKSDTITFKRLIRFVPSSLSWYGAYLVNAYPLDMSQYFRLFNSTRLPKPSRDELFTDDKARHLLVLRKGNFYIFDVLDQDGNIVSPSEIQAHLKYILSDSSPAPEFPLAYLTSENRDIWAELRQKLMSSGNEESLRKVDSAVFCLCLDDFPIKDLVHLSHNMLHGDGTNRWFDKSFNLIIAKDGSTAVHFEHSWGDGVAVLRFFNEVFKDSTQTPAVTPQSQPATTDSTVTVQKLNFELTDALKTGITAAKEKFDATMKTLTIDCVQFQRGGKEFLKKQKLSPDAVAQLAFQMAFLRQYGQTVATYESCSTAAFKHGRTETIRPASVYTKRCSEAFVREPSRHSAGELQQMMVECSKYHGQLTKEAAMGQGFDRHLFALRHLAAAKGIILPELYLDPAYGQINHNVLSTSTLSSPAVNLGGFAPVVSDGFGVGYAVHDNWIGCNVSSYPGRNAREFLQCVEKALEDMFDALEGKSIKS

SEQ ID NO: 2639 - DNA, 9852 bp, Rattus norvegicus
  ref <308>: DATABASE ACCESSION NUMBER: EMBL / J05510
  ref <309>: DATABASE ENTRY DATE: 2000-03-04
tggggtcacttccttcacacaggactttggcggaaatctctacacccgtgtctcgtcatccccttcgagagcattaactatttaaaaccaggagagaaagcgcacgccgagaggaggtgtgggtgttccgctcccatcctaacggaacgagctccctcttcgcggacatgggattgcccagcggctgctaacccctgtcctggtcctgatccctcaaaccggcgtggctccccggtcaccaaggagctgactacaaaggatttgcatccttggctgggagtccattggctacagagtgcctgacctgggtcaggcttttcaacaaggacatgtctgacaaaatgtctagtttcctacatatcggagacatttgttctctgtatgcagagggatctacgaatggatttatcagcaccttgggcttggttgatgaccgttgcgttgtacagccagaagctggggaccttaacaatccacccaagaaattcagagactgcctctttaagctatgtcctatgaatcgatattctgcacagaagcagttctggaaagctgctaagcccggggccaacagtacaacagatgcggtgctgctcaacaaattgcatcatgctgcagacttggaaaagaagcagaatgagacagaaaacaggaaattgctggggacggtcatccagtatggcaacgtgatccagctcctacatttgaaaagcaataaatacttaactgtgaataagaggcttcctgccctactggagaagaacgccatgagagtgacgttggatgaggctggaaatgaagggtcttggttttacattcagccgttctacaagctccgctccatcggagacagtgtggtcataggtgacaaggtagttttgaaccctgtcaatgctgggcagccgctacatgccagcagccatcagctggtggataacccgggctgcaatgaggtcaactccgtcaactgtaacacaagctggaaaatagtgcttttcatgaaatggagtgataacaaagatgacattctaaaaggaggtgatgtggtaagactcttccatgctgagcaagagaagtttctcacgtgcgatgagcacaggaagaagcagcacgtcttcctgaggacaaccggcagacagtcagccacgtcggccaccagctccaaagccctgtgggaagtggaggtagtccagcatgacccatgtcggggtggagctgggtactggaatagcctcttccggttcaagcacctggctacagggcattacttggcagcagaggtagaccctgactttgaggaagaatgcctggagtttcagccctcagtggaccctgatcaggacgcatctcggagcaggttgagaaatgcccaagaaaaaatggtgtactctctggtctctgtgcctgagggcaacgacatctcctccatctttgagctagaccccacaactctacgtggaggtgacagccttgtcccaaggaactcctatgtccggctcagacacctgtgtacaaacacctgggttcacagcacaaacatccccattgacaaggaagaggaaaaacctgtcatgctgaagattggtacctctcccctgaaggaggacaaggaagcttttgccatagtccccgtttctcctgctgaggttcgggacctggactttgccaatgatgccagcaaggtgctgggctccatcgctgggaagttggaaaagggcaccatcacccagaatgagagaaggtctgtcaccaagctgctggaagacttggtttactttgtcacgggtggaacgaactctggccaagacgtgcttgaagtagtcttctctaagcccaaccgagagcggcagaagctgatgagggaacagaatattctcaagcagatcttcaagcttttgcaggcccccttcacggactgcggggatggcccaatgcttcggctggaggagctgggggaccagcggcacgctcctttcagacacatttgccgactctgctacagggtcctgagacactcacagcaagactacaggaagaaccaggagtacatagccaagcagtttggcttcatgcagaagcagattggctatgatgtgctggccgaagacaccatcactgccctgctccacaacaaccgaaagctcctggaaaagcacatcaccgcagcagagattgacacgtttgtcagcctggtgcgaaagaacagggagcccaggttcttggattacctctctgacctctgtgtatccatgaataagtcaatccctgtgacccaggagctcatttgtaaagctgtgctgaatcccaccaatgctgacatcctgattgagaccaagttggttctttctcgttttgagtttgaaggcgtttccaccggagagaatgctctggaagctggggaagatgaggaagaggtgtggctgttctggagggacagcaacaaagagatccgtagcaagagtgttagggaattggcacaagatgctaaagagggacagaaggaagacagggatgtcctcagctactacaggtatcagctgaacctctttgcaaggatgtgtctggaccgccagtacctggccatcaatgaaatatccgggcagctggatgttgacctcatcctccgctgcatgtccgatgagaacctcccctatgacctcagagcatccttttgccgcctcatgcttcacatgcatgtggaccgagatccccaggagcaggtgacccctgtgaaatacgcccgtctgtggtcagaaattccctccgagatcgccattgacgactatgacagcagtggagcatcgaaggatgaaatcaaggagaggtttgctcagacgatggagtttgtggaggagtacctgagagatgtggtttgtcaaagattccccttttctgataaggagaaaaataagctcacatttgaggttgtgaacttagccaggaacctcatatactttggcttctacaacttttctgaccttctccgattaaccaagatcctcttggcaatcttagactgtgttcatgtgacaaccatcttccccattagcaagatgacgaaaggcgaagagaataaaggcagcaacgtgatgagatctatccatggagttggggagctcatgacccaggtggtgcttcggggaggaggctttttgcccatgactcctatggctgctgcccctgaaggaaatgtgaagcaggcagagccagagaaagaggatatcatggtcatggacaccaagttaaagatcattgaaatactccagtttattttgaatgtgagattggattataggatctcctgcctcctgtgtatatttaagcgggagtttgatgaaagcaattcccagtcatcagaaacatcctccggaaacagcagccaagaagggccaagtaatgtaccaggtgctcttgactttgaacacattgaagagcaagcagaaggcatctttgggggaagtgaggagaacacacctctggacttggatgatcatggtggcagaaccttcctcagggtcctgctccacttgacaatgcatgattacccacccctggtgtctggggccctgcagctcctcttccggcatttcagccagaggcaggaggtccttcaggccttcaaacaggttcaactgctggttactagccaagatgtggacaactacaaacagatcaagcaagacttggaccagctaagatccatcgtggagaagtctgagctctgggtatacaaaggccagggtcccgatgagcctatggacggagcctctggtgaaaacgaacataagaaaactgaggaggggaccagtaagccactgaagcacgaaagcaccagcagctacaactaccgagtggtgaaagagattctgattcgacttagcaagctctgtgttcaagagagcgcgtcggtgaggaagagcaggaagcagcagcagcgactgctgaggaacatgggtgcccatgctgtggtgctggagctgctgcagatcccctatgagaaggccgaagataccaagatgcaggagatcatgaggctggctcacgaatttctgcagaatttctgcgcaggcaaccagcagaaccaagctttgctacataaacacataaacctgtttctcaacccagggatcctggaagcagtgaccatgcagcacatcttcatgaacaacttccagctgtgcagtgagatcaacgagagagtggtccagcatttcgttcactgcatagagacccacggtcgaaatgtccagtatatcaagtttctccagactattgtcaaggccgaagggaaattcattaaaaagtgccaagacatggtcatggctgagcttgtcaattctggagaggacgtcctcgtgttctacaatgacagagcctctttccagactctgatccagatgatgcggtccgagcgtgaccggatggatgagaacagccctctcttcatgtaccacatccatctggtggagctcttggctgtgtgcacagagggcaagaatgtgtacacagagatcaagtgcaactccctgctcccgctcgatgacatcgttcgtgtggtcactcatgaagactgtatccccgaggttaagattgcttacatcaacttcctgaatcactgctatgtggacactgaggtggagatgaaggagatttacacaagtaatcacatgtggaagttgtttgagaatttcctcgtggacatctgcagggcctgtaacaacacaagtgacaggaagcatgcagactcggttctggagaagtacgtcactgaaatcgtgatgagcattgtcaccaccttcttcagctctcccttctcagaccagagtaccactctgcagactcgccagcctgtctttgtgcagctcctgcaaggcgtgttccgagtttaccactgcaactggttgatgccgagccagaaagcctcggtggagagctgtatccgcgtgctctctgacgtagccaagagccgggccatagccattcctgttgacctagacagccaagtcaacaacctcttcctgaagtcccacaacattgtgcagaaaacagccatgaactggcggttatcagcccgcaacgctgctcgtagagactctgtcctggcagcttccagagactaccgaaatattattgagaggttacaggacatcgtgtctgccctggaggaccgactcaggcccctggtccaggccgagctgtctgtgctcgtggatgttctacacagaccggaactgcttttccctgagaacacggatgccaggaggaaatgcgaaagtggaggtttcatctgcaagctcataaaacacaccaagcagctgctagaggagaatgaagagaaactgtgcattaaagtcttacagaccctcagggaaatgatgaccaaagatagaggctatggagaaaagcaaatttccattgatgaattggaaaatgccgagctgccacagccaccggaagctgagaactccacagaggagcttgaaccaagtccacccctgaggcaactggaagaccataaaaggggtgaggcactccggcaaattttggtcaaccgttactatggaaacatcagaccttcaggaagaagagagagccttaccagctttggcaatggtccactatcaccaggaggacccagcaagcctgggggaggagggggaggtcctgggtccggctccacaagccggggtgagatgagcctggctgaggttcaatgtcatctcgacaaggaaggcgcctccaatctggtcatcgacctcataatgaatgcatccagcgaccgagtattccacgaaagcattctcctggccatcgcacttctggaaggaggcaacaccactatccagcactcatttttctgccggctgacggaagataagaaatcagagaagttcttcaaggtcttttacgatcgaatgaaggtggcccagcaggaaatcaaggcgacagtgaccgtgaacaccagcgatttgggaaacaaaaagaaagatgatgaagtggaccgggatgccccatcccgaaagaaagccaaagagcccacaacacagataacagaagaggtccgggatcagctcttggaagcatctgctgccaccagaaaagcctttaccaccttccggagggaggccgaccctgatgaccattaccaatctggggagggcacccaggctacaacggacaaagccaaggatgacctagagatgagtgcagtcatcaccatcatgcagcctatcctgcgcttcctgcagctcctgtgtgaaaaccacaaccgcgatctgcagaatttccttcgttgccaaaataataagaccaactacaacttggtgtgtgagacactgcagtttctggactgtatctgtgggagcacaactggaggccttggtcttctcggactgtacataaatgaaaagaatgtagctcttatcaaccaaaccctggagagtctgactgagtactgtcaagggccttgccatgaaaaccagaactgcatcgccacccacgagtccaatggcatcgatatcatcacagccctcatccttaacgatatcaaccctctggggaagaaacggatggacctggtgttagaactgaagaacaatgcttcaaagctactcctggccatcatggaaagcagacacgatagtgaaaatgcagagaggatcctgtacaacatgaggcccaaggagctggtggaagtgatcaagaaggcctacatgcaaggcgaagtggagtttgaggatggggagaacggtgaggatggagcagcctcccccaggaacgtgggccataacatctacatcctcgctcaccagttggctcggcataacaaagaacttcaaaccatgctgaaacctggaggccaggtggatggcgatgaagctctggagttctatgcgaagcacacagcacaaattgagattgtcagactggaccgaactatggaacagattgtcttccctgtgcccagcatctgtgaatttctgactaaggaatcgaaacttcgaatatattacaccacagagagggatgagcaaggcagcaagatcaatgacttcttcctgcgctccgaggacctctttaatgagatgaactggcagaagaaacttcgagcccagcctgtcttgtactggtgcgcccgaaacatgtctttctggagcagcatctccttcaacctggccgtcctgatgaacctgctggtggcgtttttctacccatttaaaggagtgagaggaggaacactagagccgcactggtccggcctcctgtggacagccatgctcatctctctggcaattgtcattgcgctgcccaagccccatggcatccgggccttaattgcttctacaatcctacgactgatattttcagttggattacagcccacactgtttctgctgggagctttcaatgtctgcaataaaatcatcttcctgatgagctttgtgggcaactgtgggaccttcaccagaggctaccgagccatggttctggacgttgagttcctctatcatttgctgtatctactgatctgtgccatgggcctcttcgtacatgagtttttctatagtttgctgctttttgatttagtgtacagagaggagactttgcttaatgtcattaaaagtgtcacccgcaatggacggcccatcatcttgacagcggccctggctctgattctggtttacctgttctcaattgtgggctacctgttcttcaaggatgactttatcttggaagtagacaggttgcccaatgagacagctggtccagaaactggtgagagtttggccaacgatttcctgtactctgatgtgtgccgggtagagacgggggagaactgcacctctccggcacccaaagaagagctgctccctgtggaagaaacggaacaggataaggagcacacgtgtgagacactgctcatgtgcatcgtcaccgttctgagtcacgggctgcggagtgggggcggagtaggagatgtgctcaggaagccatccaaagaggagcctctgtttgctgcaagggtgatctatgacctcctcttcttcttcatggtcatcatcattgtcctgaacctcatttttggggtcatcatcgacacctttgctgacctgaggagtgagaagcagaagaaggaagagatcttaaaaaccacgtgcttcatttgtggcttggaaagggacaagtttgacaataagaccgtcacctttgaagagcacattaaggaagaacacaacatgtggcactatctgtgcttcatcgtgctggtgaaagtgaaggactccaccgagtacaccgggcccgagagctacgtggcagagatgatcagggaaagaaaccttgattggttccccaggatgagagccatgtccctggtcagcagtgactctgaaggggaacagaacgagctgaggaacctgcaggagaagctggagtccaccatgaagctggtcaccaatctttctggccagctgtcagaactaaaggaccagatgacagaacaaaggaagcagaaacaaagaattggccttctaggacatcctcctcacatgaatgtcaacccacagcagccagcctaagcaaatgagacggagggactgtactcaaccctttttaaattattgtcagcgtgggtctggctcttggttctgatctgccctctaaggttacatgtgcgcttagtacatttgtaaatactcggttttgtattgtatgtatatgattgcaattctcagaggtttggactttcgtattgtaattagctctgttggcatggtgacttgtcactcctgccaaaaatattaaaaatgccttttttggaaggactacagaaagtacctgatttgcacttgaaccagattatagatttaaaaagtatttgacatgtattttgttatttaaaactagaatagccagtatttatgttttttataaaactgtgcaatacaaattatgcaatcaccataactctgtaactcctgagtgtcttaagggagtgcgcatctttgaagctgatctgttaatacttatgtaataaatggttaaatatcaaatgatgatgctgctgccaaaattatattaatagcaagtttctggcccctgggcaattttgtaccttgtaattatcctatggtgatgctgtttctcgttgctaatggcattagtgcctcgtatcctagtgataactccaggtctgtgaaccattcaaacaacattcatttttgagacaaagcaactttagtttcaagggtaattttaagcttcaaaattaatcatttaaagtatttctttaagagagccatgttagaggctcacacgttagcttgaaaggagtcgatgaaataatttttttaaagggaactttttacacgacgtttggaataacagcatattgctgaccagtcagtgtcatctcccaggtgaattttgatgtcacgttatagtcaaatgagctagcttatggtttctagattctcttcatctgaaccaacatgatgcagtaggtgagaagttattatgcatatatacacatatacatccatataaggcaaagtaggagctgtccccttaggatgcatagctgcccccttagggtgcagagctcaacactgacagtgctgttctgagagagccacgtttgggttttatttctttgtcacatgatttcttttctggatgtgtgcaagtataacaggaagtgttttctacctgttgcttgttttgtacctgggtctcgttttactagaccatctctgcacaaaagtttaaaaaatgaaccgtaagcagagttctgaagcaagtcaagtttgtaagtgcatacctgaaattatttaataaatgacgcagaatact

SEQ ID NO: 2640 - protein, 2750 aa, Rattus norvegicus
  ref <308>: DATABASE ACCESSION NUMBER: SWISS-Prot / P29994
  ref <309>: DATABASE ENTRY DATE: 2002-06-15
MSDKMSSFLHIGDICSLYAEGSTNGFISTLGLVDDRCVVQPEAGDLNNPPKKFRDCLFKLCPMNRYSAQKQFWKAAKPGANSTTDAVLLNKLHHAADLEKKQNETENRKLLGTVIQYGNVIQLLHLKSNKYLTVNKRLPALLEKNAMRVTLDEAGNEGSWFYIQPFYKLRSIGDSVVIGDKVVLNPVNAGQPLHASSHQLVDNPGCNEVNSVNCNTSWKIVLFMKWSDNKDDILKGGDVVRLFHAEQEKFLTCDEHRKKQHVFLRTTGRQSATSATSSKALWEVEVVQHDPCRGGAGYWNSLFRFKHLATGHYLAAEVDPDFEEECLEFQPSVDPDQDASRSRLRNAQEKMVYSLVSVPEGNDISSIFELDPTTLRGGDSLVPRNSYVRLRHLCTNTWVHSTNIPIDKEEEKPVMLKIGTSPLKEDKEAFAIVPVSPAEVRDLDFANDASKVLGSIAGKLEKGTITQNERRSVTKLLEDLVYFVTGGTNSGQDVLEVVFSKPNRERQKLMREQNILKQIFKLLQAPFTDCGDGPMLRLEELGDQRHAPFRHICRLCYRVLRHSQQDYRKNQEYIAKQFGFMQKQIGYDVLAEDTITALLHNNRKLLEKHITAAEIDTFVSLVRKNREPRFLDYLSDLCVSMNKSIPVTQELICKAVLNPTNADILIETKLVLSRFEFEGVSTGENALEAGEDEEEVWLFWRDSNKEIRSKSVRELAQDAKEGQKEDRDVLSYYRYQLNLFARMCLDRQYLAINEISGQLDVDLILRCMSDENLPYDLRASFCRLMLHMHVDRDPQEQVTPVKYARLWSEIPSEIAIDDYDSSGASKDEIKERFAQTMEFVEEYLRDVVCQRFPFSDKEKNKLTFEVVNLARNLIYFGFYNFSDLLRLTKILLAILDCVHVTTIFPISKMTKGEENKGSNVMRSIHGVGELMTQVVLRGGGFLPMTPMAAAPEGNVKQAEPEKEDIMVMDTKLKIIEILQFILNVRLDYRISCLLCIFKREFDESNSQSSETSSGNSSQEGPSNVPGALDFEHIEEQAEGIFGGSEENTPLDLDDHGGRTFLRVLLHLTMHDYPPLVSGALQLLFRHFSQRQEVLQAFKQVQLLVTSQDVDNYKQIKQDLDQLRSIVEKSELWVYKGQGPDEPMDGASGENEHKKTEEGTSKPLKHESTSSYNYRVVKEILIRLSKLCVQESASVRKSRKQQQRLLRNMGAHAVVLELLQIPYEKAEDTKMQEIMRLAHEFLQNFCAGNQQNQALLHKHINLFLNPGILEAVTMQHIFMNNFQLCSEINERVVQHFVHCIETHGRNVQYIKFLQTIVKAEGKFIKKCQDMVMAELVNSGEDVLVFYNDRASFQTLIQMMRSERDRMDENSPLFMYHIHLVELLAVCTEGKNVYTEIKCNSLLPLDDIVRVVTHEDCIPEVKIAYINFLNHCYVDTEVEMKEIYTSNHMWKLFENFLVDICRACNNTSDRKHADSVLEKYVTEIVMSIVTTFFSSPFSDQSTTLQTRQPVFVQLLQGVFRVYHCNWLMPSQKASVESCIRVLSDVAKSRAIAIPVDLDSQVNNLFLKSHNIVQKTAMNWRLSARNAARRDSVLAASRDYRNIIERLQDIVSALEDRLRPLVQAELSVLVDVLHRPELLFPENTDARRKCESGGFICKLIKHTKQLLEENEEKLCIKVLQTLREMMTKDRGYGEKQISIDELENAELPQPPEAENSTEQELEPSPPLRQLEDHKRGEALRQILVNRYYGNIRPSGRRESLTSFGNGPLSPGGPSKPGGGGGGPGSGSTSRGEMSLAEVQCHLDKEGASNLVIDLIMNASSDRVFHESILLAIALLEGGNTTIQHSFFCRLTEDKKSEKFFKVFYDRMKVAQQEIKATVTVNTSDLGNKKKDDEVDRDAPSRKKAKEPTTQITEEVRDQLLEASAATRKAFTTFRREADPDDHYQSGEGTQATTDKAKDDLEMSAVITIMQPILRFLQLLCENHNRDLQNFLRCQNNKTNYNLVCETLQFLDCICGSTTGGLGLLGLYINEKNVALINQTLESLTEYCQGPCHENQNCIATHESNGIDIITALILNDINPLGKKRMDLVLELKNNASKLLLAIMESRHDSENAERILYNMRPKELVEVIKKAYMQGEVEFEDGENGEDGAASPRNVGHNIYILAHQLARHNKELQTMLKPGGQVDGDEALEFYAKHTAQIEIVRLDRTMEQIVFPVPSICEFLTKESKLRIYYTTERDEQGSKINDFFLRSEDLFNEMNWQKKLRAQPVLYWCARNMSFWSSISFNLAVLMNLLVAFFYPFKGVRGGTLEPHWSGLLWTAMLISLAIVIALPKPHGIRALIASTILRLIFSVGLQPTLFLLGAFNVCNKIIFLMSFVGNCGTFTRGYRAMVLDVEFLYHLLYLLICAMGLFVHEFFYSLLLFDLVYREETLLNVIKSVTRNGRPIILTAALALILVYLFSIVGYLFFKDDFILEVDRLPNETAGPETGESLANDFLYSDVCRVETGENCTSPAPKEELLPVEETEQDKEHTCETLLMCIVTVLSHGLRSGGGVGDVLRKPSKEEPLFAARVIYDLLFFFMVIIIVLNLIFGVIIDTFADLRSEKQKKEEILKTTCFICGLERDKFDNKTVTFEEHIKEEHNMWHYLCFIVLVKVKDSTEYTGPESYVAEMIRERNLDWFPRMRAMSLVSSDSEGEQNELRNLQEKLESTMKLVTNLSGQLSELKDQMTEQRKQKQRIGLLGHPPHMNVNPQQPA

SEQ ID NO: 2641 - DNA, 9517 bp, Homo sapiens
  ref <308>: DATABASE ACCESSION NUMBER: EMBL / D26070
  ref <309>: DATABASE ENTRY DATE: 1999-01-21
gttgctgtcggagagagaaagccgcacccgagaggaggtgtgggtgttccgcttccatcctaacggaacgagctccctcttcgcggacatgggattacccagcggctgctaacccctctcctcgccctgctcccccaaaccggcgtggctccccgggcaccaaggagctgactacagaggagcaggatttgcacccctcgctgggcttgctttggcaacagagtgcctgacccaggtcaggattttcaagaaagacatgtctgacaaaatgtctagcttcctacatattggagacatttgttctctgtacgcggagggatcgacaaatggatttattagcaccttgggcctggttgatgatcgttgtgttgtacagccagaaaccggggaccttaacaatccacctaagaaattcagagactgcctctttaagctatgtcccatgaaccgctactctgcccaaaagcagttctggaaagccgctaagcctggggccaacagcaccacagacgcagtgctactcaacaaactgcaccacgctgcagacttggaaaagaagcagaatgagacagaaaacaggaaattgctggggaccgtaatccagtatggcaatgtgatccagctcctgcatttgaaaagtaataaatacctaacagtgaataagaggcttcctgctctgttggagaagaatgccatgagagtcacattggacgaggctggaaatgaagggtcctggttttatattcagccattctacaagctgcgatccattggagacagcgtggtcataggtgacaaggtggttctgaaccccgtcaatgctggtcagcccctacatgctagcagccatcaactggtagataacccaggctgcaatgaggtcaattccgtcaactgcaatacaagctggaaaatagtccttttcatgaaatggagtgataacaaagacgacatattaaaggggggtgacgtggtgaggctgtttcatgctgagcaggagaagtttctcacctgtgacgaacacaggaagaagcagcacgtcttcctgagaaccacgggccggcagtcggccacatctgccaccagttcaaaagccctgtgggaggtggaggtggtccagcatgacccatgtcggggcggagcagggtattggaacagccttttccgtttcaagcatctggccacggggcattacttggcagcagaggtggaccctgatcaggacgcctctcgaagtaggttgcggaatgcccaagaaaagatggtatactccctggtctctgtgcctgaaggcaatgacatctcctccattttcgagctagatcccaccactctgcgtggaggtgacagccttgtcccaaggaactcttatgttcggctcagacacctatgtactaatacctgggttcacagcacaaatattcctattgacaaggaagaagaaaagcccgtgatgctgaaaattggcacctctcctgtgaaggaggataaggaagcatttgccatagttccggtttctcctgctgaagttcgggacctggactttgccaatgatgccagcaaggtgctgggctccattgctgggaagctagagaagggcaccatcacccagaatgaaaggaggtctgtaaccaagctgctagaagatttggtttacttcgtcactggtggaactaattctggtcaagatgttctcgaagttgtcttctccaagcccaacagagaacggcagaaactgatgagagaacagaatattctcaagcagatcttcaagttgttacaagccccattcacagactgcggtgatggcccaatgcttcggctggaagagctcggggaccagcggcacgctcctttcagacacatctgccggctctgctacagggtgctgagacactcgcagcaagactacaggaagaaccaggagtatatagccaagcagtttggcttcatgcagaagcagattggctatgatgtgttggctgaagacactatcactgccctgctccacaataatcggaaactcctggaaaaacacattaccgcggcagagattgacacatttgtcagcctggtgcgaaagaacagggagcccagattcttagattacctctccgacctctgtgtctccatgaacaaatcaattccagtgacccaggaactgatatgtaaagctgtgctgaaccccaccaacgctgacatcctgattgagaccaaattggttctttctcgttttgaatttgaaggtgtctcttccactggagagaatgctctggaggcaggagaagacgaggaagaggtgtggctgttttggagggacagcaacaaagagattcgcagcaagagtgtgagggaattggctcaggatgctaaagaagggcagaaggaggaccgagacgttctcagctactacagatatcagctgaacctctttgcgaggatgtgtctggaccgccaatacctggccatcaacgaaatctcaggccagctggatgtcgatctcattctccgctgcatgtctgacgagaacctgccctatgacctcagggcgtccttctgccgcctcatgcttcacatgcatgtggaccgagatccccaggaacaagtcacccccgtgaaatatgcccgcctctggtcggagattccctcggagatcgccattgacgactatgatagtagtggagcttccaaagatgaaattaaggagagatttgctcagaccatggagtttgtggaggagtatttaagagatgtggtttgtcagaggttccctttctctgataaagagaagaataagcttacgtttgaggttgtaaatttagctaggaatctcatatactttggtttctacaacttctctgaccttctccgattaactaagatccttctggccatattggactgtgtacatgtgacaacaatcttccccattagcaagatggcgaaaggagaagagaataaaggcagtaacgtgatgagatctattcatggcgtgggagagctgatgacccaggtggtgctccggggaggaggctttttgcccatgactcccatggctgctgcccctgaaggcaatgtgaagcaggcagagcctgagaaggaggacatcatggtcatggacaccaagctgaagatcattgagatactccagtttattttgaatgtgaggttggattataggatctcctgcctcctgtgtatatttaagcgagagtttgatgaaagcaattcccagacttcagaaacatcctccggaaacagcagccaagaagggccaagtaatgtaccaggtgctcttgactttgaacacattgaagaacaagcagaaggcatctttggaggaagtgaggagaacaccccactggacttggatgaccacggcggcagaacctttctccgtgtcctgctccacttgacgatgcatgactacccacccctggtgtcaggggccctgcagctcctcttccggcacttcagccagaggcaggaggtgctccaggccttcaaacaggttcaactgctggttaccagccaagatgtggacaactacaaacagatcaaacaagacttggatcaactgaggtccatcgtggaaaagtcagagctttgggtgtacaaagggcagggccccgatgagactatggatggtgcatctggagaaaatgaacataagaaaacggaggagggaaataacaagccacaaaagcatgaaagcaccagcagctacaactacagagtggtcaaagagattttgattcggcttagcaaactctgtgttcaagagagtgcctcagtgagaaagagcaggaagcagcaacagcgtctgctccggaacatgggcgcgcacgccgtggtgctggagctgctgcagattccctatgagaaggccgaagataccaagatgcaagagataatgaggttggctcatgaatttttgcagaatttctgcgcaggcaaccagcagaatcaagctttgctacataaacacataaacctgtttctcaacccagggatcctggaggcagtaaccatgcagcacatcttcatgaacaatttccagctttgcagtgagatcaacgagagagttgttcagcacttcgttcactgcatagagactcacggtcggaatgtccagtatataaagttcttacagacaattgtcaaggcagaagggaaatttattaaaaaatgccaagacatggttatggccgagctggtcaattcgggagaggatgtcctcgtgttctacaacgacagagcctctttccagactctgatccagatgatgcggtcagaacgggatcggatggatgagaacagccctctcatgtaccacatccacttggtcgagctcctggctgtgtgcacggagggtaagaatgtctacacagagatcaagtgcaactccctgctcccgctggatgacatcgttcgcgtggtgacccacgaggactgcatccctgaggttaaaattgcatacattaacttcctgaatcactgctatgtggatacagaggtggaaatgaaggagatttataccagcaatcacatgtggaaattgtttgagaatttccttgtagacatctgcagggcctgtaacaacactagtgacaggaaacatgcagactcgattttggagaagtatgtcaccgaaatcgtcatgagtattgttactactttcttcagctctcccttctcagaccagagtacgactttgcagactcgccagcctgtctttgtgcaactgctgcaaggcgtgttcagggtttaccactgcaactggttaatgccaagccaaaaagcctccgtggagagctgtattcgggtgctgtctgatgtagccaagagccgggccattgccattcccgtggacctggacagccaagtcaacaacctctttctcaagtcccacagcattgtgcagaaaacagccatgaactggcggctctcagcccgcaatgccgcacgcagggactctgttctggcagcttccagagactaccggaatatcattgagagattgcaggacatcgtctccgcgctggaggaccgtctcaggcccctggtgcaggcagagttatctgtgctcgtggatgttctccacagacccgagctgcttttcccagagaacacagacgccagaaggaaatgtgaaagtggcggtttcatttgcaagttaataaagcatacaaaacagctgctagaagaaaatgaagagaagctctgcattaaggtcctacagaccctgagggaaatgatgaccaaagatagaggctatggagaaaagggtgaggcgctcaggcaagttctggtcaaccgttactatggaaacgtcagaccttcgggacgaagagagagccttaccagctttggcaatggcccactgtcagcaggaggacccggcaagcccgggggaggagggggaggttccggatccagctctatgagcaggggtgagatgagtctggccgaggttcagtgtcaccttgacaaggagggggcttccaatctagttatcgacctcatcatgaacgcatccagtgaccgagtgttccatgaaagcattctcctggccattgcccttctggaaggaggcaacaccaccatccagcactcctttttctgtcgcttgacagaagataagaagtcagagaaattctttaaggtgttttatgaccggatgaaggtggcccagcaagaaatcaaagcaacagtgacagtgaacaccagtgacttgggaaataaaaagaaagacgatgaggtagacagggatgccccatcacggaaaaaagctaaagagcccacaacacagataacagaagaggtccgggatcagctcctggaggcctccgctgccaccaggaaagccttcaccactttcaggagggaggctgatcccgacgaccactaccagcctggagagggcacccaggccactgccgacaaggccaaggacgacctggagatgagcgcggtcatcaccatcatgcagcccatcctccgcttccttcagctcctgtgtgaaaaccacaaccgagacctgcagaacttcctccgttgccaaaataacaagaccaactacaatttggtatgtgagaccctgcagtttctggactgtatttgtggaagcacaactggaggccttggtcttctgggcttgtatataaatgaaaagaacgtagcgcttatcaaccaaaccctggaaagtctgaccgaatactgtcaaggaccttgccatgagaaccagaactgcatagccacccatgaatccaatggcattgacatcatcacagccctgatcctcaatgatatcaatcctttgggaaagaagaggatggaccttgtgttagaactgaagaacaatgcctcgaagttgctcctggccatcatggaaagcaggcacgacagtgaaaacgcagagaggatactttataacatgaggcccaaggaactggtggaagtgatcaagaaagcctacatgcaaggtgaagtggaatttgaggatggagaaaacggtgaggatggggcggcgtcccccaggaacgtggggcacaacatctacatattagcccatcagttggctcggcataacaaagaacttcagagcatgctgaaacctggtggccaagtggacggagatgaagccctggagttttatgccaagcacacggcgcagatagagattgtcagattagaccgaacaatggaacagatagtctttcccgtgcccagcatatgtgaattcctaaccaaggagtcaaaactacgaatttactatactacagagagagacgaacaaggcagcaaaatcaatgatttctttctgcggtctgaagacctcttcaatgaaatgaattggcagaagaaactgagagcccagcccgtgttgtactggtgtgcccgcaacatgtctttctggagcagcatttcgtttaacctggccgtcctgatgaacctgctggtggcgtttttctacccgtttaagggagtccgaggaggaaccctggagccccactggtcgggactcctgtggacagccatgctcatctctctggccatcgtcattgccctccccaagccccatggcatccgggccttaattgcctccacaattctacgactgatattttcagtcgggttacaacccacgttgtttcttctgggcgctttcaatgtatgcaataaaatcatctttctaatgagctttgtgggcaactgtgggacattcacaagaggctaccgagccatggttctggatgttgagttcctctatcatttgttgtatctggtgatctgtgccatggggctctttgtccatgaattcttctacagtctgctgctttttgatttagtgtacagagaagagactttgcttaatgtcattaaaagtgtcactcgcaatggacggtccatcatcctgacagcagttctggctctgatcctcgtttacctgttctcaatagtgggctatcttttcttcaaggatgactttatcttggaagtagataggctgcccaatgaaacagctgttccagaaaccggcgagagtttggcaagcgagttcctgttctccgatgtgtgtagggtggagagtggggagaactgctcctctcctgcacccagagaagagctggtccctgcagaagagacggaacaggataaagagcacacatgtgagacgctgctgatgtgcattgtcaccgtgctgagtcacgggctgcggagcgggggtggagtaggagatgtactcaggaaaccgtccaaagaggaacccctgtttgctgctagagttatttatgacctcttgttcttcttcatggtcatcatcattgttcttaacctgatttttggggttatcattgacacttttgctgacctgaggagtgagaagcagaagaaggaagagatcttgaagaccacgtgctttatctgtggcttggaaagagacaagtttgacaacaagactgtcacctttgaagagcacatcaaggaagaacacaacatgtggcactatctgtgcttcatcgtcctggtgaaagtaaaggactccaccgaatatactgggcctgagagttacgtggcagaaatgatcaaggaaagaaaccttgactggttccccaggatgagagccatgtcattggtcagcagtgattctgaaggagaacagaatgagctgagaaacctgcaggagaagctggagtccaccatgaaacttgtcacgaacctttctggccagctgtcggaattaaaggatcagatgacagaacaaaggaagcagaaacaaagaattggtcttctaggacatcctcctcacatgaatgtcaacccacaacaaccagcataagcaaatgaaagaaaggaattgtatttaccttttataattattattagtgtgggtatggctaatgagttctgattcacccacgaaggttacatttatgctgaatacatttgtaaatactcagttttatactgtatgtatatgattgctactctaaaggtttggatatatgtattgtaattagaattgttggcatgatgacatttcatttgtgccaaaaatattaaaaatgccttttttggaaggactaacagaaagcacctgatttgcacttgaaccagattatagatttaaaagtatatgacatgtattttgtatttaaaactagaatagccagtatttatgttttttataaaactgtgcaatacgaattatgcaatcacaatacatttgtagctcccgagtgtcctaaagggagtgcacttctttgaagctggtgtgttaatactatgtaataaatggttaactttcaaatgatgctgctgccaaaattatattaatagtgagtttcaggcccctgggcattttgtaccatgtaattatcctctggtgatgctgtttctcgttagtggcagtagtgcctccgtctcctagtgataatgctccaagtctatgaactgttaaatcagcattcattttaagaaaagcaactttagtttcaaagatacttttaagcttctaaattgatcatttaaactatttctttaaataagagagccaaattagaggctcatactttagcttgtgaagaagataatgaattttttaaagggaactttctatgcaatgttcaggataaatcgatactgctggccaatcagtgtcatctcctgggtaaattttgatgtcgcattataaagacatgcataattgatggtttctagattatctagtccaaacaatagagtttattttttcttcatctgaaccaacatgctacagtagctaagaagtattaaaactatatacatccatataaagatgaaatatgaactatctcattagaagtcatagttgaccacagacatgttattcttctgaaagagccacattttggttttatttcttgtcacatgatttcttttcttgatggatgaaaaatatgaaatgaaatcttttatatctgttgcctagttttgtacatggatctcattttacaagagaatctctctgcta

SEQ ID NO: 2642 - protein, 2758 aa, Homo sapiens
  ref <308>: DATABASE ACCESSION NUMBER: SWISS-Prot / Q14643
  ref <309>: DATABASE ENTRY DATE: 2002-06-15
MSDKMSSFLHIGDICSLYAEGSTNGFISTLGLVDDRCVVQPETGDLNNPPKKFRDCLFKLCPMNRYSAQKQFWKAAKPGANSTTDAVLLNKLHHAADLEKKQNETENRKLLGTVIQYGNVIQLLHLKSNKYLTVNKRLPALLEKNAMRVTLDEAGNEGSWFYIQPFYKLRSIGDSVVIGDKVVLNPVNAGQPLHASSHQLVDNPGCNEVNSVNCNTSWKIVLFMKWSDNKDDILKGGDVVRLFHAEQEKFLTCDEHRKKQHVFLRTTGRQSATSATSSKALWEVEVVQHDPCRGGAGYWNSLFRFKHLATGHYLAAEVDPDFEEECLEFQPSVDPDQDASRSRLRNAQEKMVYSLVSVPEGNDISSIFELDPTTLRGGDSLVPRNSYVRLRHLCTNTWVHSTNIPIDKEEEKPVMLKIGTSPVKEDKEAFAIVPVSPAEVRDLDFANDASKVLGSIAGKLEKGTITQNERRSVTKLLEDLVYFVTGGTNSGQDVLEVVFSKPNRERQKLMREQNILKQIFKLLQAPFTDCGDGPMLRLEELGDQRHAPFRHICRLCYRVLRHSQQDYRKNQEYIAKQFGFMQKQIGYDVLAEDTITALLHNNRKLLEKHITAAEIDTFVSLVRKNREPRFLDYLSDLCVSMNKSIPVTQELICKAVLNPTNADILIETKLVLSRFEFEGVSSTGENALEAGEDEEEVWLFWRDSNKEIRSKSVRELAQDAKEGQKEDRDVLSYYRYQLNLFARMCLDRQYLAINEISGQLDVDLILRCMSDENLPYDLRASFCRLMLHMHVDRDPQEQVTPVKYARLWSEIPSEIAIDDYDSSGASKDEIKERFAQTMEFVEEYLRDVVCQRFPFSDKEKNKLTFEVVNLARNLIYFGFYNFSDLLRLTKILLAILDCVHVTTIFPISKMAKGEENKGNNDVEKLKSSNVMRSIHGVGELMTQVVLRGGGFLPMTPMAAAPEGNVKQAEPEKEDIMVMDTKLKIIEILQFILNVRLDYRISCLLCIFKREFDESNSQTSETSSGNSSQEGPSNVPGALDFEHIEEQAEGIFGGSEENTPLDLDDHGGRTFLRVLLHLTMHDYPPLVSGALQLLFRHFSQRQEVLQAFKQVQLLVTSQDVDNYKQIKQDLDQLRSIVEKSELWVYKGQGPDETMDGASGENEHKKTEEGNNKPQKHESTSSYNYRVVKEILIRLSKLCVQESASVRKSRKQQQRLLRNMGAHAVVLELLQIPYEKAEDTKMQEIMRLAHEFLQNFCAGNQQNQALLHKHINLFLNPGILEAVTMQHIFMNNFQLCSEINERVVQHFVHCIETHGRNVQYIKFLQTIVKAEGKFIKKCQDMVMAELVNSGEDVLVFYNDRASFQTLIQMMRSERDRMDENSPLMYHIHLVELLAVCTEGKNVYTEIKCNSLLPLDDIVRVVTHEDCIPEVKIAYINFLNHCYVDTEVEMKEIYTSNHMWKLFENFLVDICRACNNTSDRKHADSILEKYVTEIVMSIVTTFFSSPFSDQSTTLQTRQPVFVQLLQGVFRVYHCNWLMPSQKASVESCIRVLSDVAKSRAIAIPVDLDSQVNNLFLKSHSIVQKTAMNWRLSARNAARRDSVLAASRDYRNIIERLQDIVSALEDRLRPLVQAELSVLVDVLHRPELLFPENTDARRKCESGGFICKLIKHTKQLLEENEEKLCIKVLQTLREMMTKDRGYGEKLISIDELDNAELPPAPDSENSTEELEPSPPLRQLEDHKRGEALRQVLVNRYYGNVRPSGRRESLTSFGNGPLSAGGPGKPGGGGGGSGSSSMSRGEMSLAEVQCHLDKEGASNLVIDLIMNASSDRVFHESILLAIALLEGGNTTIQHSFFCRLTEDKKSEKFFKVFYDRMKVAQQEIKATVTVNTSDLGNKKKDDEVDRDAPSRKKAKEPTTQITEEVRDQLLEASAATRKAFTTFRREADPDDHYQPGEGTQATADKAKDDLEMSAVITIMQPILRFLQLLCENHNRDLQNFLRCQNNKTNYNLVCETLQFLDCICGSTTGGLGLLGLYINEKNVALINQTLESLTEYCQGPCHENQNCIATHESNGIDIITALILNDINPLGKKRMDLVLELKNNASKLLLAIMESRHDSENAERILYNMRPKELVEVIKKAYMQGEVEFEDGENGEDGAASPRNVGHNIYILAHQLARHNKELQSMLKPGGQVDGDEALEFYAKHTAQIEIVRLDRTMEQIVFPVPSICEFLTKESKLRIYYTTERDEQGSKINDFFLRSEDLFNEMNWQKKLRAQPVLYWCARNMSFWSSISFNLAVLMNLLVAFFYPFKGVRGGTLEPHWSGLLWTAMLISLAIVIALPKPHGIRALIASTILRLIFSVGLQPTLFLLGAFNVCNKIIFLMSFVGNCGTFTRGYRAMVLDVEFLYHLLYLVICAMGLFVHEFFYSLLLFDLVYREETLLNVIKSVTRNGRSIILTAVLALILVYLFSIVGYLFFKDDFILEVDRLPNETAVPETGESLASEFLFSDVCRVESGENCSSPAPREELVPAEETEQDKEHTCETLLMCIVTVLSHGLRSGGGVGDVLRKPSKEEPLFAARVIYDLLFFFMVIIIVLNLIFGVIIDTFADLRSEKQKKEEILKTTCFICGLERDKFDNKTVTFEEHIKEEHNMWHYLCFIVLVKVKDSTEYTGPESYVAEMIKERNLDWFPRMRAMSLVSSDSEGEQNELRNLQEKLESTMKLVTNLSGQLSELKDQMTEQRKQKQRIGLLGHPPHMNVNPQQPA

SEQ ID NO: 2643 - DNA, 619 bp, Rattus norvegicus
  ref <308>: DATABASE ACCESSION NUMBER: EMBL / J05592
  ref <309>: DATABASE ENTRY DATE: 2000-03-04
gcggccatggagcccgacaacagtccacggaagatccagtttacggttccgctgctggagcctcacctggacccggaggcagccgagcagattcggaggcgccgccccacccctgccacacttgtgctgaccagcgaccagtcatccccagaagtagatgaagaccggatccccaacccacttctcaagtccacactgtcaatgtctccacggcaacggaagaagatgacaaggactacacccaccatgaaagagctccagacaatggttgaacatcacctagggcaacagaaacaaggggaagaacctgagggagccactgagagcacagggaaccaggagtcctgcccacctgggatcccagacacaggctcagcgtcaaggccagatacctcggggacagcacaaaagcctgcagaatccaaacccaagactcaggagcagcgtggtgtggagcccagcacagaggacctttcagcccacatgctaccactggattcccaaggagccagcttggtctgacagaagttgacatccggggatcgccagtgagtgtggaagttcatggacactggatgtttcttaatctcttgtttttaaacgtgataaatttggtgtt

SEQ ID NO: 2644 - protein, 171 aa, Rattus norvegicus
  ref <308>: DATABASE ACCESSION NUMBER: SWISS-Prot / P19103
  ref <309>: DATABASE ENTRY DATE: 2002-06-15
MEPDNSPRKIQFTVPLLEPHLDPEAAEQIRRRRPTPATLVLTSDQSSPEVDEDRIPNPLLKSTLSMSPRQRKKMTRTTPTMKELQTMVEHHLGQQKQGEEPEGATESTGNQESCPPGIPDTGSASRPDTSGTAQKPAESKPKTQEQRGVEPSTEDLSAHMLPLDSQGASLV

SEQ ID NO: 2645 - DNA, 662 bp, Homo sapiens
  ref <308>: DATABASE ACCESSION NUMBER: EMBL / U48707
  ref <309>: DATABASE ENTRY DATE: 1999-07-02
ccccagccatggagcaagacaacagcccccgaaagatccagttcacggtcccgctgctggagccgcaccttgaccccgaggcggcggagcagattcggaggcgccgccccacccctgccaccctcgtgctgaccagtgaccagtcatccccagagatagatgaagaccggatccccaacccacatctcaagtccactttggcaatgtcgccacggcaacggaagaagatgacaaggatcacacccacaatgaaagagctccagatgatggttgaacatcacctggggcaacagcagcaaggagaggaacctgagggggccgctgagagcacaggaacccaggagtcccgcccacctgggatcccagacacagaagtggagtcaaggctgggcacctctgggacagcaaaaaaaactgcagaatgcatccctaaaactcacgagagaggcagtaaggaacccagcacaaaagaaccctcaacccatataccaccactggattccaagggagccaactcggtctgagagaggaggaggtatcttgggatcaagactgcagtttgggaatgcatggacaccggatttgtttcttattccttcacttttggggaaaatctcttgtttttaaaaagtgataaatttggtgttaggtcaaaaaaaaaa

SEQ ID NO: 2646 - protein, 171 aa, Homo sapiens
  ref <308>: DATABASE ACCESSION NUMBER: SWISS-Prot / Q13522
  ref <309>: DATABASE ENTRY DATE: 2002-06-15
MEQDNSPRKIQFTVPLLEPHLDPEAAEQIRRRRPTPATLVLTSDQSSPEIDEDRIPNPHLKSTLAMSPRQRKKMTRITPTMKELQMMVEHHLGQQQQGEEPEGAAESTGTQESRPPGIPDTEVESRLGTSGTAKKTAECIPKTHERGSKEPSTKEPSTHIPPLDSKGANSV

SEQ ID NO: 2647 - DNA, 619 bp, Rattus norvegicus; identical to SEQ ID NO: 2643
  ref <308>: DATABASE ACCESSION NUMBER: EMBL / J05592
  ref <309>: DATABASE ENTRY DATE: 2000-03-04

SEQ ID NO: 2648 - protein, 171 aa, Rattus norvegicus; identical to SEQ ID NO: 2644
  ref <308>: DATABASE ACCESSION NUMBER: SWISS-Prot / P19103
  ref <309>: DATABASE ENTRY DATE: 2002-06-15

SEQ ID NO: 2649 - DNA, 662 bp, Homo sapiens; identical to SEQ ID NO: 2645
  ref <308>: DATABASE ACCESSION NUMBER: EMBL / U48707
  ref <309>: DATABASE ENTRY DATE: 1999-07-02

SEQ ID NO: 2650 - protein, 171 aa, Homo sapiens; identical to SEQ ID NO: 2646
  ref <308>: DATABASE ACCESSION NUMBER: SWISS-Prot / Q13522
  ref <309>: DATABASE ENTRY DATE: 2002-06-15

SEQ ID NO: 2651 - DNA, 619 bp, Rattus norvegicus; identical to SEQ ID NO: 2643
  ref <308>: DATABASE ACCESSION NUMBER: EMBL / J05592
  ref <309>: DATABASE ENTRY DATE: 2000-03-04

SEQ ID NO: 2652 - protein, 171 aa, Rattus norvegicus; identical to SEQ ID NO: 2644
  ref <308>: DATABASE ACCESSION NUMBER: SWISS-Prot / P19103
  ref <309>: DATABASE ENTRY DATE: 2002-06-15

SEQ ID NO: 2653 - DNA, 662 bp, Homo sapiens; identical to SEQ ID NO: 2645
  ref <308>: DATABASE ACCESSION NUMBER: EMBL / U48707
  ref <309>: DATABASE ENTRY DATE: 1999-07-02

SEQ ID NO: 2654 - protein, 171 aa, Homo sapiens; identical to SEQ ID NO: 2646
  ref <308>: DATABASE ACCESSION NUMBER: SWISS-Prot / Q13522
  ref <309>: DATABASE ENTRY DATE: 2002-06-15

SEQ ID NO: 2655 - DNA, 619 bp, Rattus norvegicus; identical to SEQ ID NO: 2643
  ref <308>: DATABASE ACCESSION NUMBER: EMBL / J05592
  ref <309>: DATABASE ENTRY DATE: 2000-03-04

SEQ ID NO: 2656 - protein, 171 aa, Rattus norvegicus; identical to SEQ ID NO: 2644
  ref <308>: DATABASE ACCESSION NUMBER: SWISS-Prot / P19103
  ref <309>: DATABASE ENTRY DATE: 2002-06-15

SEQ ID NO: 2657 - DNA, 662 bp, Homo sapiens; identical to SEQ ID NO: 2645
  ref <308>: DATABASE ACCESSION NUMBER: EMBL / U48707
  ref <309>: DATABASE ENTRY DATE: 1999-07-02

SEQ ID NO: 2658 - protein, 171 aa, Homo sapiens; identical to SEQ ID NO: 2646
  ref <308>: DATABASE ACCESSION NUMBER: SWISS-Prot / Q13522
  ref <309>: DATABASE ENTRY DATE: 2002-06-15

SEQ ID NO: 2659 - DNA, 17517 bp, Rattus norvegicus
  ref <308>: DATABASE ACCESSION NUMBER: EMBL / J05677
  ref <309>: DATABASE ENTRY DATE: 2000-03-04
ggatcctgtgccttctggctctccacttacatggatatactcacagtgacttaacttttaagaaaaaactactaaaaaaaacccccagaaacacaaatatttataaaccatctgcttgctgttttagtttctgagacagtgtttctttgtgtagcccacactgagctggaactcactctgtagatcaggctagtcttgaactaagagatctatctgcctgcctctgcctcagaagctctgtggttaaaggtatgcaccaccaccacctagccacctggtgttctttaaagcatggataattaaataaaataataaaaataaaaaataaatatggatggtgatagctatatataaaacggagagacttcaagcctgcctccctaaaaaaaatccctaactcttcatgtatagaaaatagatttcaacagtttgctctctccacataataccttttttcttttctttcttaactacaattaatttaagtcatacatatgtgcttgtatgctgtgtgtgtatatgtgtgtgtgtatgtgtgtacacacacgcacgtgcatactcaccctagaggtatagaatcccctggagctggaataaagattgtttgtgaaccactagatgtagtttctgggaatcgaactatggtcgaagggcaataaatgttcttaaccgctgagctatatctccaaccccaaatacccttttcttcctttgacccttggtgatagtagccctcatctccgtctctgggcatatccctgtctcttttgcagtgcttaaagtatattgtgttatggttatttgttctcaaaaacatatattatatatatatatatatataatcgttatgccgtcaacatctaactggcacttgacatagctgtcctcttgaaatgtttgctgatcttagttcctgtttgtgctcaagactggcgaagctgatggcgcaatacggttaatgaatccggatgaccattagagggcacactaatcccatgccgttccgtcccaaaggcccagcagtttggagttccccagactcgctccttcatttattcttcccatgatcatttccacccagaactccacagtcccattttaataatcttccacacaaaacactcaaacgacgttacatctcttccctagccacccaccctctctccccagtttctgttagtatttgggaattaaagagttaactccaccctcccacctggtcatcttgctcagttaatctgcgcgatctgggaggcggcgaagaagaaaggggaggtactcattgatggactgggtaacccggactctggctcgcccctacttgattgccttttctagaaaccctcccaaactcctattagccacacacaccttttccggccaagatccaaacaagctttcctctccctaggaaccaggtagaccagaggggcataggacagagggcggggggcagcttcttcacacctccttcctcagccctagtcccccggcggcctagccgccgcccgcgggtgctgccaggggagggaaacctcgcgcagcggcagcgggccggaaagagggtcagcaataactggcgcacgggagggtggggagccagcggtagtcagggctgggaggaaggagttaaagagtcaggattggttcccccggctctcttgtcaccgaatctgggaggggaggattcgctgccctggctcgggaccttgtggtcccgtcccccccccgcccgcctccggaacggccggagactggggccagccggacgccccttctggcacactcctggggcaagcgcgagcgcacactcccctttccttgctggcgctccctctcccctcgctctctctctctagaccgtcctctccttccctcgctctccaccgactcccttcgggtgctgtgcttgctcccacctgctctgaagcgctctccgctctcggacgctcccaatttagcgctcctgctcgacggccgaaccgtcgcagcctccgcaggcagcgtgccctcggggttgcggcttcaacccaccccagcttcctccctcgctacgactcgggcgccctggacgttcgaccctcgccgctgagcccgaggatggcgagcagaccatggtgacagcgctgcccggtcgctgcactcgctgaggccatgccgggctcccgacgcgtccgtccgcgcctaagggcgctgctgctgctgccgccgcttctgctactccggggcggccacgcgagcgacctgaccgtggctgtggtgctgccgctgaccaacacctcgtacccgtggtcctgggcgcgtgtagggccggccgtggaactggctctcgcgcgggtgaaggctcggccggacttgctgccgggttggacggtccgcatggtgctgggcagcagtgagaacgcggcgggcgtctgctcggacaccgccgcaccgctggccgcggtggacctcaagtgggagcacagccccgcggtgttcctgggccccggctgcgtctactccgctgccccggtggggcgcttcaccgcgcactggcgggtgccgctgctgaccgccggcgccccggctctgggcatcggggtcaaggatgagtatgcgctaaccacccgcacaggacccagccatgtcaagctgggcgatttcgtgacggcgctgcatcgacggctgggctgggagcaccaggcgctggtgctctatgcagatcggctgggcgacgaccggccttgcttcttcatagtggaggggctgtacatgcgggtgcgtgaacgcctcaacatcacagtgaatcaccaggagttcgtcgagggcgacccggaccactaccccaagctactgcgggccgtgcggcgaaagggcagaggtgaggctggcacccgccggacagctggctcgtgcggcctgatctccggcctgtccacgggcctggcattcctcctttgggggccaggcttcctcctcttagcgtcttgctcaacatgactttcctacctcggagtttctagttccctctctccgcgccgggtttgcattcctaccctctcctcctcccgtcctgtctcaagtgaccttcctgctgcgaactttcttgatttaagcgcggaagggcctagttctagcgctactgctccctcagcttcctgactcctctctccagttttcgctctaccctaccacggtctctctcctccggttccttctattgctcccacacaagctctcaggctctcgggtcccttctcccgcagattcttcctgcagtcttggtcccccacccccacccacatccacacaccttgccccaccttctcttccttcctcccacccctatctctcttcctactctgcacaccttctcccttctttcccgttcccttgctaaggcccagactgagccaggagtcgctgtcctttaaaaactacaaactcagaattccctcccttttagtaccctgcgtgttcattcatgtggtctctctctctctctctctctctctctctctctctgtctctctctctctgtgtctctctctctgtgtctctctctctgtctctctctgtgtctctctgtctctctgtctctgtctctctctctgtgtctctctctctgtctctgtctctctctctctctctctgtctctctgtctctctctctcttctcgtctcttctcttcttcctccttttccttcagttatctacatctgcagttctccggatgccttcaggaatctgatgcttctggccctgaacgctggcctgactggggaggactatgttttcttccacctggatgtgtttgggcaaagccttaagagtgctcagggccttgttccccagaaaccctgggaaagaggagatgggcaggacaggagtgcccgccaggcctttcaggtgagtgctgaggtttgaagcccaggactcttaagttgttgacatatcctttctgggcactctgcccctgtgtatctgaaatgattacagaaaacaggtttttgatagtcttgagttgaaccatgaacttcgtgggatttaaggactagaggctaaacagattattttatagccctgagtaaaagaatattaaagacccctggactagataatgtttgaatccttttgctcaaccacaggaccatgtcatgcaggacacatggatcaatttgatctttgtcttatttaatatttattatttattttggtttttgcttggtttttgttgttgttgttttgttttgttttgtttgggtcagagtctctctatgtattactggttgtcctggaacttattacacagatcaggctgggctcaaattcaaagattctcttgcttctgcctcctgcatgctagggttaaagacttgtgctaccacacccagctaatcaacttgatcccgacctaaacaggctggtctgagaggcaggaccccagatgatagggacaggatacaggaaggactggagtcagctcctaccactccccctttcaatgattccttccttaggctgccaaaattattacttacaaagagcctgataatcctgagtacttggaattcctgaagcagctgaaactcttggctgacaagaagttcaacttcaccgtggaggatggcctggtatgagggggtcctaggctcctccagtgtggctctctagaccctaattcatggctttctgtcagtctgtcctactctctcgggcattccagcatcacatctccccttctttcttcctattatttctgaatctctcctgatggtgaagggggacaatggcgagtttaacccttgaacatgaagtcctcatcatggaaaatgcaagtggcatatcctgccctatctttctctctagcatgactcggtgtcagatgaattgtagatgcaaaagcatcttttaggcagtcatatttgtgtggactttgggtgtcttctctatcccctccaagctcccactacccctccccagttccctgcccacaacgctacagtttgtcactctgagccctttatctctgccctatctgagctctgcttgcttctacagaagaatatcatcccagcctccttccacgacgggctcctgctctatgtccaggcagtgacagagactctggcacaggggggaactgtcacagatggagagaacatcactcagcggatgtggaaccgaagcttccaaggtcagggcctagaattaactggaatgggctgctttgggactggaggtgagagtgagccctagatgtcccagcaggagaccacaggaagcctattacccagctgggtaccttaagtttcctaaaattctgcatgctgtctgccattcccatagccagcacggctgcccttttcactgttgtgcatatatccatgttagtgtctgcatctctgtcgaggggggttggagggttgggatgatgtaaggcatctctgaacctccattatttcaaaacacagccttcctcccctacggccctaggtgtgacaggatacctgaaaattgatagaaacggagatcgggacaccgatttctctctctgggatatggatccagagacgggtgccttcagggtaagttcacacataccccaagaagacaatgcctgccaagaatggcctatcatcctcctaaccgcactccaccccacagccctgccaggtatctgcttattctttggacatctatgagatactaatgaggcaggctcaactaactcttcagtctgggagcagccaaaatgatgagatgcgtaaacttcctccctcagagaaccccaagtctgaagagggaacatagagtccttcccttgagttcctaagacaggtgggaccccatcctagcagagacagggactctggccaagaagaatgcatgtgtgcctctgtgtaaatgtagcaaggacaggaagggacaggggtcaaaggcaccaagattcagatctactagtgaaggcctcctggaggagacatattagggctagaagtgtacactgaggaattatttatgccttccaatcaataccaactccctgagtatagggttggggtttccaatgtggttccctatggttgcttctctgcaaacctgtgagtgttcaagtttttgccccttagtgccctggccatgggttggaagactcatggatagtcacagcaggaaccaagtgagtagtccatggtccaaatgcaggtcctggaagtagattggcgagagcaggaggcaggatggtaggggggtcgacaggcactcaccactcctgttctcactcaccactcctgttctccctcaggttgtcctgaactataatggtacttcccaggagctaatggctgtgtcagaacacaaattatactggcctctgggatatccacctcctgacgtccctaaatgtggctttgacaatgaggacccagcctgcaaccaaggtgaccgggcccatgcttccagaatcctgtcgtggagccactgcctcctccccaggggagttaaacagaggtttccttgctccagactttacttcccttcttttatcatatcagacgattctgactgactattagatgatttctccttcctatcgtctaaccctggtctctcttctacaacttggactctcccacagaccacttttccacactggaggttctggctttggtgggcagcctctctctgattagctttctgattgtgtctttcttcatatacaggtaagttaaggcacaggggtgttaggtgaggctggggagacaggagcacagagaagggagcaggaggagagtaggcctgggagggagcctaacgcgggaaaagaatgcgtctttcactccctcagtgaggaggcagaagctccagatggagtcaggaaggtgtggatcagtcatgttggttcaggctaggttaaagccacaacgtagctgggaagtgacttcagagcagagccgatgctggtgtggatctggcatcctttgctgagggcagatagaaagcagtagtttaaaaccttcaggtagctagacaatggtggtacaggcctttaatcccagcactcaagaagcagatgcaggtgaatctgagttcaaggccagcctggtctacagagagcgttccaggacagccagggctacacagagaaaccctgtctccaaaaaacaaactagcaaacaaacaaacttcaagtactaacccaaaggagttggttctggataacaaatcgctgagagctaggtgctgaccctagaccacccacccctcccctaccccacaccccaaattctcacccctgtgcatgtggaaatgaaagtacagaggggggataaggaaacaggaaagaggagggaagagagcagtgctgactgagcatgtgcgccaggcacttccacactcaggatgacactgcatcctgtaataattaagaatgaaatggaaggggctggggatttagctcagtggtagagcgcttacctaggaagcgcaaggccctgggttcggtccccagctccggaaaaaagaaccaaaaaaaaaaaaaaaaaaaaaaaaaagaatgaaatggaagccgggtgtgctacacataagctttattcccagcactggggtggtagaggcaggtggatctctgtgagttcaaggccagcctgctggtctacatagggacaacccaggccacatagtgagatccctgtctcataaacaacaacaacaacaacaaaacaaaaaaacccagaggcctccagtctccaaaggaagaaactaaagtgacttttcccctgggataagatcccctgtgagttagaatttctcaggccccaagctctcagctctgagaacaggactccctcaagcatctcttagcatgtgggatgtgctgggactctgaggggctatggagcacctgccaggggtaggggctcaggtgcaggcttcacattccaggaagatgcagctggaaaaggagctggtctcagagttgtggcgggtgcgctgggaggacttgcagcccagcagcctggagaggcatcttcggagcgctggcagccggctgaccctgagtggggtgaggacaccattgtctctgtaggatgggaatagctgagtcccaagggctgatgagttagtagaagctgcttctagatgaggtgactcacctggacccaggacttgggaggttaatatggaaagattgctgtaggtctgaggcaagcctgtgctacagaatgggaccccgtcttgtaaaaccaaaaccaaacaaaagaataggtctacccccagttctgccttcacttgcttaccctgacattgtcttagatgagggttatagttacagcctctgtaacaaggctctctcaaagctcgaaggaagatagtctaagtaaatacataaaggagggtgggagctagcattggtgactcacacctgcaatcaatcctagcctgggagggtgagtctggggcactgctacaagttccagggcagcctgagctaaagagtaagaccctatctctggagggtgacacagataagggacagtgtgactgaacctagaacttccaggatgcagaatgacctctgggctggccaatagatgactattgtttctctctgtagcgaggctccaattatggctccctgctaaccaccgagggccagttccaagtctttgccaagacagcatactataaggtaggtctggggaaagattgctgatcttgggcccctggtggagtgtggtctgaagaataagagatggtagcctgccagggaacaggggtagtcccagggcaaggatgggcttttagaagcaggtagagaactgctgtcatggatgggtttcagaagcagattggggtctcgggccatctcctgagtaataagtctccatttcctgctcagggcaaccttgtggctgtgaaacgtgtgaaccggaaacgcattgagttgacacgaaaagtcctgtttgaacttaaacatgtaattaaggggagcaaggtggtggcttgggaagggcttggtgggtactccaagagagtaagccaactgattatggagggatctatacagctgggatgggcccatgagtcttgagggtaggaaggagatcggtcataagatgagagatcactgggccctccaggccccagatgggttgtcctcacatgtacaggaaataaatggttagggagcaaattccgagaaagaatggtaacaaacatgtgacttggtgaggtttgaagcctctgccagggccttgatgctgccccaatctgcagatgcgggatgtgcagaatgagcacttgacaagatttgtgggtgcttgtaccgacccccccaacatctgtatcctcacagagtactgtccccgtggaagcctacaggtgagtgggacaagaagaagtgggacagtgaaaaagcctaggttctagccctggctcttaccccattgaccatgagcccagataagccccctctttgtggccatgcttggccctctctgtaaatgggagttgggggctggcatggcactacagtaaatccaagtgtccaagcttacaccagtagctcccttgtaccctcctcctactcccaggggggtctgactcttgctgccccagcaggacattctagagaatgagagtatcaccctggactggatgtttcggtactcgctcaccaatgacattgtcaaggtgagtccagaggagatcactggatgccaggcaagagatgggcatggttggaagtcatactcatgtctaagccctcttgccttcctaaatgttccagggaatgctctttctacacaatggggccatttgttcccatgggaacctcaagtcatccaactgtgtggtagacgggcgcttcgtgttaaagatcacagactacggtcttgagagcttcagagacccggagccagagcaaggacacaccctctttgccagtgagtctgactctttttttttttttttaagatttatttattatatataagtacactgtagctgtcttcagacacaacagaagagggcatcaaatctcattatggatggttgtgagccaccatgtggttgctgggatttgaactcaggacctccggaagagcagtcggtgctcttaaccactgagccatctctccagccctgtgagtctgactcttgaccctaggatctctgctgccagcacagctgagaagggacactgagatctagcctctgcaagacttgagtatatctcccatctccatgctcaaccttcattggttaaaaaggaagtcagactaagtggtcactggttctcagcactgtgctgtgtccacaggagtcctagccaatgtctttcttttattgtagcatttcctattagagtgtaaaatcccttatcccttctatgactcctgacctctgatccacagaaaaattgtggacggcacctgagctcctgcgaatggcttcgccacctgcccgtggctcccaagctggggatgtgtacagctttggtatcatcctgcaggagattgccctaagaagtggggtcttctatgtggaaggtttggacctcagcccaaaaggtgaggatcacatggcctatatcccagctggtcttgacgaatccacctccagagaaggaacctctccaaacacccctactgttccttctggagtggggagtcagccactcgctgtcctttgcgccatggctgccagtgaccagctcacccctgtgctctggtctggactcgccccacctgcctgtcccagccggttgcccaactaggcttgctgctcttcagcgcatcccccttccacacagagatcattgagcgtgtgactcggggtgagcagcccccattccgaccctccatggatctgcagagccacctggaggaactggggcagctgatgcagcggtgctgggcagaggacccacaggagcggccaccctttcagcagattcgcctggcgctgcgcaagttcaacaagttagtggtctctccccactacaggcactataaatcccacacttaaatttttttctacagtggcagcctactgcagctcttcacagcctcatagatgtctgcacagctgtatgatttggttgtcccaacagctcccaccattcactactccttcctctgccaacattgacatcccacaccctttcctgcccacagccctgtactgacccccagacttaagataaataagactatatgggccagatgctccaatcctttcccatttcttcccatagtctcagtcctgctcaaaagctcctaccccagtccttgtgtctcttttttctagtatgcccactggctggttctctcagtcatgtttctctgctgcctgtcatcgtcctcagctctccacctccttcaaactcatttgtgatcaataagaataaatatagtatccagcatggggactggagtgatggcttaacggttaagagcactgactgctcttccagaggtcctgagttcaattcccagcaaccacatggtggctcctaaccatctgaatgccctcttctggtgtgtctgaagaccacgacagtgtgctcacatacatgaaataaataaataaatcttaaaaaaaaaaaaaaaaggtacccagctgggcatagaagcaggtggatatctatgggttcaaggccagctgttcctttcacctaaaatacctgataatgtgaacagatccagctataactacttagagagaccgtgtctctaagggtggggccgggcatggtgagtgcctgagtgtgggcactgccaggcaggaccagtcatctcatttcatctgcccccctgtaccccacggccctcagggagaacagcagcaacatcctggacaacctgctgtcacgcatggagcagtatgctaacaacctggaggaactggtagaggagagaacacaagcttatctggaggagaagcgcaaagctgaggccttgctttaccagattctgcctcagtgagttctaagttctgcacacatgcatgcctatgagcgtgcgcgtgcgcgcacacacacacacacacacacacatacacacacacacacacacacgcatataaacatatagccctatcctcaccccacctcaccttctggtctctacctaccctctcccctcagctccgtggctgagcagctgaagagaggcgagacagtccaggctgaggcctttgatagtgttaccatctacttcagtgatattgtgggctttacagctctttcagcagaaagcacacccatgcaggtaagctggagttcagccacaggcagcaggagtaggtcatcttggtcgtctggtgagtacttccttcccacttgtccctggtgggagccctcagtccccatttctcttggcttcctttgtcttccaggtggtgactctgctcaatgatctgtacacctgttttgatgctgtcatagacaactttgatgtgtacaaggtgaggttctgagtagggataggaaggacaggcagacatggacagtcagaaaatgttcagagggatacactgaaacaaaacaaaacaaggccaggcagtggtggtgcacacctttaattctaccacttgggggatagaggcagggaaatctcaatgagttcaaggccagcctgatctacagagcaagttccaggacagccagagctacagacagaaaaccaaaataggagaaggaggtggagaatgggagaatgggggaggaagaggagaagaggggaggaagaggaagaagaaacaaagaaaggaagagagagagagagagagagagagagagagagagagagagagagagagagagagagaaaacaaaatagagacacacagggggacctaagaacagagaaactggggtcggtggccacaaggaaagctccagcccccctgtccttccttcttcccccgccccggccccccataggtggagaccattggtgatgcttacatggtggtgtcagggctcccagtgcggaatggacaactccacgcccgagaggtggcccgaatggcacttgcactactggatgctgtgcgctccttccgcatccgccataggccccaggaacagctgcgcttgcgcattggcatccacacaggtcagactacagaaggcatccagggctgaaactagggaacaagactaaacctttatcccctatctctcaccacacaccctgggaccacatatcccgactcctacctcttctggggtgctcacctaactcctctaacttccctggactcagctcccttcttttcccctcctaggtcctgtgtgtgctggtgtggtagggctaaagatgccccgatactgcctctttggagacacagtcaacacagcttcaagaatggagtctaatggagaaggtaggatggcccttctggagggaatgagaagggtgattgcccagtgcatcctgctgcttatgccttcctagttcctcagcttgctcctgccttctctctgcctaccctgacttcccttatgcacataactcccacattgtaaattaagactattgttgggggtggggttgggggtggggggttaaaaatgcactaagcccaccttagccccaaagcttacttaggtaccagaaatgttttcaaagcacttttattagcttacatctgagcaaagcaatctaacacaatcccactttttagagatttttaacaagtggcctaacactgaggtatgtgatataagatatttatattctttattttaatatagatctcattaagcaactctggctggtcttgaacttataattctcctgctctattctccaaactgggataacaggcctaagccatcagcttgggaaacaaagtctatttaataatgatgatgatgatgatgatgatgattataatgataatagttatttaatgtactaatacacccacaaagataggtgttttgctggtgaggtagctcactgggttaaggtgcttgctggccaagtctggtgacctgagattgatccttggaacccatatggtaccaggagagaatggattccacaagttgtcctctgacttccatgtattcaacacatacccacatgaatatatgtatacatacaataaatggataaacattattttaaattttatttttatttatttattttttttttttcggagctggggaccgaacccagggctttgcgcttcctaggtaagcgctctaccactgagctaaatccccagcccctttaaattttatttttaaaaactacaacgtggggttggggatttagctcagtgctagagcacttgcctaggaagggcaaggccctgggttcggtccccagctccgaaaaaaagaaccaaaaaaaaaaaaaaaaaaaaaaactacaacgtgctagagtagtagtgcacatctttagtcccagcacaaaggaggcagaggcaggtggatttctgagttggaggccatcccggtctacagagtgagttcccagacagccagggctacacaatgagaccctgcctaatgaaacaaaacaaaaaccaaacaacaatccacaaagtctgaaaatgtcctccccacccacaataaataaatacattttaaaattatgagaaaatgtaatctaaaacgccaagcatgtgacaaactgtcattctcatttctgggcctaagctcctccacacagcagtaactctgtttcaggattgtaaaagatctagcacaattctttgggtaggcagtaggcatctaataaatgctcctttccatccatcccttgatcttgtcccctgtttcctctatttttgtgtatatggctattgtctgaggcagtatctcaagttgccaaggttgacttgatcctctggctggcacctaacctaaacgctcagatcacagaattgtttcaccaggtctgtttgtttgtttgtttgtttgtttgttttttggtttgttattttgtcttgagacagacactccctccccctcccccccttccttgttttgtttgtgtaacaagcagctctgactgtcctggacttaatttgtagacccctctggtctcaaactcagagattctgcctgccactgcctccacaagtgctaggaataaatgtatgtgtaaccacctctgtgagagcctgtggcagacactaacagaaagacactcagaattcacacctctgcttccaggtgtacacacacacacacatacacacacacacacacacacacacacatacacgagagagagagagagagagagagagagagagagagagagagtactaagtcaagtaactgatctcaacaacttacatagtgtttcccatgggccccactaaatctagaaactttgtgagtgctttatttgcttatttgaggggtctaaagtctcactcaggtggagaagagtggagttaaaccctcagacagcactcacccttttgaaataagctctgtcggggttggggatttagctcagtggtagagcgcttgcctaggaagtgcaaggccctgggttcggtccccagctccggaaaaaaaagaaaaaaaaaaaaaaaaaagaaccaaaaaaaaaaaaaagaaataagctctgtcactgagggccttttacacactagggagacaaaggacattggttttagttatctgaactgatccaagctgagctccatactgagttggaacagcatctgcagtgtgggttcctaaccagtgctgtacgccccctcgggagctgggtaagtctgaaaagcaatcctgggccatagtatttttccacagtcaaaaagatgctctgtaatcccttccagaattgagtctcgtctggagattgatggcttaaaaagtgtccgttgagctgagaatatgactcactccatagagtgcttgcctagcaggaagaaagcgctgggttctatccctacggcacataaaccagccttggtgatggtcattccagcacatggcaaatggagacagggaggtcaggaggtcagagtcagtttagataacatgacctcttacttcaaaagagagtaaacagggctgggaaggcccagagtgtcagctcagcagtttagagctcttcctgctcttgtggagaacacgcgtgtgttgtataggtatgtgtatgttatgcagtcacacttcacaaggttcatctggggcttcctgagctaaaggaagcaagcgccatgcttcctggtcttcatctgcttgcaccctgctgctcccatctttggtgctcctcaccctcctcccctgtcctctccagccctcaagatccacttgtcttcagagaccaaggctgtgctggaagagttcgatggtttcgagctggagctccgaggggatgtggaaatgaaggtagagaaggactccttagaccccagaggatcccaaggccacgcccgtaacttaaatatctcaagtgatttgggggagtgggtgtgccattccctaacccgcctaatctttttattttctccagggcaaaggcaaggttcggacctattggctcctgggggagcggggatgtagcactcgaggctgacctactgccctgctgttccttgtcacccctcctccctgtgccagaggtgacagaggtgtccagcttccacctctcccacagcagcccagccactgtggaaggattagggacctgaccagcacagtcaccagatgtgacctctgagagaggatggagatggtggggactgcaggggacacctaagtttgtaggactgactgaaacacacagtccctcccatggcacccttgtggcacacatgcccagtcccacccttactctgctgcctagattgggacagcgattccttctctgccctcaacttagctccactgtgacttatagggagggaattgccacctgaaggaaacagaaagaggttagagtttgcaggaggcgggcagtcctgtgtcacaaatactcccctcacttccagcccaccacctgccccacagactttggacacagctcactgaggagaagagaagctgccggttaccttgcttctcctgtgaaccaaaccattaaagtctttattcctgtgacactgacacgtttcttcttgggaagagagggttgctgggaaacagtagtgttctttctctaccttctgcttccaaaagagttacctttggggctggggatttagctcagtggtagagcgcttacctaggaagcgcaaggccctgggttcggtccccagctccaaaaaaaaaaaagaaaaaaaaaagagttaccttcaactttgtttctttttcattgttgttgatgttgtaactaattttaagctttcttttttttttttttttttccccttcttctctgagccaggtgtagacctggctgtcttggaactcactctgtagaccaggctggcctggaactcacagagatccacctacctactgctgggattaaaggcatgtgtggcccccgaccctggctaattttacacttttaatcgacgagaccacagaattc

SEQ ID NO: 2660 - protein, 1057 aa, Rattus norvegicus
  ref <308>: DATABASE ACCESSION NUMBER: SWISS-Prot / AAA41200
  ref <309>: DATABASE ENTRY DATE: 2001-10-16
MPGSRRVRPRLRALLLLPPLLLLRGGHASDLTVAVVLPLTNTSYPWSWARVGPAVELALARVKARPDLLPGWTVRMVLGSSENAAGVCSDTAAPLAAVDLKWEHSPAVFLGPGCVYSAAPVGRFTAHWRVPLLTAGAPALGIGVKDEYALTTRTGPSHVKLGDFVTALHRRLGWEHQALVLYADRLGDDRPCFFIVEGLYMRVRERLNITVNHQEFVEGDPDHYPKLLRAVRRKGRVIYICSSPDAFRNLMLLALNAGLTGEDYVFFHLDVFGQSLKSAQGLVPQKPWERGDGQDRSARQAFQAAKIITYKEPDNPEYLEFLKQLKLLADKKFNFTVEDGLKNIIPASFHDGLLLYVQAVTETLAQGGTVTDGENITQRMWNRSFQGVTGYLKIDRNGDRDTDFSLWDMDPETGAFRVVLNYNGTSQELMAVSEHKLYWPLGYPPPDVPKCGFDNEDPACNQDHFSTLEVLALVGSLSLISFLIVSFFIYRKMQLEKELVSELWRVRWEDLQPSSLERHLRSAGSRLTLSGRGSNYGSLLTTEGQFQVFAKTAYYKGNLVAVKRVNRKRIELTRKVLFELKHMRDVQNEHLTRFVGACTDPPNICILTEYCPRGSLQDILENESITLDWMFRYSLTNDIVKGMLFLHNGAICSHGNLKSSNCVVDGRFVLKITDYGLESFRDPEPEQGHTLFAKKLWTAPELLRMASPPARGSQAGDVYSFGIILQEIALRSGVFYVEGLDLSPKEIIERVTRGEQPPFRPSMDLQSHLEELGQLMQRCWAEDPQERPPFQQIRLALRKFNKENSSNILDNLLSRMEQYANNLEELVEERTQAYLEEKRKAEALLYQILPHSVAEQLKRGETVQAEAFDSVTIYFSDIVGFTALSAESTPMQVVTLLNDLYTCFDAVIDNFDVYKVETIGDAYMVVSGLPVRNGQLHAREVARMALALLDAVRSFRIRHRPQEQLRLRIGIHTGPVCAGVVGLKMPRYCLFGDTVNTASRMESNGEALKIHLSSETKAVLEEFDGFELELRGDVEMKGKGKVRTYWLLGERGCSTRG

SEQ ID NO: 2661 - DNA, 3482 bp, Homo sapiens
  ref <308>: DATABASE ACCESSION NUMBER: Refseq / NM_000907
  ref <309>: DATABASE ENTRY DATE: 2001-02-03
atggcgctgccatcacttctgctgttggtggcagccctggcaggtggggtgcgtcctcccggggcgcggaacctgacgctggcggtggtgctgccagaacacaacctgagctatgcctgggcctggccacgggtgggacccgctgtggcactagctgtggaggctctgggccgggcactgcccgtggacctgcggtttgtcagctccgaactggaaggcgcctgctctgagtacctggcaccgctgagcgctgtggacctcaagctgtaccatgaccccgacctgctgttaggtcccggttgcgtgtaccctgctgcctctgtggcccgctttgcctcccactggcgccttcccctgctgactgcgggtgctgtggcctctggtttttcggctaagaatgaccattatcgtaccctggttcgcactggcccctctgctcccaagctgggtgagtttgtggtgacactacacgggcacttcaattggactgcccgtgctgccttgctgtacctggatgctcgcacagatgaccggcctcactacttcaccatcgagggcgtctttgaggccctgcagggcagcaacctcagtgtgcagcaccaggtgtatgcccgagagccagggggccccgagcaggccacccacttcatccgggccaacgggcgcattgtgtatatctgcggccctctggagatgctgcatgagatcctgcttcaggcccagagggagaatctgaccaatggggattatgtcttcttttacctggatgtctttggggagagtctccgtgcaggccccacacgtgctacaggccggccctggcaggacaatcgcacccgggaacaggcccaggccctcagagaggcctttcagactgtattggtgatcacgtaccgagaacccccaaatcctgagtatcaggaattccagaatcgtctgctgataagagcccgggaagactttggtgtggagctgggcccttccctgatgaacctcatcgctggctgcttctatgatgggatcctgctatatgctgaagtcctgaatgagacaatacaggaaggaggcacccgggaggatggacttcgaattgtggaaaagatgcagggacgaagatatcacggtgtaactgggctggttgtcatggacaagaacaatgaccgagagactgactttgtcctctgggccatgggagacctggattctggggactttcagcctgcagcccactactcgggagctgagaagcagatttggtggacgggacggcctattccctgggtgaagggggctcctccctcggacaatcccccctgtgcctttgacttggacgacccatcctgtgataaaactccactttcaaccctggcaattgtggctctgggcacaggaatcaccttcatcatgtttggtgtttccagcttcctaattttccgaaagctgatgctggagaaggagctggctagcatgttgtggcgtattcgctgggaagaactgcagtttggcaactcagagcgttatcacaaaggtgcaggcagtcgcctcacactgtcgctgcggggatccagttacggctcgctcatgacagcccatgggaaataccagatctttgccaacaccggtcacttcaagggaaatgttgtcgccatcaaacatgtgaataagaagcgcattgagctgacccggcaggttctgtttgaactcaaacatatgagagatgttcagttcaaccatctcactcgcttcattggcgcctgcatagaccctcccaacatttgcattgtcactgaatactgtcctcgtgggagtttacaggatattctagaaaatgacagcatcaacttggactggatgtttcgttattcactcattaatgaccttgttaagggcatggcctttctccacaacagcattatttcatcgcatgggagtctcaagtcctccaactgtgtggtggatagtcgttttgtgctcaaaatcacagactatggcctggccagcttccgatcaactgctgaacctgatgacagccatgccctctatgccaagaagctgtggactgccccagaactgctcagtgggaaccccttgccaaccacaggcatgcagaaggctgacgtctatagctttgggatcatcctgcaggagatagcacttcgcagtggtcctttctacttggagggcctggacctcagccccaaagagattgtccagaaggtacgaaatggtcagcggccatatttccggccaagcattgaccggacccaactgaatgaagagctagttttgctgatggagcgatgttgggctcaggacccagctgagcggccagactttggacagattaagggcttcattcggcgctttaacaaggagggtggcaccagcatattggacaacctcctgctgcgcatggaacagtatgccaataacttggagaagctggtggaggaacgcacacaggcctatctggaggaaaaacgcaaggctgaagctctgctctaccaaatcctaccccattcagtggcagagcagttaaaacggggagagactgtacaggctgaggcctttgacagtgttaccatctacttcagtgacattgttggcttcacagcattgtcagcagagagcacccccatgcaggtagtgacacttcttaatgacctgtatacctgctttgatgccataattgacaactttgatgtctacaaggtggagacgattggggatgcttacatggtggtatctggcctcccaggccgaaatggtcaacgccatgcaccagaaattgctcgtatggccctagcattactagatgcagtttcttcctttcgcatccgccaccgaccccatgaccagctgaggctacgcataggggtccatactggtaaggctgactctcactccagccctagtctccacctttcccagactctcccaacctgtttcttctcaaagggccagtctgtgctggggttgttggcctgaagatgccccgttattgtctttttggagacacagtgaacactgcttctcgaatggagtctaatggtcaagcgctgaagatccatgtctcctctaccaccaaggatgccctagatgagctaggatgcttccagctagagcttcggggggatgtggaaatgaagggaaaaggaaagatgcgaacatactggctcttaggagagcggaaaggacctcctggactcctgtaaacccccattctttccaagtcagatagtcttctgctgctggtacctgggtgggcaatggccaccatgtctgcacacaccagaaatggacattttcatatgcaatggaaaacagccacaaaaagacctaccttatatggaagttgtagccctctgcagctcagccctgtacatatacctgtccctctctggcttggtccccttcctccctactttctgtaaatatctgtatctaaaccagaatattttggtcaaatataaaacaataat

SEQ ID NO: 2662 - protein, 1047 aa, Homo sapiens
  ref <308>: DATABASE ACCESSION NUMBER: SWISS-Prot / P20594
  ref <309>: DATABASE ENTRY DATE: 2001-10-16
MALPSLLLLVAALAGGVRPPGARNLTLAVVLPEHNLSYAWAWPRVGPAVALAVEALGRALPVDLRFVSSELEGACSEYLAPLSAVDLKLYHDPDLLLGPGCVYPAASVARFASHWRLPLLTAGAVASGFSAKNDHYRTLVRTGPSAPKLGEFVVTLHGHFNWTARAALLYLDARTDDRPHYFTIEGVFEALQGSNLSVQHQVYAREPGGPEQATHFIRANGRIVYICGPLEMLHEILLQAQRENLTNGDYVFFYLDVFGESLRAGPTRATGRPWQDNRTREQAQALREAFQTVLVITYREPPNPEYQEFQNRLLIRAREDFGVELGPSLMNLIAGCFYDGILLYAEVLNETIQEGGTREDGLRIVEKMQGRRYHGVTGLVVMDKNNDRETDFVLWAMGDLDSGDFQPAAHYSGAEKQIWWTGRPIPWVKGAPPSDNPPCAFDLDDPSCDKTPLSTLAIVALGTGITFIMFGVSSFLIFRKLMLEKELASMLWRIRWEELQFGNSERYHKGAGSRLTLSLRGSSYGSLMTAHGKYQIFANTGHFKGNVVAIKHVNKKRIELTRQVLFELKHMRDVQFNHLTRFIGACIDPPNICIVTEYCPRGSLQDILENDSINLDWMFRYSLINDLVKGMAFLHNSIISSHGSLKSSNCVVDSRFVLKITDYGLASFRSTAEPDDSHALYAKKLWTAPELLSGNPLPTTGMQKADVYSFGIILQEIALRSGPFYLEGLDLSPKEIVQKVRNGQRPYFRPSIDRTQLNEELVLLMERCWAQDPAERPDFGQIKGFIRRFNKEGGTSILDNLLLRMEQYANNLEKLVEERTQAYLEEKRKAEALLYQILPHSVAEQLKRGETVQAEAFDSVTIYFSDIVGFTALSAESTPMQVVTLLNDLYTCFDAIIDNFDVYKVETIGDAYMVVSGLPGRNGQRHAPEIARMALALLDAVSSFRIRHRPHDQLRLRIGVHTGPVCAGVVGLKMPRYCLFGDTVNTASRMESNGQALKIHVSSTTKDALDELGCFQLELRGDVEMKGKGKMRTYWLLGERKGPPGLL

SEQ ID NO: 2663 - DNA, 1464 bp, Rattus norvegicus
  ref <308>: DATABASE ACCESSION NUMBER: EMBL / K00512
  ref <309>: DATABASE ENTRY DATE: 2000-03-04
ttcggcttccgaaggcctgatgtgatggcatcacagaagagaccctcacagcgacacggatccaagtacttggccacagcaagtaccatggaccatgcccggcatggcttcctcccaaggcacagagacacgggcatccttgactccatcgggcgcttctttagcggtgacaggggtgcgcccaagcggggctctggcaaggactcacacacaagaactacccactacggctccctgccccagaagtcgcagaggacccaagatgaaaacccagtagtccacttcttcaagaacattgtgacacctcgtacaccccctccatcccaaggaaaggggagaggcctgtccctcagcagatttagctggggaggaagagacagccgctctggatctcccatagcaagacgctgagagcctccctgctcagccttcccgaatcctgccctcggcttcttaatataactgccttaaacgtttaattctacttgcaccaaatagctagttagagcagaccctctcttaatcccgtggggctgtgaacgcggcgggccagcccacggcaccctgactggctaaaactgtttgtccctttttatttgaagattgagtttcctcggggtcttctctgccccgacttgctccccgtgtaccttggtcgactccggaggttcaggtgcacggacaccctttcaagttcacccctactccatcctcagactttcttttcacggcgaggcgcacccctccagcttccgtgggcactgcggatagacaggcacaccgccaaggagccagagagcatggcgcaggggactatgtggtccaggcttcctttgttttctttcccctaaagagctttgtttttcctgacaggatcagacagtcttggagtggcttacacaacgggggcttgtggtatgtgagcacaggtcgggcagctgtgagagtccagagtggggtggccctggggacgcttccaggccagcggttccctgcaccccaccagctgatttcgagcgtggcagagggaaggaaaggggcgagcgggctgggcaatggacccgacaggaaacggggacttaggggaacacgctggagatgccatgtgtggctgccgaaggtcaccatctctcctcagtgctccccagagcaggtgcttttaagaaccctgtttcctctcagagcctagggagagtccaaggacatggcgcatcaggaagtgggactgcaggagttctctggtggcctcgtgctgtccctctggccacttctcactttagggtggtcacggcagctcgccatggcagtgccattggtgcacactaacctcatggaaaagtaaccattccctgcctcttagaaagaactcattcttagttttaggagggttcctgtcgctgaatcaagtcgctgccctgatgcagggctggccttggcgaccctccagggatgaggagctcagaa

SEQ ID NO: 2664 - protein, 194 aa, Rattus norvegicus
  ref <308>: DATABASE ACCESSION NUMBER: SWISS-Prot / P02688
  ref <309>: DATABASE ENTRY DATE: 2002-06-15
ASQKRPSQRHGSKYLATASTMDHARHGFLPRHRDTGILDSIGRFFSGDRGAPKRGSGKVPWLKQSRSPLPSHARSRPGLCHMYKDSHTRTTHYGSLPQKSQRTQDENPVVHFFKNIVTPRTPPPSQGKGRGLSLSRFSWGAEGQKPGFGYGGRASDYKSAHKGFKGAYDAQGTLSKIFKLGGRDSRSGSPMARR

SEQ ID NO: 2665 - DNA, 2528 bp, Rattus norvegicus
  ref <308>: DATABASE ACCESSION NUMBER: EMBL / K00750
  ref <309>: DATABASE ENTRY DATE: 2002-02-12
gctcctccccaacacgcaggccggagggtgacgtcatccacgtccacgccttacgtccaagggcctgtcgtaagtgtcgggcaaacgaggcctctagaggaagggcgccctctcggtacaacctaccatgctagcccgcatgcgcgcgcaccttgctagcgctcccaatcctggagccaatgacatgcggctacgtcacggcgcagtgcccggcgctgccgcacgtccggccgcgggagggcagaacaagtgtggttgcattgacaccggtacataggcgcgggccggcgtgtccttgggctagagagcgggacgtctccctaagagtctgatcctttgtggtgttgaccagcccggaccggtgagcgcgcgacggggacgcggggcggaagagggcgaggagaccgaggcaggcctgacctacaaagacatgcggaactgtggaggctccgtgggtgaagggctggggccagagttctagagggagcttgcccgccgcaccttctgagagcagaagctgctgtttcttaagaactgggctggttctttttctgattaagtttctggaaaggtgggtttcttcagtcccctttggatgacctcgtggttacccctgggatctcagaacgcgtagagtgagaaggttccttcccttgccttcccgggccggactaatgcaagagtgacttaacctccaaatgagaccagagcaggaggaggaagcacttaggatcttcagcccccgagccccattgatgtattttcccttatctttggaagtgactttaaatgacagcacagacagcaattaagcattctgaaatgctaagaggtatagtggttttggcttaacaaaattgtagtctagtttcatatttgactttttgaccttgccttcttcagaaactgaagcttgaactgtgggtttccatttcccttccttgggcatgagcctgtcttgaaagtttgctttaatcctaaataacgcgcttgctgttgaaggatattgcaaacagactgagttattagatagcatccagcctggtggtagtattgtaaagggttggtacttaagtgatttgagtggtcattgggatccatagtatgttttgctgtaacaagtgacttgaaccgttgggtctttttcatttctagaatttaaaatgggtgatgttgaaaaaggcaagaagatttttgttcaaaagtgtgcccagtgccacactgtggaaaaaggaggcaagcataagactggaccaaacctccatggtctgtttgggcggaagacaggccaggctgctggattctcttacacagatgccaacaagaacaaaggtaagtgtggagctgctgttcagacagagcacaggttgcatgggtgtaaccaatgcagacttatcaggtataaaacatttaactgctgcatctctttctgtgtaggtatcacctggggagaggataccctgatggagtatttggaaaatcccaaaaagtacatccctggaacaaaaatgatcttcgctggaattaagaagaagggagaaagggcagacctaatagcttatcttaaaaaggctactaatgaataattccactgccttatttattacaaaacaaatgtctcatggcttttaatgtataccataatttaattcatacaccaaattcagatcatgaatggctaacaatgtttttgttggacagccccgatttaagtaaaattgacttgtcataaagtggatatgatcttttttaaagtaacacttccaattgaatacatgttatcactgctttccctttctcaagataagattggacttaattagtaatattttcctttccataaataggagggtgtcgcctcaaacctattgaatggttttatacttagatttatataactgggtatatgaatatgttcaaatcctgggaaaattctgtcactgtctgagaaacaagaagactcacccgtgcttcagtgtgtgtaaactggcctctgacaggcaatgctaaacaccaggacggaactattcttgacagtgctgttttaattagaattccctacatcaatgatgctgcctttcaccactgaaaggcatttactgtggtttatgtatgatatcaaataaagagtatttaacacttctttatagttgatctacaagttaaaatgcttttaagaacaagttaggccttttaaatcttctcttatctaagactaagctgtaattcagaattgtccttaaatgcccattcggaaagtcataactggaatttctgttcatgcctgattgggagtggtactcttttctaacttactagatggaaagatgaaaataaaggagataatttgtaagttatcaacagtcagaagataattaaatcaatcacaaatcatgatcttttgattgtgctttaatgatggttggcaaaacttaagctgtttaaactttccctagtaaaaccgtggtctagtgaaagcactggttgatattaccttgatacggggacaactcagactagagcaacac

SEQ ID NO: 2666 - protein, 104 aa, Rattus norvegicus
  ref <308>: DATABASE ACCESSION NUMBER: SWISS-Prot / AAA21711
  ref <309>: DATABASE ENTRY DATE: 2002-06-15
GDVEKGKKIFVQKCAQCHTVEKGGKHKTGPNLHGLFGRKTGQAAGFSYTDANKNKGITWGEDTLMEYLENPKKYIPGTKMIFAGIKKKGERADLIAYLKKATNE

SEQ ID NO: 2667 - DNA, 3990 bp, Homo sapiens
  ref <308>: DATABASE ACCESSION NUMBER: Refseq / NM_018947
  ref <309>: DATABASE ENTRY DATE: 2002-11-05
ggacgtccggcttcggagcgggagtgttcgttgtgccagcgactaaaaagagaattaaatatgggtgatgttgagaaaggcaagaagatttttattatgaagtgttcccagtgccacaccgttgaaaagggaggcaagcacaagactgggccaaatctccatggtctctttgggcggaagacaggtcaggcccctggatactcttacacagccgccaataagaacaaaggcatcatctggggagaggatacactgatggagtatttggagaatcccaagaagtacatccctggaacaaaaatgatctttgtcggcattaagaagaaggaagaaagggcagacttaatagcttatctcaaaaaagctactaatgagtaataattggccactgccttatttattacaaaacagaaatgtctcatgacttttttatgtgtaccatcctttaatagatctcatacaccagaattcagatcatgaatgactgacagaatattttgttgggcagtcctgatttaaaactaagactggcttgtggttaaatgaatatgttcagtttttgaattttaatagtaactccaattcagtaaatggtatcactgtttaccccttttaaagatatgattagacttcgttagtaatgttcaacttttcacaaagatggtgagtgccatcttaaaacttactggagattggttttatatttagatttatataactggttatgtgaatatatttaaatactggggaaattgcttcactgtcttagaaccaagcaagattcacctgtgttttgtgttcatgttcatttgcctcttaaaggcaagggttgaagataaataaggttgcaatgtctatagttttggccttaactatgccaatctaattataattccctgtatttaaaatggtttcttttacttattgaaaggcattttagtgtggtttatgtgtaatattaaagattattcaacacctctcacatcttacagatctataaggtcacatgcttttaaaatagtagcaagttaaacttcactcttgaattctttacaatctaagtcaaactaagttataatttaggattgtctttaaacagccattcagaaacaaaactgtagaactgtgtatttgattgggaatggtgcttttgccaacttaaaaggattaaagtaacggagatatacacaaattttaaaattatgtgtgatcacaagactaaagataattaaaaagaaaaccacagatcatgactttttgactgtgcttgatttcatgactgatgcacaaattttaatgattaaaaagtgcaggagccctaaatgtcagtgcagcagccctaaatgtcagtgcagcagtgttaaccagtcatggtgctagattgtttacttggttttctaggactgcctcaactagaataacacttcactaattgactcttagtttctttgctcagattgagaactgcagcatttatgccagacatggacagaggaatgcctgtggtcatagttttgtgatgtgtaacagtgtataattacatactgaattatttcatgcatagtctgtgccatacacatttagagtagtccttggagattttatggagatggtgagcacaaggtaagtcataaagaataatgagaaaataaatctatgctggtgcagctgagaactgtatctttgtgggacagtgagaagactgagaagatgtgaatccatggtctcaaaggtgatagggacgattagataggtgttttaaggcctgaaagcaatttataacatatgagtcttatttttatttatagaaatgtggaaagcttgctgtaattcatatttgaagtcctagtctgagttctggtggggaatttaaaaatgcatcctggaaatcctttaaagatttcagactttgaaaggccttgtagcagaggacttggtgactgtataaagttagtggtattcagggacagtgtagcaagtagcttacaaggggacaattctggactaatgagaaagacctgaagtgaaggctagagagttgattttttttttttttggcatcctggaaatgatacaggaaacatattaagatagatacagaaatgtgttcaaccttccatcttggctagttgtggcgtttagtttgttttttgagacatggtcacgctgtgtcgccaaggctggagtgcagtggtgcgatctcggctggctgcagcctctatttcccaggctcaagcgattctctcacttcagcttcccaagtagctgggactgcgggtgttcgccaccatgcccagctaatttttttgtagagatggagttttgccatgtggtcccaggctggtctcaaactcctgagctcaagcaatccgtccacttgccttggctccccaaagtgctgggattgcaggcgtgagccaccaggccctgcctggttttcaaattcagaaatcttattatttaacccagaagtaatcagcccagtagtaacttaggtttaattttttttcaggtttaaaatttttctcatttattttttctgagacggagtttcgcccttttcgcccaggctgagtacagtggtgcaatctcactgcaacctccgccttccagttgcaagtgattctcctgcctcagcctcctgagtagctgggattgcaggcacccgccaccacgcctggctaatttttgtatttttagtggagatggtgtttcaccatgttggccagactggtcttggactcctgacctcgtgatccacccaccttggcctcccaaagttctaggattacaggtgtgagccaccacgtccggccaatttttctcatttctatgcctcctatattaaggtctgtgttggcacagatgagtaactgccatgttctaggtcagttatacccaagcacttctggtggtttaaaatgtgattctgtaacttttttatttttatttttttgagataatttcactcttgttgcccaggctggagtgcaatggcgtgatcgctgctcaccgcaacctccgccttccaggttcaagcgattctcctgactcagcctctcaagtagctgggattacaagcatgcgccaccatgcccagcttattttgtgtttttagtagagacagggtttctccatgctggacaggctggtcttgaactcccgacgtcgggtgatctgcctgcctcggcctcccaaagtgctgggattacaggcgtgagccaccacgcctggccaattatgtaattttttaaaaaggacatttctatcagggatatataccttcagaaataaggaaataggggaaaaaaagagcactataaaccacatgttttcatttctagtgcttcgctgtaagtggctaggttggtagaatcaaaaacaagggccagatgtatttaaggggtattcagatgccacctacatgcttattttgtctagaacagtgctgtctaatagaactttctgtgacgatggatattttgtagacttttgctgtccagtgtggtagccactaaccacatgtggctgttaagcccttgaaatatagctagtgtgactagaaagtattttattttaaatttacataggcacaagtggctagtggctactgtattgacattctgggtctaggactagaaccagtggtctgtaacaaaagtactttctctttactctattaaatctagaattagccgggcatggtcgctcatgcctgtggtcccagcactttgggaggccaaggcaggcagatcacttgaggtcgggcgtttgagaccagcctggtcaacatggcgaaaccctgtctctacaaaaaacataaaagttagccaggtgtggtggtgggcacctgtagtctcagctacttgggaggctgaggcacaagaatcacttgaacttgggaggtggaggttgcagtgagccaggattgtgccactgcactcaagcctgggtgacgagtgaaactgtctccaaaaaaaaaaaaaaaaa

SEQ ID NO: 2668 - protein, 104 aa, Homo sapiens
  ref <308>: DATABASE ACCESSION NUMBER: SWISS-Prot / P00001
  ref <309>: DATABASE ENTRY DATE: 2002-06-15
GDVEKGKKIFIMKCSQCHTVEKGGKHKTGPNLHGLFGRKTGQAPGYSYTAANKNKGIIWGEDTLMEYLENPKKYIPGTKMIFVGIKKKEERADLIAYLKKATNE

SEQ ID NO: 2669 - DNA, 2528 bp, Rattus norvegicus; identical to SEQ ID NO: 2665
  ref <308>: DATABASE ACCESSION NUMBER: EMBL / K00750
  ref <309>: DATABASE ENTRY DATE: 2002-02-12

SEQ ID NO: 2670 - protein, 104 aa, Rattus norvegicus; identical to SEQ ID NO: 2666
  ref <308>: DATABASE ACCESSION NUMBER: SWISS-Prot / AAA21711
  ref <309>: DATABASE ENTRY DATE: 2002-06-15

SEQ ID NO: 2671 - DNA, 3990 bp, Homo sapiens; identical to SEQ ID NO: 2667
  ref <308>: DATABASE ACCESSION NUMBER: Refseq / NM_018947
  ref <309>: DATABASE ENTRY DATE: 2002-11-05

SEQ ID NO: 2672 - protein, 104 aa, Homo sapiens; identical to SEQ ID NO: 2668
  ref <308>: DATABASE ACCESSION NUMBER: SWISS-Prot / P00001
  ref <309>: DATABASE ENTRY DATE: 2002-06-15

SEQ ID NO: 2673 - DNA, 2528 bp, Rattus norvegicus; identical to SEQ ID NO: 2665
  ref <308>: DATABASE ACCESSION NUMBER: EMBL / K00750
  ref <309>: DATABASE ENTRY DATE: 2002-02-12

SEQ ID NO: 2674 - protein, 104 aa, Rattus norvegicus; identical to SEQ ID NO: 2666
  ref <308>: DATABASE ACCESSION NUMBER: SWISS-Prot / AAA21711
  ref <309>: DATABASE ENTRY DATE: 2002-06-15

SEQ ID NO: 2675 - DNA, 3990 bp, Homo sapiens; identical to SEQ ID NO: 2667
  ref <308>: DATABASE ACCESSION NUMBER: Refseq / NM_018947
  ref <309>: DATABASE ENTRY DATE: 2002-11-05

SEQ ID NO: 2676 - protein, 104 aa, Homo sapiens; identical to SEQ ID NO: 2668
  ref <308>: DATABASE ACCESSION NUMBER: SWISS-Prot / P00001
  ref <309>: DATABASE ENTRY DATE: 2002-06-15

SEQ ID NO: 2677 - DNA, 2528 bp, Rattus norvegicus; identical to SEQ ID NO: 2665
  ref <308>: DATABASE ACCESSION NUMBER: EMBL / K00750
  ref <309>: DATABASE ENTRY DATE: 2002-02-12

SEQ ID NO: 2678 - protein, 104 aa, Rattus norvegicus; identical to SEQ ID NO: 2666
  ref <308>: DATABASE ACCESSION NUMBER: SWISS-Prot / AAA21711
  ref <309>: DATABASE ENTRY DATE: 2002-06-15

SEQ ID NO: 2679 - DNA, 3990 bp, Homo sapiens; identical to SEQ ID NO: 2667
  ref <308>: DATABASE ACCESSION NUMBER: Refseq / NM_018947
  ref <309>: DATABASE ENTRY DATE: 2002-11-05

SEQ ID NO: 2680 - protein, 104 aa, Homo sapiens; identical to SEQ ID NO: 2668
  ref <308>: DATABASE ACCESSION NUMBER: SWISS-Prot / P00001
  ref <309>: DATABASE ENTRY DATE: 2002-06-15

SEQ ID NO: 2681 - DNA, 2528 bp, Rattus norvegicus; identical to SEQ ID NO: 2665
  ref <308>: DATABASE ACCESSION NUMBER: EMBL / K00750
  ref <309>: DATABASE ENTRY DATE: 2002-02-12

SEQ ID NO: 2682 - protein, 104 aa, Rattus norvegicus; identical to SEQ ID NO: 2666
  ref <308>: DATABASE ACCESSION NUMBER: SWISS-Prot / AAA21711
  ref <309>: DATABASE ENTRY DATE: 2002-06-15

SEQ ID NO: 2683 - DNA, 3990 bp, Homo sapiens; identical to SEQ ID NO: 2667
  ref <308>: DATABASE ACCESSION NUMBER: Refseq / NM_018947
  ref <309>: DATABASE ENTRY DATE: 2002-11-05

SEQ ID NO: 2684 - protein, 104 aa, Homo sapiens; identical to SEQ ID NO: 2668
  ref <308>: DATABASE ACCESSION NUMBER: SWISS-Prot / P00001
  ref <309>: DATABASE ENTRY DATE: 2002-06-15

SEQ ID NO: 2685 - DNA, 2528 bp, Rattus norvegicus; identical to SEQ ID NO: 2665
  ref <308>: DATABASE ACCESSION NUMBER: EMBL / K00750
  ref <309>: DATABASE ENTRY DATE: 2002-02-12

SEQ ID NO: 2686 - protein, 104 aa, Rattus norvegicus; identical to SEQ ID NO: 2666
  ref <308>: DATABASE ACCESSION NUMBER: SWISS-Prot / AAA21711
  ref <309>: DATABASE ENTRY DATE: 2002-06-15

SEQ ID NO: 2687 - DNA, 3990 bp, Homo sapiens; identical to SEQ ID NO: 2667
  ref <308>: DATABASE ACCESSION NUMBER: Refseq / NM_018947
  ref <309>: DATABASE ENTRY DATE: 2002-11-05

SEQ ID NO: 2688 - protein, 104 aa, Homo sapiens; identical to SEQ ID NO: 2668
  ref <308>: DATABASE ACCESSION NUMBER: SWISS-Prot / P00001
  ref <309>: DATABASE ENTRY DATE: 2002-06-15

SEQ ID NO: 2689 - DNA, 314 bp, Rattus norvegicus
  ref <308>: DATABASE ACCESSION NUMBER: EMBL / K00994
  ref <309>: DATABASE ENTRY DATE: 2000-03-04
aagagcatttttcaaaaatatgcagccaaagaaggcgatccaaaccagctgtccaaggaggagctgaagctgctgattcagtcagagttccccaacctcctgaaggcttcaagtactctagacaatctctttgaagagctggataagaacgatgatggagaagttagctatgaagaattcgaagttttcttcaaaaagttatcacaatgaagccagaagaaggagctccgacaccacctactgattgaatcctatccaatcccaaagatctagctgtgagagcaagatactgttaataaagcaaattctgagac

SEQ ID NO: 2690 - protein, 78 aa, Rattus norvegicus
  ref <308>: DATABASE ACCESSION NUMBER: SWISS-Prot / AAA40843
  ref <309>: DATABASE ENTRY DATE: 2002-06-15
SAKKSPEEMKSIFQKYAAKEGDPNQLSKEELKLLIQSEFPSLLKASSTLDNLFKELDKNGDGEVSYEEFEVFFKKLSQ

SEQ ID NO: 2691 - DNA, 456 bp, Homo sapiens
  ref <308>: DATABASE ACCESSION NUMBER: Refseq / NM_004057
  ref <309>: DATABASE ENTRY DATE: 2002-11-05
aaaaaactcctctttgattcttctagctgtttcactattgggcaaccagacaccagaatgagtactaaaaagtctcctgaggaactgaagaggatttttgaaaaatatgcagccaaagaaggtgatccagaccagttgtcaaaggatgaactgaagctattgattcaggctgaattccccagtttactcaaaggtccaaacaccctagatgatctctttcaagaactggacaagaatggagatggagaagttagttttgaagaattccaagtattagtaaaaaagatatcccagtgaaggagaaaacaaaatagaaccctgagcactggaggaagagcgcctgtgctgtggtcttatcctatgtggaatcccccaaagtctctggtttaattctttgcaattataataacctggctgtgaggttcagttattattaataaagaaattattagacat

SEQ ID NO: 2692 - protein, 78 aa, Homo sapiens
  ref <308>: DATABASE ACCESSION NUMBER: SWISS-Prot / P29377
  ref <309>: DATABASE ENTRY DATE: 2002-06-15
STKKSPEELKRIFEKYAAKEGDPDQLSKDELKLLIQAEFPSLLKGPNTLDDLFQELDKNGDGEVSFEEFQVLVKKISQ

SEQ ID NO: 2693 - DNA, 959 bp, Rattus norvegicus
  ref <308>: DATABASE ACCESSION NUMBER: EMBL / K01932
  ref <309>: DATABASE ENTRY DATE: 2000-03-04
agagggagcagctttttaacaagagaactcaagcaattgctgccatgccggggaagccagtccttcactacttcgatggcagggggagaatggagcccatccggtggctcctggctgcagctggagtagagtttgaagaacaatttctgaaaactcgggatgacctggccaggctaaggaatgatgggagtttgatgttccagcaagtgcccatggtggagattgatgggatgaagctggtgcagaccagagccattctcaactacattgccaccaaatacaacctctatgggaaggacatgaaggagagagccctcatcgacatgtatgcagaaggagtggcggatctggatgaaatagttctccattacccttacattccccctggggagaaagaggcaagtcttgccaaaatcaaggacaaagcaaggaaccgttactttcctgcctttgaaaaggtgttgaagagccatggacaagattatctcgttggcaataggctgagcagggctgatgtttacctagttcaagttctctaccatgtggaagagctggaccccagcgctttggccaacttccctctgctgaaggccctgagaaccagagtcagcaacctccccacagtgaagaagtttcttcagcctggcagccagaggaagccattagaggatgagaaatgtgtagaatctgcagttaagatcttcagttaattcaggcatctatggatacactgtacccacaaagccagccttcgaaagctttgcaacaatcgcatattttgactaaatgttgaccctacttattgggaggccaacacgttttctaatgcttctgtgttaattcatatagacatgactgatgaggaattgctgggatgctatttggttgtagttaaaatttgaaatcatgatcacttcctcagatattactttgaatctcaataaaaacttcgcaagctt

SEQ ID NO: 2694 - protein, 220 aa, Rattus norvegicus
  ref <308>: DATABASE ACCESSION NUMBER: SWISS-Prot / P04904
  ref <309>: DATABASE ENTRY DATE: 2001-10-16
PGKPVLHYFDGRGRMEPIRWLLAAAGVEFEEQFLKTRDDLARLRNDGSLMFQQVPMVEIDGMKLVQTRAILNYIATKYNLYGKDMKERALIDMYAEGVADLDEIVLHYPYIPPGEKEASLAKIKDKARNRYFPAFEKVLKSHGQDYLVGNRLSRADVYLVQVLYHVEELDPSALANFPLLKALRTRVSNLPTVKKFLQPGSQRKPLEDEKCVESAVKIFS

SEQ ID NO: 2695 - DNA, 918 bp, Homo sapiens
  ref <308>: DATABASE ACCESSION NUMBER: Refseq / NM_000847
  ref <309>: DATABASE ENTRY DATE: 2002-11-05
ggtggccttgagaagctgagcggagaccggctagactttactcaaagaaaccaagagactgttaccatggcagggaagcccaagcttcactacttcaatggacggggcagaatggagcccatccggtggctcttggctgcagctggagtggagtttgaagagaaatttataggatctgcagaagatttgggaaagttaagaaatgatgggagtttgatgttccagcaagtaccaatggttgagattgatgggattaagttggtacagaccagagccattctcaactacattgccagcaaatacaacctctacgggaaagacataaaggagagagccctaattgatatgtatacagaaggtatggcagatttgaatgaaatgatccttcttctgcccttatgtcgacctgaggaaaaagatgccaagattgccttgatcaaagagaaaacaaaaagtcgctatttccctgccttcgaaaaagtgttacagagccatggacaagactaccttgttggcaacaagctgagccgggctgacattagcctggtggaacttctctactatgtggaagagcttgactccagccttatctccaacttccctctgctgaaggccctgaaaaccagaatcagcaacctgcccacggtgaagaagtttctacagcctggcagcccaaggaagcctcccgcagatgcaaaagctttagaagaagccagaaagattttcaggttttaataaagcagccatggaggctaagaacatgcaagaccaatattctaaagttttgcaacaatgaagtgctttacttaagtgttgattgtgcctgttgtaaagctaatgaaccctttccaattatatgctaattaaataataaaaactcctatttgcaaaaaaaaaaaaaaaaaaaaaaaaaaaaaa

SEQ ID NO: 2696 - protein, 222 aa, Homo sapiens
  ref <308>: DATABASE ACCESSION NUMBER: SWISS-Prot / Q16772
  ref <309>: DATABASE ENTRY DATE: 2002-06-15
MAGKPKLHYFNGRGRMEPIRWLLAAAGVEFEEKFIGSAEDLGKLRNDGSLMFQQVPMVEIDGMKLVQTRAILNYIASKYNLYGKDIKERALIDMYTEGMADLNEMILLLPLCRPEEKDAKIALIKEKTKSRYFPAFEKVLQSHGQDYLVGNKLSRADISLVELLYYVEELDSSLISNFPLLKALKTRISNLPTVKKFLQPGSPRKPPADAKALEEARKIFRF

SEQ ID NO: 2697 - DNA, 2047 bp, Rattus norvegicus
  ref <308>: DATABASE ACCESSION NUMBER: EMBL / K02248
  ref <309>: DATABASE ENTRY DATE: 2000-03-04
aagcttgattcaagttcagaggcttatgatttctgagactgcttcctagagctgtttccaggtgccaaatgtaggctttctcctcctcctccctcctgtgtgtgtgtgtgtgtgtgtgtgtgtgtgtgtgtgtgtgtgtgtgtgtgtctgtctgtctgtctgtctgtctatctgtctgtctccctggtgcctttcttttgtcacaatataaagatcagcagattggacaaagtgatgctcctttatagctcagtcttatcctttttcctacaaggctttaagggatgccaggagagaagatagttcagtcctcctgattgcatattaattctcagattggttcctagacggatagctttaagtctcccttgccatacaataccgttaagcatgatggcaagtccagtaatctgagtacattgacaggtacccaactgtgtgtgctgatgtattgctggccaaggactgaaggatctcagtaattaatcatgcacctatgtggcggaaatatgggatatgcatgtcgacactgagtgaaggcaagattatttggtctgtgtggcgtggagaatttcatgtgcctgtgtgggtgcaggctttctttttcttcaaaaaaaaaaaaataaaccactttagatcgtgtcgcctcccctcacttctttgattgattttgcgaggctaatggtgcgtaaaagcactggtgagatctgggggcgcctccttggctgacgtcagagagagagtttaaaaaggggagaccgtggagagctcgatagcggctgaaggagacgctactggagtcgtctctgccgcctgcggacctgcgtctagactgacccaccgcgctcaagctcggctgtctgaggcaggggagatgctgtcctgccgtctccagtgcgcgctggccgcgctctgcatcgtcctggctttgggcggtgtcaccggggcgccctcggaccccagactccgtcagtttctgcagaagtctctggcggctgccaccgggaaacaggtaaggaaatggctgggactcgtcccctttgcgaattccctagccttccccttagtcttgctgtagcccctgcgacaggtgttttagcgggcgcttctcagagtcgctcagcccctgagctcccagggaaacttttgaagtctagggtccgctcttactcgttccagaattgatcggcgctggtggtcaccttgcaggtaagttcccccttcgctttcaggaaaattccgaaagcctgcaagagagcggggagagactgagctctatccctggtactggcacgagggttgctgacccaggtgctgaaaaaaaatccggcaagaactcaggtccatggtccatttcgtgtctcataaaggaaaatggagctgctcgaactattggcatactatatttacaaaacgacttcctatcatccatggtttctctgtgttttaaggcatagcactttctgaaagacttgggtttgaggaagcttttttccctgtgcataatctagtgaatatagcagccatccatattactgtggaaacttggttttgaatgattaaatcttattttcaaaccgcatttctccctttctcccattcccccttttgctctcctccctgccctatccaggaactggccaagtacttcttggcagaactgctgtccgagcccaaccagacagagaacgatgccctggagcctgaggatttgccccaggcagctgagcaggacgagatgaggctggagctgcagaggtctgccaactcgaacccagccatggcaccccgggaacgcaaagctggctgcaagaacttcttctggaagacattcacatcctgttagctttaatattgttgtctcagccagacctctgatccctctcctacaaatcccatatctcttccttaactcccagcccccccccccaatgctcaactagaccctgcgttagaaaccgaagactgtaaatacaaaataaaattatggtgaaattatgaatagcgagtgtttgacttcttattgagtaaattgttttgttcagga

SEQ ID NO: 2698 - protein, 116 aa, Rattus norvegicus
  ref <308>: DATABASE ACCESSION NUMBER: SWISS-Prot / AAA42161
  ref <309>: DATABASE ENTRY DATE: 2001-10-16
MLSCRLQCALAALCIVLALGGVTGAPSDPRLRQFLQKSLAAATGKQELAKYFLAELLSEPNQTENDALEPEDLPQAAEQDEMRLELQRSANSNPAMAPRERKAGCKNFFWKTFTSC

SEQ ID NO: 2699 - DNA, 351 bp, Homo sapiens
  ref <308>: DATABASE ACCESSION NUMBER: Refseq / NM_001048
  ref <309>: DATABASE ENTRY DATE: 2000-10-31
atgctgtcctgccgcctccagtgcgcgctggctgcgctgtccatcgtcctggccctgggctgtgtcaccggcgctccctcggaccccagactccgtcagtttctgcagaagtccctggctgctgccgcggggaagcaggaactggccaagtacttcttggcagagctgctgtctgaacccaaccagacggagaatgatgccctggaacctgaagatctgtcccaggctgctgagcaggatgaaatgaggcttgagctgcagagatctgctaactcaaacccggctatggcaccccgagaacgcaaagctggctgcaagaatttcttctggaagactttcacatcctgttag

SEQ ID NO: 2700 - protein, 116 aa, Homo sapiens
  ref <308>: DATABASE ACCESSION NUMBER: Refseq / NP_001039
  ref <309>: DATABASE ENTRY DATE: 2000-10-31
MLSCRLQCALAALSIVLALGCVTGAPSDPRLRQFLQKSLAAAAGKQELAKYFLAELLSEPNQTENDALEPEDLSQAAEQDEMRLELQRSANSNPAMAPRERKAGCKNFFWKTFTSC

SEQ ID NO: 2701 - DNA, 356 bp, Rattus norvegicus
  ref <308>: DATABASE ACCESSION NUMBER: EMBL / K02423
  ref <309>: DATABASE ENTRY DATE: 2000-03-04
gccacccccctggacaagtgaaccgtccaatccagccgcgtgtgtcaaggttctattaggcactaagagaaatatatatgcatgcccttataccattcaacactctgggtccaccctccagacgctgggctgcgggtcaagcgagccaccactgctcttccaagtgtcattttgacaggttcttctggaggagatccttcttttgttaacccatcgttttaatcaaaatggcaccaaagaaagacgtgaagaagcccgctgctgctgctcctgctcctgccccagccccggccccggcccctgccccagccaaacctaaagaagaaaaaatcgatctgtctgctattaaggtaact

SEQ ID NO: 2702 - protein, 188 aa, Rattus norvegicus
  ref <308>: DATABASE ACCESSION NUMBER: SWISS-Prot / AAA98533
  ref <309>: DATABASE ENTRY DATE: 2002-06-15
APKKDVKKPAAAAPAPAPAPAPAPAKPKEEKIDLSAIKIEFSKEQQEEFKEAFLLFDRTGECKITLSQVGDVLRALGTNPTNAEVKKVLGNPSNEEMNAKKIEFEQFLPMMQAISNNKDQGGYEDFVEGLRVFDKEGNGTVMGAELRHVLATLGEKMKEEEVEALLAGQEDSNGCINYEAFVKHIMSV

SEQ ID NO: 2703 - DNA, 1045 bp, Homo sapiens
acactctgggtccatcttcaagacactgggctgtggatcaacccaaccaccactcctcttccaagaatcattttgacaggttcttttggaggaactccttctctttttaacccacccttttaaaaaaaaaaatggcaccaaagaaagacgtgaagaaacctgtggctgcggctgcggctgccccagccccggcaccggcacctgcacctgcccctgccccagccaaacccaaagaagaaaaaattgacctctctgccattaagatcgagttctctaaggaacagcaggatgaattcaaggaggcatttctcctgtttgacagaacaggtgattccaagatcaccttaagccaggtcggtgatgtccttcgagctctgggcacaaatcccaccaatgcagaggtcaggaaagttctgggaaaccccagcaatgaagagctgaatgccaagaaaattgagtttgaacaatttctgcctatgatgcaagccatttccaacaacaaggaccaggccacctatgaagactttgttgagggtctgcgtgtctttgacaaggaaggcaatggcacagtcatgggtgctgaactccgccatgttctagccaccctgggtgaaaagatgaaagaggaagaagtggaagccctgatggcaggtcaagaagactccaatggctgcatcaactacgaagcttttgtcaagcacatcatgtctatctgaatggagctctcaagaacaagcattgtttaggaagactggctggaaacttattttaatcacacccatgacaaactctccagatctgtttaccatcattcaggaaaacaaagcaatctggacggttcaagactgagcaactccctgaatttttatacatcttcagtttttctctgaattgaattcataccacacaaacaaagtgtctgctgctctagatgagaagaataaaatattgacaatctcaaatccaagcaccattctttattatctaccatgaatcaacaaacattcttaaaacaataaatcaataaacaattttggtcagtctg

SEQ ID NO: 2704 - protein, 194 aa, Homo sapiens
MAPKKDVKKPVAAAAAAPAPAPAPAPAPAPAKPKEEKIDLSAIKIEFSKEQQDEFKEAFLLFDRTGDSKITLSQVGDVLRALGTNPTNAEVRKVLGNPSNEELNAKKIEFEQFLPMMQAISNNKDQATYEDFVEGLRVFDKEGNGTVMGAELRHVLATLGEKMKEEEVEALMAGQEDSNGCINYEAFVKHIMSI

SEQ ID NO: 2705 - DNA, 681 bp, Rattus norvegicus
  ref <308>: DATABASE ACCESSION NUMBER: EMBL / K02815
  ref <309>: DATABASE ENTRY DATE: 2000-03-04
tcagcccaacaccctcatctgctttgtagacaacatctttcctcctgtgatcaatatcacatggttgagaaacagcaagccagtcacagaaggcgtttatgagaccagcttcctttccaaccctgaccattccttccacaagatggcttacctcaccttcatcccttccaacgacgacatttatgactgcaaggtggagcactggggcctggacgagccggttctaaaacactgggaacctgaggttccagcccccatgtcagagctgacagagactgtggtctgtgccctggggttgtctgtgggcctcgtgggcatcgtggtgggcaccatcttcatcattcaaggcctgcgatcagatggcccctccagacacccagggcccctttgagtcacaccctgggaaagaaggtgcgtggccctctacaggcaagatgtagtgtgaggggtgacctggcacagtgtgttttctgccccaattcatcgtgttctttctcttctcctggtgtctcccatcttgctcttcccttggcccccaggctgtccacctcatggctctcacgcccttggaattctcccctgacctgagtttcatttttggcatcttccaagtcgaatctactatagattccgagaccctgattgatgctccaccaaaccaataaacctctcataagttgg

SEQ ID NO: 2706 - DNA, 728 bp, Homo sapiens
  ref <308>: DATABASE ACCESSION NUMBER: EMBL / M17847
  ref <309>: DATABASE ENTRY DATE: 2000-03-04
tttccaagtctcccgtgacactgggtcagcccaacaccctcatctgtcttgtggacaacatctttcctcctgtggtcaacatcacatggcttagcaatgggcacgcagtcacagaaggtgtttctgagaccagcttcctctccaagagtgatcattccttcttcaagatcagttacctcaccttcctcccttctgctgatgagatttatgactgcaaggtggagcactggggcctggaccagcctcttctgaaacactgggagcctgagattccagcccctatgtcagagctcacagagactgtggtctgtgccctggggttgtctgtgggcctcgtgggcattgtggtgggcactgtcttcatcatccaaggcctgcgttcagttggtgcttccagacaccaagggcccttgtgaatcccatcctggaagggaaggtgcatcgccatctacaggaacagaagaatggacttgctaaatgacctagcactattctctggcccgatttatcatatcccttttctcctccaaatgtttctcctctcaccttttctctgggacttaagctgctatatcccctcagagctcacaaatgcctttacattatttccctgacctcctgattttttttttcttttctcaaatgttacctacaaagacatgcctggggtaagccacccggctccctaattcctcagtaacctccatctaaaatctccaaggaagcat

SEQ ID NO: 2707 - protein, 255 aa, Homo sapiens [sequence omitted]

SEQ ID NO: 2708 - DNA, 593 bp, Rattus norvegicus
  ref <308>: DATABASE ACCESSION NUMBER: EMBL / K03045
  ref <309>: DATABASE ENTRY DATE: 2000-03-04
ggctgcagcctcctctcgctaaggaaaggctgcctgcccgttctagggagtcagtggttagcaagttggtcagggccccggggctactgtgtctctctgacttacagacgatgaccactggatcatcgatacggactacgacaccttcgctctgcagtattcctgccgcctgcagaatctggatggcacctgtgcagacagctactcctttgtgttttctcgtgaccccaatggcctgaccccggagacacggaggctggtgaggcagcgacaggaggagctgtgcctagagaggcagtacagatggatcgagcacaatggtggagcaactcttcctgagggacttagcagggctgggaggataagaggtgcagcatctgtgcaagtgggttacccgaggcctcctttggaccaagtctgattaaatttttccaggactgccatcagccacacagacaaggaccaaaggtttctcttcccctaaacgctaggcacttttctataaccaaagttgtgaaaccactctcttcttatgtttttgctccccacatttgctgctagtgcacaagccgagaccatcgcaagataaggtt

SEQ ID NO: 2709 - protein, 201 aa, Rattus norvegicus
  ref <308>: DATABASE ACCESSION NUMBER: SWISS-Prot / AAB06955
  ref <309>: DATABASE ENTRY DATE: 2000-05-30
MEWVWALVLLAALGGGSAERDCRVSSFRVKENFDKARFSGLWYAIAKKDPEGLFLQDNIIAEFSVDEKGHMSATAKGRVRLLSNWEVCADMVGTFTDTEDPAKFKMKYWGVASFLQRGNDDHWIIDTDYDTFALQYSCRLQNLDGTCADSYSFVFSRDPNGLSPETRRLVRQRQEELCLERQYRWIEHNGYCQSRPSRNSL

SEQ ID NO: 2710 - DNA, 919 bp, Homo sapiens
  ref <308>: DATABASE ACCESSION NUMBER: Refseq / NM_006744
  ref <309>: DATABASE ENTRY DATE: 2001-12-20
cgctcgcctccctcgctccacgcgcgcccggacgcggcggccaggcttgcgcgtggttcccctcccggtgggcggattcctgggcaagatgaagtgggtgtgggcgctcttgctgttggcggcgtgggcagcggccgagcgcgactgccgagtgagcagcttccgagtcaaggagaacttcgacaaggctcgcttctctgggacctggtacgccatggccaagaaggaccccgagggcctctttctgcaggacaacatcgtcgcggagttctcggtggacgagaccggccagatgagcgccacagccaagggccgagtccgtcttttgaataactgggacgtgtgcgcagacatggtgggcaccttcacagacaccgaggaccctgccaagttcaagatgaagtactggggcgtagcctcctttctgcagaaaggaaatgatgaccactggatcgtcgacacagactacgacacgtatgccgtacagtactcctgccgcctcctgaacctcgatggcacctgtgctgacagctactccttcgtgttttcccgggaccccaacggcctgcccccagaagcgcagaagattgtaaggcagcggcaggaggagctgtgcctggccaggcagtacaggctgatcgtccacaacggttactgcgatggcagatcagaaagaaaccttttgtagcaatatcaagaatctagtttcatctgagaacttctgattagctctcagtcttcagctctatttatcttaggagtttaatttgcccttctctccccatcttccctcagttcccataaaaccttcattacacataaagatacacgtgggggtcagtgaatctgcttgcctttcctgaaagtttctggggcttaagattccagactctgattcattaaactatagtcacccgtg

SEQ ID NO: 2711 - protein, 201 aa, Homo sapiens
  ref <308>: DATABASE ACCESSION NUMBER: SWISS-Prot / P02753
  ref <309>: DATABASE ENTRY DATE: 2002-06-15
MKWVWALFLLAALGSGRAERDCRVSSFRVKENFDKARFSGTWYAMAKKDPEGLFLQDNIVAEFSVDETGQMSATAKGRVRLLNNWDVCADMVGTFTDTEDPAKFKMKYWGVASFLQKGNDDHWIVDTDYDTYAVQYSCRLLNLDGTCADSYSFVFSRDPNGLPPEAQKIVRQRQEELCLARQYRLIVHNGYCDGRSERNLL

SEQ ID NO: 2712 - DNA, 593 bp, Rattus norvegicus; identical to SEQ ID NO: 2708
  ref <308>: DATABASE ACCESSION NUMBER: EMBL / K03045
  ref <309>: DATABASE ENTRY DATE: 2000-03-04

SEQ ID NO: 2713 - protein, 201 aa, Rattus norvegicus; identical to SEQ ID NO: 2709
  ref <308>: DATABASE ACCESSION NUMBER: SWISS-Prot / AAB06955
  ref <309>: DATABASE ENTRY DATE: 2000-05-30

SEQ ID NO: 2714 - DNA, 919 bp, Homo sapiens; identical to SEQ ID NO: 2710
  ref <308>: DATABASE ACCESSION NUMBER: Refseq / NM_006744
  ref <309>: DATABASE ENTRY DATE: 2001-12-20

SEQ ID NO: 2715 - protein, 201 aa, Homo sapiens; identical to SEQ ID NO: 2711
  ref <308>: DATABASE ACCESSION NUMBER: SWISS-Prot / P02753
  ref <309>: DATABASE ENTRY DATE: 2002-06-15

SEQ ID NO: 2716 - DNA, 1029 bp, Rattus norvegicus
  ref <308>: DATABASE ACCESSION NUMBER: EMBL / K03242
  ref <309>: DATABASE ENTRY DATE: 2000-03-04
attcggctgggcccttgcccctaccccagctatggctcctggggctccctcatccagccccagccctatcctggctgccctgctcttctcttctttggtgctgtccccaaccctggccattgtggtttacacggacagggaagtctatggtgctgtgcgctcccaggtcaccctgcactgctccttctggtccagtgaatgggtctcagatgacatctcttttacctggcgctaccagcctgaaggaggccgagatgccatttcaatcttccactatgccaagggtcaaccttacatcgatgaggtggggaccttcaaggagcgcatccagtgggtaggggaccctagctggaaggatggctccattgtcatacacaacctagactacagtgacaacggcactttcacatgtgatgtcaaaaacccaccggacatagtgggcaagacgtctcaggtcacgctctatgtctttgaaaaagtgcccactaggtatggggtggtgttgggagccgtgatcggtggcatcctcggggtggtgctgttgctgctgttgctcttctacctgatccggtactgctggctgcgcaggcaggctgccctgcagaggaggctcagtgccatggagaaggggaaatttcacaagtcttctaaggactcctcgaagcgcgggcggcagacgccagtgctgtatgccatgctggaccacagccgaagcaccaaagctgccagtgagaagaaatctaaagggctgggggagtctcgcaaggataagaaatagcggttagcgggccgggcggggggtcgggggtctgcgatggagtcttccaaaggctctcaggtggtggtcatcgagatggagcttcgcaaagatgagcagagctcggagccccggcctgcagtcaaatcccccagtagaaccagcctcaagaacgccctcaagaacatgatgggcctggactcgaacaagtgaccgtcacctccaggctctgtcagagcaggggacctaggctcctctttttcccagtctag

SEQ ID NO: 2717 - protein, 248 aa, Rattus norvegicus
  ref <308>: DATABASE ACCESSION NUMBER: SWISS-Prot / P06907
  ref <309>: DATABASE ENTRY DATE: 2002-06-15
MAPGAPSSSPSPILAALLFSSLVLSPTLAIVVYTDREVYGAVGSQVTLHCSFWSSEWVSDDISFTWRYQPEGGRDAISIFHYAKGQPYIDEVGTFKERIQWVGDPSWKDGSIVIHNLDYSDNGTFTCDVKNPPDIVGKTSQVTLYVFEKVPTRYGVVLGAVIGGILGVVLLLLLLFYLIRYCWLRRQAALQRRLSAMEKGKFHKSSKDSSKRGRQTPVLYAMLDHSRSTKAASEKKSKGLGESRKDKK

SEQ ID NO: 2718 - DNA, 813 bp, Homo sapiens
  misc_feature (1)..(813): n=a, c, g or t
  ref <308>: DATABASE ACCESSION NUMBER: EMBL / AI557264
  ref <309>: DATABASE ENTRY DATE: 2000-03-04
naccgttgggggggtgaattacttcttcgacgtaaaggtgggccgaaccatatgtaccaagtcccagcccaacttggacacctgtgccttccatgaacagccagaactgcagaagaaacagttgtgctctttcgagatctacgaattccctgggagaacagaaggtccctggtgaaatccaggtgtcaagaatcctagggatctgtgccaggccattcgcaccagccaccacccactcccaccccctgtagtgctcccacccctggactggtggcccccaccctgcgggaggcctccccatgtgcctgcgccaagagacagacagagaaggctgcaggagtcctttgttgctcagcagggcgctctgccctccctccttccttcttgcttctaatagccctggtacatggtacacacccccccacctcctgcaattaaacagtagcatcgccaaaaaaaaaaaaaaaaaactcgagggggggccggtacccaattcgccctatagtgagtcgtattacaattcactggccgtcgttttcaacgtcgtgactgggaaaccctggcgtacccaacttaatcgcttgagganatcccccttttgccagtgggtaatagcgagaggcccngaccgattggccttcaanagttnnnnntnaatggnnntggaaattgtaanggtnaaatttgtaaatngggtaaanttttgtnaaatagcnattttnnaccanttgnngaatnggnaaaatccctntanantaanngnaatggcccgnnnngggtnagngttntcagttgggaanangtaccattttt

SEQ ID NO: 2719 - protein, 141 aa, Homo sapiens
  ref <308>: DATABASE ACCESSION NUMBER: SWISS-Prot / P01037
  ref <309>: DATABASE ENTRY DATE: 2002-06-15
MAQHLSTLLLLLATLAVALAWSPKEEDRIIPGGIYNADLNDEWVQRALHFAISEYNKATKDDYYRRPLRVLRARQQTVGGVNYFFDVEVGRTICTKSQPNLDTCAFHEQPELQKKQLCSFEIYEVPWENRRSLVKSRCQES

SEQ ID NO: 2720 - DNA, 1029 bp, Rattus norvegicus
  misc_feature (1)..(1029): n=a, c, g or t
  ref <308>: DATABASE ACCESSION NUMBER: EMBL / K03486
  ref <309>: DATABASE ENTRY DATE: 2000-03-04
gtgaagatcctgaagaaagatgtggtgatccaagatgacgatgtggagtgcacaatggtggagaagagggtgctggccctgcctgggaagcccccattcctgactcagctccattcctgcttccagaccatggaccgcctctactttgtgatggagtatgtgaacgggggcgacctcatgtaccacatccaacaagttggccgtttcaaggagccccatgctgtattttacgctgcagagattgccatcggtcttttcttcttgcagagcaagggcatcatttaccgtgacctgaaacttgacaacgtgatgctggattccgaggggcacatcaaaatcgctgactttggcatgtgtaaagagaatatctgggatggggtgacaaccaagacattctgtggcactccagactacattgccccagagatcattgcttatcagccctacgggaagtctgtggactggtgggcgtttggagtcctgctgtatgaaatgttggctggccaggcaccttttgaaggggaggatgaggatgaactcttccagtcaatcatggagcacaacgtggcgtatcccaagtccatgtctaaggaagctgtggcaatctgcaaagggctaatgaccaaacacccaggcaagcgcctgggttgtgggcctgaaggggaacgagacattaaggagcatgcatttttccggtatatcgactgggagaaactcgaacgcaaggagattcagccaccttataaaccaaaagctagagacaagcgagacaccaacttcgacaaagagttcaccaggcagcctgtgctgactcccactgacaaactcttcatcatgaacttggaccaaaatgaatttgctggcttctcgtatactaacccagagtttgtcattaatgtgtaggtgaatgcagattccatcgctgagcctgtgtgtaaggctgcaggctgaatgtctattatcanttccagtcttccaggattcatggtgcctctgttggcatccgtcatgtggagagcttgtcttaga

SEQ ID NO: 2721 - protein, 671 aa, Rattus norvegicus
  ref <308>: DATABASE ACCESSION NUMBER: SWISS-Prot / P04410
  ref <309>: DATABASE ENTRY DATE: 2002-06-15
MADPAAGPPPSEGEESTVRFARKGALRQKNVHEVKNHKFTARFFKQPTFCSHCTDFIWGFGKQGFQCQVCCFVVHKRCHEFVTFSCPGADKGPASDDPRSKHKFKIHTYSSPTFCDHCGSLLYGLIHQGMKCDTCMMNVHKRCVMNVPSLCGTDHTERRGRIYIQAHIDREVLIVVVRDAKNLVPMDPNGLSDPYVKLKLIPDPKSESKQKTKTIKCSLNPEWNETFRFQLKESDKDRRLSVEIWDWDLTSRNDFMGSLSFGISELQKAGVDGWFKLLSQEEGEYFNVPVPPEGSEGNEELRQKFERAKIGQGTKAPEEKTANTISKFDNNGNRDRMKLTDFNFLMVLGKGSFGKVMLSERKGTDELYAVKILKKDVVIQDDDVECTMVEKRVLALPGKPPFLTQLHSCFQTMDRLYFVMEYVNGGDLMYHIQQVGRFKEPHAVFYAAEIAIGLFFLQSKGIIYRDLKLDNVMLDSEGHIKIADFGMCKENIWDGVTTKTFCGTPDYIAPEIIAYQPYGKSVDWWAFGVLLYEMLAGQAPFEGEDEDELFQSIMEHNVAYPKSMSKEAVAICKGLMTKHPGKRLGCGPEGERDIKEHAFFRYIDWEKLERKEIQPPYKPKARDKRDTSNFDKEFTRQPVELTPTDKLFIMNLDQNEFAGFSYTNPEFVINV

SEQ ID NO: 2722 - DNA, 2209 bp, Homo sapiens
  ref <308>: DATABASE ACCESSION NUMBER: EMBL / AK057555
  ref <309>: DATABASE ENTRY DATE: 2002-08-06
ggacatggtagagatggaccctacccaggaaacagctccatcagcatcttagcctgccccactctagccacacatacccacgtgtactcctgagttcagtgtgcccacctcactcccacaccctcacatagacttggcaagagtaaggagggaactccatagagacattttacctatctcaggggagcagccacaaagaagcaagtcttgtaaaaggtcttttgcaaaggagagtgaacccagcaatgagagatccttaacagctagtgcccattagggggctaaacctaaagcctgggcggtgatggctcaaacgctaatgagtcagtgaatccttaccgaccccctggcctttataatctgaggcaactttggctgcagcccgggaatgtgcagggcactagggaatacaaggccttcttccctggttgtcttgtaataaaacagccatggggttgtccctccagtccgagagactgtgataaggcctacatagcagcgatgtggtcaggtaaaaatcaggaacccactgaaatcttgggcaagccaccctgcctgcttgtgcctcggttctctcatatgtcatatataggaggtgaggactccagctccacctgccccaggtgggtgtggtgatgatgaggaaagacaagaggcttgcaaggaccctgaagaggtcggagcatcatacagattcctttattagcccacattctgatgttccctggtgagacttgccccaagcaattgctagtaaatgggggttaatttcttctccacctccctactgaacaaaaaaagaaatgccagacttactaggagaatcgagttgctttgagtttcttttgttttgttttgttttgttttgttttaaggctccccttacacaccctcctttaagctttgggttttctctcttatagtttgttgacacatgctaaaaatgtctttggagagaacttctgcctgataaacacccaattctagactgtgggtggattttcgagctgacggtggtcaattcctttcattaagcagtgatctgatttctccacatggccattctgccttcttgggggcagagtagatgggcagcagttcaccttttcagagaaagaggtcttctagccacctgggctgctactgaatggttttctccaggacgctctacctaatgattatttctataacattaagcatggtaataagtagcttccaattcaattcatcctaaagccaaagaaaatacagcaacacacacacacacacacacacacacacacacacacacacacacacacaccactttatggcaattcttaactgacattcaatgacttacttcttttcttagaaaatttccaccacatttctatccccaagccaacatacaatgtgaaatgaaagccagtgcgtggagtgcagctgctaaaaattttcagcacagggctctttctgactctgctcatgagatggtatcagccacccaatgactggcgtatcttggtcctgtgtctttcttcttatgctgtgttaatgtgtttactttccatttggcagagagacaagagagacacctccaacttcgacaaagagttcaccagacagcctgtggaactgacccccactgataaactcttcatcatgaacttggaccaaaatgaatttgctggcttctcttatactaacccagagtttgtcattaatgtgtaggtgaatgcaaactccatcgttgagcctggggtgtaagacttcaagccaagcgtatgtatcaattctagtcttccaggattcacggtgcacatgctggcattcaacatgtggaaagcttgtcttagagggcttttctttgtatgtgtagcttgctagtttgttttctacatttgaaaatgtttagtttagaataagcgcattatccaattatagaggtacaattttccaaacttccagaaactcatcaaatgaacagacaatgtcaaaactactgtgtctgataccaaaatgcttcagtatttgtaatttttcaagtcagaagctgatgttcctggtaaaagtttttacagttattctataatatcttctttgaatgctaagcatgagcgatatttttaaaaattgtgagtaagctttgcagttactgtgaactattgtctcttggaggaagttttttgtttaagaattgatatgattaaactgaattaatatatgc

SEQ ID NO: 2723 - protein, 673 aa, Homo sapiens
  ref <308>: DATABASE ACCESSION NUMBER: Refseq / NP_002729
  ref <309>: DATABASE ENTRY DATE: 2002-11-05
MADPAAGPPPSEGEESTVRFARKGALRQKNVHEVKNHKFTARFFKQPTFCSHCTDFIWGFGKQGFQCQVCCFVVHKRCHEFVTFSCPGADKGPASDDPRSKHKFKIHTYSSPTFCDHCGSLLYGLIHQGMKCDTCMMNVHKRCVMNVPSLCGTDHTERRGRIYIQAHIDRDVLIVLVRDAKNLVPMDPNGLSDPYVKLKLIPDPKSESKQKTKTIKCSLNPEWNETFRFQLKESDKDRRLSVEIWDWDLTSRNDFMGSLSFGISELQKASVDGWFKLLSQEEGEYFNVPVPPEGSEANEELRQKFERAKISQGTKVPEEKTTNTVSKFDNNGNRDRMKLTDFNFLMVLGKGSFGKVMLSERKGTDELYAVKILKKDVVIQDDDVECTMVEKRVLALPGKPPFLTQLHSCFQTMDRLYFVMEYVNGGDLMYHIQQVGRFKEPHAVFYAAEIAIGLFFLQSKGIIYRDLKLDNVMLDSEGHIKIADFGMCKENIWDGVTTKTFCGTPDYIAPEIIAYQPYGKSVDWWAFGVLLYEMLAGQAPFEGEDEDELFQSIMEHNVAYPKSMSKEAVAICKGLMTKHPGKRLGCGPEGERDIKEHAFFRYIDWEKLERKEIQPPYKPKACGRNAENFDRFFTRHPPVLTPPDQEVIRNIDQSEFEGFSFVNSEFLKPEVKS

SEQ ID NO: 2724 - DNA, 168 bp, Rattus norvegicus
  ref <308>: DATABASE ACCESSION NUMBER: EMBL / L00382
  ref <309>: DATABASE ENTRY DATE: 2000-03-04
tgcttcccctcacagagactttggctagtgccaaggaagagaacgtggagattcaccagaccttggaccagacccttctggaactcaacaacctgtaagggtggccctgctacctgccgaccagactacatagatgcctcctcaggccaataaacggatgtctctggc

SEQ ID NO: 2725 - protein, 284 aa, Rattus norvegicus
  ref <308>: DATABASE ACCESSION NUMBER: SWISS-Prot / AAA42289
  ref <309>: DATABASE ENTRY DATE: 2002-06-15
MDAIKKKMQMLKLDKENAIDRAEQAEADKKQAEDRCKQLEEEQQALQKKLKGTEDEVEKYSESVKDAQEKLEQAEKKATDAEADVASLNRRIQLVEEELDRAQERLATALQKLEEAEKAADESERGMKVIENRAMKDEEKMELQEMQLKEAKHIAEDSDRKYEEVARKLVILEGELERSEERAEVAESKCGDLEEELKIVTNNLKSLEAQADKYSTKEDKYEEEIKLLEEKLKEAETRAEFAERSVAKLEKTIDDLEDEVYAQKMKYKAISEELDNALNDITSL

SEQ ID NO: 2726 - DNA, 1044 bp, Homo sapiens
  ref <308>: DATABASE ACCESSION NUMBER: Refseq / NM_003289
  ref <309>: DATABASE ENTRY DATE: 2002-11-05
tgctgctctcctcccgctccgtcctcctcgcctgccaccggtgcacccagtccgctcacccagcccagtccgtccggtcctcaccgcctgccggccggcccaccccccaccgcaggccatggacgccatcaagaagaagatgcagatgctgaagctggacaaggagaacgccatcgaccgcgccgagcaggccgaagccgacaagaagcaagctgaggaccgctgcaagcagctggaggaggagcagcaggccctccagaagaagctgaaggggacagaggatgaggtggaaaagtattctgaatccgtgaaggaggcccaggagaaactggagcaggccgagaagaaggccactgatgctgaggcagatgtggcctccctgaaccgccgcattcagctggttgaggaggagctggaccgggcccaggagcgcctggctacagccctgcagaagctggaggaggccgagaaggcggctgatgagagcgagagaggaatgaaggtcatcgaaaaccgggccatgaaggatgaggagaagatggaactgcaggagatgcagctgaaggaggccaagcacatcgctgaggattcagaccgcaaatatgaagaggtggccaggaagctggtgatcctggaaggagagctggagcgctcggaggagagggctgaggtggccgagagccgagccagacagctggaggaggaacttcgaaccatggaccaggccctcaagtccctgatggcctcagaggaggagtattccaccaaagaagataaatatgaagaggagatcaaactgttggaggagaagctgaaggaggctgagacccgagcagagtttgccgagaggtctgtggcaaagttggagaaaaccatcgatgacctagaagagaccttggccagtgccaaggaggagaacgtcgagattcaccagaccttggaccagaccctgctggaactcaacaacctgtgagggccagccccacccccagccaggctatggttgccaccccaacccaataaaactgatgttactagcctctc

SEQ ID NO: 2727 - protein, 284 aa, Homo sapiens
  ref <308>: DATABASE ACCESSION NUMBER: SWISS-Prot / P07951
  ref <309>: DATABASE ENTRY DATE: 2002-06-15
MDAIKKKMQMLKLDKENAIDRAEQAEADKKQAEDRCKQLEEEQQALQKKLKGTEDEVEKYSESVKEAQEKLEQAEKKATDAEADVASLNRRIQLVEEELDRAQERLATALQKLEEAEKAADESERGMKVIENRAMKDEEKMELQEMQLKEAKHIAEDSDRKYEEVARKLVILEGELERSEERAEVAESKCGDLEEELKIVTNNLKSLEAQADKYSTKEDKYEEEIKLLEEKLKEAETRAEFAERSVAKLEKTIDDLEDEVYAQKMKYKAISEELDNALNDITSL

SEQ ID NO: 2728 - DNA, 6036 bp, Rattus norvegicus
  ref <308>: DATABASE ACCESSION NUMBER: EMBL / L01115
  ref <309>: DATABASE ENTRY DATE: 2000-03-04
tgcccagaaccacatagctcactacccacatggagtcctggcggaagctatgtcggttacacactaccatgagtaccacaaaaaggacagcggggaggcgcgggcacggagcaggacggcgggacggccggccctccgggccggagcccgcgagcgcggtggggcggcggccccgggcaggcgccgacccttggcagcatgtcatggtttagcggcctcctggttcccaaagtggatgaacggaaaacagcctggggcgaacgcaatggacagaagcgcccacgccaggcgacccgagcccgtggcttctgcgcgccccgctacatgagctgcctcaagaatgtggagccacccagccccactcctgcagctcgcactcggtgcccctggcaggatgaagccttcatcaggagggctggcccgggaaggggtgtgaagctggggctgcggtcagtggccttgggttttgatgacactgaggtgaccacaccgatggggacagctgaagtggcacccgacacatcgcctcgaagcggtccgtcctgctggcaccggctagcgcaggtgttccagtctaagcagttccgctccgccaagctggagcgtctgtaccagcggtacttcttccagatgaaccagagcagcctcacgctgctcatggcggtgcttgtgctcctcatggctgtactgttgaccttccacgccgcgcctgccctgcctcagcctgcttatgtggccctgctgacctgtgcctccgtcctttttgtggtactcatggtagtgtgtaaccgacatagcttccgccaggactccatgtgggtagtgagctatgtggttctgggcatcctagcagccgtgcaagtcgggggtgccctggcagccaacccacgcagcccctcagcaggcctttggtgccccgtgttcttcgtctacatcacctacacacttcttcccattcgtatgcgagcggccgtgctcagtggcctgggtctttccaccctgcatttgattttggcctggcatctcaacaatggtgaccccttcctttggaagcagctcggtgctaacgtggtgctcttcctgtgcaccaatgccatcggtgtctgcacgcactaccccgctgaagtgtctcagcgccaagcctttcaggagacccgtggttacatccaggcccggctgcacttgcagcatgagaatcgacagcaggaacggctgctgctgtcggtgttgccccagcatgttgccatggaaatgaaagaggatatcaacacaaaaaaggaagacatgatgttccacaagatttacatccagaagcatgacaatgtcagcatcctgtttgccgacatcgagggcttcaccagcctggcctcccagtgcactgcccaggaactggtcatgaccttgaatgagctctttgcccggttcgacaagctggctgcggagaatcactgtctgaggatcaagatcttaggagactgttactactgtgtgtcggggctgccggaggcccgggcagaccatgcccactgctgtgtggagatgggggtagacatgatcgaggccatctcgctggtgcgtgaggtaacgggtgtaaatgtgaacatgcgcgtgggcatccacagcgggcgtgtacactgcggtgtccttggtctgcggaaatggcagtttgatgtctggtccaacgatgtgaccctggccaaccacatggaggcggggggccgggccggccgcatccacatcactcgggccacactgcagtacctgaacggggactatgaggtggagccaggccgtggcggtgagcgcaacggctacctcaaggagcagtgcattgagaccttcctcatactaggagccagccagaaacggaaagaggagaaggccatgctggtcaagctgcagcggacgcgggccaactccatggaaggactgatgccccgctgggttcctgaccgtgccttctcccggaccaaggactctaaggcattccgacagatgggcatcgatgactctagcaaagagaaccggggtgcccaagatgctctgaaccctgaggatgaggtggacgagtttctgggccgagccatcgatgcccgaagcatcgaccagctgcgtaaggaccatgtgcgccggttcctgctcaccttccagagggaggatctcgagaagaagtattcacggaaagtagaccctcgtttcggagcctacgtcgcctgtgccctcctggttttctgcttcatctgtttcatccagttcctcgtattcccacactccgccctgatactcgggatttatgccgggatcttccttttgctgctggtcaccgtgctcatctgtgctgtgtgctcctgtgggtctttcttccccaacgccctgcagcgcctgtcccgcagtatcgtccgctcacgggtgcacagcacggctgttggagtcttctcggttctgcttgtgttcatctctgccattgccaacatgttcacctgcagtcacaccccactgaggacctgtgcggcccggatgctgaacttaacaccgtccgatgtcaccgcctgtcacctacgacagatcaattactctctgggactggaagctcccctgtgtgagggcacagcacccacctgcagtttccctgagtactttgtcgggagtgtgctgttgagtctcttggccagctccgtcttcctccacatcagcagcattggcaagctagttatgacctttgtcttggggttcatctacttgcttctgcttttgctgggtcccccagccaccatctttgacaactatgatctactgcttagcgtccatggcttggcttcctccaatgagaccttcgatgggctggactgcccagccgtagggagggtagcgctcaaatacatgacccctgtgattctcctcgtgttcgccctggcactgtatctacacgcacaacaggtggaatctaccgcccgcctggacttcctgtggaaactgcaggccacaggggagaaggaggagatggaggagttgcaggcctacaaccggcggctgctgcataacatccttcccaaggacgtggctgcccacttcctggcccgggagcgccgcaacgacgagctgtactaccaatcctgcgagtgcgtggctgtcatgtttgcctccatcgccaacttctctgagttctatgtggaactggaggcgaacaatgagggcgtggagtgcctgcgactgctcaatgagatcatcgcggactttgatgagatcatcagtgaggagaggttccggcagctggagaagatcaagaccatcggtagcacttacatggccgcctccgggctaaatgccagcacctatgaccaggtcggccgctcgcacatcaccgccctggcagactacgccatgcggcttatggagcaaatgaaacacatcaacgaacactctttcaacaacttccagatgaagatcgggttgaacatgggtccggttgtagcaggtgtcattggggcccggaagccacagtatgacatctggggaaacacggtgaatgtttccagccgtatggacagcacaggagttcctgaccgaatacaggtgaccacggatctctaccaggttctagctgccaagggctaccaactggagtgtcgaggggtggtcaaggtgaagggaaagggggagatgaccacctacttcctcaatgggggccccagcagttagcagaggccagcagtggaaattcaaccaaagggaccaaggtgggcactgagtggacttttctgctcactggatggagctgtggcagggagctctgagccttcaggtcttgctgacagcaaaagggaacaccccagcaggctgtgcttggaccatatccgtctgccttcagagcagcaaaggaagggacgccgagaggattattatccaagtgactttcttaatcagagtaaggctgtttgcttttttttttccccccctttggacgcagctgagagcagagcctcctgtttgagagtaaaatggcaacttactctgcctactgtttccctgtctgggcgacaggctcagggctgggacctttctttccctatttttcctgggactatttttgtacaaagactggggcaggcatgaggaatgcttgccttcactggcctgtgtcagcagcatttgtcttgggcactcccagtaccagccaagtctccttcctagcacaacaaggcagaggaaggaggtgctgtgggacctagctctgaccagatttcaggggaatgtttccatttgccaaatcctagtcccgtgatctgtccccagaggggaacaaagggacctctgacagtgaaaatttagcctcaattcctgcatgctccagggaaaggggcatctggcctcactggtactgtgaaagtgaccagccagggtgcaagcctgggtgtgaggtcatcagaagaacaggaactggatgttcacctgcaggtgccgaagagtgcacgcagccagggaggaggaggaggaggaggaggagggagaggaggccacattgacctgaggccccagtgtgcccagggtcagctctcttgacccatgtgctcacttgctgtctgctggcagggggcatgggtcatctctaccccttgtattgccaaatagcgaagggtcagggttccaagaaagataatcctgaccctaaacttggcctcctaagtctggcactagggaggccctgtgtgtgtgtgtgtctgtctttctgtctttctgtctgtctgtctgtctgtctgtctgtctgtctgaggtctccatgtgtccttatgctccagctcctcagctctccactggggactgcctctcccccatgggcctctgtcttctggtgttaaggcggggtttcctatgccaagggatggagagtaatttccaggttgcacaggagtgggatggggtttggtagcaaaatgagagtggtctggggagaggagtcccttttgtgccaaatccctaagtgccatttgagggggggggcacatatgcagtatgactgtccccctgcctagggtggggacccaagcacctgcttaatctctagtgttcctcggacttgaactgttggaggtttgtgggtagaggctcaggcatttgctgaattcctcagcttgtgtctcgggggtgtggtaatacttcatgactggggtggtgtgggtcccctctcagaggacccagattttggtactaaggggacggagcctaggaacttggaacttggttgtcccaagcctttctgcctgaatctagcatgactagactctagtcctggctcccaatcctcgtgaggcccgcaagggttgtactctgtcctgtcttacccttgtagcctccttgactctggtctgaattagcctggtgccttgatttctctgcacctatttaagccagaggcgtttcgcctcgattttgaccagcgattgctttgtcttagatgctgacaggaaaggcagaggagtttcaggatgtatgggaggaccaggccagtacttttgcctttccttaagcctttgccaccagttcctcgcagaggcctggtttcgggcttgggactactttcctgggactctccatgtgccactcgatggaccactaggcgcttaattagccaaggcagaagagaggaggattatctggtccaggcagaagatcacctccccgtctcccccagccatattctatccctggttaggaagggactactcgatgccgatggggtgggcgtgaggtgtataaaccaaagcagggagacctcggctttgggaactttgtctgcttcttaccaggtgggagggggttgtctacaccctggctccctgcaccacagtgccagcctgtcgtgtcctctgagttaccgttgcccctctcctcaccagttgatggaggagtcagggtacgggaggccatgggctctggttttataatgtaaccactgtgggagtgggggagggcgacgtaccatgtatttcagtgaaatatttaatatatttaaatatcaataaaatcaaactctttgtg

SEQ ID NO: 2729 - protein, 1166 aa, Rattus norvegicus
  ref <308>: DATABASE ACCESSION NUMBER: SWISS-Prot / Q03343
  ref <309>: DATABASE ENTRY DATE: 2002-06-15
MSWFSGLLVPKVDERKTAWGERNGQKRPRQATRARGFCAPRYMSCLKNVEPPSPTPAARTRCPWQDEAFIRRAGPGRGVKLGLRSVALGFDDTEVTTPMGTAEVAPDTSPRSGPSCWHRLAQVFQSKQFRSAKLERLYQRYFFQMNQSSLTLLMAVLVLLMAVLLTFHAAPALPQPAYVALLTCASVLFVVLMVVCNRHSFRQDSMWVVSYVVLGILAAVQVGGALAANPRSPSAGLWCPVFFVYITYTLLPIRMRAAVLSGLGLSTLHLILAWHLNNGDPFLWKQLGANVVLFLCTNAIGVCTHYPAEVSQRQAFQETRGYIQARLHLQHENRQQERLLLSVLPQHVAMEMKEDINTKKEDMMFHKIYIQKHDNVSILFADIEGFTSLASQCTAQELVMTLNELFARFDKLAAENHCLRIKILGDCYYCVSGLPEARADHAHCCVEMGVDMIEAISLVREVTGVNVNMRVGIHSGRVHCGVLGLRKWQFDVWSNDVTLANHMEAGGRAGRIHITRATLQYLNGDYEVEPGRGGERNGYLKEQCIETFLILGASQKRKEEKAMLVKLQRTRANSMEGLMPRWVPDRAFSRTKDSKAFRQMGIDDSSKENRGAQDALNPEDEVDEFLGRAIDARSIDQLRKDHVRRFLLTFQREDLEKKYSRKVDPRFGAYVACALLVFCFICFIQFLVFPHSALILGIYAGIFLLLLVTVLICAVCSCGSFFPNALQRLSRSIVRSRVHSTAVGVFSVLLVFISAIANMFTCSHTPLRTCAARMLNLTPSDVTACHLRQINYSLGLEAPLCEGTAPTCSFPEYFVGSVLLSLLASSVFLHISSIGKLVMTFVLGFIYLLLLLLGPPATIFDNYDLLLSVHGLASSNETFDGLDCPAVGRVALKYMTPVILLVFALALYLHAQQVESTARLDFLWKLQATGEKEEMEELQAYNRRLLHNILPKDVAAHFLARERRNDELYYQSCECVAVMFASIANFSEFYVELEANNEGVECLRLLNEIIADFDEIISEERFRQLEKIKTIGSTYMAASGLNASTYDQVGRSHITALADYAMRLMEQMKHINEHSFNNFQMKIGLNMGPVVAGVIGARKPQYDIWGNTVNVSSRMDSTGVPDRIQVTTDLYQVLAAKGYQLECRGVVKVKGKGEMTTYFLNGGPSS

SEQ ID NO: 2730 - DNA, 5877 bp, Homo sapiens
  ref <308>: DATABASE ACCESSION NUMBER: EMBL / AB007882
  ref <309>: DATABASE ENTRY DATE: 2002-05-12
cggacggcggacggcgggcgggacggccaggacgcgcgggctcggaggaccgcgggacggccggccggccggccggagcccgcgggggcggcggggcgggggcccagggcaggcgcggagccgggccggcagcaacatgtcatggtttagtggcctcctggtccctaaagtggatgaacggaaaacagcctggggtgaacgcaatgggcagaagcgttcgcggcgccgtggcactcgggcaggtggcttctgcacgccccgctatatgagctgcctccgggatgcagagccacccagccccacccctgcgggcccccctcggtgcccctggcaggatgacgccttcatccggaggggcggcccaggcaagggcaaggagctggggctgcgggcagtggccctgggcttcgaggataccgaggtgacaacgacagcgggcgggacggctgaggtggcgcccgacgcggtgcccaggagtgggcgatcctgctggcgccgtctggtgcaggtgttccagtcgaagcagttccgttcggccaagctggagcgcctgtaccagcggtacttcttccagatgaaccagagcagcctgacgctgctgatggcggtgctggtgctgctcacagcggtgctgctggctttccacgccgcacccgcccgccctcagcctgcctatgtggcactgttggcctgtgccgccgccctgttcgtggggctcatggtggtgtgtaaccggcatagcttccgccaggactccatgtgggtggtgagctacgtggtgctgggcatcctggcggcagtgcaggtcgggggcgctctcgcagcagacccgcgcagcccctctgcgggcctctggtgccctgtgttctttgtctacatcgcctacacgctcctccccatccgcatgcgggctgccgtcctcagcggcctgggcctctccaccttgcatttgatcttggcctggcaacttaaccgtggtgatgccttcctctggaagcagctcggtgccaatgtgctgctgttcctctgcaccaacgtcattggcatctgcacacactatccagcagaggtgtctcagcgccaggcctttcaggagacccgcggttacatccaggcccggctccacctgcagcatgagaatcggcagcaggagcggctgctgctgtcggtattgccccagcacgttgccatggagatgaaagaagacatcaacacaaaaaaagaagacatgatgttccacaagatctacatacagaagcatgacaatgtcagcatcctgtttgcagacattgagggcttcaccagcctggcatcccagtgcactgcgcaggagctggtcatgaccctgaatgagctctttgcccggtttgacaagctggctgcggagaatcactgcctgaggatcaagatcttgggggactgttactactgtgtgtcagggctgccggaggcccgggccgaccatgcccactgctgtgtggagatgggggtagacatgattgaggccatctcgctggtacgtgaggtgacaggtgtgaatgtgaacatgcgcgtgggcatccacagcgggcgcgtgcactgcggcgtccttggcttgcggaaatggcagttcgatgtgtggtccaatgatgtgaccctggccaaccacatggaggcaggaggccgggctggccgcatccacatcactcgggcaacactgcagtacctgaacggggactacgaggtggagccaggccgtggtggcgagcgcaacgcgtacctcaaggagcagcacattgagactttcctcatcctgggcgccagccagaaacggaaagaggagaaggccatgctggccaagctgcagcggactcgggccaactccatggaagggctgatgccgcgctgggttcctgatcgtgccttctcccggaccaaggactccaaggccttccgccagatgggcattgatgattccagcaaagacaaccggggcacccaagatgccctgaaccctgaggatgaggtggatgagttcctgagccgtgccatcgatgcccgcagcattgatcagctgcggaaggaccatgtgcgccggtttctgctcaccttccagagagaggatcttgagaagaagtactcccggaaggtggatccccgcttcggagcctacgttgcctgtgccctgttggtcttctgcttcatctgcttcatccagcttctcatcttcccacactccaccctgatgcttgggatctatgccagcatcttcctgctgctgctaatcaccgtgctgatctgtgctgtgtactcctgtggttctctgttccctaaggccctgcaacgtctgtcccgcagcattgtccgctcacgggcacatagcaccgcagttggcatcttttccgtcctgcttgtgtttacttctgccattgccaacatgtacttcatcgggaacatgctgctgagtctcttggccagctctgtcttcctgcacatcagcagcatcgggaagttggccatgatctttgtcttggggctcatctatttggtgctgcttctgctgggtcccccagccaccatctttgacaactatgacctactgcttggcgtccatggcttggcttcttccaatgagacctttgatgggctggactgtccagctgcagggagggtggccctcaaatatatgacccctgtgattctgctggtgtttgcgctggcgctgtatctgcatgctcagcaggtggagtcgactgcccgcctagacttcctctggaaactacaggcaacaggggagaaggaggagatggaggagctacaggcatacaaccggaggctgctgcataacattctgcccaaggacgtggcggcccacttcctggcccgggagcgccgcaatgatgaactctactatcagtcgtgtgagtgtgtggctgttatgtttgcctccattgccaacttctctgagttctatgtggagctggaggcaaacaatgagggtgtcgagtgcctgcggctgctcaacgagatcatcgctgactttgatgagattatcagcgaggagcggttccggcagctggaaaagatcaagacgattggtagcacctacatggctgcctcagggctgaacgccagcacctacgatcaggtgggccgctcccacatcactgccctggctgactacgccatgcggctcatggagcagatgaagcacatcaatgagcactccttcaacaatttccagatgaagattgggctgaacatgggcccagtcgtggcaggtgtcatcggggctcggaagccacagtatgacatctgggggaacacagtgaatgtctctagtcgtatggacagcacgggggtccccgaccgaatccaggtgaccacggacctgtaccaggttctagctgccaagggctaccagctggagtgtcgaggggtggtcaaggtgaagggcaagggggagatgaccacctacttcctcaatgggggccccagcagttaacagggcccagccacaaattcagctgaagggaccaaggtgggcattgagtggactctgtgctcactgggtggagctgtggcagggggcactgagcctccagaccctgctaaccacaaaagggaacatcccagcaggctgtgcttggatcatgctcgtctgccctcaagctggaaaacaaggggctacctaccgagaggattatgcaagtgactttctttcttacttggggtagggctgttccctctccaatcttccagcctttgggagcaggggaggggtcagtagcagaagcagagggaggcctcttgcctgagggattaaaatggcagcttgccatgcctacccttccctgtctgtctgggcagcaggttcagggctgagcccttcttttccctcttttttcctgggaatattttgtacaatattttgtacaaagacaggcatgaggagtgcctattccatgcttgcctttgcaatacctgcatccccagcactggtcctgggcacttccccaccccagccaggtgtccctcctatgcacagagcagaggagggagaagctctggggagccagctttggccatatttcaggagaatgtttccatgtgccaaatcttagtcccatgatctgtccccaaaggggaacaaagggacctctgacagcttagatttagccccagttcctgcacgctccagggaacggggtgtctggcctcactggtactgtgaaaaatgctcagagagcaagcctgtgtgtggggatgtcaggtcaggagctggaagttcacctgcaggtgccaaagagcaggccggccagggctggggcagtgccagactctgatctgaggaccccgtcggggtccagatcaggtcactctgccccagtgctctcttgctgtctgctgacaagggggcatggagcatctcttcctcttctgttgccaaatagaaaagggtcagggcatggagaaaggtgaccctgatcccaaacctgccctcccaagtctctggtgttggggagggcccgtgtgtttgtgtaactgtgtgtgcatgttggtctttgtgtgcatatctgttttccaggtctatgtgagtccttgtgctcctgctcctcagctctccaccccaggttgcctctctcctgtgggcctctgtcttctgggaataaagcagggtttcctacttcaggggatgtagagagatgcccaggttgcacaggagtgggatggggtgtggtagcaaaaggagggagaggagtcctttttgtgccaaatccctaagtgccgttcgggggccatgtgtgcagcatgactctccctgtctgtggcagggacccaagcgcttgcttaagccccagtgctccatgccagcacttgaactgtctggggtttgatggacagaggctgaggaatttcctggcttccccagatagtgtcctgggacatggtatgctttggggctggggtagcatggaatccctctgaggacctggatactggtactacggggtggggaagaggaaccttaaacttggctttccccagccttcagcctgagtctagcatgtttctagctccccagtcccttgtgaagccttgagggctggcagaagggttaggaggttgaactctagattcccttcctgtctttgccttccttttacccctttccctgcaacctccttgactctggcctgaatttgttggtgcctcagtttctctgtctgtacctatttaagccaaaggcactagcctgaattttgcttgaagatcactttgtcttggaaatgactagagaggcagaggagaagggtttccagagttgctaggtttgggagtggaaggggcaggcagtgcacttgcccctcctcatgccccttctgacaccagctccctgtggaggcctggtttctgggtaatgcctcccttgggcatcttcatgcatcaaccaaatgggccatcaggtacttcattagtcatggcagaaggaggggaaaagacttgttttccagacagaaaatctactcccctgtccccagccatatccctggataggaagggataggaagagactacttggtgccatggggtaggggtgagggtataagtagatcagagtgggaagacctcagccttgggtggcttgtctctgcttcttgccaggtgggagggcctgtccacaccctggatccccgtaccacagtgccagccatgcccttcccctgggctaccattgtccctttcctcacccagttggtagaggagtcaggaggtgggaggccgtgggctttggttttataatgtaaccactgtgggggtgggggaggatggtgaaccatgtatttcagtgaaatatttaatatatttaaatatcaataaaatcaaactctttgt

SEQ ID NO: 2731 - protein, 1168 aa, Homo sapiens
  ref <308>: DATABASE ACCESSION NUMBER: SWISS-Prot / O43306
  ref <309>: DATABASE ENTRY DATE: 2002-06-15
MSWFSGLLVPKVDERKTAWGERNGQKRSRRRGTRAGGFCTPRYMSCLRDAEPPSPTPAGPPRCPWQDDAFIRRGGPGKGKELGLRAVALGFEDTEVTTTAGGTAEVAPDAVPRSGRSCWRRLVQVFQSKQFRSAKLERLYQRYFFQMNQSSLTLLMAVLVLLTAVLLAFHAAPARPQPAYVALLACAAALFVGLMVVCNRHSFRQDSMWVVSYVVLGILAAVQVGGALAADPRSPSAGLWCPVFFVYIAYTLLPIRMRAAVLSGLGLSTLHLILAWQLNRGDAFLWKQLGANVLLFLCTNVIGICTHYPAEVSQRQAFQETRGYIQARLHLQHENRQQERLLLSVLPQHVAMEMKEDINTKKEDMMFHKIYIQKHDNVSILFADIEGFTSLASQCTAQELVMTLNELFARFDKLAAENHCLRIKILGDCYYCVSGLPEARADHAHCCVEMGVDMIEAISLVREVTGVNVNMRVGIHSGRVHCGVLGLRKWQFDVWSNDVTLANHMEAGGRAGRIHITRATLQYLNGDYEVEPGRGGERNAYLKEQHIETFLILGASQKRKEEKAMLAKLQRTRANSMEGLMPRWVPDRAFSRTKDSKAFRQMGIDDSSKDNRGTQDALNPEDEVDEFLSRAIDARSIDQLRKDHVRRFLLTFQREDLEKKYSRKVDPRFGAYVACALLVFCFICFIQLLIFPHSTLMLGIYASIFLLLLITVLICAVYSCGSLFPKALQRLSRSIVRSRAHSTAVGIFSVLLVFTSAIANMFTCNHTPIRSCAARMLNLTPADITACHLQQLNYSLGLDAPLCEGTMPTCSFPEYFIGNMLLSLLASSVFLHISSIGKLAMIFVLGLIYLVLLLLGPPATIFDNYDLLLGVHGLASSNETFDGLDCPAAGRVALKYMTPVILLVFALALYLHAQQVESTARLDFLWKLQATGEKEEMEELQAYNRRLLHNILPKDVAAHFLARERRNDELYYQSCECVAVMFASIANFSEFYVELEANNEGVECLRLLNEIIADFDEIISEERFRQLEKIKTIGSTYMAASGLNASTYDQVGRSHITALADYAMRLMEQMKHINEHSFNNFQMKIGLNMGPVVAGVIGARKPQYDIWGNTVNVSSRMDSTGVPDRIQVTTDLYQVLAAKGYQLECRGVVKVKGKGEMTTYFLNGGPSS

SEQ ID NO: 2732 - DNA, 481 bp, Rattus norvegicus
  ref <308>: DATABASE ACCESSION NUMBER: EMBL / L01793
  ref <309>: DATABASE ENTRY DATE: 2000-01-22
catggtagatgtcttggacagtggtgattctgctcatctaaccttaatgaagaggcctgagttgggcatcacgttgactaaactccactgctggtcactcactcagtattccaaatgtgtgttcatggatgcagatactctggttctctcaaatattgatgatctttttgaaagagaagaattgtcagcagcaccagacccagggtggcctgactgtttcaattctggagtctttgcttatcacccctcaattgaaacgtataaccagctgttgcatcttgcttctgagcaaggtagttttgatggtggggaccagggcctactgaatacatattttagtggctgggcaacgacagatatcacaaaacacttgccatttgtgtataacctgagcagcctctcaatatactcctacctcccggcatttaaagcgtttggtaaaaatgccaaagttgtgcacttcctgggacgaaccaagcca

SEQ ID NO: 2733 - protein, 333 aa, Rattus norvegicus
  ref <308>: DATABASE ACCESSION NUMBER: Refseq / NP_112305
  ref <309>: DATABASE ENTRY DATE: 2002-11-05
MTDQAFVTLTTNDAYAKGALVLGSSLKQHRTTRRTVVLASPQVSDSMRKVLETVFDEVIMVDVLDSGDSAHLTLMKRPELGITLTKLHCWSLTQYSKCVFMDADTLVLSNIDDLFEREELSAAPDPGWPDCFNSGVFVYQPSIETYNQLLHLASEQGSFDGGDQGLLNTYFSGWATTDITKHLPFVYNLSSLSIYSYLPAFKAFGKNAKVVHFLGRTKPWNYTYNPQTKSVKCESQDPIVSHPEFLNLWWDTFTTNVLPLLQHHGLVKDAGSYLMMEHVTGALSDLSFGEAPPASQPSLSSEERKERWEQGQADYMGADSFDNIKRKLDTYLQ

SEQ ID NO: 2734 - DNA, 1807 bp, Homo sapiens
  ref <308>: DATABASE ACCESSION NUMBER: Refseq / NM_004130
  ref <309>: DATABASE ENTRY DATE: 2002-04-10
ctctgagtcaccaacctgaggctgccccggccgcctgcgcacccggcagcaccatgacagatcaggcctttgtgacactaaccacaaacgatgcctacgccaaaggtgccctggtcctgggatcatctctgaaacagcacaggaccaccaggaggctggtcgtgctcgccacccctcaggtctcagactccatgagaaaagttttagagacagtctttgatgaagtcatcatggtagatgtcttggacagtggcgattctgctcatctaaccttaatgaagaggccagagttgggtgtcacgctgacaaagctccactgctggtcgcttacacagtattcaaaatgtgtattcatggatgcagatactctggtcctagcaaatattgatgatctttttgacagagaagaattgtcagcagcaccagacccagggtggcctgactgcttcaattccggagtcttcgtttatcagccttcagttgaaacatacaatcagctgttgcatcttgcttctgagcaaggtagttttgatggtggggaccaaggcatactgaacacattttttagcagctgggcaacaacagatatcagaaaacacctgccgtttatttataacctaagcagcatctctatatactcctacctcccggcatttaaagtgtttggtgcaagtgccaaagttgtgcatttcctgggacgagtcaaaccatggaattatacttatgatcccaaaacaaaaagtgtcaaaagtgaggcccatgatcccaacatgactcatccagagtttctcatcctgtggtggaacatctttaccaccaacgttttacctctgcttcaacaatttggccttgtcaaagacacctgctcatatgtaaatgtgctttcagacttggtctatacactggctttctcttgtggcttctgtagaaaggaagatgtctcaggagccatatcacatctgtcccttggggagatcccagctatggcacagccgtttgtatcctcggaagaacggaaggaacgatgggaacagggccaggctgattatatgggagcagattcctttgacaacatcaagaggaaacttgacacttacctccagtagaaacactgcatttttctgtgaacacatccacttcacaagccttgtttctgatacttagtatctagagctgggttgagaaaagtctgttacagttgctagaggttttcattaaaacttatcagatgagaggcttttttaggataagaggtgagaactgggcaaaagttgtgaagcagcaattctgttatatggacagtgttctgctttttaatcctatttagcttgtttcagaaattctcacttttgttgactgccaacatacaaagtaagggaaactcaagatattaagatggctgtatcagttcttaaaatctgcagagcctggttcaaaatcagtcactcccttcagaagcagacatggcatctgttccttgcttgcttgttggttgtgtacctttcacgagacctgaattttagaattgcccagtgctgccagagtgagtgagtgtaattctcctttcaggtaaagataggctatctcaacactgctgagtgattcataaacatatcaaccaatagcattaacccattttatttcctgtccttagtgtctgaagatgctcaccagttttctgtgtacagtaaggcagcatgctaaaatgcttttgttcagttctggatatttgaaaatagcagtgtgttctctgatggttacctgcagtggcaccctgtacaaaaaataaaagacttattggtgtaaa

SEQ ID NO: 2735 - protein, 349 aa, Homo sapiens
  ref <308>: DATABASE ACCESSION NUMBER: SWISS-Prot / P46976
  ref <309>: DATABASE ENTRY DATE: 2002-06-15
TDQAFVTLTTNDAYAKGALVLGSSLKQHRTTRRLVVLATPQVSDSMRKVLETVFDEVIMVDVLDSGDSAHLTLMKRPELGVTLTKLHCWSLTQYSKCVFMDADTLVLANIDDLFDREELSAAPDPGWPDCFNSGVFVYQPSVETYNQLLHLASEQGSFDGGDQGILNTFFSSWATTDIRKHLPFIYNLSSISIYSYLPAFKVFGASAKVVHFLGRVKPWNYTYDPKTKSVKSEAHDPNMTHPEFLILWWNIFTTNVLPLLQQFGLVKDTCSYVNVLSDLVYTLAFSCGFCRKEDVSGAISHLSLGEIPAMAQPFVSSEERKERWEQGQADYMGADSFDNIKRKLDTYLQ

SEQ ID NO: 2736 - DNA, 481 bp, Rattus norvegicus; identical to SEQ ID NO: 2732
  ref <308>: DATABASE ACCESSION NUMBER: EMBL / L01793
  ref <309>: DATABASE ENTRY DATE: 2000-01-22

SEQ ID NO: 2737 - protein, 332 aa, Rattus norvegicus
  ref <308>: DATABASE ACCESSION NUMBER: SWISS-Prot / AAB81219
  ref <309>: DATABASE ENTRY DATE: 2002-06-15
TDQAFVTLTTNDAYAKGALVLGSSLKQHRTTRRTVVLASPQVSDSMRKVLETVFDEVIMVDVLDSGDSAHLTLMKRPELGITLTKLHCWSLTQYSKCVFMDADTLVLSNIDDLFEREELSAAPDPGWPDCFNSGVFVYQPSIETYNQLLHLASEQGSFDGGDQGLLNTYFSGWATTDITKHLPFVYNLSSLSIYSYLPAFKAFGKNAKVVHFLGRTKPWNYTYNPQTKSVKCESQDPIVSHPEFLNLWWDTFTTNVLPLLQHHGLVKDAGSYLMMEHVTGALSDLSFGEAPPASQPSLSSEERKERWEQGQADYMGADSFDNIKRKLDTYLQ

SEQ ID NO: 2738 - DNA, 1807 bp, Homo sapiens; identical to SEQ ID NO: 2734
  ref <308>: DATABASE ACCESSION NUMBER: Refseq / NM_004130
  ref <309>: DATABASE ENTRY DATE: 2002-04-10

SEQ ID NO: 2739 - protein, 349 aa, Homo sapiens; identical to SEQ ID NO: 2735
  ref <308>: DATABASE ACCESSION NUMBER: SWISS-Prot / P46976
  ref <309>: DATABASE ENTRY DATE: 2002-06-15

SEQ ID NO: 2740 - DNA, 481 bp, Rattus norvegicus; identical to SEQ ID NO: 2732
  ref <308>: DATABASE ACCESSION NUMBER: EMBL / L01793
  ref <309>: DATABASE ENTRY DATE: 2000-01-22

SEQ ID NO: 2741 - protein, 333 aa, Rattus norvegicus; identical to SEQ ID NO: 2733
  ref <308>: DATABASE ACCESSION NUMBER: Refseq / NP_112305
  ref <309>: DATABASE ENTRY DATE: 2002-11-05

SEQ ID NO: 2742 - DNA, 1807 bp, Homo sapiens; identical to SEQ ID NO: 2734
  ref <308>: DATABASE ACCESSION NUMBER: Refseq / NM_004130
  ref <309>: DATABASE ENTRY DATE: 2002-04-10

SEQ ID NO: 2743 - protein, 349 aa, Homo sapiens; identical to SEQ ID NO: 2735
  ref <308>: DATABASE ACCESSION NUMBER: SWISS-Prot / P46976
  ref <309>: DATABASE ENTRY DATE: 2002-06-15

SEQ ID NO: 2744 - DNA, 481 bp, Rattus norvegicus; identical to SEQ ID NO: 2732
  ref <308>: DATABASE ACCESSION NUMBER: EMBL / L01793
  ref <309>: DATABASE ENTRY DATE: 2000-01-22

SEQ ID NO: 2745 - protein, 332 aa, Rattus norvegicus; identical to SEQ ID NO: 2737
  ref <308>: DATABASE ACCESSION NUMBER: SWISS-Prot / AAB81219
  ref <309>: DATABASE ENTRY DATE: 2002-06-15

SEQ ID NO: 2746 - DNA, 1807 bp, Homo sapiens; identical to SEQ ID NO: 2734
  ref <308>: DATABASE ACCESSION NUMBER: Refseq / NM_004130
  ref <309>: DATABASE ENTRY DATE: 2002-04-10

SEQ ID NO: 2747 - protein, 349 aa, Homo sapiens; identical to SEQ ID NO: 2735
  ref <308>: DATABASE ACCESSION NUMBER: SWISS-Prot / P46976
  ref <309>: DATABASE ENTRY DATE: 2002-06-15

SEQ ID NO: 2748 - DNA, 3829 bp, Rattus norvegicus
  ref <308>: DATABASE ACCESSION NUMBER: EMBL / L02315
  ref <309>: DATABASE ENTRY DATE: 2000-03-04
cgggtgctctccccaccccgcgaggggggaggggagcgcttcggcccctttaaggtgcggcgctcggcgaagtgcgggcaggcggcccgcgagccggcgcggggccaggagccgggtagggaagtcctgcctccccctccgcccgcaccggcccgcgccctccgcccaccgcgccgcgagggccatgcggcgcctctgaaccatgtcgtcctcctacgccaagaacggggcggcggacgggccgcactcccccagctcgcaggtggcccgaggcaccacgacccggaggagcaggttgaaaagatccgatggcagcaccacttccaccagcttcatcctcagacaggggtcagcagattcctatacaagcaggccatcggactccgatgtctctttggaagaggaccgggaagcgattcggcaagagagagaacagcaagcagctatccagcttgagagagcgaagtccaaacctgtagcttttgcggtgaaaacgaatgtgagctactgtggtgccctggatgaggatgtgcccgttcccagcacagccatctcctttgacgccaaggactttcttcacattaaagagaaatataacaatgattggtggataggaaggctggtgaaggagggctgtgagatcggcttcatcccaagtccactgcgtttggagaacatacggattcaacaggaacagaaaagaggccgttttcatggcgggaaatcgagtggaaactcttcctccagtctgggagaaatggtgtcaggaacatttcgagcaactcccacaacaacagcaaaacagaagcagaaagtgacggagcacattcctccgtatgatgttgtgccatcaatgcgtcctgtggtgttagtagggccatcactgaaaggttatgaggtaacagacatgatgcagaaagccctctttgatttcctgaagcacaggtttgatgggaggatatcaataaccagagtgacagctgacatttctcttgctaagaggtctgtcctcaacaatcctagcaagagagcaataattgaacgttcaaacaccagatccagcctagcggaagtacagagtgaaattgaaagaattttcgagttggcaagatctttgcaattggttgttctcgatgcagacaccatcaatcacccagcacagctgataaagacatcgttagcgcccatcatcgtccacgtgaaggtctcgtccccaaaggttttacagcggctgattaagtccagaggaaagtcccagagtaaacacttgaatgttcaactggtggcagctgataaactggcccagtgtccccctgaaatgtttgatgttatattagatgagaatcaacttgaggatgcctgtgaacatctgggagagtacctggaggcatattggcgtgccacccacacaagcagtagcacccctatgaccccattgctggggaggaacgtgggctccacagctctctcaccgtatcccacagcaatctctggactacagagtcagcggatgaggcatagcaaccactctacagagaattctccaattgaaagacgaagcctaatgacctctgatgaaaattaccacaatgagagggcccgcaagagtaggaaccgcttgtcctccagctcccagcacagccgagatcactaccctctggtggaagaagattatcctgactcataccaggacacttacaaaccccataggaaccgaggctcacctgggggatgcagccatgactcccgacataggctttgaggctgcccaaacaaacaaacaaacaaacaaacatcatctgttgacaatttgccatagtactgctaagataaaccagtcatcttaatttggcaagcatggcacagtatctgctgtgcgggtggtctgctgtcgtttgatgtaaggggcaagaattaaatagaagtacattatgcccttgagtctaggagggtattagatacccggtcatataggtatttttaagtgctacatttacatgataacagtaccttttgttttcttcatagattttagacacatcaatttgtaatttagggtactgatcaaggcacatataaaataatttcccgtgtaggaaattccaaatgaccagttccagttggaaccaatttataaaccaattcctgttggaatttgggtgaattgactggaaagtctacctgagcatgttgaaatcaattgaaaaaatcagagaagaaaaaaatacccaataaggaaatcaaaatactaatagaaaccaaacccagctatggtatttgtttgctggaagctaaatttacacttcaagttggaatgtagaaacattttaataatgttgctggaatggcttttcaaacttaccaaatatattgatagtgccaaaaaaaaatctcagaaatcttaatgcagaaattatataatcgcctcagattttaatatttttatttttcctgatatagctgttgtattcaaagtgttttgccttctgttcagtcagtactgttagccagtttgaagttgacaaaatccaggggatatttgagaagtggtaaagagaagccctagcatggacagttccagagagtggagaatgaggtgttgttccttctgcagtcagtctgcacacagctgcacacatctggagacctggtgtcaggtagcagagatgtggcggggcctctctggctacaacggtaattggcttcagatgggaagtcgtccatcgtacagcacaccgacacgggcttaggagctgtgccagcatggctgagtgtctttccctcacttcagccagtctccatctttgaatataatgaatgttttggccctgcatcacacttcttttatgtttcatgggcataatcaaattaggtactgaaagttatgttttcacaaaataattaggaaaacttaaaacactgaattaaaatcttgcagagaaagaaaaaaaaaccctcatagaatcagaatatatttattcactaaaagcaagacagtttcaatacacggcattagagagagttgagagactgctcggttccattgatagtgaacagcctttagacttctatgagtgtatttatggaattgatgacctatgtcctatgttattaaagacagctttaatccaagaaattagtgaaattgaccctttgaaacaaatgtctttctgaaagggcttgtttctgaaatgacgcaatacatgtgttttctaaagacccaattggagctagacgtaaagtctctttctactaatgctttgaagtcaatttccgaaacaagtataattaatagtatgttaatttctccaaaaaaaagacatgggtcctcaaaactgtgtaccagttcattaattctcctgatcaagagtctaagtttcatattcttaatcagttatcctatctcggatcccatcaacccattgtcttgactgtatgtgcaacccattatgaacctgcttatctgataatgaggctgcctgaaattttgtggtaatctcaaacatttgatacatttaaacacgggctcagtcaaattgacaagctaacatctgacactggcttgtgaagcttttttgtcatccagcgaggcttacagaattttctgttaagacatttaacagagctgtattcattgggctctttaataagcatataatcttccattaccaaatactttgttagaagacagaagagcatttttccagcgaacaaactatatttattacatgtatagcacatatttgcatgagaaagaaaaacattagccaaacattttcctgtatgctttactggtttcttgtttgtgcgcattaaagcatttaattgc

SEQ ID NO: 2749 - DNA, 2034 bp, Homo sapiens
  ref <308>: DATABASE ACCESSION NUMBER: EMBL / AF038852
  ref <309>: DATABASE ENTRY DATE: 2000-03-03
agaacgggaccgcggacgggccgcactcccccacctcgcaggtggcccgaggcaccacaacccggaggagcaggttgaaaagatccgatggcagcaccacttcgaccagcttcatcctcagacagggttcagcggattcctacacaagcaggccgtctgactccgatgtctctttggaagaggaccgggaagcaattcgacaggagagagaacagcaagcagctatccagcttgagagagcaaagtccaaacctgtagcatttgccgtgaagacaaatgtgagctactgcggcgccctggacgaggatgtgcctgttccaagcacagctatctcctttgatgctaaagactttctacatattaaagagaaatataacaatgattggtggataggaaggctggtgaaagagggctgtgaaattggcttcattccaagtccactcagattggagaacatacggatccagcaagaacaaaaaagaggacgttttcacggagggaaatcaagtggaaattcttcttcaagtcttggagaaatggtatctgggacattccgagcaactcccacatcaacagcaaaacagaagcaaaaagtgacggagcacattcctccttacgatgttgtaccgtcaatgcgtccggtggtgttagtggggccgtcactgaaaggttacgaggtaacagacatgatgcagaaagccctctttgatttcctgaagcacaggtttgatgggaggatttcaataacgagagtgacagctgacatttctcttgctaagaggtctgtcctaaataatcccagcaagagagcaataattgaacgttcgaacacccggtccagcttagcggaagtacaaagtgaaattgaaagaatctttgagttggcaagatctttgcaactggttgttcttgatgcagacaccatcaatcacccagcacaacttataaagacttccttagcaccaattattgttcatgtaaaagtctcatctccaaaggttttacagcggttgattaaatctagaggaaagtcacaaagtaaacacttgaatgttcaactggtggcagctgataaacttgcacaatgccccccagaaatgtttgatgttatattggatgaaaatcagcttgaggatgcatgtgaacatctaggggagtacctggaggcgtactggcgtgccacccacacaaccagtagcacacccatgaccccgctgctgggaaggaatttgggctccacggcactctcaccatatcccacagcaatttctgggttacagagtcagcgaatgaggcacagcaaccactccacagagaactctccaattgaaagacgaagtctaatgacctctgatgaaaattatcacaatgaaagggctcggaagagtaggaaccgcttgtcttccagttctcagcatagccgagatcattaccctcttgtggaagaagattaccctgactcataccaggacacttacaaaccccataggaaccgaggatcacctgggggatatagccatgactcccgacataggctttgagtttaatgaaacaaaaaatattcatctgttgacaatttgccatagcagtgctaggataaaccaatcatcttaacttggctaacatagcacagtatttactgtgctaatgggctgctgtcattttatgctaagtaaggggcaaaaaaaaaaattacattatgcccttgagtctagatggatattagatgcccgatcatatagatatttttaagtgcaacatttacatgataacagtacattttgttttcttcatagatttagacacatcaatttgtaatttagggtacttacaaggcacatataaaataatttcccatgctggaaattccaaatgaccagttccagttggaaccaatttataaaccaattcctgttggaatttgggtgaattgactagaaagtctacttgagcatgttgtaatcaactgaaaaatctggggggaaaaaaaaaaaactaataagaaaatcgaaataccaatagaagccaaatcca

SEQ ID NO: 2750 - protein, 520 aa, Homo sapiens
  ref <308>: DATABASE ACCESSION NUMBER: SWISS-Prot / O00305
  ref <309>: DATABASE ENTRY DATE: 2002-06-15
MSSSSYAKNGTADGPHSPTSQVARGTTTRRSRLKRSDGSTTSTSFILRQGSADSYTSRPSDSDVSLEEDREAIRQEREQQAAIQLERAKSKPVAFAVKTNVSYCGALDEDVPVPSTAISFDAKDFLHIKEKYNNDWWIGRLVKEGCEIGFIPSPLRLENIRIQQEQKRGRFHGGKSSGNSSSSLGEMVSGTFRATPTSTAKQKQKVTEHIPPYDVVPSMRPVVLVGPSLKGYEVTDMMQKALFDSLKHRFDGRISITRVTADISLAKRSVLNNPSKRAIIERSNTRSSLAEVQSEIERIFELARSLQLVVLDADTINHPAQLIKTSLAPIIVHVKVSSPKVLQRLIKSRGKSQSKHLNVQLVAADKLAQCPPEMFDVILDENQLEDACEHLGEYLEAYWRATHTTSSTPMTPLLGRNLGSTALSPYPTAISGLQSQRMRHSNHSTENSPIERRSLMTSDENYHNERARKSRNRLSSSSQHSRDHYPLVEEDYPDSYQDTYKPHRNRGSPGGYSHDSRHRL

SEQ ID NO: 2751 - DNA, 3829 bp, Rattus norvegicus; identical to SEQ ID NO: 2748
  ref <308>: DATABASE ACCESSION NUMBER: EMBL / L02315
  ref <309>: DATABASE ENTRY DATE: 2000-03-04

SEQ ID NO: 2752 - DNA, 2034 bp, Homo sapiens; identical to SEQ ID NO: 2749
  ref <308>: DATABASE ACCESSION NUMBER: EMBL / AF038852
  ref <309>: DATABASE ENTRY DATE: 2000-03-03

SEQ ID NO: 2753 - protein, 520 aa, Homo sapiens; identical to SEQ ID NO: 2750
  ref <308>: DATABASE ACCESSION NUMBER: SWISS-Prot / O00305
  ref <309>: DATABASE ENTRY DATE: 2002-06-15

SEQ ID NO: 2754 - DNA, 1330 bp, Rattus norvegicus
  ref <308>: DATABASE ACCESSION NUMBER: EMBL / L03201
  ref <309>: DATABASE ENTRY DATE: 2000-03-04
gggactctctcatgccgccatacggagatggctgttttgggtgcccctggtgtgctctgtgacaatggagcaactgcagagagacctaccctggaccaccactgggatctctggaagaaaactcgcatgagaaggaatacagatcagaatgaagaagacgtacgacgtctcatctgggaaaagaatctcaagtttataatgcttcacaatctggaacattctatgggaatgcattcatacagtgtgggcatgaaccacatgggagacatgacacctgaagaagtcataggttatatgggctctctgagaattcccaggccctggaatagaagtggcactctcaagtcaagctctaatcagacattgcccgactctgtggactggcgagaaaagggctgcgtcactaatgtgaaataccagggctcttgtggttcctgctgggctttcagcgccgagggggcccttgaagggcagctgaagctgaaaacggggaagctggtgtctctcagtgctcagaacctggtggattgctcaaccgaagaaaagtacgggaataaaggctgcgggggtggcttcatgaccgaagctttccagtacatcatcgatacgagcatcgactcagaagcttcctatccctacaaagccatggatgaaaagtgtctctatgacccaaaaaatcgagctgccacgtgttcaaggtacattgagctccccttcggcgatgaagaagctctgaaagaagcagtggccactaaagggcctgtctctgtgggcatcgacgacgccagccattcctccttcttcctctaccaaagtggtgtctatgatgacccctcctgtaccgagaatatgaatcatggtgttctcgtggttggctatgggactcttgatgggaaagactactggcttgtgaaaaacagttggggccttcactttggtgatcaaggatatattcggatggcgagaaataacaaaaatcactgcgggattgctagctattgctcttacccagaaatctaaaccgtttcttctttttctaatgggtcacaaagacggaatacactctaatttaattttgtctgctccatccggaggacccaagtgtgtcgtgatcagtgtgtacatactgtgctaactggcttacagcttgtttgttttataactttacctctctctgaaaagtctgtaagcaaggacgcgctgaggatggagctggcagtctgtcctagatattctttctatgcttgcaccctgtcgtctaatgtgtctaataaccctttgtaacacagatatccccaaagtgcctaataaaatctgtcatttcaagctc

SEQ ID NO: 2755 - protein, 330 aa, Rattus norvegicus
  ref <308>: DATABASE ACCESSION NUMBER: SWISS-Prot / Q02765
  ref <309>: DATABASE ENTRY DATE: 2002-06-15
MAVLGAPGVLCDNGATAERPTLDHHWDLWKKTRMRRNTDQNEEDVRRLIWEKNLKFIMLHNLEHSMGMHSYSVGMNHMGDMTPEEVIGYMGSLRIPRPWNRSGTLKSSSNQTLPDSVDWREKGCVTNVKYQGSCGSCWAFSAEGALEGQLKLKTGKLVSLSAQNLVDCSTEEKYGNKGCGGGFMTEAFQYIIDTSIDSEASYPYKAMDEKCLYDPKNRAATCSRYIELPFGDEEALKEAVATKGPVSVGIDDASHSSFFLYQSGVYDDPSCTENMNHGVLVVGYGTLDGKDYWLVKNSWGLHFGDQGYIRMARNNKNHCGIASYCSYPEI

SEQ ID NO: 2756 - DNA, 1763 bp, Homo sapiens
  ref <308>: DATABASE ACCESSION NUMBER: EMBL / M90696
  ref <309>: DATABASE ENTRY DATE: 2000-10-20
ggggtacctcatgtgacaagttccaatttcttttcaagtcaattgaactgaaatctccttgttgctttgaaatcttagaagagagcccactaattcaaggactcttactgtaggagcaactgctggttctatcacaatgaaacggctggtttgtgtgctcttggtgtgctcctctgcagtggcacagttgcataaagatcctaccctggatcaccactggcatctctggaagaaaacctatggcaaacaatacaaggaaaagaatgaagaagcagtacgacgtctcatctgggaaaagaatctaaagtttgtgatgcttcacaacctggagcattcaatgggaatgcactcatacgatctgggcatgaaccacctgggagacatgaccagtgaagaagtgatgtctttgatgagttccctgagagttcccagccagtggcagagaaatatcacatataagtcaaaccctaatcggatattgcctgattctgtggactggagagagaaagggtgtgttactgaagtgaaatatcaaggttcttgtggtgcttgctgggctttcagtgctgtgggggccctggaagcacagctgaagctgaaaacaggaaagctggtgtctctcagtgcccagaacctggtggattgctcaactgaaaaatatggaaacaaaggctgcaatggtggcttcatgacaacggctttccagtacatcattgataacaagggcatcgactcagacgcttcctatccctacaaagccatggatctgaaatgtcaatatgactcaaaatatcgtgctgccacatgttcaaagtacactgaacttccttatggcagagaagatgtcctgaaagaagctgtggccaataaaggcccagtgtctgttggtgtagatgcgcgtcatccttctttcttcctctacagaagtggtgtctactatgaaccatcctgtactcagaatgtgaatcatggtgtacttgtggttggctatggtgatcttaatgggaaagaatactggcttgtgaaaaacagctggggccacaactttggtgaagaaggatatattcggatggcaagaaataaaggaaatcattgtgggattgctagctttccctcttacccagaaatctagaggatctctcctttttataacaaatcaatgaaatatgaagcactttctcttaacttaatttttcctgctgtatccagaagaaataattgtgtcatgattaatgtgtatttactgtactaattagaaaatatagtttgaggccgggcacgtggctcacgcgtaatcccgttacttgggaggccaaggcaggcattatcaatcttgaggccaggagttaaagagcagcctggctaacatggtgaaaccccatctctactaaaaatacaaaaaattagccgagcacggtggtgcatgcctgtaatcccagctacttgggaggctgaggcacgagattccttgaacccaagaggttgaggctatgttgagctgagatcacaccactgtactccagcctggatgacagagtggagactctgtttcaaaaaaacagaaaagaaaatatagtttgattcttcatttttttaaatttgcaaatctcaggataaagtttgctaagtaaattagtaatgtactatagatataactgtacaaaaattgttcaacctaaaacaatctgtaattgcttattgttttattgtcccgaattcagttggtttaatatattgtcctctgtaatttcgatccttcttaa

SEQ ID NO: 2757 - protein, 331 aa, Homo sapiens
  ref <308>: DATABASE ACCESSION NUMBER: SWISS-Prot / P25774
  ref <309>: DATABASE ENTRY DATE: 2002-06-15
MKRLVCVLLVCSSAVAQLHKDPTLDHHWHLWKKTYGKQYKEKNEEAVRRLIWEKNLKFVMLHNLEHSMGMHSYDLGMNHLGDMTSEEVMSLMSSLRVPSQWQRNITYKSNPNRILPDSVDWREKGCVTEVKYQGSCGACWAFSAVGALEAQLKLKTGKLVTLSAQNLVDCSTEKYGNKGCNGGFMTTAFQYIIDNKGIDSDASYPYKAMDQKCQYDSKYRAATCSKYTELPYGREDVLKEAVANKGPVSVGVDARHPSFFLYRSGVYYEPSCTQNVNHGVLVVGYGDLNGKEYWLVKNSWGHNFGEEGYIRMARNKGNHCGIASFPSYPEI

SEQ ID NO: 2758 - DNA, 3617 bp, Rattus norvegicus
  ref <308>: DATABASE ACCESSION NUMBER: EMBL / L03294
  ref <309>: DATABASE ENTRY DATE: 2000-03-04
ttctgccccttgtagctgttctgccctcccctttaaaggttgacttgccccgcggcgctccaccgcgctctagtcctctgacgcctccggctcaaccctttgcaacgcggatccccgcccgcctgactgcccgcgcagcgcagttccagcagcaaagcagaagggcgcgccgagatggagagcaaagccctgctcctggtggccctgggagtttggctccagagtttgaccgccttccgcggaggggtggccgcagcagacgggggaagagatttctcagacatcgaaagtaaatttgccctaaggacccctgaagacacagctgaggacacttgtcatctgattcctggattagcagactctgtgtctaactgccacttcaaccacagcagcaaaacctttgtggtgatccatggatggacggtgacaggaatgtatgagagttgggtgcccaaacttgtggctgccctatacaaaagagaacctgactccaatgtcattgtagtagactggttgtatcgggcccagcaacattatccagtgtctgccggctataccaagctggtgggaaatgatgtggccaggttcatcaactggctggaggaagaatttaactaccccctagacaatgtccacctcttagggtacagtcttggagcccatgctgctggcgtggcaggaagtctgaccaacaagaaggtcaatagaattactggcttggatccagctgggcctaactttgagtatgcagaagcccctagtcgcctttctcctgatgatgcggatttcgtagatgtcttacacacatttaccagggggtcgcctggtcgaagtattgggatccagaaaccagtagggcatgttgatatttatcccaatggaggcactttccagccaggatgcaacattggagaagccattcgtgtaattgcagagaaggggcttggagatgtggaccagctggtgaagtgctcgcacgagcgctccatccatctcttcattgactccctgctgaatgaagaaaaccccagcaaggcatacaggtgcaattccaaggaggcctttgagaaagggctctgcctgagttgcagaaagaatcgctgtaacaacgtgggctatgagatcaacaaggtcagagccaagagaagcagtaagatgtacctgaagactcgctctcagatgccctacaaagtattccattaccaagtcaagattcacttttctggaactgagaatgacaagcaaaacaaccaggccttcgagatttctctgtatggcacagtggctgaaagtgagaacattcccttcaccctgccggaggtcgccacaaataaaacctactccttcttgatttacacggaggtggacatcggggaattgctgatgatgaagcttaagtggaagaacgactcctacttccgctggtcagactggtggagcagtcccagctttgtcatcgagaagatccgagtgaaagccggagagactcagaaaaaggtcatcttctgtgccagggagaaagtttctcatctgcagaaaggaaaggacgctgcagtgtttgtgaaatgccatgacaagtctctgaagaagtcgggctgacactggacaaaccaacaagagaagaaagcatctgagttctttgaagaccgaagaaaatgaagtaaattttatttaaaaaaaatacccttgtttgggtgtttgaaagtggattttcctgagtattaatcccagctatatcttgttagttaaatagaagacagtgtcaaatattaaaaggtggctaacacaacgtgaggaacctaatggccgatagcatgtcctccagcatcagaagacagcagagaggagaagcatgccatcttatatcccttaagaaggaatcatttgttcccaaccatacaagactccttcatgtgacccatttggtcatggtctaaaattagtaagggcctcttattttcattagatctctgaggttttaaattgagaccttctcaaagttctcttgaagtctaatatagacaacatttttttgtgctgtgagtcagatccatttctttagcagttgaaacagctggccattgtaactagttcttttaccatcaggatatagcacccctaccaaataaaataaataaataaagtgaccagggacatgtgactttgcaaaagcaatggacgacgtggctcgtggattcctgacccttagtcccaccacaacgaagtacaagtcagtagaggtacaaaacctagactgagtaattcttagtagacttcaagttttatggcttaattcctctgtcttttaaaaacgtgtcacatattataacattattctctagacagatgttgaaatgagcttgtgattcaggtgacatatgaattgagctgagagaaaataatgccctggctgattttatttctctgttttgctttcttgagaaaaggaatacttgtcccactccgtatctgagcctgaccaagaactaaactatgtacttcaggcttaccttgaactctcaaccatcctgccttggcttcctgagtgctgggagcttgataaccataattttattatcagatttttcttagtcattttcaccaatagaacacattcaatgcccaatcgttagcatttcgtttgagactcatcttgaccgtacctctgtcacacgtctaacacatcacattaatttctagtttagaagtgatcaagttcaaattctgcactgcgcaaagtacaagttttagagcaggaccattttttttttaccacgtaaaagtcgaaattactaggaaatgtgtatatcgatgcttgtacactgttgcgtgcaaagtgaggagccttctattgtgatagccatagacagtaccaggctcgttgccgctcttttgttttactataaaaaaataatgaagaattatttatgaacaagatctcatatgttcagattgcttttactattcatcaatataaaatgttaaaaaaaaaaaataaaacaagttctatctcagaggctgttgctgggaacagaaactgtgaaatgtgtgggtatctgaacacctacacacaagcaaagccccacaagagtctttgtcattcaatgtcattcagaaaggaaagagtcaagagatataccataatatgtcagagaagtagttccagatatgctggaatgctagcccttgctaggagaaagttggttgtgcctatgtaatataggacaaaagtgactggtttcattaggctcagtgtcattctaacaataaaatgatgtaccatatgtcaccagcatccccattattgctaattcatggcagtatatacgtacatatctcaatgatgctttgactttaaattttatttattagctgtaaataatgtgtgggtgtgtaaggaagcttgtaaacactggaaacgctgttgtggctatctggggtgtagatttgtggtgctaactctgtgtccacctccatcagtgattgtctcactgagccaactcactctgatgaacagcacaatggaatagcttttgaaggaagaaaataaactcacctgtgtgaagaaatgggatctgctttcaataaaatcgagaacgttttatccggaatccgcg

SEQ ID NO: 2759 - protein, 474 aa, Rattus norvegicus
  ref <308>: DATABASE ACCESSION NUMBER: SWISS-Prot / Q06000
  ref <309>: DATABASE ENTRY DATE: 2002-06-15
MESKALLLVALGVWLQSLTAFRGGVAAADGGRDFSDIESKFALRTPEDTAEDTCHLIPGLADSVSNCHFNHSSKTFVVIHGWTVTGMYESWVPKLVAALYKREPDSNVIVVDWLYRAQQHYPVSAGYTKLVGNDVARFINWLEEEFNYPLDNVHLLGYSLGAHAAGVAGSLTNKKVNRITGLDPAGPNFEYAEAPSRLSPDDADFVDVLHTFTRGSPGRSIGIQKPVGHVDIYPNGGTFQPGCNIGEAIRVIAEKGLGDVDQLVKCSHERSIHLFIDSLLNEENPSKAYRCNSKEAFEKGLCLSCRKNRCNNVGYEINKVRAKRSSKMYLKTRSQMPYKVFHYQVKIHFSGTENDKQNNQAFEISLYGTVAESENIPFTLPEVATNKTYSFLIYTEVDIGELLMMKLKWKNDSYFRWSDWWSSPSFVIEKIRVKAGETQKKVIFCAREKVSHLQKGKDAAVFVKCHDKSLKKSG

SEQ ID NO: 2760 - DNA, 3549 bp, Homo sapiens
  ref <308>: DATABASE ACCESSION NUMBER: EMBL / M15856
  ref <309>: DATABASE ENTRY DATE: 1999-07-02
cccctcttcctcctcctcaagggaaagctgcccacttctagctgccctgccatcccctttaaagggcgacttgctcagcgccaaaccgcggctccagccctctccagcctccggctcagccggctcatcagtcggtccgcgccttgcagctcctccagagggacgcgccccgagatggagagcaaagccctgctcgtgctgactctggccgtgtggctccagagtctgaccgcctcccgcggaggggtggccgccgccgaccaaagaagagattttatcgacatcgaaagtaaatttgccctaaggacccctgaagacacagctgaggacacttgccacctcattcccggagtagcagagtccgtggctacctgtcatttcaatcacagcagcaaaaccttcatggtgatccatggctggacggtaacaggaatgtatgagagttgggtgccaaaacttgtggccgccctgtacaagagagaaccagactccaatgtcattgtggtggactggctgtcacgggctcaggagcattacccagtgtccgcgggctacaccaaactggtgggacaggatgtggcccggtttatcaactggatggaggaggagtttaactaccctctggacaatgtccatctcttgggatacagccttggagcccatgctgctggcattgcaggaagtctgaccaataagaaagtcaacagaattactggcctcgatccagctggacctaactttgagtatgcagaagccccgagtcgtctttctcctgatgatgcagattttgtagacgtcttacacacattcaccagagggtcccctggtcgaagcattggaatccagaaaccagttgggcatgttgacatttacccgaatggaggtacttttcagccaggatgtaacattggagaagctatccgcgtgattgcagagagaggacttggagatgtggaccagctagtgaagtgctcccacgagcgctccattcatctcttcatcgactctctgttgaatgaagaaaatccaagtaaggcctacaggtgcagttccaaggaagcctttgagaaagggctctgcttgagttgtagaaagaaccgctgcaacaatctgggctatgagatcaataaagtcagagccaaaagaagcagcaaaatgtacctgaagactcgttctcagatgccctacaaagtcttccattaccaagtaaagattcatttttctgggactgagagtgaaacccataccaatcaggcctttgagatttctctgtatggcaccgtggccgagagtgagaacatcccattcactctgcctgaagtttccacaaataagacctactccttcctaatttacacagaggtagatattggagaactactcatgttgaagctcaaatggaagagtgattcatactttagctggtcagactggtggagcagtcccggcttcgccattcagaagatcagagtaaaagcaggagagactcagaaaaaggtgatcttctgttctagggagaaagtgtctcatttgcagaaaggaaaggcacctgcggtatttgtgaaatgccatgacaagtctctgaataagaagtcaggctgaaactgggcgaatctacagaacaaagaacggcatgtgaattctgtgaagaatgaagtggaggaagtaacttttacaaaacatacccagtgtttggggtgtttcaaaagtggattttcctgaatattaatcccagccctacccttgttagttattttaggagacagtctcaagcactaaaaagtggctaattcaatttatggggtatagtggccaaatagcacatcctccaacgttaaaagacagtggatcatgaaaagtgctgttttgtcctttgagaaagaaataattgtttgagcgcagagtaaaataaggctccttcatgtggcgtattgggccatagcctataattggttagaacctcctattttaattggaattctggatctttcggactgaggccttctcaaactttactctaagtctccaagaatacagaaaatgcttttccgcggcacgaatcagactcatctacacagcagtatgaatgatgttttagaatgattccctcttgctattggaatgtggtccagacgtcaaccaggaacatgtaacttggagagggacgaagaaagggtctgataaacacagaggttttaaacagtccctaccattggcctgcatcatgacaaagttacaaattcaaggagatataaaatctagatcaattaattcttaataggctttatcgtttattgcttaatccctctctcccccttcttttttgtctcaagattatattataataatgttctctgggtaggtgttgaaaatgagcctgtaatcctcagctgacacataatttgaatggtgcagaaaaaaaaaagataccgtaattttattattagattctccaaatgattttcatcaatttaaaatcattcaatatctgacagttactcttcagttttaggcttaccttggtcatgcttcagttgtacttccagtgcgtctcttttgttcctggctttgacatgaaaagataggtttgagttcaaattttgcattgtgtgagcttctacagattttagacaaggaccgtttttactaagtaaaagggtggagaggttcctggggtggattcctaagcagtgcttgtaaaccatcgcgtgcaatgagccagatggagtaccatgagggttgttatttgttgtttttaacaactaatcaagagtgagtgaacaactatttataaactagatctcctatttttcagaatgctcttctacgtataaatatgaaatgataaagatgtcaaatatctcagaggctatagctgggaacccgactgtgaaagtatgtgatatctgaacacatactagaaagctctgcatgtgtgttgtccttcagcataattcggaagggaaaacagtcgatcaagggatgtattggaacatgtcggagtagaaattgttcctgatgtgccagaacttcgaccctttctctgagagagatgatcgtgcctataaatagtaggaccaatgttgtgattaacatcatcaggcttggaatgaattctctctaaaaataaaatgatgtatgatttgttgttggcatcccctttattaattcattaaatttctggatttgggttgtgacccagggtgcattaacttaaaagattcactaaagcagcacatagcactgggaactctggctccgaaaaactttgttatatatatcaaggatgttctggctttacattttatttattagctgtaaatacatgtgtggatgtgtaaatggagcttgtacatattggaaaggtcattgtggctatctgcatttataaatgtgtggtgctaactgtatgtgtctttatcagtgatggtctcacagagccaactcactcttatgaaatgggctttaacaaaacaagaaagaaacgtacttaactgtgtgaagaaatggaatcagcttttaataaaattgacaacattttattaccac

SEQ ID NO: 2761 - protein, 475 aa, Homo sapiens
  ref <308>: DATABASE ACCESSION NUMBER: SWISS-Prot / P06858
  ref <309>: DATABASE ENTRY DATE: 2002-06-15
MESKALLVLTLAVWLQSLTASRGGVAAADQRRDFIDIESKFALRTPEDTAEDTCHLIPGVAESVATCHFNHSSKTFMVIHGWTVTGMYESWVPKLVAALYKREPDSNVIVVDWLSRAQEHYPVSAGYTKLVGQDVARFINWMEEEFNYPLDNVHLLGYSLGAHAAGIAGSLTNKKVNRITGLDPAGPNFEYAEAPSRLSPDDADFVDVLHTFTRGSPGRSIGIQKPVGHVDIYPNGGTFQPGCNIGEAIRVIAERGLGDVDQLVKCSHERSIHLFIDSLLNEENPSKAYRCSSKEAFEKGLCLSCRKNRCNNLGYEINKVRAKRSSKMYLKTRSQMPYKVFHYQVKIHFSGTESETHTNQAFEISLYGTVAESENIPFTLPEVSTNKTYSFLIYTEVDIGELLMLKLKWKSDSYFSWSDWWSSPGFAIQKIRVKAGETQKKVIFCSREKVSHLQKGKAPAVFVKCHDKSLNKKSG

SEQ ID NO: 2762 - DNA, 3617 bp, Rattus norvegicus; identical to SEQ ID NO: 2758
  ref <308>: DATABASE ACCESSION NUMBER: EMBL / L03294
  ref <309>: DATABASE ENTRY DATE: 2000-03-04

SEQ ID NO: 2763 - protein, 474 aa, Rattus norvegicus; identical to SEQ ID NO: 2759
  ref <308>: DATABASE ACCESSION NUMBER: SWISS-Prot / Q06000
  ref <309>: DATABASE ENTRY DATE: 2002-06-15

SEQ ID NO: 2764 - DNA, 3549 bp, Homo sapiens; identical to SEQ ID NO: 2760
  ref <308>: DATABASE ACCESSION NUMBER: EMBL / M15856
  ref <309>: DATABASE ENTRY DATE: 1999-07-02

SEQ ID NO: 2765 - protein, 475 aa, Homo sapiens; identical to SEQ ID NO: 2761
  ref <308>: DATABASE ACCESSION NUMBER: SWISS-Prot / P06858
  ref <309>: DATABASE ENTRY DATE: 2002-06-15

SEQ ID NO: 2766 - DNA, 3617 bp, Rattus norvegicus; identical to SEQ ID NO: 2758
  ref <308>: DATABASE ACCESSION NUMBER: EMBL / L03294
  ref <309>: DATABASE ENTRY DATE: 2000-03-04

SEQ ID NO: 2767 - protein, 474 aa, Rattus norvegicus; identical to SEQ ID NO: 2759
  ref <308>: DATABASE ACCESSION NUMBER: SWISS-Prot / Q06000
  ref <309>: DATABASE ENTRY DATE: 2002-06-15

SEQ ID NO: 2768 - DNA, 3549 bp, Homo sapiens; identical to SEQ ID NO: 2760
  ref <308>: DATABASE ACCESSION NUMBER: EMBL / M15856
  ref <309>: DATABASE ENTRY DATE: 1999-07-02

SEQ ID NO: 2769 - protein, 475 aa, Homo sapiens; identical to SEQ ID NO: 2761
  ref <308>: DATABASE ACCESSION NUMBER: SWISS-Prot / P06858
  ref <309>: DATABASE ENTRY DATE: 2002-06-15

SEQ ID NO: 2770 - DNA, 985 bp, Rattus norvegicus
  misc_feature (1)..(985): n=a, c, g or t
  ref <308>: DATABASE ACCESSION NUMBER: EMBL / L03556
  ref <309>: DATABASE ENTRY DATE: 2000-03-04
tgcacaattatggagatcatagttccgtgagcgaacaattcagggactcggcgagcatgcactccggcaggtacggctacggctacaatggcatggatctcagcgtcggccgttcgggttccggccactttggctccggcgagckckcccgcagctacncggctggggccagtgcggcgcccgccgagcccaggtacagccagccggccacgtccacgcactcgccaccgcccgacccgctgccctgctcagcggtggcccccttgcccggcagcgacacgcaccacggcgggaaaaactccctgggcaactccagcggctgctcggccaactgcggcagcacccacatcagcagcagagagggggttggcacggcgtccgcagcggaggaggacgcccctgccagcagcgagcaggcgggcgcccagagcgagccgagcccggcgccgcccgctcaaccccagatctacccctggatgcgcaagctgcacattagtcacgacaacataggtggcccagaaggcaaaagggcccggacgtgctacactcgctaccagaccctggagctggagaaagaattccacttcaaccgctacctgacccgccgaagaaggattgaaatagcacatgccctttgcctctccgagagacaaattaaaatctggttccaaaacaggaggatgaagtggaaaaaggataaatagctgaaaagtatgagtatggccgcggcagggggggccttccgcccctgaggttctgagcggccaaagtactgggcagtagtagcgcgcggacgaactctccgtagtgtcagtactaaggtgactttctgaaactccccttgtgttccttctgtgaagaagccctgttctcgttgccctaattcatcttttaatcatgagcctgtttattgccattatagcgcctgtataagtagatcagcttctgttcatctctttgctgatgcttgtcgaaaaaaatagag

SEQ ID NO: 2771 - protein, 233 aa, Rattus norvegicus
  misc_feature (1)..(233): Xaa=Unknown amino acid
  ref <308>: DATABASE ACCESSION NUMBER: SWISS-Prot / P52949
  ref <309>: DATABASE ENTRY DATE: 2002-06-15
HNYGDHSSVSEQFRDSASMHSGRYGYGYNGMDLSVGRSGSGHFGSGEXXRSYXAGASAAPAEPRYSQPATSTHSPPPDPLPCSAVAPLPGSDTHHGGKNSLGNSSGCSANCGSTHISSREGVGTASAAEEDAPASSEQAGAQSEPSPAPPAQPQIYPWMRKLHISHDNIGGPEGKRARTCYTRYQTLELEKEFHFNRYLTRRRRIEIAHALCLSERQIKIWFQNRRMKWKKDK

SEQ ID NO: 2772 - DNA, 1160 bp, Homo sapiens
  ref <308>: DATABASE ACCESSION NUMBER: EMBL / BC013682
  ref <309>: DATABASE ENTRY DATE: 2002-09-02
gcacaaacgaccgcgagccacaaatcaagcacacatatcaaaaaacaaatgagctcttattttgtaaactcattttgcggtcgctatccaaatggcccggactaccagttgcataattatggagatcatagttccgtgagcgagcaattcagggactcggcgagcatgcactccggcaggtacggctacggctacaatggcatggatctcagcgtcggccgctcgggctccggccactttggctccggagagcgcgcccgcagctacgctgccagcgccagcgcggcgcccgccgagcccaggtacagccagccggccacgtccacgcactctcctcagcccgatccgctgccctgctccgccgtggccccctcgcccggcagcgacagccaccacggcgggaaaaactccctaagcaactccagcggcgcctcggccgacgccggcagcacccacatcagcagcagagagggggttggcacggcgtccggagccgaggaggacgcccctgccagcagcgagcaggcgagtgcgcagagcgagccgagcccggcgccgcccgcccaaccccagatctacccctggatgcgcaagctgcacataagtcatgacaacataggcggcccggaaggcaaaagggcccggacggcctacacgcgctaccagaccctggagctggagaaggagttccacttcaaccgttacctgacccgcagaaggaggattgaaatagcacatgctctttgcctctccgagagacaaattaaaatctggttccaaaaccggagaatgaagtggaaaaaagataataagctgaaaagcatgagcatggccgcggcaggaggggccttccgtccctgagtatctgagcgtttaaagtactgagcagtattagcggatcccgcgtagtgtcagtactaaggtgactttctgaaactcccttgtgttccttctgtgaagaagccctgttctcgttgccctaattcatcttttaatcatgagcctgtttattgccattatagcgcctgtataagtagatctgctttctgttcatctctttgtcctgaatggctttgtcttgaaaaaaaatagatgttttaacttatttatatgaagcaagctgtgttacttgaagtaactataacaaaaaaaaaaaaaaa

SEQ ID NO: 2773 - protein, 270 aa, Homo sapiens
  ref <308>: DATABASE ACCESSION NUMBER: SWISS-Prot / P20719
  ref <309>: DATABASE ENTRY DATE: 2002-06-15
MSSYFVNSFCGRYPNGPDYQLHNYGDHSSVSEQFRDSASMHSGRYGYGYNGMDLSVGRSGSGHFGSGERARSYAASASAAPAEPRYSQPATSTHSPQPDPLPCSAVAPSPGSDTHHGGKNSLSNSSGASADAGSTHISSREGVGTASGAEEDAPASSEQASAQSEPSPAPPAQPQIYPWMRKLHISHDNIGGPEGKRARTAYTRYQTLELEKEFHFNRYLTRRRRIEIAHALCLSERQIKIWFQNRRMKWKKDNKLKSMSMAAAGGAFRP

SEQ ID NO: 2774 - DNA, 985 bp, Rattus norvegicus; identical to SEQ ID NO: 2770
  misc_feature (1)..(985): n=a, c, g or t
  ref <308>: DATABASE ACCESSION NUMBER: EMBL / L03556
  ref <309>: DATABASE ENTRY DATE: 2000-03-04

SEQ ID NO: 2775 - protein, 233 aa, Rattus norvegicus; identical to SEQ ID NO: 2771
  misc_feature (1)..(233): Xaa=Unknown amino acid
  ref <308>: DATABASE ACCESSION NUMBER: SWISS-Prot / P52949
  ref <309>: DATABASE ENTRY DATE: 2002-06-15

SEQ ID NO: 2776 - DNA, 1160 bp, Homo sapiens; identical to SEQ ID NO: 2772
  ref <308>: DATABASE ACCESSION NUMBER: EMBL / BC013682
  ref <309>: DATABASE ENTRY DATE: 2002-09-02

SEQ ID NO: 2777 - protein, 270 aa, Homo sapiens; identical to SEQ ID NO: 2773
  ref <308>: DATABASE ACCESSION NUMBER: SWISS-Prot / P20719
  ref <309>: DATABASE ENTRY DATE: 2002-06-15

SEQ ID NO: 2778 - DNA, 3559 bp, Rattus norvegicus
  ref <308>: DATABASE ACCESSION NUMBER: EMBL / L04739
  ref <309>: DATABASE ENTRY DATE: 2000-03-04
atgcaggagatctcgttgcttctctggtaaagataaacggacacaccagcagtttttaataccttaagttctttcccctgtgttatagcttatttcaaccattccaaccagccgcttaaagtttctaaaagaagctggccatgggacacagaaggaagagatccctgaggaggaattggcggaggatgttgaagagattgaccatgccgaacgggagttgcggcgtggccagatcttgtggtttagaggcctgaacagaatccaaacacaggtatgggtctggtagagaggtaggagagctgatggggtaaggacgttcacctgggagaggcccgaatgtgcttttaactgccttgccatgcttcccgacccacaaagtgtattcctttgaaaaacacctactgatgactgaattgagtgaagcttttaactgaatatggaagaatgtctcttataagccctcagctttttttttccctagcctttattttcccctttcatctcaaaatgctacatcttgcctatttatctgctctgtaaaagtgccttttcctatacgttttaaatgttggttgatggaacggtcctttctctgttctctctctcttgctgagcaagctgtcacgatctctgattccttgcagatggatgtagtgaatgctttccagagtggaggttccattcagggggctctaaggcgacaaccctccatcgccagaaagcaccatgatggtaacaaatgttctacccctacacatgtagtgtttcctcttctactgcttctactcctgtggggtgtgagtgtgtgttcctaagtgcatgaaattaacatttcctactcctcacacctaacgtttctcattctctccttactgtttaaactcattgttcgggctttttcataaagctttctttttgtaaagtggactggacctcaagtgttgccattgttgtttcatttcttagagggttggaggaaaggtgggtcagttgcaaccaaagaatacacacgaaatcagggagcttgtctctatgctaactctcagagctcatagcggggagtaaagttacagtttagtacttatgaaatgactataaatgtttgagtatatacctttcaacatattcatactgcatggttcccagaagcatgtgatctgaaactgagctaacagaaccagaaaattacatgtacaacgccaaagaatgaacttggcatttcagctcatacattgtcctttgagagagtgagttagcagcatgaagcgaggctctcgctagctagccagttgcttgccttcctaacttgaactctgtctgccttgatcctgtgtgccactgaataagctttcatcatttttacgctccctatattggtcaatttcttgggcttttcccttttgtacaatcactacagtcagcttggaagtgcatcgtagacaataccctgatgttacaaagttgacggtgtattcgctgctgttggtctgttagttaaaatagaaacgcacgatgaagtagaatgatgaaatagcataataaagtcaaaagaaatatgtacaggctgcatttggttatgtatgcagaaatgcagactgtgtaggtaggacctctcctggatcagagtctgcctttccccaaatatccccagtcaatcaagtgcacaccagagtctgagagagatcttgggcttgattatgtatgctaacactgcaccacattccatagcaaccccatggggtggtggggcattacatctgatttcctggagaaatgccatttggccaccactccccctcctcaagtaggcaggaggggaactcattccatgcctccctttctcactcagctatatttacactctgtgcaaagggccaagttatttagaatgatggttctcaacctccctaacactgcagcccggtgaaccccatcataaaattacctttgttgcttctgtacaactgtaattttgctactgctatgaattataacataaatgtgtaatgtgcaggatatcagatatgggatatagatacacacacacacacacaagcttgtgaccaccgatttagactaacacagctcagatggggtagtaagacccagaagataaatatgaagaaagatagtaatttgaagggacacatgacccaaccatatattttttaaatatacatttaattttctatttgagtaaatgtcttaatggtcattgcactgttaagataattttagtgactactgttttcttccagaatgtttgtatcaggtataagtaaatggtgccttcattcttaaaattattgaaacaaaggtgaacatttccatgttataaaaatatttacattttaactaatgtaaatgctcagctgaattgattttatcctcttaaaaaacattttttttgaatgacactggtttattgatcccaactgttgggaccagagtgacatttttaggcttgtctttaacctagtttcctgtatacagcagacacccaaggagaaaggcaaattgttaggccgtgtaagtccaaatggttgctagaaagaaaactctgaaacttggtgtcttttccttgattttttttttttcagagtcccagagggtggtgtttttggaatctgttctttcggagagaactatagtgattaagttacaatcttttatacacctgcccccccaaaaaaaccattaacacttttgtagaaaaatggcatatactcaaatacttatagttgtttagtattatagatatatatttgggttcatctttattttcaattcaggaaggagtggggcagatgtgaattcattgtggcatccggcttatatctgcttggcttgttcatagttggtgacaccctaactcctggcatgatatagagctcccttttgtgcttgacattgtttagcttgaattgttttgagaaatatgagctttttgatttaaagataaattcaagtaagcttgtgtatggcgaagttctcatttcgttttctggtttttgttttcgtcttcgtagggaaaaaaaaaaaaaaaaaaagcctataaaatggctgttaaatatttttagccagtaacaatgagatttcgttagtttttctttgaatgtatacctcttaattagagtatgtggtttcgttgttctgtagtgtcctactaaaatattcatttttttacagtgtattgcaagttccacattacatgcaaatacgattcactcatacctagctgtttgtggattcaaactcataagtgaaccgctgctggggttaagttcctggtgtcctgacatccccctgtgttttgtgctgtttacagatccgagtggtgaatgcatttcgtagctctttatacgaagggttagagaagccagaatcaagaagttcaatccacaactttatgacacaccccgagtttaggatagaagattcagagccgctcatcccccttatcgatgacactgatgctgaagatgacgctcctactaaacgcaactccagccctccgccctctcctaacaaaaataataatgccgttgacagcgggatc

SEQ ID NO: 2779 - protein, 1258 aa, Rattus norvegicus
  ref <308>: DATABASE ACCESSION NUMBER: SWISS-Prot / AAA50878
  ref <309>: DATABASE ENTRY DATE: 2002-06-15
MGDMANNSVAYSGVKNSLKEANHDGDFGITLAELRALMELRSTDALRKIQESYGDVYGICTKLKTSPNEGLSGNPADLERREAVFGKNFIPPKKPKTFLQLVWEALQDVTLIILEIAAIVSLGLSFYQPPEGDNALCGEVSVGEEEGEGETGWIEGAAILLSVVCVVLVTAFNDWSKEKQFRGLQSRIEQEQKFTVIRGGQVIQIPVADITVGDIAQVKYGDLLPADGILIQGNDLKIDESSLTGESDHVKKSLDKDPLLLSGTHVMEGSGRMVVTAVGVNSQTGIIFTLLGAGGEEEEKKDEKKKEKKNKKQDGAIENRNKAKAQDGAAMEMQPLKSEEGGDGDEKDKKKANLPKKEKSVLQGKLTKLAVQIGKAGLLMSAITVIILVLYFVIDTFWVQKRPWLAECTPIYIQYFVKFFIIGVTVLVVAVPEGLPLAVTISLAYSVKKMMKDNNLVRHLDACETMGNATAICSDKTGTLTMNRMTVVQAYINEKHYKKVPEPEAIPPNILSYLVTGISVNCAYTSKILPPEKEGGLPRHVGNKTECALLGFLLDLKRDYQDVRNEIPEEALYKVYTFNSVRKSMSTVLKNSDGSFRIFSKGASEIILKKCFKILSANGEAKVFRPRDRDDIVKTVIEPMASEGLRTICLAFRDFPAGEPEPEWDNENDVVTGLTCIAVVGIEDPVRPEVPEAIKKCQRAGITVRMVTGDNINTARAIATKCGILHPGEDFLCLEGKDFNRRIRNEKGEIEQERIDKIWPKLRVLARSSPTDKHTLVKGIIDSTVSEQRQVVAVTGDGTNDGPALKKADVGFAMGIAGTDVAKEASDIILTDDNFTSIVKAVMWGRNVYDSISKFLQFQLTVNVVAVIVAFTGACITQDSPLKAVQMLWVNLIMDTLASLALATEPPTESLLLRKPYGRNKPLISRTMMKNILGHAFYQLVVVFTLLFAGEKFFDIDSGRNAPLHAPPSEHYTIVFNTFVLMQLFNEINARKIHGERNVFEGIFNNAIFCTIVLGTFVVQIIIVQFGGKPFSCSELSIEQWLWSIFLGMGTLLWGQLISTIPTSRLKFLKEAGHGTQKEEIPEEELAEDVEEIDHAERELRRGQILWFRGLNRIQTQMDVVNAFQSGGSIQGALRRQPSIASQHHDVTNVSTPTHIRVVNAFRSSLYEGLEKPESRSSIHNFMTHPEFRIEDSEPLIPLIDDTDAEDDAPTKRNSSPPPSPNKNNNAVDSGIHLTIEMNKSATSSSPGSPLHSLETSL

SEQ ID NO: 2780 - DNA, 3164 bp, Homo sapiens
  ref <308>: DATABASE ACCESSION NUMBER: EMBL / M95542
  ref <309>: DATABASE ENTRY DATE: 1999-07-02
taaagactttttaacatgatctgattcaccagtcaatgagctttcatcaattttaagatcgttgccttgaataagtatgccgtcagctggaagaagatcaccatatttcacttgagcaatatctccaacagtaatgtcagctacaggtactcatgtaatggaaggctctggaagaatggtagttacagctgtaggtgtaaattctcaaactggaattatctttaccttacttggagctggaggtgaagaggaagagaagaaagatgagaagaaaaaggaaaagaaaaataagaaacaagatggagctattgagaatcgcaacaaagcaaaagcccaggatggtgcagccatggaaatgcagccattgaagagtgaagaaggtggagatggtgatgaaaaagataaaaagaaagcaaatttgccaaaaaaggaaaaatctgttttacaagggaaacttacaaaactggctgttcagattggcaaagcaggtctgttgatgtctgccatcacagttatcattctagtattatattttgtcattgacaccttctgggttcagaaaagaccatggcttgctgagtgcacaccaatttatatacaatactttgtgaagttcttcattattggagttacagttttagtggtcgcagtgccagaaggtcttccacttgcagtcacgatctcactggcttattcagtcaaaaaaatgatgaaagataataacttagtaaggcatctggatgcttgtgaaaccatgggaaatgctacagctatttgttcagataaaacaggaactttgacaatgaacagaatgacagtcgttcaagcttacataaatgaaaaacattataaaaaggttcctgaaccagaagctattccaccaaatattttgtcctatcttgtaacaggaatttctgtgaattgtgcttatacatcaaaaatattgccaccagagaaagagggtggattacctcgtcacgttggtaataaaactgaatgtgccttgttgggacttcttttggatttaaaacgggattatcaggatgttagaaatgaaataccagaagaagcactgtacaaagtctacaccttcaattctgttaggaagtccatgagtactgtcctgaaaaattcagatggaagttatcgaatattcagcaagggtgcatctgagataattctgaaaaagtgtttcaaaatcttgagtgctaatggtgaggcaaaagtattcagaccaagggaccgtgatgatattgtaaaaactgtgattgaaccgatggcatcagaaggcttgagaaccatatgtcttgcattcagagattttccagcaggagaaccagaaccagagtgggataatgaaaatgatattgtcaccggccttacatgcattgctgttgtggggattgaagatcctgtgagacctgaggtgccagatgcaattaaaaagtgtcagagggctggaattactgtgcggatggtcactggtgataatattaatactgctcgggccattgctaccaaatgtggtattttacatcctggggaagattttctgtgcctagaaggtaaagattttaacagaagaatacgaaatgaaaaaggagagattgagcaagagaggatagacaagatttggccaaaacttcgagtacttgcaagatcatctcctactgataagcatacactggttaaaggtataattgacagcactgtctcagaccaacgccaggttgtagctgtaactggtgatggtacaaatgatggcccagcactaaagaaagcagatgttggatttgcaatgggtattgctggaactgatgtagctaaagaagcatccgatattattctcacagatgacaactttacaagcattgttaaagcagttatgtggggacgaaatgtctatgacagcatctcaaaattccttcagttccaacttactgttaatgtagtagcagtgattgttgcttttacgggcgcctgcattactcaagactcaccgcttaaggctgtgcagatgctgtgggtaaacctcataatggatacactcgcttccctggctctggcaacggaaccacccactgagtctctcttgcttcggaaaccttatggtagaaataagcctctcatctcacgtacaatgatgaagaatattttgggtcatgcattctatcaacttgtagtagtctttacactcttatttgctggagaaaagttttttgacattgatagtggaagaaatgctcctttgcatgctcctccttcagaacattatactattgtttttaatacctttgtgctgatgcaacttttcaacgaaataaatgcccggaaaattcatggtgaaagaaatgtattcgaaggaatctttaacaatgccatcttctgcacaattgttttaggcacttttgtggtacagataataattgtgcagtttggtggaaaacctttcagttgttcagaactttcaatagaacagtggctatggtcaatattcctaggaatgggaacattactctggggccagcttatttcaacaattccaactagccgtttaaaattcctcaaagaagctggtcatggaacacaaaaggaagaaatacctgaggaggaattagcagaggatgttgaagagattgatcacgctgaaagggagttgcggcgtggccaaatcttgtggtttagaggtctgaacagaatccaaacacagattcgagtggtgaatgcatttcgtagttctttatatgaagggttagaaaaaccggaatcaagaagttcgattcacaactttatgacacatcctgagtttaggatagaagattcagagcctcatatcccccttattgatgacactgatgccgaagatgatgctcctacaaaacgtaactccagtcctccaccctctcccaacaaaaataacaatgctgttgacagtggaattcaccttacaatagaaatgaacaagtctgctacctcttcatccccaggaagcccactacatagtttggaaacatcactctgattgtaagctgaatgttaacacactagctgcattgtaaagaaacaaattgaaactgggtcttttcacatattgtgatggacaagctagtattcttgtctttggacttcaacagaagacacacttgtacgaatgtagatttatt

SEQ ID NO: 2781 - protein, 1258 aa, Homo sapiens; identical to SEQ ID NO: 2604
  ref <308>: DATABASE ACCESSION NUMBER: SWISS-Prot / P20020
  ref <309>: DATABASE ENTRY DATE: 2002-06-15

SEQ ID NO: 2782 - DNA, 1912 bp, Rattus norvegicus
  ref <308>: DATABASE ACCESSION NUMBER: EMBL / L04760
  ref <309>: DATABASE ENTRY DATE: 2002-02-07
cgggggacggctgtggtgaaggttctggagtgtggtgtttgtgaagatgtcttctctctgcaaggagataaagttcctcgccttctcctttgtggccacacagtctgtcatgactgtctctctcgcttgcctctgcatggaagagcaatacgttgcccatttgatcgacaagtgacagacctaggagattcaggtgtctggggtttgaaaaaaaattttgctttactggagcttttagaacgtttgcaaaatggacatattggtcagtatggagctgcagaagaagcccttgggatatctggagagagtatcattcgctgtgatgaagatgaagctcacgttgcatctgtgtactgcactgtgtgtgcgactcacttgtgctcagagtgttctcaagtcactcattctacaaagactctggccaagcataggcgagtgcctctagctgataaacctcatgagaagaccatgtgctgtcagcaccaggtacatgccattgagtttgtttgcttggaagaagcttgtcaaactagtcctctcatgtgctgtgtctgcaaagaatatggaaaacaccagggtcacaagcactcagtactggagccagaagctaaccagatccgagcgtcaattttagacatggctcactgcatacgaaccttcactgaggagatctcagattattccagaaaattagttgggattgttcagcacattgaaggaggagaacaaatagtggaagatggaattggaatggctcacacggaacacgtcccaggtactgcagagaatgcacgatcatgtgtcagagcttatttttctgatttgcatgaaactctttgtcgtcaagaagaaatggctctcagtgttgttgatgcccatgttcgagaaaaactgatttggcttaggcagcaacaagaggatatgactattctcttgtcccaggtttcaacagcctgtctccattgtgaaaagactttgcagcaggatgattgcagagttgtcttggcaaaacaagaaatcacaagattattagaaacactgcagaaacagcagcagcagtttacagaagttgcagatcatattcagttggatgccagtattccagtcacttttacaaaggacaacagagtttatattggacccaaaatggaaatacgagtagtcacattaggattagatggtgctggaaaaactactattttgttcaagttaaaacaagatgaatttatgcagcctattccaacaattggttttaatgtggaaactgtggaatacaaaaatctaaaattcaccatttgggatgtgggtgaaaaacacaaattaagaccattgtggaaacattattacctcaatacacaagctgttgtatttgttgttgacagcagtcacagagacagaattagtgaagcacacagtgaacttgcgaagttgttaacagaaaaagaacttcgagatgccttactcttgatttttgctaacaaacaggatgtcgctggggcactttcggttgaagaaatcaccgaacttctcagtctccataaattatgctgcggaaggagctggtatattcagggctgtgatgctcgaagtggtatggggctctacgaagggttggactggctgtcccggcaacttgtggctgccggagtgttggatgttgcttgattctattgcagcagttgtttcgagcttatggttaaaaagttactttgcatgtaaaaaaaaaaaaaaaaaatgcattctaagaaattctacatctcaagtatgataatttagtatgtgtacgtatgaatcctggactgagaaatgtaccattgcttttaaaaattattctgtggcaaatttaagtgatcctgttacattggttaaatagttttgctttgtttttttttggatataaacttttaaaagg

SEQ ID NO: 2783 - protein, 554 aa, Rattus norvegicus
  ref <308>: DATABASE ACCESSION NUMBER: SWISS-Prot / P36407
  ref <309>: DATABASE ENTRY DATE: 2001-10-16
RGTAVVKVLECGVCEDVFSLQGDKVPRLLLCGHTVCHDCLSRLPLHGRAIRCPFDRQVTDLGDSGVWGLKKNFALLELLERLQNGHIGQYGAAEEALGISGESIIRCDEDEAHVASVYCTVCATHLCSECSQVTHSTKTLAKHRRVPLADKPHEKTMCCQHQVHAIEFVCLEEACQTSPLMCCVCKEYGKHQGHKHSVLEPEANQIRASILDMAHCIRTFTEEISDYSRKLVGIVQHIEGGEQIVEDGIGMAHTEHVPGTAENARSCVRAYFSDLHETLCRQEEMALSVVDAHVREKLIWLRQQQEDMTILLSQVSTACLHCEKTLQQDDCRVVLAKQEITRLLETLQKQQQQFTEVADHIQLDASIPVTFTKDNRVYIGPKMEIRVVTLGLDGAGKTTILFKLKQDEFMQPIPTIGFNVETVEYKNLKFTIWDVGEKHKLRPLWKHYYLNTQAVVFVVDSSHRDRISEAHSELAKLLTEKELRDALLLIFANKQDVAGALSVEEITELLSLHKLCCGRSWYIQGCDARSGMGLYEGLDWLSRQLVAAGVLDVA

SEQ ID NO: 2784 - DNA, 1822 bp, Homo sapiens
  ref <308>: DATABASE ACCESSION NUMBER: EMBL / AF230399
  ref <309>: DATABASE ENTRY DATE: 2001-01-18
ctgtggcgcttcccctgcgaggatggctaccctggttgtaaacaagctcggagcgggagtagacagtggccggcagggcagccgggggacagctgtagtgaaggtgctagagtgtggagtttgtgaagatgtcttttctttgcaaggagacaaagttccccgtcttttgctttgtggccataccgtctgtcatgactgtctcactcgcctacctcttcatggaagagcaatccgttgcccatttgatcgacaagtaacagacctaggtgattcaggtgtctggggattgaaaaaaaattttgctttattggagcttttggaacgactgcagaatgggcctattggtcagtatggagctgcagaagaatccattgggatatctggagagagcatcattcgttgtgatgaagatgaagctcaccttgcctctgtatattgcactgtgtgtgcaactcatttgtgctctgagtgttctcaagttactcattctacaaagacattagcaaagcacaggcgagttcctctagctgataaacctcatgagaaaactatgtgctctcagcaccaggtgcatgccattgagtttgtttgcttggaagaaggttgtcaaactagcccactcatgtgctgtgtctgcaaagaatatggaaaacaccagggtcacaagcattcagtattggaaccagaagctaatcagatccgagcatcaattttagatatggctcactgcatacggaccttcacagaggaaatctcagattattccagaaaattagttggaattgtgcagcacattgaaggaggagaacaaatcgtggaagatggaattggaatggctcacacagaacatgtaccagggactgcagagaatgcccggtcatgtattcgagcttatttttatgatctacatgaaactctgtgtcgtcaagaagaaatggctctaagtgttgttgatgctcatgttcgtgaaaaattgatttggctcaggcagcaacaagaagatatgactattttgttgtcagaggtttctgcagcctgcctccactgtgaaaagactttgcagcaggatgattgtagagttgtcttggcaaaacaggaaattacaaggttactggaaacattgcagaaacagcagcagcagtttacagaagttgcagatcacattcagttggatgccagcatccctgtcacttttacaaaggataatcgagttcacattggaccaaaaatggaaattcgggtcgttacgttaggattggatggtgctggaaaaactactatcttgtttaagttaaaacaggatgaattcatgcagcccattccaacaattggttttaacgtggaaactgtagaatataaaaatctaaaattcactatttgggatgtaggtggaaaacacaaattaagaccattgtggaaacattattacctcaatactcaagctgttgtgtttgttgtagatagcagtcatagagacagaattagtgaagcacacagcgaacttgcaaagttgttaacggaaaaagaactccgagatgctctgctcctgatttttgctaacaaacaggatgttgctggagcactgtcagtagaagaaatcactgaactactcagtctccataaattatgctgtggccgtagctgtttttcagataatatgtgaccaatatactgggaaagaggtagtcacagagaaagggtaaaaggtcatgctgttacaggtgtagtttgtgtgcataaataatacttccgaattaaattatttaatatttgactgatttcaataactgtgaaaataaaaaggtgttgtattgcttgtgag

SEQ ID NO: 2785 - protein, 574 aa, Homo sapiens
  ref <308>: DATABASE ACCESSION NUMBER: SWISS-Prot / P36406
  ref <309>: DATABASE ENTRY DATE: 2002-06-15
MATLVVNKLGAGVDSGRQGSRGTAVVKVLECGVCEDVFSLQGDKVPRLLLCGHTVCHDCLTRLPLHGRAIRCPFDRQVTDLGDSGVWGLKKNFALLELLERLQNGPIGQYGAAEESIGISGESIIRCDEDEAHLASVYCTVCATHLCSECSQVTHSTKTLAKHRRVPLADKPHEKTMCSQHQVHAIEFVCLEEGCQTSPLMCCVCKEYGKHQGHKHSVLEPEANQIRASILDMAHCIRTFTEEISDYSRKLVGIVQHIEGGEQIVEDGIGMAHTEHVPGTAENARSCIRAYFYDLHETLCRQEEMALSVVDAHVREKLIWLRQQQEDMTILLSEVSAACLHCEKTLQQDDCRVVLAKQEITRLLETLQKQQQQFTEVADHIQLDASIPVTFTKDNRVHIGPKMEIRVVTLGLDGAGKTTILFKLKQDEFMQPIPTIGFNVETVEYKNLKFTIWDVGGKHKLRPLWKHYYLNTQAVVFVVDSSHRDRISEAHSELAKLLTEKELRDALLLIFANKQDVAGALSVEEITELLSLHKLCCGRSWYIQGCDARSGMGLYEGLDWLSRQLVAAGVLDVA

SEQ ID NO: 2786 - DNA, 1912 bp, Rattus norvegicus; identical to SEQ ID NO: 2782
  ref <308>: DATABASE ACCESSION NUMBER: EMBL / L04760
  ref <309>: DATABASE ENTRY DATE: 2002-02-07

SEQ ID NO: 2787 - protein, 554 aa, Rattus norvegicus; identical to SEQ ID NO: 2783
  ref <308>: DATABASE ACCESSION NUMBER: SWISS-Prot / P36407
  ref <309>: DATABASE ENTRY DATE: 2001-10-16

SEQ ID NO: 2788 - DNA, 1822 bp, Homo sapiens; identical to SEQ ID NO: 2784
  ref <308>: DATABASE ACCESSION NUMBER: EMBL / AF230399
  ref <309>: DATABASE ENTRY DATE: 2001-01-18

SEQ ID NO: 2789 - protein, 574 aa, Homo sapiens; identical to SEQ ID NO: 2785
  ref <308>: DATABASE ACCESSION NUMBER: SWISS-Prot / P36406
  ref <309>: DATABASE ENTRY DATE: 2002-06-15

SEQ ID NO: 2790 - DNA, 3844 bp, Rattus norvegicus
  ref <308>: DATABASE ACCESSION NUMBER: EMBL / L05435
  ref <309>: DATABASE ENTRY DATE: 2000-03-04
cctcagccctgtggctggaccccctccctcacccggggactccctgacccggggaaccaagctcaggtctccagagcctcccagaagaaaaataggcagccctccctgaaatatcttggctcctcagtttatcctttccaacctggctcccccttcccagttcccctccctactccctgtctccctccccaactcaccctactgaactgggtgcagagcaaagcccttttcgcccttttccccatctggacttctctggccagttcctcttagtccgatcccaaagacactggaacacatttctaaagggtcttcttgatccctccaattcattgagcaaagggctgaaaaagaagcagagagtaaggtagagccagtgactcgcccccaagccccatcatggaagaaggctttcgagaccgagcagcgttcatccgtggggccaaagacattgccaaggaagttaagaagcacgcggccaagaaggtggtgaagggtctcgacagagtccaggatgaatattcccgaaggtcctactcccgctttgaggaggaggaggatgatgatgacttccctgcccctgctgacggctattaccgcggagaaggggcccaggatgaggaggaaggtggcgcttccagtgatgccactgagggccacgatgaggatgatgagatctacgagggagaatatcagggcatcccccgggcagagtctgggggcaaaggcgaacggatggcagatggggcacccctggctggagtgagagggggcttaagtgatggggagggtccccctgggggtcgcggggaggcgcagcggcgtaaagatcgggaagaattggctcagcagtatgagaccatcctccgggagtgcggccatggtcgcttccagtggacactctacttcgtgctgggtctggcgctgatggccgatggtgtagaggtctttgtggtgggctttgtgctgcccagtgctgagaaagatatgtgcctgtcggactccaacaaaggcatgctaggcctcattgtgtacctgggcatgatggtgggggccttcctctggggaggcctggctgatcggctgggtcggagacagtgtctgctcatctcgctctcagtcaacagcgtcttcgctttcttctcatccttcgtccagggttatggcaccttccttttctgccgcctcctttctggggttgggattggtggttccatccccattgtcttctcctatttttcggagtttctggcccaggagaaacgtggggagcatttgagctggctctgtatgttctggatgattggtggcgtgtatgcagctgcaatggcctgggccatcatcccccactatgggtggagtttccagatgggctctgcttaccagttccacagctggagggtctttgtcctcgtctttgcctttccctctgtgtttgccatcggggctctgactacgcagccggagagtccccgcttcttcttagagaatgggaagcacgatgaggcctggatggtgctgaagcaggttcatgacaccaacatgcgagccaagggccatcctgagcgagtcttctcagtaacccacattaaaacgattcatcaggaggatgaattgattgagatccagtcagacacaggaacctggtaccagcgctggggagtgcgggctttgagcctggggggtcaggtttgggggaacttcctctcctgcttcagtccagagtaccggcgcatcactctgatgatgatgggggtatggttcaccatgtccttcagctactacggtttgactgtctggtttcccgacatgatccgccatctccaggctgtggactatgcagcccgaaccaaagtgttcccaggggagcgcgtggagcacgtgacatttaacttcacactggagaatcagatccaccgagggggacagtacttcaatgacaagttcatcgggctgcgtctgaagtcagtgtcctttgaggattccctgtttgaggaatgttactttgaagatgtcacatccagcaacacattcttccgcaactgcacattcatcaacaccgtgttctacaacacggacctgtttgagtacaagttcgtgaacagccgcctggtgaacagcacattcctgcacaataaggaaggttgcccactagatgtgacagggacgggcgaaggtgcctacatggtgtactttgtcagcttcttggggacactggctgtgctccctggaaatattgtgtctgctctgctcatggacaagattggcaggctcagaatgcttgctggttccagtgtgttgtcctgtgtttcctgcttcttcctgtcttttgggaacagtgagtcagccatgatcgctctgctctgcctttttgggggagtcagtattgcatcctggaacgcgctggacgtgctgactgttgaactctacccttccgacaagaggacgacggccttcggcttcctgaatgccctgtgtaagctggcagctgtactgggcatcagcatcttcacgtcctttgtgggaatcaccaaggccgctcccatcctcttcgcctcagctgcgcttgcccttggtagctctctggctctgaagctgcctgagacccggggacaggtgctgcagtgagggatgggggagtgtctcaggggctttagggatggcaggcacactgtgaccaataatttcttttatccctaccctgccctgctgtcctggtcctactccgtgtttggtgtcttagctgtgtgcctgtgtgcatgtgtgtgaccctgacgggcaggggctacggggagggtccctttgtcccatgtttgggaggagggactccccacctgctgccaccctcaactttgcacaaggagaaggctgagctgcatccttctctccctcagtgttagcaggggtggggacgactgtttctctgctccaggtgttccagaatttctgcctttcccatcattccctccgcctaggccctggtgaaccacaggtatggagttatagtgggggctgaggcttggaccaaaagaacttcttgagtgggagcctcccaaggatgctggggagtagcaataaaccttagcctccgttttcacctcaattcaggctacaagtgtgaagcctggattttatggaattagttttctgattcttatttatatgtaagttctgaggcagcttagctggactgtgtgtggatgtatacatacactcatatgtgtgtgtgtgtgcgccgcgtgcgtgtgcgtgtgtgtatgtgtgccatggggtaggggtaccactatactgttcaattataagccaagagtagtagtttcagtgagcacacacacaacactgtttttctatcgtaactcccagaatcttgtacctgtgttggggctgcaggcagaagtccttggtcaggctggggtgagccctgcaatcttgggggacctgagggcacctgacaaggactttctccttcctctagagaggttctacccactagccacagccctcccatctgacctgtccacacaggcagtgtatcagaggaaagaaagggaaaataaccaggcacacatggtcaaaccagcaggtctgaaagcacaagaagctggggcaggggcaggaagcaggggtccatcccctaacccttctcaaaaaggctgggtcgtgagggacccctaatgcagggacctgaagcctcagtttccccatcttgcccttccacagaacagcctctgtaggtagagctgccccccgtcctaccctactcttgtggctgctttctttggtactcttcccactcccaccgtagctgtgacgtgttgtagtttttagctgtttgtaaaatgtt

SEQ ID NO: 2791 - protein, 742 aa, Rattus norvegicus
  ref <308>: DATABASE ACCESSION NUMBER: SWISS-Prot / Q02563
  ref <309>: DATABASE ENTRY DATE: 2000-05-30
MEEGFRDRAAFIRGAKDIAKEVKKHAAKKVVKGLDRVQDEYSRRSYSRFEEEEDDDDFPAPADGYYRGEGAQDEEEGGASSDATEGHDEDDEIYEGEYQGIPRAESGGKGERMADGAPLAGVRGGLSDGEGPPGGRGEAQRRKDREELAQQYETILRECGHGRFQWTLYFVLGLALMADGVEVFVVGFVLPSAEKDMCLSDSNKGMLGLIVYLGMMVGAFLWGGLADRLGRRQCLLISLSVNSVFAFFSSFVQGYGTFLFCRLLSGVGIGGSIPIVFSYFSEFLAQEKRGEHLSWLCMFWMIGGVYAAAMAWAIIPHYGWSFQMGSAYQFHSWRVFVLVFAFPSVFAIGALTTQPESPRFFLENGKHDEAWMVLKQVHDTNMRAKGHPERVFSVTHIKTIHQEDELIEIQSDTGTWYQRWGVRALSLGGQVWGNFLSCFSPEYRRITLMMMGVWFTMSFSYYGLTVWFPDMIRHLQAVDYAARTKVFPGERVEHVTFNFTLENQIHRGGQYFNDKFIGLRLKSVSFEDSLFEECYFEDVTSSNTFFRNCTFINTVFYNTDLFEYKFVNSRLVNSTFLHNKEGCPLDVTGTGEGAYMVYFVSFLGTLAVLPGNIVSALLMDKIGRLRMLAGSSVLSCVSCFFLSFGNSESAMIALLCLFGGVSIASWNALDVLTVELYPSDKRTTAFGFLNALCKLAAVLGISIFTSFVGITKAAPILFASAALALGSSLALKLPETRGQVLQ

SEQ ID NO: 2792 - DNA, 3190 bp, Homo sapiens
  ref <308>: DATABASE ACCESSION NUMBER: EMBL / BC000776
  ref <309>: DATABASE ENTRY DATE: 2001-06-08
ggcacgagggcacaacgacggaaagaacgagaagaactggcccaacagtatgaagccatcctacgggagtgtggccacggccgcttccagtggacactgtattttgtgcttggtctggcgctgatggctgacggtgtggaggtctttgtggtgggcttcgtgctgcccagcgctgagaaagacatgtgcctgtccgactccaacaaaggcatgctaggcctcatcgtctacctgggcatgatggtgggagccttcctctggggaggtctggctgaccggctgggtcggaggcagtgtctgctcatctcgctctcagtcaacagcgtcttcgccttcttctcatcttttgtccagggttacggcactttcctcttctgccgcctactttctggggttgggattggagggtccatccccattgtcttctcctatttctccgagtttctggcccaggagaaacgaggggagcatttgagctggctctgcatgttttggatgattggtggcgtgtacgcagctgctatggcctgggccatcatcccccactatgggtggagttttcagatgggttctgcctaccagttccatagctggagggtcttcgtcctcgtctgcgcctttccttctgtgtttgccattggggctctgaccacgcagcctgagagcccccgtttcttcctagagaatggaaagcatgatgaggcctggatggtgctgaagcaggtccatgataccaacatgcgagccaaaggacatcctgagcgagtgttctcagtaacccacattaagacgattcatcaggaggatgaattgattgagatccagtcggacacagggacctggtaccagcgctggggggtccgggccttgagcctaggggggcaggtttgggggaattttctctcctgttttggtcccgaatatcggcgcatcactctgatgatgatgggtgtgtggttcaccatgtcattcagctactatggcctgaccgtctggtttcctgacatgatccgccatctccaggcagtggactacgcatcccgcaccaaagtgttccccggggagcgcgtagagcatgtaacttttaacttcacgttggagaatcagatccaccgaggcgggcagtacttcaatgacaagttcattgggctgcggctcaagtcagtgtcctttgaggattccctgtttgaagagtgttattttgaggatgtcacatccagcaacacgtttttccgcaactgcacattcatcaacactgtgttctataacactgacctgttcgagtacaagtttgtgaacagccgtctgataaacagtacattcctgcacaacaaggagggctgcccgctagacgtgacagggacgggcgaaggtgcctacatggtatactttgtgagcttcctggggacactggcagtgcttcctgggaatatcgtgtctgccctgctcatggacaagatcggcaggctcagaatgcttgctggctccagcgtgatgtcctgtgtctcctgcttcttcctgtcttttgggaacagtgagtcggccatgatcgctctgctctgcctttttggcggggtcagcattgcatcctggaatgcgctggacgtgttgactgttgaactctacccctcagacaagaggaccacagcttttggcttcctgaatgccctgtgtaagctggcagctgtgctggggatcagcattttcacatccttcgtgggaatcaccaaggctgcacccatcctctttgcctcagctgcccttgcccttggcagctctctggccctgaagctgcctgagacccgggggcaggtgctgcagtgaaggggtctctagggctttgggattggcaggcacactgtgagaccaacaactccttccttcccctccctgccctgccatcctgacctccagagccctcactccccactccccgtgtttggtgtcttagctgtgtgtgcgtgtgcgtgtgcatgtgtgtaaaccccgtgggcagggactacagggaaggctccttcatcccagttttgagatgaagctgtactccccatttcccactgcccttgactttgcacaagagaaggctgagccccatccttctccccctgttagagaggggcccttgcttccctgttccaggggttccagaataggcttcctgccttccccatcattccctctgcctaggccctggtgaaaccacaggtatgcaattatgctaggggctggggctctggtgtagaccatggaccaaaagaacttcttagagtctgaagagtgggcctcgggtgccctctcacatctcctgttggatgctgggggagaagcaataaacctcagccctctggcctccactttcctctcaatttgggctgcaaatatgaagcctgaattttatgaaattagctttctgattcttatttattaatagattaagttctgaggcagctccgcaggactgtgtgtgaatgtgtatgtatacttacatatgtgtgtgcatgtgccatggggcggggggtatcactatactgtcctcaaatataagccaagggtaatttcagcggatgcacacacaaccctgcctcccacagttcctcccctaatctggtttctgtgttgagcctgggatggaggagccctaggccagcctgggataagagtcccacagtctagggagatctgagggcatccgacaaggcccatctccttccctcctcaagaagcagaggcctcctctggagtgagaggctccacccactacagcacaggcgggaatagcacagctgccctcccatgctccctacctgtcccctcacagggaggggagcaggggagggaaagaaaccaggcatctggtcaaaccagcagatcaaaaagcacaaagagctggggcagaggcaggaagcaggggccctcctggcagctcctctgagtggggagaggttgggcagtgagtgagggacccctaatgcagggactagaagcctcagtttccccattttacccttccacacaatagcctctgtaggttaggctgccccatcccaccctactctgtgtggctgctttctttggtgccctcccctcaccccactgtagctgtgacgtgttgtagtttttagatgtttgtaaaatgtttaaaaaaatgttaaaaggaaaaaagtgaaaataacaaaaaaaaaaaaaaaaa

SEQ ID NO: 2793 - protein, 742 aa, Homo sapiens
  ref <308>: DATABASE ACCESSION NUMBER: Refseq / NP_055664
  ref <309>: DATABASE ENTRY DATE: 2002-11-05
MEEGFRDRAAFIRGAKDIAKEVKKHAAKKVVKGLDRVQDEYSRRSYSRFEEEDDDDDFPAPSDGYYRGEGTQDEEEGGASSDATEGHDEDDEIYEGEYQGIPRAESGGKGERMADGAPLAGVRGGLSDGEGPPGGRGEAQRRKEREELAQQYEAILRECGHGRFQWTLYFVLGLALMADGVEVFVVGFVLPSAEKDMCLSDSNKGMLGLIVYLGMMVGAFLWGGLADRLGRRQCLLISLSVNSVFAFFSSFVQGYGTFLFCRLLSGVGIGGSIPIVFSYFSEFLAQEKRGEHLSWLCMFWMIGGVYAAAMAWAIIPHYGWSFQMGSAYQFHSWRVFVLVCAFPSVFAIGALTTQPESPRFFLENGKHDEAWMVLKQVHDTNMRAKGHPERVFSVTHIKTIHQEDELIEIQSDTGTWYQRWGVRALSLGGQVWGNFLSCFGPEYRRITLMMMGVWFTMSFSYYGLTVWFPDMIRHLQAVDYASRTKVFPGERVEHVTFNFTLENQIHRGGQYFNDKFIGLRLKSVSFEDSLFEECYFEDVTSSNTFFRNCTFINTVFYNTDLFEYKFVNSRLINSTFLHNKEGCPLDVTGTGEGAYMVYFVSFLGTLAVLPGNIVSALLMDKIGRLRMLAGSSVMSCVSCFFLSFGNSESAMIALLCLFGGVSIASWNALDVLTVELYPSDKRTTAFGFLNALCKLAAVLGISIFTSFVGITKAAPILFASAALALGSSLALKLPETRGQVLQ

SEQ ID NO: 2794 - DNA, 1550 bp, Rattus norvegicus
  ref <308>: DATABASE ACCESSION NUMBER: EMBL / L05489
  ref <309>: DATABASE ENTRY DATE: 2002-02-12
gggcccccccgtctccgccaggctcgggaccatgaagctgctgccgtcggtggtgctgaagctctttctggccgcagtgttgtccgcgttggtgaccggtgagagtctggagcggcttcggagaggtctggcggcagcaaccagcaaccctgaccctcccactggaaccacaaaccagctgctacccacgggagctgatcgcgctcaggaggtccaggacttggaagggaccgatctggaccttttcaaagttgctttctcctccaagccacaagccctggccaccccaggaaaagaaaagaacgggaaaaagaagaggaaaggcaaggggttaggaaagaagagagatccatgccttaagaaatacaaggactactgcatccacggagagtgcagatacctgaaggagctccgtattccctcgtgccactgcctccctggttaccatggacagaggtgtcatgggctgaccctaccggtagagaaccccctgtacacatatgaccacactaccgtcttggctgtggtggctgtagtactgtcatctgtctgtcttcttgtcatcgtgggacttctcatgttcaggtaccataggcgaggaggttatgacttggaaagtgaggagaaagtgaagttgggcatggctagctcccactgaggaggatctgagctcaaggagccttcagaggatggctacttctgagatggcggttccttacaagttctacagagggaaaatacttcaccagcagccatgaagacttcttcattcattcccagttgctaccctgactgggcctcctgtaattgctctgcaaaaatatcagagcctctaagtgccaaacagactatgccccgctgggatctggatcagaagaaagcaggagcaagtgagcccttcaggccttcctgatcctccaccactgaacccactggtttgtttaaacacttagcttctggattaaagtgtcagctagtttccatatgctccaggatttttggctgaaaaaaaaaaaagaagagaggacggatgagtggtttatggactggaagagatcaacagagttgagaagctaagtgttcaagtagccacaggggatctgctgtttggaccctccagcacgctggatttgatgagctaactgtgaaatatctcaagcccgagaactcttgagttttgggacttctacccagagggaaaaataacaagtattttgttgttgttgttgtttgtttgtttttaaaatgcctcttaaattatatatttattttattctatgtatgttaatatatttagtttttaacaatctaacaataatatttcaagtgcctagactgttactttgccaatgtcctggcccgcctctcttgcagctcttccacctggctcaatgccacactcccatctgctctgtaacccatctgtagtaatttattgtctgtctacatttcagaagatgcccctgtagcagagtatcccagggtgggttgtgtatggtcggagtgcaaggatggatttgggcagagccactctgtgagttggactgcag

SEQ ID NO: 2795 - protein, 208 aa, Rattus norvegicus
  ref <308>: DATABASE ACCESSION NUMBER: SWISS-Prot / Q06175
  ref <309>: DATABASE ENTRY DATE: 2001-10-16
MKLLPSVVLKLFLAAVLSALVTGESLERLRRGLAAATSNPDPPTGTTNQLLPTGADRAQEVQDLEGTDLDLFKVAFSSKPQALATPGKEKNGKKKRKGKGLGKKRDPCLKKYKDYCIHGECRYLKELRIPSCHCLPGYHGQRCHGLTLPVENPLYTYDHTTVLAVVAVVLSSVCLLVIVGLLMFRYHRRGGYDLESEEKVKLGMASSH

SEQ ID NO: 2796 - DNA, 2360 bp, Homo sapiens
  ref <308>: DATABASE ACCESSION NUMBER: EMBL / M60278
  ref <309>: DATABASE ENTRY DATE: 1999-07-02
gctacgcgggccacgctgctggctggcctgacctaggcgcgcggggtcgggcggccgcgcgggcgggctgagtgagcaagacaagacactcaagaagagcgagctgcgcctgggtcccggccaggcttgcacgcagaggcgggcggcagacggtgcccggcggaatctcctgagctccgccgcccagctctggtgccagcgcccagtggccgccgcttcgaaagtgactggtgcctcgccgcctcctctcggtgcgggaccatgaagctgctgccgtcggtggtgctgaagctctttctggctgcagttctctcggcactggtgactggcgagagcctggagcggcttcggagagggctagctgctggaaccagcaacccggaccctcccactgtatccacggaccagctgctacccctaggaggcggccgggaccggaaagtccgtgacttgcaagaggcagatctggaccttttgagagtcactttatcctccaagccacaagcactggccacaccaaacaaggaggagcacgggaaaagaaagaagaaaggcaaggggctagggaagaagagggacccatgtcttcggaaatacaaggacttctgcatccatggagaatgcaaatatgtgaaggagctccgggctccctcctgcatctgccacccgggttaccatggagagaggtgtcatgggctgagcctcccagtggaaaatcgcttatatacctatgaccacacaaccatcctggccgtggtggctgtggtgctgtcatctgtctgtctgctggtcatcgtggggcttctcatgtttaggtaccataggagaggaggttatgatgtggaaaatgaagagaaagtgaagttgggcatgactaattcccactgagagagacttgtgctcaaggaatcggctggggactgctacctctgagaagacacaaggtgatttcagactgcagaggggaaagacttccatctagtcacaaagactccttcgtccccagttgccgtctaggattgggcctcccataattgctttgccaaaataccagagccttcaagtgccaaacagagtatgtccgatggtatctgggtaagaagaaagcaaaagcaagggaccttcatgcccttctgattcccctccaccaaaccccacttcccctcataagtttgtttaaacacttatcttctggattagaatgccggttaaattccatatgctccaggatctttgactgaaaaaaaaaaagaagaagaagaaggagagcaagaaggaaagatttgtgaactggaagaaagcaacaaagattgagaagccatgtactcaagtaccaccaagggatctgccattgggaccctccagtgctggatttgatgagttaactgtgaaataccacaagcctgagaactgaattttgggacttctacccagatggaaaaataacaactatttttgttgttgttgtttgtaaatgcctcttaaattatatatttattttattctatgtatgttaatttatttagtttttaacaatctaacaataatatttcaagtgcctagactgttactttggcaatttcctggccctccactcctcatccccacaatctggcttagtgccacccacctttgccacaaagctaggatggttctgtgacccatctgtagtaatttattgtctgtctacatttctgcagatcttccgtggtcagagtgccactgcgggagctctgtatggtcaggatgtaggggttaacttggtcagagccactctatgagttggacttcagtcttgcctaggcgattttgtctaccatttgtgttttgaaagcccaaggtgctgatgtcaaagtgtaacagatatcagtgtctccccgtgtcctctccctgccaagtctcagaagaggttgggcttccatgcctgtagctttcctggtccctcacccccatggccccaggccacagcgtgggaactcactttcccttgtgtcaagacatttctctaactcctgccattcttctggtgctactccatgcaggggtcagtgcagcagaggacagtctggagaaggtattagcaaagcaaaaggctgagaaggaacagggaacattggagctgactgttcttggtaactgattacctgccaattgctaccgagaaggttggaggtggggaaggctttgtataatcccacccacctcaccaaaacgatgaaggtatgctgtcatggtcctttctggaagtttctggtgccatttctgaactgttacaacttgtatttccaaacctggttcatatttatactttgcaatccaaataaagataacccttattccataaaaaaaaaaaaaaaaaa

SEQ ID NO: 2797 - protein, 208 aa, Homo sapiens
  ref <308>: DATABASE ACCESSION NUMBER: SWISS-Prot / Q99075
  ref <309>: DATABASE ENTRY DATE: 2002-06-15
MKLLPSVVLKLFLAAVLSALVTGESLERLRRGLAAGTSNPDPPTVSTDQLLPLGGGRDRKVRDLQEADLDLLRVTLSSKPQALATPNKEEHGKRKKKGKGLGKKRDPCLRKYKDFCIHGECKYVKELRAPSCICHPGYHGERCHGLSLPVENRLYTYDHTTILAVVAVVLSSVCLLVIVGLLMFRYHRRGGYDVENEEKVKLGMTNSH

SEQ ID NO: 2798 - DNA, 1550 bp, Rattus norvegicus; identical to SEQ ID NO: 2794
  ref <308>: DATABASE ACCESSION NUMBER: EMBL / L05489
  ref <309>: DATABASE ENTRY DATE: 2002-02-12

SEQ ID NO: 2799 - protein, 208 aa, Rattus norvegicus; identical to SEQ ID NO: 2795
  ref <308>: DATABASE ACCESSION NUMBER: SWISS-Prot / Q06175
  ref <309>: DATABASE ENTRY DATE: 2001-10-16

SEQ ID NO: 2800 - DNA, 2360 bp, Homo sapiens; identical to SEQ ID NO: 2796
  ref <308>: DATABASE ACCESSION NUMBER: EMBL / M60278
  ref <309>: DATABASE ENTRY DATE: 1999-07-02

SEQ ID NO: 2801 - protein, 208 aa, Homo sapiens; identical to SEQ ID NO: 2797
  ref <308>: DATABASE ACCESSION NUMBER: SWISS-Prot / Q99075
  ref <309>: DATABASE ENTRY DATE: 2002-06-15

SEQ ID NO: 2802 - DNA, 258 bp, Rattus norvegicus
  ref <308>: DATABASE ACCESSION NUMBER: EMBL / L05557
  ref <309>: DATABASE ENTRY DATE: 2000-03-04
ccctcccctcccccaaccctcctccaaatcccctcggaagggcccagcacacttctgaccaaagtgtttcccttgcagatccgcgtcgtgaaggcgttccgtagctctctctatgaagggttagaaaaacccgagtctcgaacctccatccataacttcatggctcatcctgaattccggatcgaagattcccagccccacatccccctcatcgatgacaccgacctggaagaagatgccgcgctcaagcagaactcg

SEQ ID NO: 2803 - protein, 1243 aa, Rattus norvegicus; identical to SEQ ID NO: 2500
  ref <308>: DATABASE ACCESSION NUMBER: SWISS-Prot / AAB60703
  ref <309>: DATABASE ENTRY DATE: 2002-06-15

SEQ ID NO: 2804 - DNA, 4398 bp, Homo sapiens; identical to SEQ ID NO: 2603
  ref <308>: DATABASE ACCESSION NUMBER: EMBL / J04027
  ref <309>: DATABASE ENTRY DATE: 2000-03-04

SEQ ID NO: 2805 - protein, 1258 aa, Homo sapiens; identical to SEQ ID NO: 2604
  ref <308>: DATABASE ACCESSION NUMBER: SWISS-Prot / P20020
  ref <309>: DATABASE ENTRY DATE: 2002-06-15

SEQ ID NO: 2806 - DNA, 258 bp, Rattus norvegicus; identical to SEQ ID NO: 2802
  ref <308>: DATABASE ACCESSION NUMBER: EMBL / L05557
  ref <309>: DATABASE ENTRY DATE: 2000-03-04

SEQ ID NO: 2807 - protein, 1243 aa, Rattus norvegicus; identical to SEQ ID NO: 2500
  ref <308>: DATABASE ACCESSION NUMBER: SWISS-Prot / AAB60703
  ref <309>: DATABASE ENTRY DATE: 2002-06-15

SEQ ID NO: 2808 - DNA, 4857 bp, Homo sapiens
gagccaccacccctgaccatgtagatgccagttccagggagcagcatgggccccactgaatggagactcctgggtctacagccctgagcccctccggcccctggacctcgtcccacaccggaggacacctcttggagctcaccaccactgtcaccagcccgcctcggccacccccaccccccgggacccggagtcggccgcctggtgccacagctgaccagtgagggtgtgctgaggacagccacaagcagccatcacccggcagcctcttgtccagcgctgacccttgggcccagcccgagcaaggaccgcagcaaacatgggtgacatgaccaacagcgacttttactccaaaaaccaaagaaatgagtcgagccatgggggcgagttcgggtgcacaatggaggagctccgctccctcatggagctgcggggcactgaggctgtggtcaagatcaaggagacttatggggacaccgaagccatctgccggcgcctcaaaacctcacctgttgaaggtttgccgggcaccgctccagacctggaaaagagaaagcaaatttttgggcaaaactttatacctccaaagaagccaaaaaccttcctgcagctcgtgtgggaggcgctgcaggacgtgacgctcatcatcctggagattgccgccatcatctccctggggctgtccttctaccacccgcccggcgagggcaacgaaggatgtgcgacggcccagggtggggcagaggatgaaggagaggcagaggcaggttggatcgagggggccgccattctcctctcagttatctgtgtggtcctggtcacggccttcaatgactggagcaaagagaaacagttccggggcctgcagagccgcatcgagcaggaacagaaatttaccgtggtccgggctggccaggtggtccagatccctgtggctgagatcgtggttggggacatagcccaggtcaaatatggtgacctcctccctgccgacggcctcttcatccagggcaatgacctcaagattgatgaaagctccctaactggagagtctgaccaggtgcgcaagtccgtggacaaggaccccatgctgctgtcaggaacccacgtgatggagggctcaggacggatgttggtgactgctgtgggtgtgaactctcagactggcatcatctttaccctcctgggggctggtggtgaagaggaagagaagaaagacaaaaaaggtgtgaagaagggggatggccttcagctaccagcagcagacggtgcggcagcttcaaatgctgcagatagtgcgaatgccagcctagtcaatggtaaaatgcaggatggcaatgtggacgccagccagagcaaagccaaacaacaggacggggcagccgccatggagatgcagcccctcaagagtgccgagggcggcgacgctgacgacaggaagaaggccagcatgcacaagaaggagaagtccgtgctgcagggcaagctcaccaagctggctgtgcagatcgggaaggcgggcttggtgatgtcagccatcacggtgatcatcctggtgctctacttcactgtggacaccttcgtggtcaacaagaagccgtggctgcctgagtgcacgcccgtctacgtgcagtactttgtcaagttcttcatcattggcgtgacggtgctggtggtcgccgtgcccgaggggctccctctggccgtcaccatctcgttggcctattcggtgaagaaaatgatgaaggacaacaacctggtacgccacctggatgcctgtgagaccatgggcaatgccacagccatctgctcagacaagacaggcacgctgaccaccaatcgcatgacagtggtacaggcctatgtcggcgacgtccactataaagagatccccgaccccagctccatcaacaccaagaccatggagctgctgatcaatgccatcgccatcaacagcgcctacaccaccaagattctgcccccagagaaggagggcgccctgcctcggcaggtgggcaacaagacggagtgcggcctgctgggcttcgtgctggacctgaagcaggactacgagcccgtgcgcagccagatgccagaggagaagttgtacaaagtgtacaccttcaactccgtgcgcaagtccatgagcactgtcatcaagctgcccgacgagagcttccgcatgtacagcaagggggcttctgagatcgtgctcaagaagtgctgcaaaatcctcaatggggcgggagagcctcgtgtcttccggccccgcgaccgggacgagatggtaaagaaggtgattgagcccatggcttgcgatgggctccgcactatctgcgtggcctaccgcgacttccccagcagcccggagccggactgggacaatgagaatgacatcctcaacgaactcacctgcatctgcgtggtgggcatcgaggacccggtgcggccagaggtcccagaagccatccgcaagtgccagcgggcaggcatcacggtccgcatggtcactggcgacaatatcaacacggctcgggccatcgccatcaagtgtggcatcatccatcctggggaggactttctgtgcctcgagggcaaggagttcaacaggaggatccgcaacgagaagggggagattgagcaggagcgaattgacaagatctggccaaagctgcgggtgctggctcgctcctccccaacggacaagcataccctggttaaaggcatcatcgacagcacacacactgagcagcggcaggtggtggccgtgacgggggacgggaccaacgacgggcctgcactcaagaaggccgacgtgggcttcgccatgggcatcgcaggcactgacgtggccaaggaggcctcagacatcatcctgacagacgacaatttcagcagcatcgtcaaggcagtgatgtggggccgcaacgtctatgacagcatctccaaattcttgcagttccagctcaccgtcaacgtggtggccgtgattgtggccttcacaggcgcctgcatcacgcaggactcccctctgaaggccgtgcagatgctctgggtgaacctcatcatggacacgtttgcctcgctggcactggccactgagccgcccacggagaccctgctgctgaggaagccgtacggccgcaacaagccgctcatctccaggaccatgatgaagaacatcctgggccatgctgtctaccagcttgccctcatcttcaccctgctctttgttggcgagaagatgttccagatcgacagcgggaggaacgcgcccctgcattcgccaccctcagaacattacaccatcatcttcaacaccttcgtcatgatgcagctcttcaacgagatcaacgcccgcaagatccacggcgagcgcaatgtctttgacggcatcttccggaaccccatcttctgcaccatcgtgctgggcacctttgccatccagatagtgatcgtgcagtttggagggaagccattcagctgctctccactgcagctggaccagtggatgtggtgcatattcattgggttaggagagctcgtttggggccaggtcatcgccaccatcccgaccagcagactcaagttcctcaaggaggcaggcaggctcacacagaaggaggagatcccggaggaggagctcaacgaggacgtggaggagatcgaccacgcagagcgggagctgcggcggggccagatcctgtggttccgaggcctgaatcggatccagacacagatccgcgtcgtgaaggcgttccgtagctctctctatgaaggtttagaaaagcctgaatctcgaacctccatccataacttcatggctcatcctgaattccggatcgaagattcccagccccacatccccctcattgatgacaccgacctggaagaagatgccgcgctcaagcagaactcgagcccgccgtcatccctcaacaagaacaacagcgccatcgacagtgggatcaacctgacgaccgacacaagcaaatcagctacctcttcaagtccagggagccccatccacagcctggagacgtcgctttagctgaggaccctctcgcctgcccgcccgccctcatggaccccgctgccacccgctttccgggcacccatccatccaggcacccaactcacccaagcagcaacgagcaacaatcggaaaccaaatactggagagaaaaccaacgtttccacccacagaccctttctctggctgcgatgctgtttgaactctttttcacttcaaggcaaggggcgggatctccactgggggcttacgggagtgagcggttttcccaaaacaagcccttcctggctcccacccagacatggaccagccatgcacccgcccagccaccacgtcccccgcatgaatgtactgtacactttcaatcctccccttgtttggtttttgggggttggggaggggtttttgtttgtttgtttgttttcttaggcgggaactgcaaacagactcttttctgagactatttatccaatccactggtctgtgagtttttgaaatgcttgcacagcatggtctcagttgtatagattaatttaataactttttgaaattgcagagcttaactcgcctagtagatttgcaccaatggaaccgaagaacttcatagacactcacaaggttatatccatttctttgtatctatatcaacgtatacttttccgagactgtatacgtccatatagataggtagatatatatatatatatataaatatatatacatggatatataaagtttctttgccggcatgttgccttgtttccgcttaaattgctctattttaacttatttatgtcctaaaagaagaatgtaatttgtttaca

SEQ ID NO: 2809 - protein, 1243 aa, Homo sapiens [sequence omitted]

SEQ ID NO: 2810 - DNA, 2146 bp, Rattus norvegicus
  ref <308>: DATABASE ACCESSION NUMBER: EMBL / L07073
  ref <309>: DATABASE ENTRY DATE: 2000-03-04
cggacccggcaccgaatcactgactcgcccaggtgtcgggaaaatgatccacagtctatttctcatcaactgttctggcgacatatttctagaaaaacactggaagagcgttgtaagccaatctgtgtgtgactatttctttgaagctcaggagaaagctgctgatgttgaaaatgtaccaactgtcatttcaacacctcaccactacctcattagtatctaccgggataagctcttctttgtgtctgtgatacagactgaagtgccacctctctttgtaattgagtttctgcatcgagttgctgacacttttcaggactactttggtgagtgttcagaggctgcaattaaggataatgtggtcatagtgtatgagctcttggaagaaatgttagacaatggattcccactggctaccgaatctaacattctgaaagaactgattaaaccaccaacaattctacgttctgtcgtcaattctattacaggcagtagtaatgttggggacacgctccccactgggcagctgtccaacatcccatggcgtcgagcaggtgtaaagtacaccaacaatgaagcctactttgatgtagtcgaagagatagatgcgattatagataaatcaggatctacagtctttgcagaaattcaaggtgtcattgatgcttgcattaagctgtctggaatgcctgatctctctctctctttcatgaacccaaggcttctagatgatgtcagcttccacccatgcatccggttcaaacgctgggaatctgagagagttttgtcattcattcctcccgatggaaatttccgactcatatcataccgcgtcagctcacaaaatctagtggcaatcccagtgtatgtgaaacataatatcagctttaaggaaaacagctcttgtggtagatttgatataacaattggaccaaaacagaatatgggaaaaacgattgaaggaatcacagtgactgttcacatgccaaaagttgtgctgaatatgaacctgacaccaacacaaggcagctatacattcgatccagtcaccaaggtactagcatgggatgtggggaaaattactccacaaaagctcccaagtcttaaaggactggtaaatttacagtcaggagcacccaagccagaagagaacccaaacctcaacatacagttcaagatccagcagcttgctatttcaggcttaaaagtgaaccgcttggacatgtatggtgagaagtataagccatttaaaggagtcaagtatatcacaaaggccggaaagttccaagtgaggacatgagaagaggccagacttgctcaagatcagtttgttttgcaagtgtcattgcggtttcttactattaggtaccaagtgggtgggaataatatagagcatctgggtcaagctaccctgctaacaaagttgcttagtaatgatgtaggctcctcaggagctttaagctaaggaaagttttctaaagacttagcttattttgtatcttttcacttaggaaaaggtttaggtgatttttttccatgggggccaccagctgaatgctgcccatgggtaacagtcaaggcagaaggctacagtgataacctctctcctaaagcaagtgaactggtctcatcttccagcaggaactgtctcagtctatgaggtgtcagctgtagccaagggtcacaccttctgatcttagccatctcaatcagtgtctgtcccaagagaggagattgcccccacccccaagaagtttacagaaaactgcctcttcaagtgtttgccttactcagcttttcacttgtgccattaagcaagcactgtagcaaaagccacttccacatggcccaggcagggagccctgcagctccatgctccattcctcacctggttaaccttgggtattatattttttataaataagatttttatgtaaagctcagattttgatttacaagaccttgctgcagtaaatattccatcaatcttgagccaccagttcagctgttagatagcacagtcaaatcatttgcatcaaaagggcaaatactttattaagataatgaaagggaacactacttctgctgttaggcacaagtgtctgtgcttttaaacaaattcaagtagtaaaagagaaaatcaagc

SEQ ID NO: 2811 - protein, 418 aa, Rattus norvegicus
  ref <308>: DATABASE ACCESSION NUMBER: SWISS-Prot / P53676
  ref <309>: DATABASE ENTRY DATE: 2001-10-16
MIHSLFLINCSGDIFLEKHWKSVVSQSVCDYFFEAQEKAADVENVPTVISTPHHYLISIYRDKLFFVSVIQTEVPPLFVIEFLHRVADTFQDYFGECSEAAIKDNVVIVYELLEEMLDNGFPLATESNILKELIKPPTILRSVVNSITGSSNVGDTLPTGQLSNIPWRRAGVKYTNNEAYFDVVEEIDAIIDKSGSTVFAEIQGVIDACIKLSGMPDLSLSFMNPRLLDDVSFHPCIRFKRWESERVLSFIPPDGNFRLISYRVSSQNLVAIPVYVKHNISFKENSSCGRFDITIGPKQNMGKTIEGITVTVHMPKVVLNMNLTPTQGSYTFDPVTKVLAWDVGKITPQKLPSLKGLVNLQSGAPKPEENPNLNIQFKIQQLAISGLKVNRLDMYGEKYKPFKGVKYITKAGKFQVRT

SEQ ID NO: 2812 - DNA, 1348 bp, Homo sapiens
  ref <308>: DATABASE ACCESSION NUMBER: EMBL / AF092092
  ref <309>: DATABASE ENTRY DATE: 1999-03-23
atgatccacagtctatttctcataaactgttccggtgacatatttctagagaagcactggaagagcgttgtgagccagtctgtctgtgattatttctttgaagctcaagagaaagctgctgatgttgaaaatgtaccacctgtcatttcaacacctcaccactacctcatcagtatctaccgggataagctcttctttgtatctgtcatacagaccgaagtgccacctctctttgtaattgagttcctacatcgagttgctgacacttttcaggactactttggtgagtgttcagaggctgcaattaaggataatgtggtcatagtatatgaactcttagaagaaatgttagacaatggatttccactggctaccgaatctaacattttgaaagaattgattaaaccaccaacaattctacgctctgttgtcaactctattacaggcagtagtaatgttggggacacactccccaccgggcagctgtccaacataccatggcgtcgggcaggggtaaagtacacaaacaatgaagcctattttgatgttgttgaagaaatagacgcaattatagataaatcaggatctacagtctttgcagaaattcagggggtcattgatgcttgcattaaactatctggaatgcctgatctctccctttctttcatgaaccctaggcttctggatgatgtcagctttcacccctgcatccggttcaagcgttgggaatctgaaagagttttgtcatttattcctccagatggaaatttccgactcatatcataccgtgtcagctcacaaaatctagtggcaataccagtgtatgtgaaacatagtatcagctttaaggagaacagttcttgcggcagatttgatataacaattggaccaaagcagaatatggggaaaactattgaaggaattacagtgacagttcacatgccaaaagttgtgctgaacatgaacctgacacccacacaaggcagctatacatttgatccagtcaccaaggtactaacatgggatgtgggaaaaattactccacaaaagctcccaagtcttaaaggactggtaaatttacagtctggagcccccaaaccagaagagaatccgagcctcaacatacagtttaagatccagcagcttgctatttcaggcttaaaagtaaaccgtttggacatgtatggggagaaatataagccatttaaaggagtcaaatacgtcacgaaagctggaaagttccaagtgaggacatgagaagaggccaaaattcctcaggaccagtttgttttccaagtgtcattacgatgtatcactattaggtaccaagtgagtgggaatacatatt

SEQ ID NO: 2813 - protein, 418 aa, Homo sapiens
  ref <308>: DATABASE ACCESSION NUMBER: SWISS-Prot / Q9Y2T2
  ref <309>: DATABASE ENTRY DATE: 2002-06-15
MIHSLFLINCSGDIFLEKHWKSVVSQSVCDYFFEAQEKAADVENVPPVISTPHHYLISIYRDKLFFVSVIQTEVPPLFVIEFLHRVADTFQDYFGECSEAAIKDNVVIVYELLEEMLDNGFPLATESNILKELIKPPTILRSVVNSITGSSNVGDTLPTGQLSNIPWRRAGVKYTNNEAYFDVVEEIDAIIDKSGSTVFAEIQGVIDACIKLSGMPDLSLSFMNPRLLDDVSFHPCIRFKRWESERVLSFIPPDGNFRLISYRVSSQNLVAIPVYVKHSISFKENSSCGRFDITIGPKQNMGKTIEGITVTVHMPKVVLNMNLTPTQGSYTFDPVTKVLTWDVGKITPQKLPSLKGLVNLQSGAPKPEENPSLNIQFKIQQLAISGLKVNRLDMYGEKYKPFKGVKYVTKAGKFQVRT

SEQ ID NO: 2814 - DNA, 3295 bp, Rattus norvegicus
  ref <308>: DATABASE ACCESSION NUMBER: EMBL / L07074
  ref <309>: DATABASE ENTRY DATE: 2000-03-04
ccacacttctcccactggcctcttcttcaccatgattcacagtcttttcttgatcaactctgctggggatattttcctggagaagcactggaaaagcgtggtcagccgctctgtttgcgattactttttcgaggcccaagagagagctacggaggctgaaaatgtgcctcccgtcatccccacacctcaccactaccttctgagcgtttaccggcacaagatcttctttgtggctgtgatccagacggaggtcccgcctctgtttgtcattgaattccttcaccgagtagtggacacatttcaggactatttcggggtctgctctgagccagtgatcaaagacaacgtggtggtggtctacgaggtgttggaagagatgctggacaatgggttccccttggctacggagtcgaacatcctcaaggagctgataaagcctcccaccattctccggacagtagtcaacaccatcacaggaagcaccaatgtgggcgaccagcttccaactgggcagctgtcggtggtgccttggcgacggactggggtgaaatataccaacaacgaggcctatttcgacgtggttgaagagatagacgccatcattgacaaatcaggttccacagtcaccgctgagatccaaggggtgattgatgcctgtgttaaactgaccgggatgccagatctcacgctgtccttcatgaaccccaggttgctggatgatgttagcttccacccctgtgtccgtttcaagcgctgggaatctgagcgcatcctctccttcatccctcctgacggcaacttccgcctgctctcctaccacgtcagtgcacagaacctagttgccattccagtctatgtcaaacacagcatcagcttccgggacagtggctcacttggacgctttgaaatcacagtggggccgaagcagaccatggggaagaccatagagggtgtgactgtaaccagccagatgcccaaaggagtcttgaacatgagcctcactccatcccaggggacacacacgtttgacccggtgacaaagatgctgtcttgggatgtaggaaaaataaacccgcaaaagctgccaagtttgaaggggacaatgggtctccaggtcggagcttctaaacccgatgagaaccctacaattaaccttcagttcaagatccagcagctggccatttctggactcaaagtgaaccgtctggatatgtacggagagaagtacaagccctttaagggcataaaatacatgaccaaagccggcaagttccaagtccgaacctgaagggaaagtcttggtgaaggaacactcacgaacactttttcgtttcttacttgtctaaaagtaaaatgtcagcctgtttcttaggtcagttccctcaggctccatctgccccctttgtcctctgtcttcagtaccacataagtgatggagggacaggaggttcctcagggaaaacgaagccaaacccatcgcagcactgactgagtcctagagtgtgggctggagagtggtggcctgtcgcactgcatttcacctcttaacacggttgccgttgggaaaagaccggcctttgacgtttggtttcaatcacctaaccccaatggaagatgtctatattgatttttttttatgatagaaagatttgaaagagagaaaaaaaaagaatagaaaaaaatgggtgttagtccaagaaagagcagttgagatttgattggtctgggttgtaactcggtgatcaagtgccgacctgggtcctgtgcaagccctggttcattcctggtaccgtccacaatacaagacagatctgctctacgaggggcaagaccaagaagctggtgtgaagagagttgtgaagagagaggtcacagtgaagagttggtgagaacagttatcagaatctccccaggggctaggacgagcagaacgcagtgtttctttctgaccccctcttacgtgtagaaaggatttgcatgtccaggactttcaaagttcaagtccacgcttgaactgaaactgcagtgggatcagcgtcctttggagactaaggtgccacacacagcctgcctctggagattctcactcgctgtttgcgctggcccatcgtcctggtgggaaggttacctgtcagagcagcttacagccttctgctggttatctgactccttggtgggctcgccccccaaaaacagcagtgatctcggtgcaggcagatctgtgaatgatagtggcagagtcgaggtgaactactccatggacagccatgctcggtgaccaccattacattaatgtttgtgaggccggactggcctatgccttgctttttcctgtctgaaggtcccatcagaacccctgagtaggtgtgaacccaccgaggacatgcgcgagtgcacaaatgcttcccactgtctgttccggtctccagacagacagctcccagtccgttcttacaacctaaaaaggtgtcttgagcctctgaatagaataccataggagggcaggcagtgttggccacaagtagctccccattactccccagtttaaacccagcagctgaaggagcagagtatctcaatctgtttcaatgtgtcctttagtcattttactaaacacataaggtgcgggtgtgtgttgtttttaacttagagcagcctgtgctctgtattgtgcctggagggagaagaccggcttgcttcagtctgcagggctccccctgaagtcccgtttctaagtgcttgtgcttgcttgcagggctctcccctgaagtcccgtgtctaagtgcttgtgcttgcttagtttctattgtttgctagtgctctcatgctgtggccaggacttatttttgctgcccagtagagttactctgtggtttccttgtgtggtgaactgcgctgtgtacagtcagatgttccttaccaggatctggactagtgtagccccacaccctgctgcaggggacacttcaggtcactttcacaggctctgggggattccgaggtttcttgggtcataggtactatttgcatcggtccccgtgtgtgtttaggtttgtacgtgtggctcattactcccgagagcacaggatagcttgtttttccaggcagagacagggttggagtacgggctccccaggcccagacaccgtggatacagccaagcctcgccgtccccacctagtggctgtcagcagaggtggcgcaggcctctccatagctgctcgctctgtgtgtggtccatgtgtggaagcagcatttctgttgaagtcttaataaagctttaccagtcttgtgg

SEQ ID NO: 2815 - protein, 418 aa, Rattus norvegicus
  ref <308>: DATABASE ACCESSION NUMBER: SWISS-Prot / P53678
  ref <309>: DATABASE ENTRY DATE: 2001-10-16
MIHSLFLINSAGDIFLEKHWKSVVSRSVCDYFFEAQERATEAENVPPVIPTPHHYLLSVYRHKIFFVAVIQTEVPPLFVIEFLHRVVDTFQDYFGVCSEPVIKDNVVVVYEVLEEMLDNGFPLATESNILKELIKPPTILRTVVNTITGSTNVGDQLPTGQLSVVPWRRTGVKYTNNEAYFDVVEEIDAIIDKSGSTVTAEIQGVIDACVKLTGMPDLTLSFMNPRLLDDVSFHPCVRFKRWESERILSFIPPDGNFRLLSYHVSAQNLVAIPVYVKHSISFRDSGSLGRFEITVGPKQTMGKTIEGVTVTSQMPKGVLNMSLTPSQGTHTFDPVTKMLSWDVGKINPQKLPSLKGTMGLQVGASKPDENPTINLQFKIQQLAISGLKVNRLDMYGEKYKPFKGIKYMTKAGKFQVRT

SEQ ID NO: 2816 - DNA, 3461 bp, Homo sapiens
  ref <308>: DATABASE ACCESSION NUMBER: EMBL / D38293
  ref <309>: DATABASE ENTRY DATE: 1999-09-02
gctgagagcagcaaggccagagttgaaaacttacagagtcctgaggcttcagactgaaaaaggcttcttctgtcactgacaatcgccaccatgatccatagtcttttcttgatcaactcctctggagacattttcctggagaaacattggaaaagtgtggtcagccgttctgtttgtgattacttttttgaggcgcaagagagagctactgaggcagaaaatgtgcctccggttatccctacccctcaccactatctcttaagtgtttaccgccacaagatcttttttgtggccgtgatccagacggaggtcccccctctgtttgtcattgagtttcttcaccgagtggtggacacatttcaggattattttggagtctgttcagagccagtgatcaaagacaatgtagttgtggtttatgaggtattggaagagatgcttgacaatggttttccattggctaccgagtcgaacattcttaaagaactcataaagcctcctaccatccttcgaacggttgtcaacaccatcacaggaagcacgaatgtgggtgaccagcttcccactgggcagctgtcagtggtgccttggcgacggactggggtgaaatataccaacaatgaggcctattttgatgtgattgaagagattgatgcaattattgataaatcaggctccacaattactgctgagatccagggggtgattgatgcctgtgtcaagctgactggcatgccagaccttacactttccttcatgaaccctaggttgttggatgatgtcagcttccatccttgtgttcgtttcaaacgctgggaatctgagcgcatcctctccttcatccctcctgatggaaacttccgcctgctgtcttaccatgtcagtgcacagaatctggttgcaatcccagtgtatgtcaaacataacatcagtttccgggacagtagttcccttggacgctttgaaataacggtgggacccaagcagacgatggggaagaccattgagggagtgactgtcaccagccagatgcccaagggggtcctgaacatgagccttactccatcacaggggacacacacattcgacccagtcacaaagatgctgtcttgggatgtaggaaaaataaatccacaaaagctaccaagtttgaaggggaccatgagtcttcaggctggagcttccaaaccagatgaaaaccccacaattaacctgcagtttaagatccagcagctggccatttctggactcaaggtgaatcgtctggatatgtatggagaaaagtacaaaccctttaagggcataaaatacatgaccaaagctgggaagttccaagttcgaacctgaagggagcatttgctgagggaatagtcttgcacattttttcatttcttacttgtctaaaagtaaaaaaaaatatcagcctgtctcctaggtcagtcccctcctggacccacccgctcccttttttccttagccttcagtgccatggaactaatcaagggaggaaaaggtcaccagggagaactggacagaactgaaacacagcaacaccagttctcaaggacaaggtgtgtgatgggggtaggaagcttggtgcttatgtaaccattttaaacgtggtttctataggaaagaccaacatttgtttagcttgcttggctttaattatctaaagccaatgaaagacttctttgttgattttttaagatagaaagattaaaaagaaagaaagatgggaagaaaatgaatgtcagtcaaggaaaggccacttaaggatctgctctatgaaggagaagaaagaggaaaaagaagtaaaggagttaggaggagacacttaaatgaaagattggcaagaaaagcagtcggactctaccttaaggagggatgggaaggaaagagtgtgttggtttctttctgattcctctactcatgtagaaaacacttgtacttctggaaatggactggagactttttaaatttgagtccactattgacatggaaaccccagtggaatcagattttccctcaaagaccatgatggtatcggactagttttcagacactgcctgttgctgtccatcagcacttggtctcttatcttcagtgagaaggtgacccgccttcttcccatggtggctgcctaaagtgcttcttttctaacccaaaacagttctactcacttccttttacagaattcaccggccattttcctgttacctgatccttctacaggatttttaaaaagtaagagagtttcagagaagccgatcccataatccccagtgcagccagggcccgtgtgtcatcgtactggagtagagggccgactcttcccatgaaggtgagcacagctgtgagtgagtgagctcatatctccatttgtcagtgctggactggtaccagatcgtaaccttcccgttggtcggaaacttttccatctgtcaccctagaaaaagagaaagcttaccatcgagggtgtggttgatccttgaagctgcttggtaaagttatcatttctcagtcttttcttttgtactcctatcatgtattcattaatatctaccagtcccttttcattctaagacaaaacatttctcctaaatctctgaataaaatcagtgctgtaggaagatggactgtgttgatcatgggtgtaagcaacccagtttaagaaacatggcaactaaagggatacctcaggctttctttcccagtgggtcatttttgtcctagttcagtgtgtctgttactatttaaatatttatacaaaagggtttttgtttatagcttaaggaatgatactgtgctctgcttggtgcatggagaaaaaggaagacccgtactctccacaccctagagctttctctaaatattgtgcaaagtttttgctagttttatcttctgactttggactagtttttgcctgcagttgtgttgctttgtgattttcctctgggatagtgtactgtacacaaccagatgtgttccacactccgtgactccgcagtttgtcctggagtgacatacacatccaccatggaaagggaagcatctctgccgagattctaagtacttgaagcacctctcctgaggaacctacaggattctaaggtttcctaggtcactgaacaactaatcttggtccctgaatatttctaggtttgtaagtgcagcagttttatttcctctagaactcatcctgtttcaagggaagtacctaagaagatatagagtgtttctagggtaagggacctgcaggtgtaagcatagatgaaataactgtcctgtcacatgtgcagcaggccatggagtgtagcgggcatcgctgccgccattcctgcagcatcaccataagcagtgcagggtgtctccatcgagctgtttggttccatgtgtgtttaacatgtgcagaagtagcttctctgtttaagtttaataaagttgagtttcaaccagtc

SEQ ID NO: 2817 - protein, 418 aa, Homo sapiens
  ref <308>: DATABASE ACCESSION NUMBER: SWISS-Prot / P53677
  ref <309>: DATABASE ENTRY DATE: 2001-10-16
MIHSLFLINSSGDIFLEKHWKSVVSRSVCDYFFEAQERATEAENVPPVIPTPHHYLLSVYRHKIFFVAVIQTEVPPLFVIEFLHRVVDTFQDYFGVCSEPVIKDNVVVVYEVLEEMLDNGFPLATESNILKELIKPPTILRTVVNTITGSTNVGDQLPTGQLSVVPWRRTGVKYTNNEAYFDVIEEIDAIIDKSGSTITAEIQGVIDACVKLTGMPDLTLSFMNPRLLDDVSFHPCVRFKRWESERILSFIPPDGNFRLLSYHVSAQNLVAIPVYVKHNISFRDSSSLGRFEITVGPKQTMGKTIEGVTVTSQMPKGVLNMSLTPSQGTHTFDPVTKMLSWDVGKINPQKLPSLKGTMSLQAGASKPDENPTINLQFKIQQLAISGLKVNRLDMYGEKYKPFKGIKYMTKAGKFQVRT

SEQ ID NO: 2818 - DNA, 4377 bp, Rattus norvegicus
  ref <308>: DATABASE ACCESSION NUMBER: EMBL / L07736
  ref <309>: DATABASE ENTRY DATE: 2000-03-04
agtcggtcgactccgagctcagtgaggacctaaagcagaggactgtggtgcggaggacagtgcttgctccggggagtgcagagcaataggtccccactcaagatggcagaggctcaccaagctgtggccttccagttcaccgtcacccccgatggcattgacctccgcctgagccacgaagccctcaaacagatctgcctgtcggggctgcactcctggaagaagaagttcatccggttcaagaatggcatcatcactggtgtgttccccgcgaatccgtccagctggcttatcgtggtggtgggtgtgatttcatccatgcatgccaaagtggacccctccctgggcatgatcgcaaagatcagtcggaccctagacaccactggccgcatgtcaagccagacgaagaacattgtgagcggcgtcctctttggtacagggctctgggtggcagtcatcatgaccatgcgctactcgctgaaggtgctgctctcctaccacggctggatgtttgcagaacacggcaaaatgagccgcagcaccaagatctggatggctatggtcaaggtcctctcaggtcggaagcccatgttgtacagcttccagacgtctctgccacgcctgcctgtcccagctgtcaaagatactgtgagcaggtacctggaatctgtaaggccactgatgaaggaagaagacttccagcgcatgacagcactggcccaggattttgctgtcaacctcggacccaaattgcagtggtatttgaagctaaaatcctggtgggccacaaattacgtgagtgactggtgggaagaatatatctacctgcggggccgagggccgctcatggtcaacagcaactactacgccatggagatgctgtacatcaccccaacccatatccaggcagcgagagctggcaacaccatccacgccatactgctgtatcgtcgcacattagaccgtgaggaactcaaacccattcgtcttctgggatccaccattccactctgctcagcccagtgggagcgactcttcaatacttcccggatccctggggaggagacagacaccatccaacatatcaaggacagcaggcacattgttgtgtaccacagagggcggtacttcaaggtctggctctaccacgatgggaggctgctgaggccccgagagctggagcagcagatgcagcagatcctggatgatccctcagagccacagcctggggaggccaagctggccgccctcactgctgcagacagagtgccctgggcaaagtgtcggcagacctattttgcacgagggaaaaataagcagtccctggatgcggtggaaaaggcagcgttcttcgtgacgttggacgaatcggagcagggatacagagaggaggatcctgaggcatccatcgacagctacgccaaatccctgctgcatggaagatgctttgacaggtggtttgacaagtccatcacctttgttgtcttcaaaaacagcaagataggcataaatgcagagcactcctgggcggacgcgcccatcgtgggccatttgtgggagtatgtcatggccaccgacgtcttccagctgggttactcagaggatggacactgtaaaggagacaccaaccccaacatccctaagcccacaaggctacaatgggacattccaggagagtgccaggaggtcatagatgcatccctgagcagcgccagtcttttggcaaatgatgtggacctgcattccttcccatttgactctttcggcaaaggcttgatcaagaagtgccggacgagtcccgatgccttcatccagctggcgctgcagctcgcacattacaaggacatgggcaagttctgcctcacatatgaggcctccatgacccggctcttccgagaagggaggacagagactgtacgctcctgcactatggagtcctgcaactttgtgcaggccatgatggaccccaagtcaacggcagagcagaggctcaagctgttcaagatagcttgtgagaagcaccagcacctgtaccgcctcgccatgacgggcgccggcatcgaccgccatctcttctgcctctatgtggtgtccaagtatcttgcagtcgactcacctttcctgaaggaggtattgtctgagccatggaggttgtctacgagccagactcctcagcagcaggtggagctctttgactttgagaaaaaccctgactatgtgtcctgtggagggggctttgggccggttgccgatgacggctatggtgtctcctacattatagtgggagagaatttcatccacttccatatttcttccaagttctctagccctgagacagactcacaccgctttgggaagcacttgagacaagccatgatggacattatcaccttgtttggcctcaccatcaattctaaaaagtaaacccctgagccacacggaaggaaaacggaccctcgtgatacaaaccaaatgaatagatgttgctcctgaccataggacaggcagaaaattgctcttataaaactcagttttccttccagaaggtttaccgtcagtctccctagaacaacagtaggcttcacgtgtgaattgtgaccctactacatccagagatgccttggctccaggaatattgggcacagtcccctgatgtcttttgaatcggctcctactggataaagggatttaaatgctggtgaattcctggattctgggggttgtttcttcacatgtgttggaggtgacagacttcctcagtggtgaccctgtgaatacttgggcgtctgactccacccaggcagtgtgagcatcaccttgtggaaagagaaagtgtcttcagagccagcagaggcaacagctgtagctaacacatctgtaacacactaatggaatggttaggcctggggattaaggttctgctatgagtgacagccactgtccctttggaagttcacatttccaggaagcagagtaccacctccccagtgccaccttcctcacacatcttcaaaacccagtgccttaaagaaggggcccattggcaagcgggaccatagagaagacttagcatctgtgaagcctttgggtggatatgtgaggatgctgcttccccttactggttcctgcataaagatgtccctaagtaagcacttcccccacccctagaaaatgaggtccttggtgaaggcagggatgctggagtctcattgcctgccagttccattaagccacaaaatagcagacatgtgtccacagagggaggggcttggtagtcaaaggctgcatagctggacaacagcgggagagtgtggcttgctgtatttgacagctgttggcaagaggagtgagaccctggtcaccaagtcagacatactgacacaggcagccaaagctcacggagccaggagatatagatagatactggcttgtattctggcagatacacccctgggcttatcttctaatcccacccagtcagattccaaccagagtcaaattccatagaaggctaggtcattttggcgacagactcagggatctcaagtaatgggtgcttttacccacatgccatccctcagtgggagtgcctttcttgaaagcatccaatgggctaaagcagctctaccaagtctgtttggtatttaatgtaaacattagcattaatggagtggtctctcctacctgtcaccatcctgtcctgacaagcttagctctccgaggtttacatcatgtatttattttccagtgcccctttggccttgtttgattcctgcccctgtgccagaagtggcccagaagtgaggggtggggtgaccagcagtgcagagaggtgctggctgaacagttcatgtgtgtcttatgggtatacatgtataaattttgtaatgtaaaaaaaaaaatcatacctaaaagggccaaagttttttttttttttactaaaaccaagaaaacaaaagacaacataaagacataagcagaaacaaactgttgtaagtcagagcggcctgactctcgctgctgtgaccactcaccaacctgtgttactcagagtagcccggctagtgcccgagtgggacattcctctctcaggtttccagtgtccttgctgctcctgagcagttaccaatgcaatttcgcattccttacaaggcagaagagtgggctctcactgtatgtgttcaaaggaggaggtaagactattgtgtatttaatttaatgtggaacaaaatatagtcttaccgcagccaaggttcaaatttggtgttctaatctgtccattgcatgtaaataccatatctgtttggatataaatcttagaagtgcatgtgtgagcgaatgtagctggccattaataaaacattaatactgtctact

SEQ ID NO: 2819 - protein, 773 aa, Rattus norvegicus
  ref <308>: DATABASE ACCESSION NUMBER: SWISS-Prot / P32198
  ref <309>: DATABASE ENTRY DATE: 1999-07-15
MAEAHQAVAFQFTVTPDGIDLRLSHEALKQICLSGLHSWKKKFIRFKNGIITGVFPANPSSWLIVVVGVISSMHAKVDPSLGMIAKISRTLDTTGRMSSQTKNIVSGVLFGTGLWVAVIMTMRYSLKVLLSYHGWMFAEHGKMSRSTKIWMAMVKVLSGRKPMLYSFQTSLPRLPVPAVKDTVSRYLESVRPLMKEEDFQRMTALAQDFAVNLGPKLQWYLKLKSWWATNYVSDWWEEYIYLRGRGPLMVNSNYYAMEMLYITPTHIQAARAGNTIHAILLYRRTLDREELKPIRLLGSTIPLCSAQWERLFNTSRIPGEETDTIQHIKDSRHIVVYHRGRYFKVWLYHDGRLLRPRELEQQMQQILDDPSEPQPGEAKLAALTAADRVPWAKCRQTYFARGKNKQSLDAVEKAAFFVTLDESEQGYREEDPEASIDSYAKSLLHGRCFDRWFDKSITFVVFKNSKIGINAEHSWADAPIVGHLWEYVMATDVFQLGYSEDGHCKGDTNPNIPKPTRLQWDIPGECQEVIDASLSSASLLANDVDLHSFPFDSFGKGLIKKCRTSPDAFIQLALQLAHYKDMGKFCLTYEASMTRLFREGRTETVRSCTMESCNFVQAMMDPKSTAEQRLKLFKIACEKHQHLYRLAMTGAGIDRHLFCLYVVSKYLAVDSPFLKEVLSEPWRLSTSQTPQQQVELFDFEKNPDYVSCGGGFGPVADDGYGVSYIIVGENFIHFHISSKFSSPETDSHRFGKHLRQAMMDIITLFGLTINSKK

SEQ ID NO: 2820 - DNA, 2546 bp, Homo sapiens
  ref <308>: DATABASE ACCESSION NUMBER: EMBL / BC000185
  ref <309>: DATABASE ENTRY DATE: 2001-07-13
gctgccgctgccgcacctccgtagctgactcggtactctctgaagatggcagaagctcaccaagctgtggcctttcagttcacggtcactccggacgggattgacctgcggctgagccatgaagctcttagacaaatctatctctctggacttcattcctggaaaaagaagttcatcagattcaagaacggcatcatcactggcgtgtacccggcaagcccctccagttggcttatcgtggtggtgggcgtgatgacaacgatgtacgccaagatcgacccctcgttaggaataattgcaaaaatcaatcggactctggaaacggccaactgcatgtccagccagacgaagaacgtggtcagcggcgtgctgtttggcaccggcctgtgggtggccctcatcgtcaccatgcgctactccctgaaagtgctgctctcctaccacgggtggatgttcactgagcacggcaagatgagtcgtgccaccaagatctggatgggtatggtcaagatcttttcaggccgaaaacccatgttgtacagcttccagacatcgctgcctcgcctgccggtcccggctgtcaaagacactgtgaacaggtatctacagtcggtgaggcctcttatgaaggaagaagacttcaaacggatgacagcacttgctcaagattttgctgtcggtcttggaccaagattacagtggtatttgaagttaaaatcctggtgggctacaaattacgtgagcgactggtgggaggagtacatctacctccgaggacgagggccgctcatggtgaacagcaactattatgccatggatctgctgtatatccttccaactcacattcaggcagcaagagccggcaacgccatccatgccatcctgctttacaggcgcaaactggaccgggaggaaatcaaaccaattcgtcttttgggatccacgattccactctgctccgctcagtgggagcggatgtttaatacttcccggatcccaggagaggagacagacaccatccagcacatgagagacagcaagcacatcgtcgtgtaccatcgaggacgctacttcaaggtctggctctaccatgatgggcggctgctgaagccccgggagatggagcagcagatgcagaggatcctggacaatacctcggagcctcagcccggggaggccaggctggcagccctcaccgcaggagacagagttccctgggccaggtgtcgtcaggcctattttggacgtgggaaaaataagcagtctcttgatgctgtggagaaagcagcgttcttcgtgacgttagatgaaactgaagaaggatacagaagtgaagacccggatacgtcaatggacagctacgccaaatctctactacacggccgatgttacgacaggtggtttgacaagtcgttcacgtttgttgtcttcaaaaacgggaagatgggcctcaacgctgaacactcctgggcagatgcgccgatcgtggcccacctttgggagtacgtcatgtccattgacagcctccagctgggctatgcggaggatgggcactgcaaaggcgacatcaatccgaacattccgtaccccaccaggctgcagtgggacatcccgggggaatgtcaagaggttatagagacctccctgaacaccgcaaatcttctggcaaacgacgtggatttccattccttcccattcgtagcctttggtaaaggaatcatcaagaaatgtcgcacgagcccagacgcctttgtgcagctggccctccagctggcgcactacaaggacatgggcaagttttgcctcacatacgaggcctccatgacccggctcttccgagaggggaggacggagaccgtgcgctcctgcaccactgagtcatgcgacttcgtgcgggccatggtggacccggcccagacggtggaacagaggctgaagttgttcaagttggcgtctgagaagcatcagcatatgtatcgcctcgccatgaccggctctgggatcgatcgtcacctcttctgcctttacgtggtgtctaaatatctcgctgtggagtcccctttccttaaggaagttttatctgagccttggagattatcaacaagccagacccctcagcagcaagtggagctgtttgacttggagaataacccagagtacgtgtccagcggagggggctttggaccggttgctgatgacggctatggtgtgtcgtacatccttgtgggagagaacctcatcaatttccacatttcttccaagttctcttgccctgagacggggattataagtcaaggaccaagttcagatacttgagacaaagtggaaagtctcagcatatggaaacaaggccttggaggagaccatggacatcaccaagttcatgtgctgggctggaaagaaaagcctgttgattttcacttgctgtgcatttattcatccattccattgcctcaatgctgagaacagtgcctgacacataaaagatgctcaataaatatgttaaaagtaaaaaaaaaaaaaaaaaaaaaaaaaaaaaaaaaaaa

SEQ ID NO: 2821 - protein, 773 aa, Homo sapiens
  ref <308>: DATABASE ACCESSION NUMBER: SWISS-Prot / P50416
  ref <309>: DATABASE ENTRY DATE: 1999-07-15
MAEAHQAVAFQFTVTPDGIDLRLSHEALRQIYLSGLHSWKKKFIRFKNGIITGVYPASPSSWLIVVVGVMTTMYAKIDPSLGIIAKINRTLETANCMSSQTKNVVSGVLFGTGLWVALIVTMRYSLKVLLSYHGWMFTEHGKMSRATKIWMGMVKIFSGRKPMLYSFQTSLPRLPVPAVKDTVNRYLQSVRPLMKEEDFKRMTALAQDFAVGLGPRLQWYLKLKSWWATNYVSDWWEEYIYLRGRGPLMVNSNYYAMDLLYILPTHIQAARAGNAIHAILLYRRKLDREEIKPIRLLGSTIPLCSAQWERMFNTSRIPGEETDTIQHMRDSKHIVVYHRGRYFKVWLYHDGRLLKPREMEQQMQRILDNTSEPQPGEARLAALTAGDRVPWARCRQAYFGRGKNKQSLDAVEKAAFFVTLDETEEGYRSEDPDTSMDSYAKSLLHGRCYDRWFDKSFTFVVFKNGKMGLNAEHSWADAQIVAHLWEYVMSIDSLQLGYAEDGHCKGDINPNIPYPTRLQWDIPGECQEVIETSLNTANLLANDVDFHSFPFVAFGKGIIKKCRTSPDTFVQLALQLAHYKDMGKFCLTYEASMTRLFREGRTETVRSCTTESCDFVRAMVDPAQTVEQRLKLFKLASEKHQHMYRLAMTGSGIDRHLFCLYVVSKYLAVESPFLKEVLSEPWRLSTSQTPQQQVELFDLENNPEYVSSGGGFGPVADDGYGVSYILVGENLINFHISSKFSCPETDSHRFGRHLKEAMTDIITLFGLSSNSKK

SEQ ID NO: 2822 - DNA, 3665 bp, Rattus norvegicus
  ref <308>: DATABASE ACCESSION NUMBER: EMBL / L07925
  ref <309>: DATABASE ENTRY DATE: 2000-06-16
ccaccaggcctaacaactagaggaggcttacggccctcggaaaccacgcccccatcagtcagtccccaccctcagctgacatcagcgagtccggccctgggcgcagagcgcaggcagcgcggagccgcgccggccggccctgcgcccacgccgccccgggtctcgcggcccgccggccacccgcgccaccgggagtcgtccatggtgcagcgcatgtgggccgaggcgtccgggcccatagggggcgccgagccgttgtttcccggctcccggcgcagccgcagcgtgtgggacgccgtgcgtctggaggtgggcgtccctgacagctgtccagtggtgctgcacagcttcacgcagctcgaccccgatctgccgcgcctggagagctctacgcaggagattggggaggagctgatcaacggggtcatctactccatctccctgcgcaaggttcagctatacccaggagccaccaagggccagcgctggctagggtgcgagaatgagtcagctctgaacctctacgagacttgcaaggtgcgcacggtgaaggccggtactctggagaagctggtggaacacctggtgcctgccttccagggcagtgacctttcctacgtcaccgtattcctgtgcacctacagagccttcacaaccactcagcaggtgctagacctgctgttcaaaagatatggctgcatccttccctactccagtgaggacggcggaccacaggaccaactcaaaaatgccatctcttccatcctgggcacctggctggaccaatactccgaggacttctgtcaacccccggactttccctgcctcaagcagctggtggcttatgtgcagctcaacatgcctggctcagacctggagcgccgtgctcaccttctcctggcccagctggaggacctggagcccagtgaggttgagcctgaggccctgtccccagctccagtgctgtctctgaaaccagcttcacagctagaaccagctcccgccctgcttctgacgcccagccgagctgtggcatccactccagtacgagagccagccccggtgccagtactggcatccagcccggtggtggcgccagcctctgagctagaaccagctctggagccgcccctagaccctgagccaaccctcgcacctgctccagagctggaccccactgtctcacagagcctccacctcgagcccgctcccgtgcccgctcctgcattagagccttcctggcctctgcctgaaaccacggagaacggactgtgtgcaaagcctcacctactgctgttccctccagacttggtggctgaacagtttacgctgatggacgcagagctattcaagaaagttgtgccctaccactgcctgggctccatctggtcccagcgggcaaagaagggcaaggagcacctcgcgcccaccatccgtgccactgtcgcccagttcaacaacgtggccaactgtgtcatcaccacctgccttggggaccagagtatgaaagcttcggacagggcccgggtggtggaacactggatcgaggtggccagggagtgcagggtgctcaagaatttctcctccctctacgccatcctctctgccctacagagcaatgccatccaccgcctaaagaagacatgggaagaggtctccaggggcagctttcgagtgttccagaaactgtcagaaatcttctctgatgagaacaactactccttgagcagagagctgctcatcaaggaaggaacctccaagtttgccacgctggagatgaaccctaggagaacccagaggcggcagaaggagacaggtgtcatccagggcactgtcccctacctgggcacattcctcactgacctggtgatgctggacacagccatgaaggactatctatatgggagactgatcaactttgaaaagaggaggaaggagttcgaagtcatcgcccagatcaagttgctccagtcggcctgcaacaactacagcattgttcccgaggagcactttggagcctggttccgagccatgggacggctcagcgaggctgagagctacaacctgtcgtgtgagctggagcccccgtctgagtcagccagcaacaccctgaggagcaagaaaagcacagctatcgtcaagcgctgggagcgacgccaggctcccagcacggagctcagcaccagtagcagtgcacactccaagtcatgtgaccagctccggtgcagcccctacctcagcagcggggacatcacggacgcactcagtgtgcactcagctggttcatccacgtctgacgtggaggagatcaacatgagctttgttccagagtctcctgatggccaggaaaagaagttctgggagtcagcctcccagtcgtccccagagacctctggcatcagctcggcctccagcagcacctcctcttcgtcagcctctaccacaccggtgtctaccacacgcacccacaagcgctctgtctcaggggtctgcagctacagctcctcactgccactctacaaccagcaggtgggcgactgctgcatcatcagggtcagcctggatgtggacaacggcaacatgtacaagagcatcctggtgaccagccaggataaggctccgactgtcatccggaaagccatggacaaacacaacctagatgaggacgagcccgaggactatgagctgctgcagatcatctcagaggaccacaagctgaaaattccagagaacgccaatgtgttctatgccatgaactctgccgccaactatgacttcatcctaaagaagcgggccttcactaagggggctaaagtcaagcatggagccagctccactctccctcgaatgaagcagaagggactcaggattgccagaggcatcttctaaggacgtctcccaggggctggctggctggctggggactaagcacttacagactagagtggcccaggccacaggtacctctgccctcctgccagcccaggctactcccagactccactttcaccccgaacctgtcctgctgccgggattgacacctgccactgacaggctgacctggcctccggggaccgctcaccgccttaggtgccttctgctctctgcaaccagaggactagctgactttgccaaggggtgctgccagctgggcatggagcctcgcctgccctggacaatgtccaccacactttcctgtcacctccccaagtgcagatcactgccacccatgctcccagatgctccaggacacccacacacccagcggggctgccaactgcgttctctccttgtgcccataggccatggcctgggaccttcatggaggtcctagcctttcttaggctgcaccaaagattccaccttcaggcctacagagtgagggagtctcgcccaccacgagcccaagccctcccatggatcagagagagaagccctctcatggaccgcctggttggcattgaaccccataccactgaaagtgccattcaccaccgctgcgtcccgggtgtacaagactacatgcaatgggaggtttgtggggagggggaagacgactggatatttgtataaaacgtaaaaagtttactgattggggtggggcaatatttatttgttgtaaatagaaaatgctagacttgaatattatattaaaatcccgtttc

SEQ ID NO: 2823 - protein, 895 aa, Rattus norvegicus
  ref <308>: DATABASE ACCESSION NUMBER: SWISS-Prot / Q03386
  ref <309>: DATABASE ENTRY DATE: 2002-06-15
MVQRMWAEASGPIGGAEPLFPGSRRSRSVWDAVRLEVGVPDSCPVVLHSFTQLDPDLPRLESSTQEIGEELINGVIYSISLRKVQLYPGATKGQRWLGCENESALNLYETCKVRTVKAGTLEKLVEHLVPAFQGSDLSYVTVFLCTYRAFTTTQQVLDLLFKRYGCILPYSSEDGGPQDQLKNAISSILGTWLDQYSEDFCQPPDFPCLKQLVAYVQLNMPGSDLERRAHLLLAQLEDLEPSEVEPEALSPAPVLSLKPASQLEPAPALLLTPSRAVASTPVREPAPVPVLASSPVVAPASELEPALEPPLDPEPTLAPAPELDPTVSQSLHLEPAPVPAPALEPSWPLPETTENGLCAKPHLLLFPPDLVAEQFTLMDAELFKKVVPYHCLGSIWSQRAKKGKEHLAPTIRATVAQFNNVANCVITTCLGDQSMKASDRARVVEHWIEVARECRVLKNFSSLYAILSALQSNAIHRLKKTWEEVSRGSFRVFQKLSEIFSDENNYSLSRELLIKEGTSKFATLEMNPRRTQRRQKETGVIQGTVPYLGTFLTDLVMLDTAMKDYLYGRLINFEKRRKEFEVIAQIKLLQSACNNYSIVPEEHFGAWFRAMGRLSEAESYNLSCELEPPSESASNTLRSKKSTAIVKRWERRQAPSTELSTSSSAHSKSCDQLRCSPYLSSGDITDALSVHSAGSSTSDVEEINMSFVPESPDGQEKKFWESASQSSPETSGISSASSSTSSSSASTTPVSTTRTHKRSVSGVCSYSSSLPLYNQQVGDCCIIRVSLDVDNGNMYKSILVTSQDKAPTVIRKAMDKHNLDEDEPEDYELLQIISEDHKLKIPENANVFYAMNSAANYDFILKKRAFTKGAKVKHGASSTLPRMKQKGLRIARGIF

SEQ ID NO: 2824 - DNA, 5796 bp, Homo sapiens
  ref <308>: DATABASE ACCESSION NUMBER: EMBL / AB037729
  ref <309>: DATABASE ENTRY DATE: 2000-03-14
ctggaccagtactcggaggatttctgtcaacctccggactttccctgcctcaagcagctggtggcctacgtgcagctcaacatgccaggctcagacctggagcgccgtgcccaccttctcctggcccagctggagcactcggaacccattgaggcagagcctgaggctctgtcaccagtgccagctctaaaaccaactccagagctcgagctagctctaacaccagctcgagcacccagcccagtgccggctccagccccggagccagagccagctccaacaccagctccaggttcagagctagaagtagctccagcaccagctccggagctccagcaggctccagagccagctgtgggactagaatcggctccagcgccagctctggaactagagccagctccagaacaggatccagctccctcacaaactctagagctggagccagctccagcaccagttccatcattacagccttcctggccttcacctgtggttgcagagaacgggctgagtgaggagaagcctcacctcttggtgttccctccagatctggtggcagagcagtttacactgatggatgcggaactgttcaagaaggtggtgccctaccactgcctgggctccatctggtcccagcgggacaagaagggcaaggagcacctggcgcccaccatccgcgccactgtcacccagttcaacagtgtggccaactgtgtcatcaccacctgcctcgggaaccgaagcacgaaagccccagacagggccagggtggtggagcactggatcgaggtggccagggagtgccggatcctcaagaacttctcgtcactgtatgccatcctctctgccctgcagagcaactccatccaccgtctgaagaagacgtgggaagacgtttccagggacagtttccggatctttcagaagctgtcagagatcttctcagatgagaacaactactcattgagccgggagctgctcatcaaggagggcacctccaagtttgccaccctggagatgaaccccaagagagcccagaaacggccgaaggagacgggcatcatccagggcaccgttccctacctgggcacgttcctcaccgacctggtgatgctggacactgccatgaaggactatctgtatggcagactcatcaactttgagaagaggaggaaggagttcgaggtgatcgcccagatcaagctgctgcagtcggcctgcaacaactacagcatcgcgccagatgagcaatttggggcctggttccgggccgtggagcggctcagcgagactgagagctacaacctgtcgtgcgagctggagcccccatccgagtcagccagcaacaccctcaggaccaagaagaacacagccattgtcaagcgctggagcgaccgccaggcccccagcactgagctcagtaccagtggcagctcccactccaagtcctgtgaccagctcaggtgtggcccctacctcagcagcggggacatcgctgacgcgctcagcgtgcactcggccggctcctctagctccgacgtggaggagatcaacatcagcttcgtcccggagtctcctgatggccaggaaaagaaggtgactgcctgcccttctccccaatatcctttcccatctccccactccaaatccatgcatggggccaggaagccctggatcctgaacacagcttctagaaggttccccatctggcagctggcctggggtgcccccacagggcagtgggatctgctgatcttaccgtctccctcagttctgggaatcagcctcacagtcatccccggagacctccggcatcagctcagcctccagcagcacctcgtcctcctcagcctccaccacgcccgtggctgccacacgcacccacaagcgctctgtctcagggctctgcaactccagctccgcgctgccgctctacaaccagcaggtgggcgactgctgtatcatccgcgtcagcctggacgtggacaatggcaacatgtacaagagcatcctggtaagccggcgggggtggcctgggtgcctccctccactggcggcaaatgcaccctgaacacagtgcaccatccctgccctcccggggtctaccttgtagttggcggggaaggacagatgtcagccaggtacagaaatgaagaaggtagtgatcagggacaaggctggcctgagggcagagggggaggaaaggagcagccgtgcaaagcccccaggagctgaaggggcggtgctgtaggggaggtgaggtcagggaagtatccagggcctggccacataggccctgagccctgccaggacctcgactttctcggggaggaagacaggagcaatgatggctggcttctctgtctggcgtgggctggtaccagagccgcaggggtgttggttaggaggccgctgtggcaaccaggctgggagccctggaaggggccagcagggtcagagtctagacaggatttggagacagcagatgggaattgctcacagaatgggtttgcctgggggctctttcttcatcctccaggtgtcctgcgacagatgaaccatttgtaacccccaccctctgtaccccagccctgggtcaggtgccccattattcacacacgctcctgacccctcattgccaggagctagcatggttgtcattaagcagtcacctgtggccctatgtccgagttccgcctgtgctctggccctcagggtcaaggtagcaggggcctggcctatgctgaccacactgagcatcctggccggcccctcctttcttacctccagggcttggactagggactgtctgttccccaggctcagtgatgctgttatcctggaggggcaagtgcttctcaaggaagtgtgggaggagggaacagtctcttacaggagaagcagggtaggcactgctgggacagacccctcctcattccatggaggcctcacatggggaacagaaggacggaggcctcacttggggagtaggagaatgtgacaaggccctctccggacccagcacctggccagaggctgtgagtgcctgtgcttggtgctgaggggactccagagggtccttggccactgcactctgggggagccgctccagggtcttttccctgatggtccatcccccgccgcgatgcaggtgaccagccaagataaggctccggctgtaatccgcaaggccatggacaaacacaacctggaggaggaggagccggaggactatgagctgctgcagattctctcagatgaccggagtaagtcagaagaccagagggcgatggcagagggggcaggtccacaccactccccagccccaggttggaagcctttggccccagaaaattcaccagcagagtgtgggtagacactgtggacagggcagccctggctgcccccattgtctgcttgctgtccccagcaaccactggacctccccagtgtgtgcccttccctaggcgtgaacaggcagttcaaagctcacatcagtgaggagcaaagagaaaaggcatttttcactgggacaggttagccacgtggcccactggaagggacgctttctggctaagacaagaaaacatgtgctctacaaagaatggtgacagctgtggaccaaagtgtcaagtgttaaaatccatgagtgtgtgattctaaaagcagaacaggctactaggaggccaactcagtattctagaaactgggaaagtgtcaagaaccagtgcaggctcagagtggggtatcctgggcctggagacgctgggcaagctccttaagccctctgtgcttgtcttctcatcccccaaatggaaatgaaagtagccagtgtgttcatcatatatgtaaaaatctatatgtatgtatatatgtgtatatatatgcatgtatatgtgtgtgtatatatatgcatgtatatgtgtgtgtatatatatgcatgtatatataaagcatctatgtgcaccataaaagttaactataaatactatcatcgctgttttctttccagtgagctgaacaccacctcccaccattagcccagacagtaagcaatgactcctgtgatccctagaagttacagtctaaatcctctggcagcttcttgcaccatttcggttaggtgggcagggtaggcgggacccccatcttacagaaaaggaagactgaggcctagagaggttaaagatgacgaaaagccacacgatgtcggcaggagcacaaatcgagcccagctctggtttatagcaggctgtgggccagaggagatggtgggaaatggagccaaaaggaagtgcttgccgggtgccagggttcaaggagtacaggcctccctggaacgggcgccagagccctggggcaggcctgtcctttcctggtccttggatcccttgtcctgagtagggcaggattctgggaggtgacctggattctagaaagcctgttccaggtgggcagccagcactgcagtatgggcaggacggggtgaccctctgccagctcaggccaagccggggggttctggagtcagtccctgtttaaacaagagtcatcaggttttgtgaggacctcagcagagtctgtcctcaggcaggagtcattgagaggggtccttggagttctggagctgtattggaggggatctgaggtctgtggctcaagacagtccttgtatgggctctcaagcggtaggggtatcctgcagggcccccaggagcatccctgatcacccctctgcccctccccaccagagctgaagatccctgaaaacgccaacgtcttctatgccatgaactctactgccaactatgactttgtcctgaagaagcggaccttcaccaagggagtgaaggtcaagcacggagccagctccaccctccctcgcatgaagcagaaaggactcaagattgccaagggcatcttctgagggcatcctcccagggtctggctggctggtagccaagcacttatggaccagagtggcccaggccagctgggcgccttcctcccacctgccagcccagggtaccccagactccagtttcatcctgaacctctcccgctgctgggattgacgcctgccattggtcaggctgacctggcctcccgtggaccactcgctgccttaggtgccttctgctctctggaaccagaggactagctgacttttgccaaggagcagtgccaacgggcatggcatggtgccctgcctgcccccgggcgccacctctgtacacttccctgacaccttcccaggtgtgggtcactgccacctgtgcccatgggcaccccagagcacccactgtgaccactgcagttctctcatgcccacaggcactggcctgtgaccttcgcaggggtcccggcccctcccaccactctagcctttctcaggctgcaccaaagattccatcatcagggccaactgagagtgagggagtctcacccaccgcttaccccagccctcccctgggagcagagagagaaaccctcttcatggaccagactctgcacccggtgagtgaggacagtcccagctgagtcccatcgatgttgaatctcatgccactgcaagtgccattcaccactgcgtcctgggctttacgagaccatgcaagacgggggttagtgaggaaggaggatttggggtgggggtggggtgattgaatatttgtataaaaagcaaaaagaaaaaaaaaatgtttgtttactgattggggaggggcaatatttatttgttgtaaatagcaaatgctagacttgaatattatattaaaatcctgtttctactat

SEQ ID NO: 2825 - protein, 914 aa, Homo sapiens
  ref <308>: DATABASE ACCESSION NUMBER: SWISS-Prot / Q12967
  ref <309>: DATABASE ENTRY DATE: 2002-06-15
MVQRMWAEAAGPAGGAEPLFPGSRRSRSVWDAVRLEVGVPDSCPVVLHSFTQLDPDLPRPESSTQEIGEELINGVIYSISLRKVQLHHGGNKGQRWLGYENESALNLYETCKVRTVKAGTLEKLVEHLVPAFQGSDLSYVTIFLCTYRAFTTTQQVLDLLFKRYGRCDALTASSRYGCILPYSDEDGGPQDQLKNAISSILGTWLDQYSEDFCQPPDFPCLKQLVAYVQLNMPGSDLERRAHLLLAQLEHSEPIEAEPEALSPVPALKPTPELELALTPARAPSPVPAPAPEPEPAPTPAPGSELEVAPAPAPELQQAPEPAVGLESAPAPALELEPAPEQDPAPSQTLELEPAPAPVPSLQPSWPSPVVAENGLSEEKPHLLVFPPDLVAEQFTLMDAELFKKVVPYHCLGSIWSQRDKKGKEHLAPTIRATVTQFNSVANCVITTCLGNRSTKAPDRARVVEHWIEVARECRILKNFSSLYAILSALQSNSIHRLKKTWEDVSRDSFRIFQKLSEIFSDENNYSLSRELLIKEGTSKFATLEMNPKRAQKRPKETGIIQGTVPYLGTFLTDLVMLDTAMKDYLYGRLINFEKRRKEFEVIAQIKLLQSACNNYSIAPDEQFGAWFRAVERLSETESYNLSCELEPPSESASNTLRTKKNTAIVKRWSDRQAPSTELSTSGSSHSKSCDQLRCGPYLSSGDIADALSVHSAGSSSSDVEEINISFVPESPDGQEKKFWESASQSSPETSGISSASSSTSSSSASTTPVAATRTHKRSVSGLCNSSSALPLYNQQVGDCCIIRVSLDVDNGNMYKSILVTSQDKAPAVIRKAMDKHNLEEEEPEDYELLQILSDDRKLKIPENANVFYAMNSTANYDFVLKKRTFTKGVKVKHGASSTLPRMKQKGLKIAKGIF

SEQ ID NO: 2826 - DNA, 3665 bp, Rattus norvegicus; identical to SEQ ID NO: 2822
  ref <308>: DATABASE ACCESSION NUMBER: EMBL / L07925
  ref <309>: DATABASE ENTRY DATE: 2000-06-16

SEQ ID NO: 2827 - protein, 895 aa, Rattus norvegicus; identical to SEQ ID NO: 2823
  ref <308>: DATABASE ACCESSION NUMBER: SWISS-Prot / Q03386
  ref <309>: DATABASE ENTRY DATE: 2002-06-15

SEQ ID NO: 2828 - DNA, 5796 bp, Homo sapiens; identical to SEQ ID NO: 2824
  ref <308>: DATABASE ACCESSION NUMBER: EMBL / AB037729
  ref <309>: DATABASE ENTRY DATE: 2000-03-14

SEQ ID NO: 2829 - protein, 914 aa, Homo sapiens; identical to SEQ ID NO: 2825
  ref <308>: DATABASE ACCESSION NUMBER: SWISS-Prot / Q12967
  ref <309>: DATABASE ENTRY DATE: 2002-06-15

SEQ ID NO: 2830 - DNA, 4444 bp, Rattus norvegicus
  ref <308>: DATABASE ACCESSION NUMBER: EMBL / L08228
  ref <309>: DATABASE ENTRY DATE: 2000-03-04
tcgcgcagtccgcgctgctgtcctttccgccttttccgcgcgggtgttcgagcagcgccaaacacgcttcagcacctcggacagcatccgccgcgctcgcccggggctcctagagaacccgggggcgcttgaccgcgcgcgggcggcccgcgggtcgtacatcgcgaggtcgtcgcactcgcgcaacccagagccaggcccgctgtgcccggagctcatgagcaccatgcacctgctgacattcgccctgcttttttcctgctccttcgcccgcgccgcctgcgaccccaagatcgtcaacatcggcgcggtgctgagcacgcgcaagcatgaacagatgttccgcgaggcagtaaaccaggccaataagcgacacggctcttggaagatacagctcaacgccacttctgtcacccacaagcccaacgccatacagatggccctgtcagtgtgtgaggacctcatctctagccaggtctacgctatcctagttagccacccgcctactcccaacgaccacttcactcccacccctgtctcctacacagctggcttctacagaatccctgtcctgggactgactacccgaatgtccatctactctgacaagccctctgtccatcacacaggtcggaaagagcaggcccgcagcaccaaatgtaatacaagttgcctgcagccagttgcagaggcggtgaacattctatccctacaatgcactgcccctgaccaccaagagggaaccggtaaaaaactaacctagaagcatcagagggccaagagcagtgtgaatcatgacggtgcggaaggagccatgttcactcagagtatccacctgagtttccttcgcacggtgccgccctactcccaccagtccagcgtctggtttgagatgatgcgagtctacaactggaaccacatcatcctgctggtcagcgacgaccacgagggacgggcagcgcagaagcgcttggagacgttgctggaggaacgggagtccaagagtaaaaaaaggaactatgaaaacctcgaccaactgtcctatgacaacaagcgcggacccaaggcagagaaggtgctgcagtttgacccaggaaccaagaatgtgacggctctgctgatggaggcccgggaactggaggcccgggtcatcatcctttctgcaagcgaggacgacgctgccacagtgtaccgcgcagccgcaatgctgaacatgacgggctctgggtacgtgtggctggtcggggaacgcgagatctctgggaacgccctgcgctacgctcctgatggcatcatcggacttcagctcatcaatggcaagaatgagtcagcccacatcagtgacgccgtgggcgtggtggcacaggcagttcacgaactcctagagaaggagaatatcactgacccaccgcggggttgcgtgggcaacaccaacatctggaagacaggaccattgttcaagagggtgctgatgtcttctaagtatgcggacggagtgactggccgtgtggaattcaatgaggatggggaccggaagtttgccaactatagtatcatgaacctgcagaaccgcaagctggtgcaagtgggcatctacaatggtacccatgtcatcccaaatgacaggaagatcatctggccaggaggagagacagagaaacctcgaggataccagatgtccaccagactaaagatagtgacaatccaccaagagcccttcgtgtacgtcaagcccacaatgagtgatgggacatgcaaagaggagttcacagtcaatggtgacccagtgaagaaggtgatctgtacggggcctaatgacacgtccccaggcagcccacgccacacagtgccccagtgctgctatggcttctgcatagacctgctcatcaagctggcgcggaccatgaattttacctatgaggtgcacctggtggcagatggcaagtttggcacacaggagcgggtaaacaacagcaacaaaaaggagtggaacggaatgatgggcgagctactcagtggccaagcggacatgattgtggcaccactgaccatcaacaatgagcgtgcgcagtacatagagttctccaagcccttcaagtaccagggcctgaccattttggtcaagaaggagattcccaggagcacactggactcatttatgcagccttttcagagcacactgtggttgctagtaggactgtcagttcatgtggtggctgtgatgctgtacctgctggaccgcttcagtccctttggccgattcaaggtgaacagtgaggaggaggaggaagatgcactgaccctgtcctctgccatgtggttttcctggggcgtcctgctcaactccggcattggggaaggtgccccccggagtttctctgcacgtatcctaggcatggtgtgggctggtttcgccatgatcatagtggcttcctacactgccaacttggcagctttcctggtgctggatcggcctgaggagcgcatcacgggcatcaatgaccccaggctcagaaacccctcagacaagttcatctacgcaactgtaaagcagagctccgtggacatctacttccggaggcaggtggagttgagtaccatgtaccggcacatggaaaaacacaattacgagagcgcagctgaggccatccaggctgtgcgggacaacaagctgcacgcctttatctgggactcggccgtgctggagtttgaggcttcacagaagtgcgatctggtgaccacgggtgagctgttcttccgctcaggctttggcatcggcatgcgcaaggacagcccctggaagcagaacgtttccctgtccatactcaagtcccatgagaatggcttcatggaagatctggataagacatgggttcggtatcaggaatgcgactcccgcagcaatgctcctgcaaccctcacttttgagaacatggcaggggtcttcatgctggtggctggaggcatcgtagctgggattttcctcattttcattgagatcgcctacaagcgacacaaggatgcccgtaggaagcagatgcagctggcttttgcagccgtgaacgtgtggaggaagaacctgcaggatagaaagagtggtagagcagagcccgaccctaaaaagaaagccacatttagggctatcacctccaccctggcctccagcttcaagagacgtaggtcctccaaagacacgagcaccgggggtggacgcggcgctttgcaaaaccaaaaagacacagtgctgccgcgacgcgctattgagagggaggagggccagctgcagctgtgttcccgtcatagggagagctgagacgccccgcccgccctcctctgcccctcccccgcagacagacgcacgggacagcggcctggcccacgcagagccccggagcacgacggggtcgggggaggagcactcccagcctcccccaggccgtgcccgcctgcccaccggtcggccggctggccggtccaccctgtcccggccccgcgcgtgcccccgacgtcggagctaacgggccgccttgtctgtgtatttctattttacagcagtaccatcccactgatatcacgggcccgctcaacctctcagatccctcggtcagcaccgtggtgtgaggccccccggaggcgcccacctgcccagttagcccggccaaggacactgatgagtcctgctgctcgggaaggcctgagggaagcccacccgccccagagactgcccaccctgggcctcccgtccgcctgctctgctgcctggcgggcagcccctgcaggaccaaggtgcggaccagagcggctgaggatgggccagagctgagccggctgggcagggccacagggcgctccggcagaggcagggccctgaggtctctgagcagtggggtgaggggcctaagtggccccggtcggaggagtctggagcagaaatggcagccccatccttcctccagccactaccccaagctacagtgggggcctatggccccagcttgctaggtcacccccgacccttcctccagcgcctgctctctgcaacttgatttccacctctctcctgctgcaccaccctcccacgacatttccccaccccattcactgggttgtctctgacctttcccagggctagccttcactgccctagtggcagtgcttcaggggtgctttctggctcccagacatctagggctccagactccaagagggctgagccttctcttctgtccgcagccacaataggcttcctcagacgctggctcgtgatgagtcccgcaccttgggcaccagggagcgccatctgcctcccagtccggtgtcactcaccccactaccttgtacatgaccagctctcccagtgtcccagtgtctgccccagggacaccgggcgcgcacagccacccctaatcccggtattcagtggtgatgcctaaaggaatgtcag

SEQ ID NO: 2831 - protein, 938 aa, Rattus norvegicus
  ref <308>: DATABASE ACCESSION NUMBER: SWISS-Prot / AAB50928
  ref <309>: DATABASE ENTRY DATE: 2002-06-15
MSTMHLLTFALLFSCSFARAACDPKIVNIGAVLSTRKHEQMFREAVNQANKRHGSWKIQLNATSVTHKPNAIQMALSVCEDLISSQVYAILVSHPPTPNDHFTPTPVSYTAGFYRIPVLGLTTRMSIYSDKSIHLSFLRTVPPYSHQSSVWFEMMRVYNWNHIILLVSDDHEGRAAQKRLETLLEERESKAEKVLQFDPGTKNVTALLMEARELEARVIILSASEDDAATVYRAAAMLNMTGSGYVWLVGEREISGNALRYAPDGIIGLQLINGKNESAHISDAVGVVAQAVHELLEKENITDPPRGCVGNTNIWKTGPLFKRVLMSSKYADGVTGRVEFNEDGDRKFANYSIMNLQNRKLVQVGIYNGTHVIPNDRKIIWPGGETEKPRGYQMSTRLKIVTIHQEPFVYVKPTMSDGTCKEEFTVNGDPVKKVICTGPNDTSPGSPRHTVPQCCYGFCIDLLIKLARTMNFTYEVHLVADGKFGTQERVNNSNKKEWNGMMGELLSGQADMIVAPLTINNERAQYIEFSKPFKYQGLTILVKKEIPRSTLDSFMQPFQSTLWLLVGLSVHVVAVMLYLLDRFSPFGRFKVNSEEEEEDALTLSSAMWFSWGVLLNSGIGEGAPRSFSARILGMVWAGFAMIIVASYTANLAAFLVLDRPEERITGINDPRLRNPSDKFIYATVKQSSVDIYFRRQVELSTMYRHMEKHNYESAAEAIQAVRDNKLHAFIWDSAVLEFEASQKCDLVTTGELFFRSGFGIGMRKDSPWKQNVSLSILKSHENGFMEDLDKTWVRYQECDSRSNAPATLTFENMAGVFMLVAGGIVAGIFLIFIEIAYKRHKDARRKQMQLAFAAVNVWRKNLQDRKSGRAEPDPKKKATFRAITSTLASSFKRRRSSKDTSTGGGRGALQNQKDTVLPRRAIEREEGQLQLCSRHRES

SEQ ID NO: 2832 - DNA, 5137 bp, Homo sapiens
  ref <308>: DATABASE ACCESSION NUMBER: Refseq / NM_007327
  ref <309>: DATABASE ENTRY DATE: 2001-02-03
ggtaaggctctggaaaagggggcgctgggagcgcattgcgagggggctggagagggagagaggagcggaagctgagggtgtgaaacggctggccccgaacacacctcgcggcgctccagtgattcctggtgtccgacctcagccccagtcagtgcgggtccagtttccaggctctcgcggaaggcctggctgagcacatgcggcagccacggtcgccctccctattcctcttagcccgaggaggggggtcccaagttacatggccacgcagatggggcctctccctcatttctgaaccttgtggggaggggaaccttgaagggagcgccccccagagccatggcttagggcctcccccacccctctggagctccagtctgcaagagtcaggagccgaaatatcgctgactgtgggtgacgactcttgcgcgcacacacacatacaagcgggcacgacgcgttcggtcctattaaaaggcacgcaagggtgcggctgcacgcggtgacacggacccctctaacgtttccaaactgagctccctgcaggtccccgacagcacaggcccctgtcccaggacccctccaggcacgcgctcacacgcacacgcgcgctccccggctcacgcgcgctccgacacacacgctcacgcgaacgcaggcgcacgctctggcgcgggaggcgccccttcgcctccgtgttgggaagcgggggcggcgggaggggcaggagacgttggccccgctcgcgtttctgcagctgctgcagtcgccgcagcgtccggaccggaaccagcgccgtccgcggagccgccgccgccgccgccgggccctttccaagccgggcgctcggagctgtgcccggccccgcttcagcaccgcggacagcgccggccgcgtggggctgagccgagcccccgcgcacgcttcagcgccccttccctcggccgacgtcccgggaccgccgctccgggggagacgtggcgtccgcagcccgcggggccgggcgagcgcaggacggcccggaagccccgcgggggatgcgccgagggccccgcgttcgcgccgcgcagagccaggcccgcggcccgagcccatgagcaccatgcgcctgctgacgctcgccctgctgttctcctgctccgtcgcccgtgccgcgtgcgaccccaagatcgtcaacattggcgcggtgctgagcacgcggaagcacgagcagatgttccgcgaggccgtgaaccaggccaacaagcggcacggctcctggaagattcagctcaatgccacctccgtcacgcacaagcccaacgccatccagatggctctgtcggtgtgcgaggacctcatctccagccaggtctacgccatcctagttagccatccacctacccccaacgaccacttcactcccacccctgtctcctacacagccggcttctaccgcatacccgtgctggggctgaccacccgcatgtccatctactcggacaagagcatccacctgagcttcctgcgcaccgtgccgccctactcccaccagtccagcgtgtggtttgagatgatgcgtgtctacagctggaaccacatcatcctgctggtcagcgacgaccacgagggccgggcggctcagaaacgcctggagacgctgctggaggagcgtgagtccaaggcagagaaggtgctgcagtttgacccagggaccaagaacgtgacggccctgctgatggaggcgaaagagctggaggcccgggtcatcatcctttctgccagcgaggacgatgctgccactgtataccgcgcagccgcgatgctgaacatgacgggctccgggtacgtgtggctggtcggcgagcgcgagatctcggggaacgccctgcgctacgccccagacggcatcctcgggctgcagctcatcaacggcaagaacgagtcggcccacatcagcgacgccgtgggcgtggtggcccaggccgtgcacgagctcctcgagaaggagaacatcaccgacccgccgcggggctgcgtgggcaacaccaacatctggaagaccgggccgctcttcaagagagtgctgatgtcttccaagtatgcggatggggtgactggtcgcgtggagttcaatgaggatggggaccggaagttcgccaactacagcatcatgaacctgcagaaccgcaagctggtgcaagtgggcatctacaatggcacccacgtcatccctaatgacaggaagatcatctggccaggcggagagacagagaagcctcgagggtaccagatgtccaccagactgaagattgtgacgatccaccaggagcccttcgtgtacgtcaagcccacgctgagtgatgggacatgcaaggaggagttcacagtcaacggcgacccagtcaagaaggtgatctgcaccgggcccaacgacacgtcgccgggcagcccccgccacacggtgcctcagtgttgctacggcttttgcatcgacctgctcatcaagctggcacggaccatgaacttcacctacgaggtgcacctggtggcagatggcaagttcggcacacaggagcgggtgaacaacagcaacaagaaggagtggaatgggatgatgggcgagctgctcagcgggcaggcagacatgatcgtggcgccgctaaccataaacaacgagcgcgcgcagtacatcgagttttccaagcccttcaagtaccagggcctgactattctggtcaagaaggagattccccggagcacgctggactcgttcatgcagccgttccagagcacactgtggctgctggtggggctgtcggtgcacgtggtggccgtgatgctgtacctgctggaccgcttcagccccttcggccggttcaaggtgaacagcgaggaggaggaggaggacgcactgaccctgtcctcggccatgtggttctcctggggcgtcctgctcaactccggcatcggggaaggcgcccccagaagcttctcagcgcgcatcctgggcatggtgtgggccggctttgccatgatcatcgtggcctcctacaccgccaacctggcggccttcctggtgctggaccggccggaggagcgcatcacgggcatcaacgaccctcggctgaggaacccctcggacaagtttatctacgccacggtgaagcagagctccgtggatatctacttccggcgccaggtggagctgagcaccatgtaccggcatatggagaagcacaactacgagagtgcggcggaggccatccaggccgtgagagacaacaagctgcatgccttcatctgggactcggcggtgctggagttcgaggcctcgcagaagtgcgacctggtgacgactggagagctgtttttccgctcgggcttcggcataggcatgcgcaaagacagcccctggaagcagaacgtctccctgtccatcctcaagtcccacgagaatggcttcatggaagacctggacaagacgtgggttcggtatcaggaatgtgactcgcgcagcaacgcccctgcgacccttacttttgagaacatggccggggtcttcatgctggtagctgggggcatcgtggccgggatcttcctgattttcatcgagattgcctacaagcggcacaaggatgctcgccggaagcagatgcagctggcctttgccgccgttaacgtgtggcggaagaacctgcaggatagaaagagtggtagagcagagcctgaccctaaaaagaaagccacatttagggctatcacctccaccctggcttccagcttcaagaggcgtaggtcctccaaagacacgagcaccgggggtggacgcggcgctttgcaaaaccaaaaagacacagtgctgccgcgacgcgctattgagagggaggagggccagctgcagctgtgttcccgtcatagggagagctgagactccccgcccgccctcctctgccccctcccccgcagacagacagacagacggatgggacagcggcccggcccacgcagagccccggagcaccacggggtcgggggaggagcacccccagcctcccccaggctgcgcctgcccgcccgccggttggccggctggccggtccaccccgtcccggccccgcgcgtgcccccagcgtggggctaacgggcgccttgtctgtgtatttctattttgcagcagtaccatcccactgatatcacgggcccgctcaacctctcagatccctcggtcagcaccgtggtgtgaggcccccggaggcgcccacctgcccagttagcccggccaaggacactgatgggtcctgctgctcgggaaggcctgagggaagcccacccgccccagagactgcccaccctgggcctcccgtccgtccgcccgcccaccccgctgcctggcgggcagcccctgctggaccaaggtgcggaccggagcggctgaggacggggcagagctgagtcggctgggcagggcgcagggcgctccggcagaggcagggccctggggtctctgagcagtggggagcgggggctaactggccccaggcggaggggcttggagcagagacggcagccccatccttcccgcagcaccagcctgagccacagtggggcccatggccccagctggctgggtcgcccctcctcgggcgcctgcgctcctctgcagcctgagctccaccctcccctcttcttgcggcaccgcccacccacaccccgtctgccccttgaccccacacgccggggctggccctgccctcccccacggccgtccctgacttcccagctggcagcgcctcccgccgcctcgggccgcctcctccagactcgagagggctgagcccctcctctcctcgtccggcctgcagcccagaacgggcctccccgggggtccccggacgctggctcgggactgtcttcaaccctgccctgcaccttgggcacgggagagcgccacccgcccgcccccgccctcgctccgggtgcgtgaccggcccgccaccttgtacagaaccagcactcccagggcccgagcgcgtgccttccccgtgcggcccgtgcgcagccgcgctctgcccctccgtccccagggtgcaggcgcgcaccgcccaacccccacctcccggtgtatgcagtggtgatgcctaaaggaatgtcacgc

SEQ ID NO: 2833 - protein, 938 aa, Homo sapiens
  ref <308>: DATABASE ACCESSION NUMBER: SWISS-Prot / Q05586
  ref <309>: DATABASE ENTRY DATE: 2002-06-15
MSTMRLLTLALLFSCSVARAACDPKIVNIGAVLSTRKHEQMFREAVNQANKRHGSWKIQLNATSVTHKPNAIQMALSVCEDLISSQVYAILVSHPPTPNDHFTPTPVSYTAGFYRIPVLGLTTRMSIYSDKSIHLSFLRTVPPYSHQSSVWFEMMRVYSWNHIILLVSDDHEGRAAQKRLETLLEERESKAEKVLQFDPGTKNVTALLMEAKELEARVIILSASEDDAATVYRAAAMLNMTGSGYVWLVGEREISGNALRYAPDGILGLQLINGKNESAHISDAVGVVAQAVHELLEKENITDPPRGCVGNTNIWKTGPLFKRVLMSSKYADGVTGRVEFNEDGDRKFANYSIMNLQNRKLVQVGIYNGTHVIPNDRKIIWPGGETEKPRGYQMSTRLKIVTIHQEPFVYVKPTLSDGTCKEEFTVNGDPVKKVICTGPNDTSPGSPRHTVPQCCYGFCIDLLIKLARTMNFTYEVHLVADGKFGTQERVNNSNKKEWNGMMGELLSGQADMIVAPLTINNERAQYIEFSKPFKYQGLTILVKKEIPRSTLDSFMQPFQSTLWLLVGLSVHVVAVMLYLLDRFSPFGRFKVNSEEEEEDALTLSSAMWFSWGVLLNSGIGEGAPRSFSARILGMVWAGFAMIIVASYTANLAAFLVLDRPEERITGINDPRLRNPSDKFIYATVKQSSVDIYFRRQVELSTMYRHMEKHNYESAAEAIQAVRDNKLHAFIWDSAVLEFEASQKCDLVTTGELFFRSGFGIGMRKDSPWKQNVSLSILKSHENGFMEDLDKTWVRYQECDSRSNAPATLTFENMAGVFMLVAGGIVAGIFLIFIEIAYKRHKDARRKQMQLAFAAVNVWRKNLQDRKSGRAEPDPKKKATFRAITSTLASSFKRRRSSKDTSTGGGRGALQNQKDTVLPRRAIEREEGQLQLCSRHRES

SEQ ID NO: 2834 - DNA, 1651 bp, Rattus norvegicus
  ref <308>: DATABASE ACCESSION NUMBER: EMBL / L08490
  ref <309>: DATABASE ENTRY DATE: 2002-02-08
ctcccgggtctggagcgatccggtgcccagaggggccccgagctggacaagcccgtgatgaagaaaagtcggggtctctctgactatctttgggcctggaccctcattctgagcactctctcgggaagaagctatggacagccctcccaagatgaacttaaggacaacaccactgtcttcacgaggattttggaccgactgctggatggttatgacaatcgtctgagaccaggcttgggagagcgtgtaactgaagtgaagacggacatctttgtcaccagtttcggacccgtgtcagaccacgatatggaatatacaatagatgtgtttttccgccaaagctggaaggatgaaagattaaaattcaaaggacccatgacagtgctccggctgaacaacctgatggccagtaaaatctggactccagatacatttttccacaatggaaaaaagtctgtggcccacaacatgaccatgcccaataaactcctgcgtatcacagaggatggcacactgctgtacaccatgaggttgactgtgagagccgaatgccccatgcacttagaagactttcccatggatgcccatgcctgcccactaaaatttgggagctatgcttatacaagagcagaagttgtctatgagtggacaagggagccagcccgctcagtggttgtggcagaagatgggtcacgtttaaaccagtatgaccttcttgggcaaacagttgactctggaattgttcagtccagtactggagaatatgtggttatgacgactcactttcacttgaagagaaaaatcggctactttgttattcaaacatatctgccatgcataatgacagtcattctctcccaagtctccttctggcttaacagagagtcagtaccagcaagaactgtctttggagtgacgaccgttctgaccatgacaaccttgagtatcagtgccagaaattccctcccaaaggtggcttatgcaacggccatggactggtttattgcagtgtgctatgccttcgtgttctcggctctgattgagtttgccacagtaaactatttcaccaagagagggtatgcgtgggatggcaaaagcgtggttccagaaaagccaaagaaagtgaaggatcctctcattaagaaaaacaacacatatgctcctacagcaaccagctatacccctaacttagccaggggtgaccccggcttggccactattgctaaaagtgcgaccatagaaccgaaagaagtcaagcctgagacaaaaccgccagaacccaagaaaacctttaacagcgtcagcaaaatcgaccgactgtcaagaatagcctttccgctgctatttggaatctttaacttagtctattgggccacgtatttaaacagagagcctcagctaaaagcccccacaccccatcaataggttcttttagtcgtattctgttgttcagtcctctgcactgagaatcgctttctgttctcaacgcagtgattcctgtctgccttactgcctctgtcttaaaagaattcgaaggtttccttatttccatatttcatatcgaacaagagacccctgtctgacagttcagagcagggcagagtattcagctcggggacaggattctgagaggaagccagagagcaaaatc

SEQ ID NO: 2835 - protein, 455 aa, Rattus norvegicus
  ref <308>: DATABASE ACCESSION NUMBER: SWISS-Prot / AAC42029
  ref <309>: DATABASE ENTRY DATE: 2002-06-15
MKKSRGLSDYLWAWTLILSTLSGRSYGQPSQDELKDNTTVFTRILDRLLDGYDNRLRPGLGERVTEVKTDIFVTSFGPVSDHDMEYTIDVFFRQSWKDERLKFKGPMTVLRLNNLMASKIWTPDTFFHNGKKSVAHNMTMPNKLLRITEDGTLLYTMRLTVRAECPMHLEDFPMDAHACPLKFGSYAYTRAEVVYEWTREPARSVVVAEDGSRLNQYDLLGQTVDSGIVQSSTGEYVVMTTHFHLKRKIGYFVIQTYLPCIMTVILSQVSFWLNRESVPARTVFGVTTVLTMTTLSISARNSLPKVAYATAMDWFIAVCYAFVFSALIEFATVNYFTKRGYAWDGKSVVPEKPKKVKDPLIKKNNTYAPTATSYTPNLARGDPGLATIAKSATIEPKEVKPETKPPEPKKTFNSVSKIDRLSRIAFPLLFGIFNLVYWATYLNREPQLKAPTPHQ

SEQ ID NO: 2836 - DNA, 1843 bp, Homo sapiens
  ref <308>: DATABASE ACCESSION NUMBER: Refseq / NM_000806
  ref <309>: DATABASE ENTRY DATE: 2000-10-31
gcacaattcagaggtaacagcgcctgcgttttctccatgataacatagacaaacagttgcctccaaagctgcagattggatattgggaagcaaatttgggtgtgaaatcttcagcaaaggagcacgcagagtccatgatggctcagaccaagtgagtgagaggcagagcgaggacgcccctctgctctggcgcgcccggactcggactcgcagactcgcgctggctccagtctctccacgattctctctcccagacttttccccggtcttaagagatcctgtgtccagagggggccttagctgctccagcccgcgatgaggaaaagtccaggtctgtctgactgtctttgggcctggatcctccttctgagcacactgactggaagaagctatggacagccgtcattacaagatgaacttaaagacaataccactgtcttcaccaggattttggacagactcctagatggctatgacaatcgcctgagaccaggattgggagagcgtgtaaccgaagtgaagactgatatcttcgtcaccagtttcggacccgtttcagaccatgatatggaatatacaatagatgtatttttccgtcaaagctggaaggatgaaaggttaaaatttaaaggacctatgacagtcctccggttaaataacctaatggcaagtaaaatccggactccggacacatttttccacaatggaaagaagtcagtggcccacaacatgaccatgcccaacaaactcctgcggatcacagaggatggcaccttgctgtacaccatgaggctgacagtgagagctgaatgtccgatgcatttggaggacttccctatggatgcccatgcttgcccactaaaatttggaagttatgcttatacaagagcagaagttgtttatgaatggaccagagagccagcacgctcagtggttgtagcagaagatggatcacgtctaaaccagtatgaccttcttggacaaacagtagactctggaattgtccagtcaagtacaggagaatatgttgttatgaccactcatttccacttgaagagaaagattggctactttgttattcaaacatacctgccatgcataatgacagtgattctctcacaagtctccttctggctcaacagagagtctgtaccagcaagaactgtctttggagtaacaactgtgctcaccatgacaacattgagcatcagtgccagaaactccctccctaaggtggcttatgcaacagctatggattggtttattgccgtgtgctatgcctttgtgttctcagctctgattgagtttgccacagtaaactatttcactaagagaggttatgcatgggatggcaaaagtgtggttccagaaaagccaaagaaagtaaaggatcctcttattaagaaaaacaacacttacgctccaacagcaaccagctacacccctaatttggccaggggcgacccgggcttagccaccattgctaaaagtgcaaccatagaacctaaagaggtcaagcccgaaacaaaaccaccagaacccaagaaaacctttaacagtgtcagcaaaattgaccgactgtcaagaatagccttcccgctgctatttggaatctttaacttagtctactgggctacgtatttaaacagagagcctcagctaaaagcccccacaccacatcaatagatcttttactcacattctgttgttcagttcctctgcactgggaatttatttatgttctcaacgcagtaattcccatctgcctttattgcctctgtcttaaagaatttgaaagtttccttattttcataattcatttaagacaagagacccctgtctg

SEQ ID NO: 2837 - protein, 456 aa, Homo sapiens
  ref <308>: DATABASE ACCESSION NUMBER: SWISS-Prot / P14867
  ref <309>: DATABASE ENTRY DATE: 2002-06-15
MRKSPGLSDCLWAWILLLSTLTGRSYGQPSLQDELKDNTTVFTRILDRLLDGYDNRLRPGLGERVTEVKTDIFVTSFGPVSDHDMEYTIDVFFRQSWKDERLKFKGPMTVLRLNNLMASKIRTPDTFFHNGKKSVAHNMTMPNKLLRITEDGTLLYTMRLTVRAECPMHLEDFPMDAHACPLKFGSYAYTRAEVVYEWTREPARSVVVAEDGSRLNQYDLLGQTVDSGIVQSSTGEYVVMTTHFHLKRKIGYFVIQTYLPCIMTVILSQVSFWLNRESVPARTVFGVTTVLTMTTLSISARNSLPKVAYATAMDWFIAVCYAFVFSALIEFATVNYFTKRGYAWDGKSVVPEKPKKVKDPLIKKNNTYAPTATSYTPNLARGDPGLATIAKSATIEPKEVKPETKPPEPKKTFNSVSKIDRLSRIAFPLLFGIFNLVYWATYLNREPQLKAPTPHQ

SEQ ID NO: 2838 - DNA, 2559 bp, Rattus norvegicus
  ref <308>: DATABASE ACCESSION NUMBER: EMBL / L08595
  ref <309>: DATABASE ENTRY DATE: 2000-03-04
tggatccccaaattgctttttaaaaaatatcttggaaactttgtcctttgctgaattacgacactgtccacctttaatttcctcgaaaactccaatcactcggctgaagccatgccttgtgttcaggcgcagtatgggtcctcgcctcaaggagccagccccgcttctcagagctacagttaccactcttcgggagaatacagctccgatttcttaactccagagtttgtcaagtttagcatggacctcaccaacactgaaattactgccaccacttctctccccagcttcagtacctttatggacaactacagcacaggctacgacgtcaagccaccttgcttgtaccaaatgcccctgtccggacagcagtcctccattaaggtagaagacattcagatgcacaactaccagcaacacagccacctgccccctcagtccgaggagatgatgccacacagcgggtcggtttactacaagccctcttcgcccccgacacccagcaccccgggcttccaggtgcagcatagcccgatgtgggacgatccgggctcccttcacaacttccaccagaactacgtggccactacgcatatgatcgagcagaggaagacacctgtctcccgcctttcactcttctcctttaagcagtccgccccgggcactcctgtgtctagctgccagatgcgctttgacgggcctctgcacgtccccatgaacccggagcccgcgggcagccaccacgtagtggatgggcagaccttcgccgtgcccaatcccattcgcaagccggcatccatgggcttcccgggcctgcagatcggccacgcgtcgcagttgcttgacacgcaggtgcccccgtcgccgtcccggggctctccctccaatgagggtctgtgcgctgtttgcggtgacaacgcggcctgtcagcattacggtgttcgcacttgtgagggctgcaaaggtttctttaagcgcacggtgcaaaaaaacgcgaaatatgtgtgtttagcaaataaaaattgcccagtggataagcgccgccgaaatcgttgtcagtactgtcggtttcagaagtgcctggctgttgggatggttaaagaagtggttcgcacggacagtttaaaaggccggagaggtcgtctaccctcaaaaccgaagagcccacaggatccctctcccccctcacctccgggatctgatcagtgccctcgtcagacccacgtcgactccaatccggcaatgaccagcctggactattccaggttccaggcaaaccctgactatcagatgagtggagatgatactcaacatatccagcagttctacgatctcctgactggctctatggagatcatcagagggtgggcagagaagattcctggctttgctgacctgcccaaagccagtcaggacctgctttttgaatcagctttcttagaattatttgttctacgcttagcatacaggtccaacccagtggagggtaaactcatcttttgcaatggggtggtcctgcacaggttgcaatgcgtgcgtggctttggggaatggattgattccattgttgaattctcctccaacttgcagaatatgaacatcgacatttctgccttctcctgcattgctgccctggctatggtcacagagagacacgggctcaaggaacccaagagagtggaagagctacaaaacaaaattgtaaattgtcttaaagaccatgtgactttcaataatgggggattgaaccgacccaactacctgtccaaactgttggggaagctcccagaacttcgcaccctttgcacacaggggctccagcgcattttctacctgaaattggaagacttggtaccaccaccagcaataattgacaaacttttcctggacaccttacctttctaagactttctcccatgcacgtcaaagaactggaaagaaaaaaaaaatccagagggggctggtcaagatgggtagagagctggctgaagtgtccggttcatgtctcccttctgtagacccctagccctcacccctaaagtaaacaaacaaacaagcaaacaaacaaacacaaattaaaaactgttgctatttcctaacctgcaggcagaacgtgaaagggcattttggctccggggcatcctggatttagaaaacggacaacatacacagtacagtggtataaacttttttattatcagttcaaaatcagtttattgttcagaaggaagattgcaaatgtatgatgggaaatgtttggccatgcttgcttgttgcagttaagacaaatgtaaggcaaatgtaacacacacacacacacacacacacacacacacacacacctcttaatgggaccctcatattttgccctttaacaagacttcaaagttttctgctgtaaagaaagctgtaatatatagtaaaactaaatgttgcgtgggtggcatgaattgaaggcagaggcttgtaaattttatccaatgcagtttggctttttaaattattttgtgcctatttatgaataaatattacaaattctaaaaagtaagtgtgtttgca

SEQ ID NO: 2839 - protein, 598 aa, Rattus norvegicus
  ref <308>: DATABASE ACCESSION NUMBER: SWISS-Prot / Q07917
  ref <309>: DATABASE ENTRY DATE: 1999-07-15
MPCVQAQYGSSPQGASPASQSYSYHSSGEYSSDFLTPEFVKFSMDLTNTEITATTSLPSFSTFMDNYSTGYDVKPPCLYQMPLSGQQSSIKVEDIQMHNYQQHSHLPPQSEEMMPHSGSVYYKPSSPPTPSTPGFQVQHSPMWDDPGSLHNFHQNYVATTHMIEQRKTPVSRLSLFSFKQSRPGTPVSSCQMRFDGPLHVPMNPEPAGSHHVVDGQTFAVPNPIRKPASMGFPGLQIGHASQLLDTQVPSPPSRGSPSNEGLCAVCGDNAACQHYGVRTCEGCKGFFKRTVQKNAKYVCLANKNCPVDKRRRNRCQYCRFQKCLAVGMVKEVVRTDSLKGRRGRLPSKPKSPQDPSPPSPPVSLISALVRAHVDSNPAMTSLDYSRFQANPDYQMSGDDTQHIQQFYDLLTGSMEIIRGWAEKIPGFADLPKADQDLLFESAFLELFVLRLAYRSNPVEGKLIFCNGVVLHRLQCVRGFGEWIDSIVEFSSNLQNMNIDISAFSCIAALAMVTERHGLKEPKRVEELQNKIVNCLKDHVTFNNGGLNRPNYLSKLLGKLPELRTLCTQGLQRIFYLKLEDLVPPPAIIDKLFLDTLPF

SEQ ID NO: 2840 - DNA, 3427 bp, Homo sapiens
  ref <308>: DATABASE ACCESSION NUMBER: EMBL / X75918
  ref <309>: DATABASE ENTRY DATE: 1995-01-06
gctcgcgcacggctccgcggtcccttttgcctgtccagccggccgcctgtccctgctccctccctccgtgagtgtccgggttcccttcgcccagctctcccacccctacccgaccccggcgcccgggctcccagagggaactgcacttcggcagagttgaatgaatgaagagagacgcggagaactcctaaggaggagattggacaggctggactccccattgcttttctaaaaatcttggaaactttgtccttcattgaattacgacactgtccacctttaatttcctcgaaaacgcctgtaactcggctgaagccatgccttgtgttcaggcgcagtatgggtcctcgcctcaaggagccagccccgcttctcagagctacagttaccactcttcgggagaatacagctccgatttcttaactccagagtttgtcaagtttagcatggacctcaccaacactgaaatcactgccaccacttctctccccagcttcagtacctttatggacaactacagcacaggctacgacgtcaagccaccttgcttgtaccaaatgcccctgtccggacagcagtcctccattaaggtagaagacattcagatgcacaactaccagcaacacagccacctgcccccccagtctgaggagatgatgccgcactccgggtcggtttactacaagccctcctcgcccccgacgcccaccaccccgggcttccaggtgcagcacagccccatgtgggacgacccgggatctctccacaacttccaccagaactacgtggccactacgcacatgatcgagcagaggaaaacgccagtctcccgcctctccctcttctcctttaagcaatcgccccctggcaccccggtgtctagttgccagatgcgcttcgacgggcccctgcacgtccccatgaacccggagcccgccggcagccaccacgtggtggacgggcagaccttcgctgtgcccaaccccattcgcaagcccgcgtccatgggcttcccgggcctgcagatcggccacgcgtctcagctgctcgacacgcaggtgccctcaccgccgtcgcggggctccccctccaacgaggggctgtgcgctgtgtgtggggacaacgcggcctgccaacactacggcgtgcgcacctgtgagggctgcaaaggcttctttaagcgcacagtgcaaaaaaatgcaaaatacgtgtgtttagcaaataaaaactgcccagtggacaagcgtcgccggaatcgctgtcagtactgccgatttcagaagtgcctggctgttgggatggtcaaagaagtggttcgcacagacagtttaaaaggccggagaggtcgtttgccctcgaaaccgaagagcccacaggagccctctcccccttcgcccccggtgagtctgatcagtgccctcgtcagggcccatgtcgactccaacccggctatgaccagcctggactattccaggttccaggcgaaccctgactatcaaatgagtggagatgacacccagcatatccagcaattctatgatctcctgactggctccatggagatcatccggggctgggcagagaagatccctggcttcgcagacctgcccaaagccgaccaagacctgctttttgaatcagctttcttagaactgtttgtccttcgattagcatacaggtccaacccagtggagggtaaactcatcttttgcaatggggtggtcttgcacaggttgcaatgcgttcgtggctttggggaatggattgattccattgttgaattctcctccaacttgcagaatatgaacatcgacatttctgccttctcctgcattgctgccctggctatggtcacagagagacacgggctcaaggaacccaagagagtggaagaactgcaaaacaagattgtaaattgtctcaaagaccacgtgactttcaacaatggggggttgaaccgccccaattatttgtccaaactgttggggaagctcccagaacttcgtaccctttgcacacaggggctacagcgcattttctacctgaaattggaagacttggtgccaccgccagcaataattgacaaacttttcctggacactttacctttctaagacctcctcccaagcacttcaaaggaactggaatgataatggaaactgtcaagagggggcaagtcacatgggcagagatagccgtgtgagcagtctcagctcaagctgccccccatttctgtaaccctcctagcccccttgatccctaaagaaaacaaacaaacaaacaaaaactgttgctatttcctaacctgcaggcagaacctgaaagggcattttggctccggggcatcctggatttagaacatggactacacacaatacagtggtataaactttttattctcagtttaaaaatcagtttgttgttcagaagaaagattgctataaggtataatgggaaatgtttggccatgcttggttgttgcagttcagacaaatgtaacacacacacacatacacacacacacacacacagagacacatcttaaggggacccacaagtattgccctttaacaagacttcaaagttttctgctgtaaagaaagctgtaatatatagtaaaactaaatgttgcgtgggtggcatgagttgaagaaggcaaaggcttgtaaatttacccaatgcagtttggctttttaaattattttgtgcctatttatgaataaatattacaaattctaaaagataagtgtgtttgcaaaaaaaaagaaaataaatacataaaaaagggacaagcatgttgattctaggttgaaaatgttataggcacttgctacttcagtaatgtctatattatataaatagtatttcagacactatgtagtctgttagattttataaagattggtagttatctgagcttaaacattttctcaattgtaaaataggtgggcacaagtattacacatcagaaaatcctgacaaaagggacacatagtgtttgtaacaccgtccaacattccttgtttgtaagtgttgtatgtaccgttgatgttgataaaaagaaagtttatatcttgattattttgttgtctaaagctaaacaaaacttgcatgcagcagcttttgactgtttccagagtgcttataatatacataactccctggaaataactgagcactttgaattttttttatgtctaaaattgtcagttaatttattattttgtttgagtaagaattttaatattgccatattctgtagtatttttctttgtatatttctagtatggcacatgatatgagtcactgcctttttttctatggtgtatgacagttagagatgctgattttttttctgataaattctttctttgagaaagacaattttaatgtttacaacaataaaccatgtaaatgaaaaaaaaaa

SEQ ID NO: 2841 - protein, 598 aa, Homo sapiens
  ref <308>: DATABASE ACCESSION NUMBER: SWISS-Prot / P43354
  ref <309>: DATABASE ENTRY DATE: 2001-10-16
MPCVQAQYGSSPQGASPASQSYSYHSSGEYSSDFLTPEFVKFSMDLTNTEITATTSLPSFSTFMDNYSTGYDVKPPCLYQMPLSGQQSSIKVEDIQMHNYQQHSHLPPQSEEMMPHSGSVYYKPSSPPTPTTPGFQVQHSPMWDDPGSLHNFHQNYVATTHMIEQRKTPVSRLSLFSFKQSPPGTPVSSCQMRFDGPLHVPMNPEPAGSHHVVDGQTFAVPNPIRKPASMGFPGLQIGHASQLLDTQVPSPPSRGSPSNEGLCAVCGDNAACQHYGVRTCEGCKGFFKRTVQKNAKYVCLANKNCPVDKRRRNRCQYCRFQKCLAVGMVKEVVRTDSLKGRRGRLPSKPKSPQEPSPPSPPVSLISALVRAHVDSNPAMTSLDYSRFQANPDYQMSGDDTQHIQQFYDLLTGSMEIIRGWAEKIPGFADLPKADQDLLFESAFLELFVLRLAYRSNPVEGKLIFCNGVVLHRLQCVRGFGEWIDSIVEFSSNLQNMNIDISAFSCIAALAMVTERHGLKEPKRVEELQNKIVNCLKDHVTFNNGGLNRPNYLSKLLGKLPELRTLCTQGLQRIFYLKLEDLVPPPAIIDKLFLDTLPF

SEQ ID NO: 2842 - DNA, 1792 bp, Rattus norvegicus
  ref <308>: DATABASE ACCESSION NUMBER: EMBL / L09653
  ref <309>: DATABASE ENTRY DATE: 2000-03-04
cccgaggctcgttcgcggcgccccaggggccggtctatgacgagcgacgggggctgccatgggtcgggggctgctccggggcctgtggccgctgcacatcgtcctgtggacgcgcatcgccagcacgatcccgccgcacgttcccaagtcggttaacagcgatctgatggcgggtgacaacagcggtgcggtcaagcttccacagctgtgcaagttttgcgacgtgacactgtccacttgtgacaaccagaagtcttgcatgagcaactgcagcgtcacctccatctgtgagaagccgcaggaagtctgcgtggccgtgtggaggaagaacgacaagaacattactctggagaccgtttgccacgaccccaagttcacctaccacggcttcactctggaagatgccacttctcccacgtgcgtcatgaaggaaaagaaaagggcgggcgagaccttcttcatgtgctcctgtaacacagaggagtgtaacgattacatcatctttaatgaagaatacaccaccagcagtcctgacctgttgctggtcattatccaagtgacgggcgtcagcctcctgcctccgctggggattgccatagctgtcattgccatcttctactgttaccgtgtccaccggcagcagaagttgagcccctcctgggagagcagcaagccccggaagctcatggatttcagcgacaactgcgccatcatcctggaggacgaccgctctgacatcagctctacgtgcgccaacaacatcaaccacaatacggaactgctgcccatcgagctggacacgctggtggggaagggccgcttcgccgaggtctacaaggccaagctgaagcagaacacttcagagcagtttgagaccgtggctgtcaagatcttcccctacgaggaatactcctcgtggaaaacggagaaggacatcttctctgacatcaacctgaaacacgagaacatcctgcagttcctgacggccgaggagcggaagacggagatgggcaagcagtactggctgatcacggcgtttcatgctaagggcaacctgcaggagtacctcactaggcacgtcatcagctgggaggacctgcggaagctgggcagctccctggcccggggcatcgcccatctgcacagtgaccacactccttgtgggaggcccaagatgcccattgttcacagggacctcaagagctctaacatcctagtgaagaacgatttgacctgttgcctgtgtgacttcgggctgtccttgcgcctggaccctactctgtctgtggatgacctggccaacagcgggcaggtgggaacagcgagatacatggccccggaagttctagaatccaggatgaatttggagaacatggagtccttcaagcagacggatgtctactccatggctctggtactctgggaaatgacgtctcgctgcaacgctgtgggagaagtgaaagattatgagcccccatttggttccaaggtgcgggagcacccctgtgtggagagcatgaaagacaacgtgctgagagaccgaggacggcctgaaatccccagcttctggctcaaccaccagggcatccagatcgtgtgtgagacactgaccgagtgctgggaccacgaccccgaggcccgtctcacagcccagtgtgtggcagagcgcttcagtgaactggagcacccagatagactctccgggaggagctgctcccaggagaagattccagaagacggctccctgaacactaccaaatagctttttctgggcaggctgggccaagactcc

SEQ ID NO: 2843 - protein, 567 aa, Rattus norvegicus
  ref <308>: DATABASE ACCESSION NUMBER: SWISS-Prot / P38438
  ref <309>: DATABASE ENTRY DATE: 2002-06-15
MGRGLLRGLWPLHIVLWTRIASTIPPHVPKSVNSDLMAGDNSGAVKLPQLCKFCDVTLSTCDNQKSCMSNCSVTSICEKPQEVCVAVWRKNDKNITLETVCHDPKFTYHGFTLEDATSPTCVMKEKKRAGETFFMCSCNTEECNDYIIFNEEYTTSSPDLLLVIIQVTGVSLLPPLGIAIAVIAIFYCYRVHRQQKLSPSWESSKPRKLMDFSDNCAIILEDDRSDISSTCANNINHNTELLPIELDTLVGKGRFAEVYKAKLKQNTSEQFETVAVKIFPYEEYSSWKTEKDIFSDINLKHENILQFLTAEERKTEMGKQYWLITAFHAKGNLQEYLTRHVISWEDLRKLGSSLARGIAHLHSDHTPCGRPKMPIVHRDLKSSNILVKNDLTCCLCDFGLSLRLDPTLSVDDLANSGQVGTARYMAPEVLESRMNLENMESFKQTDVYSMALVLWEMTSRCNAVGEVKDYEPPFGSKVREHPCVESMKDNVLRDRGRPEIPSFWLNHQGIQIVCETLTECWDHDPEARLTAQCVAERFSELEHPDRLSGRSCSQEKIPEDGSLNTTK

SEQ ID NO: 2844 - DNA, 2535 bp, Rattus norvegicus
  ref <308>: DATABASE ACCESSION NUMBER: EMBL / L09656
  ref <309>: DATABASE ENTRY DATE: 2000-03-04
cgcccggggagccacgggcggccaagcccgagagccgcccgagccgctcggactcaagcgctcgcgcgggcccgaggcagcccagccgccggcggcgcgtggggagggggaagcccgagcccgcgctcccgaccaaagtgaactttaatcgggaaggttggatgcggagcccgggcggcaggacctgctagaagtagctgaagatgaatccccagcagcagcgcatggccgcgatagggaccgacaaggagctgagcgacctgctggacttcagtgcgatgttttctccacctgttaatagtgggaaaacgagaccaacgacactgggaagtagtcagttcagcgggtcaggtatggatgagcgtggaggaacaacgtcttggggaacaagcggtcaaccaagcccctcctatgattcatctagaggttttacagacagccctcattacagtgatcacttgaatgacagtcgattaggaacccatgaaggcttgtccccaacacctttcatgaactcaaatctgatagggaaaacctcagagagaggctcattttccctgtacagcagagactctggattatcaggctgtcagtctagtctcctgagacaagatctaggactcgggagcccagcacagttgtcttcttcaggaaaacctggaacaccatactactcattctctgccacaagttctagaagaagaccgctccatgattctgtagctctagatcctttacaagcaaagaaagtaagaaaggtgcctcctggcctaccttcttctgtgtatgcaccatccccaaattctgacgatttcaaccgtgaatctcctagttacccatctcccaagccaccaaccagtatgttcgctagcactttctttatgcaagatggcactcacagttcttctgacctttggagttcatcgaatgggatgagccagcctggttttggtggaattctggggacctccacttcccacatgtctcagtccagtagttatggcagtcttcattcacatgaccgcttgagttatcctccacactcagtgtcaccaacagacataaacacaagtcttccgccaatgtccagcttccaccgtggtagtaccagcagctcaccatatgttgccgcctcacatactcctcccatcaatggatcagatagcatcctgggaacccgagggaatgctgctggaagctcacagaccggtgatgcacttgggaaggccttggcatctatttattctcctgaccacacaagcagtagttttccatcaaacccatcaacaccagtaggatctccttcacctctcacagcaggtaccagtcagtggcccagagctggagggcaagctccttcatccccaagctatgaaaactcacttcactccctgaaaaatcgagttgagcagcaacttcacgagcatttgcaagatgcaatgtccttcttaaaggatgtctgtgagcagtctcgaatggaagaccgtttagacaggctggatgatgctatccatgtgctacggaaccatgcagttggaccttctaccagtctgcctactagccacagtgatatacacagtttattgggaccatcccataatgcaccaattggaaacctcaattcaaactatggaggatcaagccttgttacaaatagtcgatcagcttcgatggtcggaactcatcgggaagattcggtcagtctcaatggcaatcattcggtcctgtctagtactgttgctgcctcaaacacagaactgaaccataaaacaccagaaagtttcagaggtggtgtacaaaatcagtctggaagtgttgttccaacagaaatcaagactgaaaacaaagaaaaagatgaaaaccttcatgaacctccttcatcagatgacatgaaatcagatgatgagtcctcccagaaagacatcaaagtctcatctagaggcagaacaagcagtaccaatgaagatgaggatctgaatccagaacagaaaatcgaaagggagaaggaaaggcggatggctaacaatgccagagagcgcttgcgtgtgcgggatatcaatgaggcattcaaggagctcggccgaatgtgtcagcttcatttgaagagtgagaaaccacagacaaaacttctcattcttcatcaagccgtggcagtcatccttagtctagaacagcaagtcagagagaggaacctcaaccccaaagcagcctgccttaagagaagagaagaagaaaaggtctctgctgcgtcagcagagccgcccaccacgttgccaggaacccatcctgggcttagtgagacaaccaaccctatgggtcatctgtaaacatcagccagttccagagtcatcagtaggctagatagaaggtgacctctcctcataaagatttggagaactcagattatctgaagacacaaacctggcaggagggagaagaaaaagcaaaacacttgaaacaagaaactcatatgtaatcctatgatcaaagcaactggtcaacacttccatcagaagtgaggataggaagctgcgg

SEQ ID NO: 2845 - protein, 707 aa, Rattus norvegicus
  ref <308>: DATABASE ACCESSION NUMBER: SWISS-Prot / P51514
  ref <309>: DATABASE ENTRY DATE: 2001-10-16
MNPQQQRMAAIGTDKELSDLLDFSAMFSPPVNSGKTRPTTLGSSQFSGSGMDERGGTTSWGTSGQPSPSYDSSRGFTDSPHYSDHLNDSRLGTHEGLSPTPFMNSNLIGKTSERGSFSLYSRDSGLSGCQSSLLRQDLGLGSPAQLSSSGKPGTPYYSFSATSSRRRPLHDSVALDPLQAKKVRKVPPGLPSSVYAPSPNSDDFNRESPSYPSPKPPTSMFASTFFMQDGTHSSSDLWSSSNGMSQPGFGGILGTSTSHMSQSSSYGSLHSHDRLSYPPHSVSPTDINTSLPPMSSFHRGSTSSSPYVAASHTPPINGSDSILGTRGNAAGSSQTGDALGKALASIYSPDHTSSSFPSNPSTPVGSPSPLTAGTSQWPRAGGQAPSSPSYENSLHSLKNRVEQQLHEHLQDAMSFLKDVCEQSRMEDRLDRLDDAIHVLRNHAVGPSTSLPTSHSDIHSLLGPSHNAPIGNLNSNYGGSSLVTNSRSASMVGTHREDSVSLNGNHSVLSSTVAASNTELNHKTPESFRGGVQNQSGSVVPTEIKTENKEKDENLHEPPSSDDMKSDDESSQKDIKVSSRGRTSSTNEDEDLNPEQKIEREKERRMANNARERLRVRDINEAFKELGRMCQLHLKSEKPQTKLLILHQAVAVILSLEQQVRERNLNPKAACLKRREEEKVSAASAEPPTTLPGTHPGLSETTNPMGHL

SEQ ID NO: 2846 - DNA, 4202 bp, Homo sapiens
  ref <308>: DATABASE ACCESSION NUMBER: Refseq / NM_003205
  ref <309>: DATABASE ENTRY DATE: 2000-10-31
taaagggaccgacagcccgccccgggaggaaggggcgccaggcccgaaagccgcctccccctcccagacccgagagctcgtgcggggcaaagtgaaccgagccgctgggcgtgcaaggggaagcccaagcccgttctcccggccaaagtgaactttaatcggggtggttggatgcggagacggggcggcaggacctgctagaagtggccgaagatgaatccccagcaacaacgcatggccgctatagggaccgacaaggagctgagcgacctactggacttcagtgcgatgttttccccacctgttaatagtgggaaaactagaccaactacactgggaagcagtcaattcagtggatcaggtattgatgaaagaggaggtacaacatcttggggaacaagtggtcaaccaagtccttcctatgattcatctagaggttttacagacagccctcattacagtgatcacttgaatgacagtcgattaggagcccatgaaggcttgtccccaacacctttcatgaactcaaatctgatgggaaaaacatcagagagaggctcattttccctgtacagcagagatactggattaccaggctgtcaatctagtctcctgagacaagatctggggcttgggagcccagcacagctatcttcttcaggaaaacctgggacagcatactattcattctctgctacaagttccaggaggagaccactccatgactctgcagcgcttgatcccttgcaagcaaaaaaagtcagaaaggtgcctcctggtttgccttcttctgtatatgcaccatccccaaattcagatgatttcaaccgtgaatctcctagttatccatctcctaagccaccaaccagtatgttcgctagcactttctttatgcaagatgggacccacaattcttctgacctttggagttcatcaaatgggatgagccagcctggttttggtggaattctggggacctccacttcccacatgtctcaatccagtagttatggcaaccttcattcacatgaccgcttgagttatcctccacactcagtttcaccaacagacataaacacgagtcttccaccaatgtccagctttcatcgcggcagtaccagcagttcaccttacgttgctgcctcacacactcctcccatcaatggatcagacagcattctaggaaccagagggaatgctgctggaagctcacagacaggtgatgcacttggaaaggctttggcatctatttattctcctgaccataccagcagtagttttccgtcaaatccatcaacaccagttggatcaccttcacctctcacaggtaccagtcagtggccaagacctggagggcaagcaccttcatccccaagctatgaaaactcactccactccctgcagtctcgaatggaggatcgtttagacagactggatgatgcaatccatgtgctgcggaaccatgctgtgggaccttccaccagtttgcctgctggtcacagtgatatacatagtttattgggaccatcccataatgcaccaattggaagcctcaattcaaactatggaggatcaagccttgttgcaagcagtcgatcagcttcaatggttggaactcatcgggaagactctgtcagtctcaatggcaatcattcagtcctgtctagtacagtcactacttcaagcacagacctgaaccataaaacacaagaaaattatagaggtggcttgcaaagtcagtctggaactgttgttacaacagaaatcaagactgaaaacaaagaaaaggatgaaaaccttcatgaacctccttcatcagatgacatgaagtcagatgatgaatcctcccaaaaagatatcaaggtttcatctagaggcagaacaagcagtactaatgaagatgaggatttgaaccctgaacagaagatagaaagggagaaggagaggcggatggctaacaatgccagagaacgcttacgcgtgcgggatattaatgaagcattcaaagagcttggccgaatgtgtcagcttcacttgaagagtgaaaaaccccaaacaaaactccttattcttcatcaagccgtggcagtcatccttagtctagaacagcaagtcagagagaggaaccttaaccccaaagcagcctgccttaagagaagggaagaagaaaaagtttctgccgtatcggcagagccgccaaccacactgccaggaacccatcctgggcttagtgaaactaccaaccctatgggtcatatgtaaacatcagccagttccagagttatcagtaggctagatagaaggtgacctctcctcataaggacttggacaactcagattatctgaagacacaaacctgacaggagggagaagaaaaaacaaaacacttgaaccaagaaactcaaatgtaatcctacgatcaaagcaactggtcaacacttccatcagaagtgaagataggaagctcatcagatagaacatcagcccatgagatgtttgcaacaaatcttttgttgcaagcagtgtgtcgcttctgcacaatcagagactgtctcgatctctccactcaccgtggaagttgccttgtgcctaaactgaattgacaaatgcattgtaactacaaattttatttattgttatgaaactgtaaggtctacatataaagggaaaaagttaatgtggaaagctgatctacactcagctgatgccagcatacattaaagcggttcacgtgcagagaacaaagcagtgacaaccattggcccttagcattcccggcatacctattagtgtcttaaaaaggaagggaaaagtcttttgttgccctctcctatcctcttgccatatgaatagcgttttccatgaaataggaaaatattacttggtatagcatttctcttgctctcattttttgatttatttttattttctctttgtgggtgttatatttgatctctaaatctgaacagtttatggtcacagtccagcctcctccgtgcagccctgtgtgctttgcacatttaccttacagtggtaagcagagaccatctgtgaccatagcctagctagcattttaaaaggggaaattttgttctctaggttttcccccaaataaacattgctttatttctaataataaccaagacttttcaagcttctagatctcataggaaagcttgtaatagcaaaattgtaaattacaagggaagaatctactttttagaaatcgctttgttttccaagcagtaagtactacatacagtacttgtaaagtgttagctgtaagtaagcacaaaatacatttaaaatacaaagacgattttttcaggctgtgattatggtgaacataacaaaacccagtagtcaccaaggcaggtagtgtgataaatgaacacaccactctgaggctaattacctaatggaatacaagagcaatggtcacccgtatttccttatcctagcctttatttctctgtcatttggatggctggtcaatggggaagaattgagtgggtgatttaatcaactgcaaaccatctgcccctgtcccaaaatgatgagccagattagcattaaaccagtacttgtcagtccatcttaatactgttcattaaggcactctctgtctctaatccttaggagttgttttaaaagacataatcactttgaacttccatgaaacctgtcttccaccacaacaaccctgggagagaaaaacatgctaaaggaggtatcttggcttaataattccttatagccaatatcaacagtggcaatcagcacacagaggaaaggacccaaatcactatgtagcttaaagatttctgttaatttgaaagaacaaaaacaagacagaacttctggtactctaatcaggatgattcctaacaagtcagtcatttgtgaacttagtggactttttggttactttaatttgcatatattctccagttacatcggactctatctgtggccttgttcttcatttcagtgttaatcagctaaacagaagttgttgcttatgatgtgtgagtgaacatatgccactgcctggcccttttttcttcagagcttgttgtctttttcgctatattagactttgcagtatgcccagaagctttccttcataaaatagaaagaaaaaaacatttggcttatttttcactgtagctagtcttttatacaataatcttgtaagaaaa

SEQ ID NO: 2847 - protein, 682 aa, Homo sapiens
  ref <308>: DATABASE ACCESSION NUMBER: SWISS-Prot / Q99081
  ref <309>: DATABASE ENTRY DATE: 2000-05-30
MNPQQQRMAAIGTDKELSDLLDFSAMFSPPVNSGKTRPTTLGSSQFSGSGIDERGGTTSWGTSGQPSPSYDSSRGFTDSPHYSDHLNDSRLGAHEGLSPTPFMNSNLMGKTSERGSFSLYSRDTGLPGCQSSLLRQDLGLGSPAQLSSSGKPGTAYYSFSATSSRRRPLHDSAALDPLQAKKVRKVPPGLPSSVYAPSPNSDDFNRESPSYPSPKPPTSMFASTFFMQDGTHNSSDLWSSSNGMSQPGFGGILGTSTSHMSQSSSYGNLHSHDRLSYPPHSVSPTDINTSLPPMSSFHRGSTSSSPYVAASHTPPINGSDSILGTRGNAAGSSQTGDALGKALASIYSPDHTSSSFPSNPSTPVGSPSPLTGTSQWPRPGGQAPSSPSYENSLHSLQSRMEDRLDRLDDAIHVLRNHAVGPSTSLPAGHSDIHSLLGPSHNAPIGSLNSNYGGSSLVASSRSASMVGTHREDSVSLNGNHSVLSSTVTTSSTDLNHKTQENYRGGLQSQSGTVVTTEIKTENKEKDENLHEPPSSDDMKSDDESSQKDIKVSSRGRTSSTNEDEDLNPEQKIEREKERRMANNARERLRVRDINEAFKELGRMCQLHLKSEKPQTKLLILHQAVAVILSLEQQVRERNLNPKAACLKRREEEKVSAVSAEPPTTLPGTHPGLSETTNPMGHM

SEQ ID NO: 2848 - DNA, 2240 bp, Rattus norvegicus
  ref <308>: DATABASE ACCESSION NUMBER: EMBL / L10073
  ref <309>: DATABASE ENTRY DATE: 2000-03-04
ggttcccagtgtgcaggcatcagtccccagttctgcaggcggttggttactctgaagaccacaaagagactgggagaggttgatgcgctggacaaagctagactaaggagtctcaactggaaaaaagggtctacgaaaacctcaaaaaagaagcgcctacagtttggaaaaagaacaaaggtggcgcggcttagacttctttttgtgttgctgggctcgcgcagtgcccctcctgcctcgccacctaaccacagttcatgcaatcacgggcacatctgccagagagcccgagtccctgaacaatggaagtctctaacctctcaggcgccacccctggcattgcctttcctccgggacccgagagctgcagtgacagcccaagttccggcagaagcatgggatccaccccaggggggctcatcttgtccggccgcgagccgcccttctctgccttcaccgtactcgtggtaactctactggtgttgctgatcgctgccactttcttatggaatctgctagttctggtgactatcctgcgcgtccgcgccttccaccgtgtgccacataacttggtagcctcgaccgccgtctcggacgtcctggtggcggctctggtgatgccactgagcctggtgagcgagttgtcggctgggcgacgttggcagctgggcaggagtctgtgccacgtgtggatctccttcgacgtgttgtgctgcacagccagcatctggaacgtggcggccatcgccctggatcgctactggactatcacgcgccacctgcagtacacgctgcgcacccggcgccgcgcttcagcacttatgatcgcgatcacctgggcactgtccgccctcatcgcgctcgccccgctgctctttggctggggcgaagcctacgatgctcggctgcagcgttgccaggtgagccaggagccttcgtacgccgtcttctccacctgcggagctttctacgtgcctctggccgtggtgctcttcgtctactggaagatatacaaagccgccaagtttcgattcggccgcagacggcgggcggtagtgcccctgcccgccaccacgcaggcaaaggaagcacctcaggagtctgagacggtattcaccgcgcgttgcagagcgacagtggccttccagacaagtggagactcctggcgggagcagaaggagaagcgagccgccatgatggtggggatcttgatcggtgtgtttgtgctgtgctggatccccttcttcctgacggagctcgtcagcccgctctgcgcctgcagcctgccacccatctggaaaagcatattcctgtggcttggctattcaaattcgttcttcaatcccttaatctacacggcctttaataagaactacaacaatgccttcaagagcctctttactaagcagagataagcagggctggggagataaaaaggaagaccggggaagagaaaggggatctgccgtcctcatttcaccagagacctgggggcttctccccgccgcccacacccccctaacgacactccagaaatcacaccgtagggcctggaatgttgagttctcacgaaggtagacaacggtttggcaaatacatccatgccttctacgcgtcgtgacagacattgctagtgaattgtgctacatttctgcaccaggcaggaaccccgccaaaccctttccgggtgtattttaggtattattgctcatttgtcagactccacatgtggcagagttgatttgcttttgcgttagtactatgtccctcagtgagggtctcttggggctctcctgagactgactccttgacatagcctctcctctaccccttatccatcagagcactttacctttcttagcctcacacaggacctccacaaggcaatgattctcagtttaggaagagatgtcctcgcctgaagctttgttaaaaagtgttccacacagacgtcgtcaagatggctcagtagagggggttggggatttagctcagtggtagagcccttgcctagggagcgcaaggccctgggttcggtccccagctccgaaaaaaagaaccaaaaaaaaaaaaaaaaaaaaaaaaagatggctcagtagatgaaggcgcctgtccccaagcctggtggcctgcttttgagatacatgtaatggaaggaaataaaatgattgcaagttgtctctgacctccagatatgtgccatcagccctctcccccatgtgcacagcggccgcgaattc

SEQ ID NO: 2849 - protein, 370 aa, Rattus norvegicus
  ref <308>: DATABASE ACCESSION NUMBER: SWISS-Prot / P35365
  ref <309>: DATABASE ENTRY DATE: 1996-10-01
MEVSNLSGATPGIAFPPGPESCSDSPSSGRSMGSTPGGLILSGREPPFSAFTVLVVTLLVLLIAATFLWNLLVLVTILRVRAFHRVPHNLVASTAVSDVLVAALVMPLSLVSELSAGRRWQLGRSLCHVWISFDVLCCTASIWNVAAIALDRYWTITRHLQYTLRTRRRASALMIAITWALSALIALAPLLFGWGEAYDARLQRCQVSQEPSYAVFSTCGAFYVPLAVVLFVYWKIYKAAKFRFGRRRRAVVPLPATTQAKEAPQESETVFTARCRATVAFQTSGDSWREQKEKRAAMMVGILIGVFVLCWIPFFLTELVSPLCACSLPPIWKSIFLWLGYSNSFFNPLIYTAFNKNYNNAFKSLFTKQR

SEQ ID NO: 2850 - DNA, 1074 bp, Homo sapiens
  ref <308>: DATABASE ACCESSION NUMBER: Refseq / NM_024012
  ref <309>: DATABASE ENTRY DATE: 2001-03-06
atggatttaccagtgaacctaacctccttttccctctccaccccctcccctttggagaccaaccacagcctcggcaaagacgacctgcgccccagctcgcccctgctctcggtcttcggagtgcttattctcaccttgctgggctttctggtggcggcgacgttcgcctggaacctgctggtgctggcgaccatcctccgtgtacgcaccttccaccgcgtgccccacaacctggtggcatccatggccgtctcggatgtcctggtggccgcgctggtcatgccgctgagcctggtgcatgagctgtccgggcgccgctggcagctaggtcggaggctgtgccagctttggatcgcgtgcgacgtgctttgctgcacggccagcatctggaacgtgacggccatagccctggaccgctactggtccatcacgcgccacatggaatacacgctccgcacccgcaagtgcgtctccaacgtcatgatcgcgctcacctgggcactctccgctgtcatctctctggccccgctgctttttggctggggagagacgtactctgagggcagcgaggagtgccaggtaagccgcgagccttcctacgccgtgttctccaccgtaggcgccttctacctgccgctctgtgtggtgctcttcgtgtactggaagatctacaaggctgccaagttccgcgtgggctccaggaagaccaatagcgtctcacccatatccgaagctgtggaggtgaaggactctgccaaacagccccagatggtgttcacggtccgccacgccaccgtcaccttccagccagaaggggacacgtggcgggagcagaaggagcagcgggccgccctcatggtgggcatcctcattggcgtgttcgtgctctgctggatccccttctttctcaccgagctcatcagtcccctctgctcctgtgacatccccgccatctggaaaagcatcttcctgtggcttggctactccaactccttctttaaccccctgatctatacggctttcaacaagaactacaacagcgccttcaagaacttcttttctaggcaacactga

SEQ ID NO: 2851 - protein, 357 aa, Homo sapiens
  ref <308>: DATABASE ACCESSION NUMBER: Refseq / NP_076917
  ref <309>: DATABASE ENTRY DATE: 2001-03-06
MDLPVNLTSFSLSTPSPLETNHSLGKDDLRPSSPLLSVFGVLILTLLGFLVAATFAWNLLVLATILRVRTFHRVPHNLVASMAVSDVLVAALVMPLSLVHELSGRRWQLGRRLCQLWIACDVLCCTASIWNVTAIALDRYWSITRHMEYTLRTRKCVSNVMIALTWALSAVISLAPLLFGWGETYSEGSEECQVSREPSYAVFSTVGAFYLPLCVVLFVYWKIYKAAKFRVGSRKTNSVSPISEAVEVKDSAKQPQMVFTVRHATVTFQPEGDTWREQKEQRAALMVGILIGVFVLCWIPFFLTELISPLCSCDIPAIWKSIFLWLGYSNSFFNPLIYTAFNKNYNSAFKNFFSRQH

SEQ ID NO: 2852 - DNA, 733 bp, Rattus norvegicus
  ref <308>: DATABASE ACCESSION NUMBER: EMBL / L10326
  ref <309>: DATABASE ENTRY DATE: 2000-03-04
ccgcgccccgccgccgccatgggctgcctcggcaacagtaagaccgaggaccagcgcaacgaggagaaggcgcagcgcgaggccaacaaaaagatcgagaagcagctgcagaaggacaagcaggtctaccgggccacgcaccgcctgctgctgctgggtgctggagagtctggcaaaagcaccattgtgaagcagatgaggatcctacatgttaatgggtttaacggagagggcggcgaagaggacccgcaggctgcaaggagcaacagcgatggagtctattacccccactagatgatggctacagtcctccatcttcgctatgtcctaccccagttatcccattttgcatgctggaattgcccggtcttaggaaactactaataagaatactattctgttgtctgggtgggggggaggggggatgggtccctaacctattacctaacctttaggcgttaagtaaaaacagaaagatgggatgaagtctttaattggcaacagtgtagtagaacagcaatcagaaaacgcatcgatatcttgataatccgctgtaccaaaagttggcatctgagaagtgtggcaagcccctactgagagagcctcctatgtaatgtgtgctgtgctaagcccttcaaccctactaatacctgcacgtttttcttcctatgactctacaagtaaaaataagtattaacactcctgataaataaaactctctgcatgtttcagc

SEQ ID NO: 2853 - protein, 394 aa, Rattus norvegicus
  ref <308>: DATABASE ACCESSION NUMBER: SWISS-Prot / P04894
  ref <309>: DATABASE ENTRY DATE: 2002-06-15
MGCLGNSKTEDQRNEEKAQREANKKIEKQLQKDKQVYRATHRLLLLGAGESGKSTIVKQMRILHVNGFNGEGGEEDPQAARSNSDGEKATKVQDIKNNLKEAIETIVAAMSNLVPPVELANPENQFRVDYILSVMNVPNFDFPPEFYEHAKALWEDEGVRACYERSNEYQLIDCAQYFLDKIDVIKQADYVPSDQDLLRCRVLTSGIFETKFQVDKVNFHMFDVGGQRDERRKWIQCFNDVTAIIFVVASSSYNMVIREDNQTNRLQEALNLFKSIWNNRWLRTISVILFLNKQDLLAEKVLAGKSKIEDYFPEFARYTTPEDATPEPGEDPRVTRAKYFIRDEFLRISTASGDGRHYCYPHFTCAVDTENIRRVFNDCRDIIQRMHLRQYELL

SEQ ID NO: 2854 - DNA, 3660 bp, Rattus norvegicus
  ref <308>: DATABASE ACCESSION NUMBER: EMBL / L10362
  ref <309>: DATABASE ENTRY DATE: 2000-03-04
agctacccagatcaacggtgctctaccgctgaatcgctcgctgcggattttccacccaggccacaaccttcagtagaaggacaaacatcacagccagtgagctgccaagcagtgctccgaccgaccttgtcaaagagagcagctggtcccagttttagtcagcacctctcagcataagtgtctgggtcacagaaggagaacaggtcaacatttccaaagacatttaacacaccagcacaaaaggctacttaggttgtctttgtatgaatttggttgactagagaagtaaattaaaaaggtgctttgattgaagaagtcacatggacataatcaccatttcaacaatatattagatgatggttattggaacagcccaaacatttaccacagagcaagagatatagcttgagtggctactagactattccagaatcaaggaatggatgactacaggtatcgggacaactatgagggctatgcccctaatgatggctactaccggggcaatgagcagaacccggaagaagatgcacagagcgatgttacagaaggccacgatgaagaggatgagatctatgagggcgagtaccaaggcatccctcatccagatgatgtcaagtctaagcagactaagatggcaccgtccagagcagatggccttcggggccaggcagacctgatggctgagagaatggaagatgaggagcagctcgctcaccagtacgagaccatcattgatgagtgtggccatgggcgcttccagtggaccctctttttcgtcttggtcttggccttgatggctgacggagtggaagtgtttgtggtgagctttgctctgccaagtgcagagaaagatatgtgtctgtcaagttccaagaaaggaatgctcgggctgattgtctacctaggaatgatggcaggagccttcatcctggggggcctggctgataaactgggaaggaagaaggtcctcagcatgtccttggctatcaatgcttcctttgcctccctctcctccttcgtgcagggatatggagctttcctcttctgcagactcatctcaggcataggtattgggggctccctgccaattgtttttgcctacttttctgagttcttatcacgggagaaacgcggtgagcatctcagctggctgggtatcttctggatgactgggggcatctacgcatctgccatggcctggagcatcattccacactatggctggggcttcagcatgggaaccaattatcacttccacagctggagagtgtttgtcatcgtctgtgctctgcctgccactgtgtccatggtggccctgaagttcatgccagaaagccccaggttcctgctggagatgggcaagcatgatgaagcctggatgattctcaagcaagtccatgacaccaacatgagagctaaggggacccctgagaaggtgttcacggtttcccacatcaaaactcccaagcaaatggatgaattcattgagatccagagttcaacagggacttggtaccagcgctggttggtcaggttcatgaccattttcaaacaggtgtgggataacgccttgtactgtgtgatgggaccctacagaatgaacaccctgattctggctgtggtctggttcaccatggccttaagttactatggcctgacagtgtggttccccgacatgatccggtatttccaggatgaagaatataagtctaaaatgaaggtgttttttggtgagcacgtgcatggcgccacaatcaacttcaccatggaaaaccagatccaccaacatgggaagcttgtgaacgataagttcataaagatgtactttaagcatgtcctctttgaggacacattctttgacaaatgctattttgaagatgtgacatccacagatacttatttcaagaactgcaccattgaatcgactaccttctacaacacagacctctacaaacacaagttcattgactgtcggtttatcaattccacctttctggagcagaaggagggctgccacatggactttgaagaggacaatgattttctgatttacctcgtcagcttcctcggcagcctgtctgtcttgcctgggaacataatttctgccctgctcatggacagaatcggaagacttaagatgattggtggctccatgctcatctctgcagtctgctgcttcttcctgttttttggcaacagcgagtctgcgatgatcggctggcaatgcctgttctgtgggaccagcattgcagcctggaatgctctggatgtgatcacagtagagctgtatcccaccaaccagagggccactgccttcggcatcctcaatggactgtgcaaacttggtgccatcctgggaaacactatctttgcttcttttgttgggatcaccaaagtggtccccatccttctggctgctgcttctctggttggaggtggcttggttgcccttcgactgccagagactcgagagcaggtcctgatgtgaacagcaccgtggggagaggaagatgggaagatcttttttcaggacacttcagcacagccacacctcctgcctctcactgtccacaggacaccacggacagcacagaaggagaaatggactgtgtgatccctagtttaggacccacttcagttgttaatacgtttttaactcaggtcattggctaggggtgcccagagtcaaccttaggatcccagagctgtgcgcttagcttcaggtctctcgatccaaggcagggggaggacactccagtaaatccatatagtaagcaagaaattgcttgcatttcagactgacattgaggacaagaaacacttaatctcctctatgtagcttctgggagcccagtgacctagcagattgcctcagttgggagtgggatcaatacataaatatcagattcacagaacagactatatatttgcatttgaaagtatcacctatcatatttttccttttgaaaattggcacggtagtattgaagatactctgatatagaaaaacccaatattgaagcaaaatgtatatagactgacttttcatctcaagcgtcctgaactttgcacaaagaagaggtgacacgtcaagagtgatatttattatggttttgctctactcagagacacttgaggttggttattatgtaaactatgtttgtatatagcagttttgaggttttattcccacaaatggtagctgctaagattgccagcattttagccgaatttggggagaactcgccattcaaggtcccaggaaactggtgcaaatggatgatgtttaagcatgatgtcagtgcagccatcttgcctgctgtcaggaggatgtacttggcaagccacatgctatttcctttacctgggaatttttcttcaacttggtagggcagttacttttctctccaatgctgatcgcttgtgaaactcaggtccatgggtcgtttgatgctgtttacccaggaagaacaggaagaaaggtttatttttatttttattttttaatggctgcttgcattttccttttaaagaaaaacaaaacaaaacaacacaggtaactggccaaggatgggaaaatgaaatcacagttcttcaaagtgtgagtccttactgtttgatttcaaaggaaaacacaatgcacttttattacagcat

SEQ ID NO: 2855 - protein, 684 aa, Rattus norvegicus
  misc_feature (1)..(684): Xaa=Unknown amino acid
MDDYRYRDNYEGYAPNDGYYRGNEQNPEEDAQSDVTEGHDEEDEIYEGEYQGIPHPDDVKSKQTKMAPSRADGLRGQADLMAERMEDEEQLAHQYETIIDECGHGRFQWTLFFVLVLALMADGVEVFVVSFALPSAEKDMCLSSSKKGMLGLIVYLGMMAGAFILGGLADKLGRKKVLSMSLAINASFASLSSFVQGYGAFLFCRLISGIGIGGSLPIVFAYFSEFLSREKRGEHLSWLGIFWMTGGIYASAMAWSIIPHYGWGFSMGTNYHFHSWRVFVIVCALPATVSMVALKFMPESPRFLLEMGKHDEAWMILKQVHDTNMRAKGTPEKVFTVSHIKTPKQMDEFIEIQSSTGTWYQRWLVRFMTIFKQVWDNALYCVMGPYRMNTLILAVVWFTMALSYYGLTVWFPDMIRYFQDEEYKSKMKVFFGEHVHGATINFTMENQIHQHGKLVNDKFIKMYFKHVLFEDTFFDKCYFEDVTSTDTYFKNCTIESTTFYNTDLYKHKFIDCRFINSTFLEQKEGCHMDFEEDNDFLIYLVSFLGSLSVLPGNIISALLMDRIGRLKMIGGSMLISAVCCFFLFFGNSESAMIGWQCLFCGTSIAAWNALDVITVELYPTNQRATAFGILNGLCKLGAILGNTIFASFVGITKVVPILLAAASLVGGGLVALRLPETREQVLMX

SEQ ID NO: 2856 - DNA, 1739 bp, Homo sapiens
  ref <308>: DATABASE ACCESSION NUMBER: EMBL / AK000592
  ref <309>: DATABASE ENTRY DATE: 2000-02-22
actacattagatgctggaaatatcaaattggctttcaatagtttactagaaaaggcagaagcccgtgaacgtgaaagagaaaaagaagaggctcggaagatgaaacgaaaagaatctgcatttaagagtatgttaaaacaagctgctcctccgatagaattggatgctgtctgggaagatatccgtgagagatttgtaaaagagccagcatttgaggacataactctagaacctgaaagaaaacgaatatttaaagattttatgcatgtgcttgagcatgaatgtcagcatcatcattcaaagaacaagaaacattctaagaaatctaaaaaacatcataggaaacgttcccgctctcgatcggggtcagattcagatgatgatgatagccattcaaagaaaaaaagacagcgatcagagtctcgttctgcttcagaacattcttctagtgcagagtctgagagaagttataaaaagtcaaaaaagcataagaagaaaagtaagaagaggagacataaatctgactctccagaatccgatgctgagcgagagaaggataaaaaagaaaaagatcgggaaagtgaaaaagacagaactagacaaagatcagaatcaaaacacaaatcgcctaagaaaaagactggaaaggattctggtaattgggatacttctggcagcgaactgagtgaaggggaattggaaaagcgcagaagaacccttttggagcaactggatgatgatcaataaattataccaaatatatgtttacagtatgatttaaagtctgattcagaccagggactctattttaagttcaactgaaataacactgggttttaattatatcacaggaaaaaaaaagtgcatttaagtattgttatcgtggactttataaaagcaaaggaaattgaaagtaacttttgattctgtatcaagaatcatattttcatacagtcataactgtctttctgtgaccctttcacagggcactgtaggatggattaaaggtggcaatttactgataactgcagatgtctctactttgttctaaaatctaagtcatgaggtgatttgatttactttatagaagctggattttgaagatctaatgaaaaattttttgataatatagtagtacaaaaaaagcaccagcaactgataaaaattgcttttttgtgcgctacccaactggttaaagccaatgtgatcttttatggtgaaactcctaagaaacaggtggttttgctggaaacttggtagacccttaattatagtggtgctaatgagcactactgtaatataaagccaccattattttttatcaaacatctgaatacattttacaaaggctattgtgagggcattattttgagcatctattttgaggtgatgtttaaaaaaactttaacatcaaatcaaattgtaaattaatttaaatatattgccttaaggacctactaaagaatgtgccaccagactttaagtgatagttgcaatatccttgtctaaaaaaaaaaaaaaagttgacttaaacattttctttaacagttgtcttttttttctaaattcagtctttctcttgcttttttttccctgctattgaggaagtattttgccttccctactcactgagaagtattgacttcgtggtacacattctaaagcatttctgatttgaatatttttgtacatttttatcaattattaaaccttctcttctaaaaaaaaaaaaaaaaaaa

SEQ ID NO: 2857 - protein, 216 aa, Homo sapiens
  misc_feature (1)..(216): Xaa=Unknown amino acid
MKRKESAFKSMLKQAAPPIELDAVWEDIRERFVKEPAFEDITLEPERKRIFKDFMHVLEHECQHHHSKNKKHSKKSKKHHRKRSRSRSGSDSDDDDSHSKKKRQRSESRSASEHSSSAESERSYKKSKKHKKKSKKRRHKSDSPESDAEREKDKKEKDRESEKDRTRQRSESKHKSPKKKTGKDSGNWDTSGSELSEGELEKRRRTLLEQLDDDQX

SEQ ID NO: 2858 - DNA, 2798 bp, Rattus norvegicus
  ref <308>: DATABASE ACCESSION NUMBER: EMBL / L10669
  ref <309>: DATABASE ENTRY DATE: 2000-03-04
gtccaggcctctttcagaccaggataagagaaagcaaatcagtgttcgtggcctagccggcgtggaaaatgtgtctgacctgaaaaagaacttcaaccgccacctacatttcaccctggtcaaggatcgcaatgtggccactccgagagattactatttcgcactggctcacaccgtgcgggaccacctcgtggaccgctggatccgcacacagcagcattactatgcgaaggaccccaagaggatttactacctgtctttggagttgtacatggggaggacactgcagaacaccatggtgaacctggccttggagaatgcctgcgatgaggccacctaccagctgggtctggacatggaggagctggaggagatcgaggaggatgcagggttgggcaatggaggcctgggacgcctggcagcttgcttcctggactccatggctacactggggctagctgcctatggctacgggatccgctatgagtttgggatttttaatcagaagatctgtgggggctggcagatggaagaagctgatgactggcttcgctatggcaacccctgggagaaggcccgcccagagttcacgctgcctgtgcacttctacggtcgagtggagcacaccagtcagggtgccaagtgggtggacacacaggtagtgttggctatgccctatgacactcctgtgcctggctatcgaaacaacgttgtcaacaccatgcgcctctggtcggccaaggcacctccttacttcaacctcaaggacttcaacgttggcggctacatccaggccgtgctggaccgaaacctggctgagaacatctcacgtgttttgtaccccaatgataagttctttgaagggaaggaattgcggctgaagcaggagtactttgtggtggccgccaccctccaggacatcattcgccgtttcaagtcctccaagtttggctgccgtgatcctgtgcgcacaaactttgatgctttccctgataaggtggccatccagctcaacgacacccacccttctttggccatccctgaacttattaggattctggtggacctggaacgactggactgggacaaggcctgggatgtgacagtgaagacctgtgcctacaccaaccacacagtgctgcctgaagccctggagcgctggccagtgcacctcatggagacactgcttccccgccatctgcagatcatttatgagatcaaccagcgtttccttaatcgggtggcggccgcattccctggggacgtagataggctgcggcgcatgtcactcgtggaggaaggagcggtgaaacgcatcaacatggcacacttgtgcattgctggttcccacgcagtcaacggtgtggctcgcatccattcggagatcctcaagaaaaccatcttcaaggacttttatgagctggagcctcacaagttccagaacaagaccaatggcatcacccctcggcgctggttggttctgtgtaaccctgggctggcagaggtcattgctgagcgcatcggtgaggagtacatctcggatcttgaccagctacgcaagctgctctcctatctggatgatcaagcctttatccgtgatgtggccaaagtcaaacaggaaaacaagcttaaattctctgcctacctggagaccgaatacaaagtccacatcaaccccaactccctcttcgacgtccaggtgaagaggattcatgagtataaacgccagcttctcaattgccttcacatcatcaccttgtataaccgcatcaaaagggagcccaataggttcatggtgccaaggactatcatgattggaggcaaggctgcacccgggtaccacatggctaagatgatcatcaagcttatcaccgccattggggatgtggtcaaccacgaccctgcggtgggagaccgcttccgagtgatcttcctggagaactaccgagtctcactggctgagaaagttattcccgctgctgacctctcagagcagatctccaccgcgggcactgaggcctcaggcactggcaacatgaagttcatgctcaacggggctctgaccatcggcaccatggatggtgccaacgtggagatggcagaggaggctggggaagataacttcttcatcttcggcatgcgggtggaggacgtggaaaggctggaccagagagggtacaatgcccaggaatactacgaccggattcctgagcttcggcagatcatcgaacagttaagcagtggcttcttctcccctaaacagcctgacctgttcaaggacatcgtcaacatggtcatgcaccatgaccggttcaaagtctttgcagattatgaggaatacattaaatgccaggacaaagtcagtgagttgtacaagaacccaagagagtggacacggatggtgatcaggaacatagccacctctggcaagttttccagtgaccgtaccattgcccagtatgcccgggagatctggggtcttgaaccttctcgtcagcgcctgccagccccagatgagaagatctgagcttccacaccagaccccatacctgcctttgagtctgtttgcaattcccggaatcaggcccactccaggggttgggcccctggaattacatctgggcccccccttttggaagcctcttttaccagtctctaggtcctgatgccagtgtgactaaagaccctgccctcttcttttccctcaactccctaccccctttatttatgtatggggtctaaccaatgcacccactcccccaataaatcgactctccatgaccttccttaaaaaaaaa

SEQ ID NO: 2859 - protein, 842 aa, Rattus norvegicus
  ref <308>: DATABASE ACCESSION NUMBER: SWISS-Prot / AAA41253
  ref <309>: DATABASE ENTRY DATE: 2000-05-30
MSRPLSDQDKRKQISVRGLAGVENVSDLKKNFNRHLHFTLVKDRNVATPRDYYFALAHTVRDHLVDRWIRTQQHYYAKDPKRIYYLSLELYMGRTLQNTMVNLALENACDEATYQLGLDMEELEEIEEDAGLGNGGLGRLAACFLDSMATLGLAAYGYGIRYEFGIFNQKICGGWQMEEADDWLRYGNPWEKARPEFTLPVHFYGRVEHTSQGAKWVDTQVVLAMPYDTPVPGYRNNVVNTMRLWSAKAPPYFNLKDFNVGGYIQAVLDRNLAENISRVLYPNDKFFEGKELRLKQEYFVVAATLQDIIRRFKSSKFGCRDPVRTNFDAFPDKVAIQLNDTHPSLAIPELIRILVDLERLDWDKAWDVTVKTCAYTNHTVLPEALERWPVHLMETLLPRHLQIIYEINQRFLNRVAAAFPGDVDRLRRMSLVEEGAVKRINMAHLCIAGSHAVNGVARIHSEILKKTIFKDFYELEPHKFQNKTNGITPRRWLVLCNPGLAEVIAERIGEEYISDLDQLRKLLSYLDDQAFIRDVAKVKQENKLKFSAYLETEYKVHINPNSLFDVQVKRIHEYKRQLLNCLHIITLYNRIKREPNRFMVPRTIMIGGKAAPGYHMAKMIIKLITAIGDVVNHDPAVGDRFRVIFLENYRVSLAEKVIPAADLSEQISTAGTEASGTGNMKFMLNGALTIGTMDGANVEMAEEAGEDNFFIFGMRVEDVERLDQRGYNAQEYYDRIPELRQIIEQLSSGFFSPKQPDLFKDIVNMVMHHDRFKVFADYEEYIKCQDKVSELYKNPREWTRMVIRNIATSGKFSSDRTIAQYAREIWGLEPSRQRLPAPDEKI

SEQ ID NO: 2860 - DNA, 2798 bp, Rattus norvegicus; identical to SEQ ID NO: 2858
  ref <308>: DATABASE ACCESSION NUMBER: EMBL / L10669
  ref <309>: DATABASE ENTRY DATE: 2000-03-04

SEQ ID NO: 2861 - protein, 842 aa, Rattus norvegicus; identical to SEQ ID NO: 2859
  ref <308>: DATABASE ACCESSION NUMBER: SWISS-Prot / AAA41253
  ref <309>: DATABASE ENTRY DATE: 2000-05-30

SEQ ID NO: 2862 - DNA, 5822 bp, Rattus norvegicus
  ref <308>: DATABASE ACCESSION NUMBER: EMBL / L11002
  ref <309>: DATABASE ENTRY DATE: 2000-03-04
ggtcctgtccctcagcacgttcatgtgctcacacgctcggacacccaccttccccgtacacacatacactcatagcctctctggcctccccccacggggaaggaccacttgtagtatttgccttggtttggtggggtacagtggatgtgaatactgtaaatagcttgtgctcagacacctctgcgtggacgaggcgggtacaggactcggaccctcctcccaagactccctgggaagatctccctctatttaactaaccgacggggaactcaggtctgggaacggaggggcaccttgggccacagaatactggttgcttcaggggcaataccctctgtcctggcctggaatcagtgttattacatctgatcaaacatctccagaaataaagtgagaataattctgccaaaaaaaaaaaaaaaaaaagccatttaagtattttaaagaattttttttctgcattgtcataactgatagatgttttttcctttttttttcttttcttttttttttttttttttacatgaactctcagaggacatggtgggcttgagataataaagccctgtttatgttacacagggctggagagtggcaagtgggagcggcaaagagcaggggccgccaggaatgattttgattcctcctggggtagggctgctgtcttcgctctgtagaaggccagcactcggggaagaggggctagctagggttctactcaggctcgcttttgctcttcgtatgcctagggcctaagaaggctagctttcagcatcaacgtgtccctaagtaaggcacccaccagtggagactccggacaagccaggagaggttgactgacttatgtgcgatttgggagcctggagttttcttgccctctgccgctgccgtcaaccggagcagagcctccgctggtgttgcgaaaagcaggccgaatgaggcagagaagctgagcactgtctggaaagcccacgaggaacggcgcaaggcatcgagagcccgtgggctgggcagtgcggagcagggcctggcgctgaggatggccaggcagcaggcgccaccctgggtccacgtagccctcatcctcttcctcctcagcctcggaggggccattgagattccgatggatccaagcattcagaatgagctgacccaacccccaacgatcaccaagcagtcggtgaaggaccacatcgtggacccccgagataacatcctgattgaatgtgaagctaaagggaaccccgcccccagtttccactggactcgcaacagcaggttcttcaacattgccaaggacccacgggtgtccatgaggaggaggtctgggaccttggtgatcgacttccgcagtggtgggcggcctgaggagtacgaaggggagtaccagtgctttgcccggaacaaattcggcacagctcttagcaaccgcatccgcctgcaggtgtccaaatctcccctgtggcccaaggaaaacctagaccccgtcgtggttcaagagggtgcccccttaaccctgcagtgcaaccccccacctggcctcccatcccccgtcatcttctggatgagcagctccatggagcccatcacccaggacaagcgtgtctcccagggtcacaacggggacctgtacttctccaacgtcatgctgcaggacatgcagaccgactacagctgcaatgcacgcttccacttcacccacaccattcagcagaagaatcccttcaccctcaaagtcctcaccacccgaggagttgcggaaagaacacctagcttcatgtatccccagggcacgtcaagcagtcagatggtactgcgcggcatggacctgctgctggagtgcattgcctctggggtcccaacaccagatattgcatggtacaagaaaggtggggacctcccatctgacaaggccaagttcgagaattttaacaaggctctgcgcatcaccaatgtctctgaagaggactctggggagtatttctgcctggcctccaacaagatgggcagcatccggcacacgatctcggtgagagtaaaggctgccccatactggctggatgagcccaagaacttgatcctggctcctggtgaagatgggaggctggtgtgtcgagccaatgggaacccgaagccgaccgtccagtggctggtgaatggagaccctttgcaatcggcaccacccaaccccaaccgtgaggtggccggagacactatcatcttccgggacactcagatcagcagcagggcagtgtaccagtgtaacacatccaacgaacatggctacctgctggccaatgccttcgtcagcgtattagatgtaccccctcggatgctgtctccccggaaccagctcatcagggtgatcctttacaaccggacgcgactggactgtccgttctttgggtctcccattccaacactccgatggtttaagaatgggcaaggaagcaacctggatggtggtaactaccacgtctaccaaaatggcagcctggaaatcaagatgattcgcaaagaggaccaaggcatctacacctgtgtggccaccaacatcctgggaaaagctgaaaatcaagtccgcctggaggtcaaagaccccaccaggatctacaggatgcctgaagaccaggtggccaagaggggcaccacagtgcagctggagtgccgtgtgaagcatgacccctccttgaaactcacagtctcctggctgaaggatgacgagccactctacattggaaacaggatgaaaaaggaagatgactccctgaccatcttcggagtggcagagcgggaccaaggcagttacacgtgcatggccagcaccgagctggaccaggacctggcaaaggcctacctcactgttctagctgatcaggccactccgactaaccgtttggctgccctgcccaaagggcggccagaccgacccagggacctggagctcactgacctggcggaaaggagtgtgaggctgacctggatcccgggggatgataacaacagtcccatcacagactacgttgtccagtttgaagaggaccagttccagccaggagtcttgcatgaccactccaagttcccaggcagtgtcaactcagccgtcctccatctgtccccgtatgtcaactatgacttccgagtcatcgctgtcaacgaggttgggagcagccaccccagccttccatccgagcggtaccgaacaagcggggcaccccctgaatccaaccccagtgatgtgaagggcgaagggacacgaaaaaacaatatggagatcacatggacgcctatgaatgctacctccgcctttggccccaacctgcgctactacattgtcaagtggcgacggagagaaacccgagagacttggaacaatgtcaccgtgtggggctctcgctatgtggtggggcagacccctgtctacgtaccctatgagatccgagtccaggctgaaaatgactttgggaaaggcccggagcctgaaaccgtcattgggtactcgggggaagattatcccagggctgcacccactgaagttaaaatccgagtcctgaacagcacagccatcagccttcagtggaaccgcgtctaccctgacacggtccagggccagctcagagagtatcgagcttactactggagggaaagcagtttgctgaagaacctgtgggtgtctcagaagagacagcaggccagcttccctggcgaccgcccccggggcgtggtgggtcgcctgttcccctacagtaactacaagctggagatggttgtggtcaatgggagaggtgatgggcctcgaagtgaaaccaaggaattcaccaccccggaaggagtacccagtgcccccaggcgtttcagagtccgacagcccaacctggagaccatcaacctggaatgggatcacccagagcaccccaacgggatcctgattggatacacgctcagatacgtgccctttaatggaaccaaactgggaaagcagatggtggaaaacttctctcccaatcagaccaagttctcggtgcagagagcagaccccgtgtcccgttaccgcttctccctcagtgccaggacgcaggtgggctctggagaagcagccacggaggagtccccaacacctccaaatgaagctactccaactgcagctcctcccacattgcccccgactaccgtgggtaccacaggccttgtgagcagtactgatgctactgcccttgctgccaccagtgaagccacaacagttcccatcatcccaacggtggtacctaccaccgtcgccaccaccattgccacaactactacaaccactgccgccgccaccaccactaccaccacggagagtcctcccactaccaccactgggactaagattcacgaaaccgcccccgacgagcagtccatttggaacgtcacggtgctccccaacagtaaatgggccaacatcacctggaagcacaatttcaggcctggaactgactttgtggttgagtacatcgacagcaaccatacgaaaaaaactgtccctgttaaggcccaagcccagcccatacagctgacagacctctttcccgggatgacgtacacgttgcgggtgtattcccgggacaacgagggcatcagcagtaccgtcatcacctttatgaccagtacagcttacaccaacaaccagactgacatcgccacccagggctggttcatcgggctcatgtgtgccattgcccttctggtgctgatcctgctgatcgtctgcttcatcaagaggagtcgtggcggcaagtacccagtgcgagaaaagaaggatgtccccttgggccctgaagaccccaaagaagaagatggttcatttgactacagtgacgaggacaacaagcccctgcagggcagccagacatctctggatggcaccatcaagcaacaggagagtgacgacagcctagtggactacggcgagggtggcgagggccagttcaacgaagatggctcctttattggccagtacactgtcagaaaggacaaggaggagaccgagggcaatgagagctcagaggccacatctccagtcaatgccatctattccctggcctgatggagcatcccaggcacagcactactttgcaagtaggaggggagaggggagaggaagccactgcagacctgccaccaagccacaacaccttcagggacaagggtacaacatgggggtctgccaagctgtgaggaccagtgaccacccagctacccacaccccctcctagtgatgccccattacccttgggtgccattagatgggaaagctgaagttaacgctcattggagggagccctagtcccttgccctgtctcacggccaccctgagcgtcccaccacaatggccaccctggatctcggctcacactcacttctttctattgcttacaatattctcattcatgttctctctctctctctctctctccctctctctctctctctctgtgtgtgtgtctgtgtgtctgtgtgtggcatatatatgtggggggttatgtatgtttatatgtatctgtatgtgtatgtgtggtatatgtgtgaggtgtgtgtgtctttttgtatagcgtatgcatggggtatgcatgtgcatgtgtatgtatgtatctatgtatgtgtgtgtgcacgtgtgtgtttgtgtgtatgtgtctgtgtctctgtgtgtgtgtacatgtatgtctgtctgtgtgtctccctgtgtatttatgtctgtgtctctatgtgtgtctgtgtgcatgtctgtgtctctctgtgcgattctgtctgtgtgtgtgtgtctgtctgtctgtctgtctgtc

SEQ ID NO: 2863 - protein, 1217 aa, Rattus norvegicus
  ref <308>: DATABASE ACCESSION NUMBER: SWISS-Prot / AAB47753
  ref <309>: DATABASE ENTRY DATE: 2003-02-01
IEIPMDPSIQNELTQPPTITKQSVKDHIVDPRDNILIECEAKGNPAPSFHWTRNSRFFNIAKDPRVSMRRRSGTLVIDFRSGGRPEEYEGEYQCFARNKFGTALSNRIRLQVSKSPLWPKENLDPVVVQEGAPLTLQCNPPPGLPSPVIFWMSSSMEPITQDKRVSQGHNGDLYFSNVMLQDMQTDYSCNARFHFTHTIQQKNPFTLKVLTTRGVAERTPSFMYPQGTSSSQMVLRGMDLLLECIASGVPTPDIAWYKKGGDLPSDKAKFENFNKALRITNVSEEDSGEYFCLASNKMGSIRHTISVRVKAAPYWLDEPKNLILAPGEDGRLVCRANGNPKPTVQWLVNGDPLQSAPPNPNREVAGDTIIFRDTQISSRAVYQCNTSNEHGYLLANAFVSVLDVPPRMLSPRNQLIRVILYNRTRLDCPFFGSPIPTLRWFKNGQGSNLDGGNYHVYQNGSLEIKMIRKEDQGIYTCVATNILGKAENQVRLEVKDPTRIYRMPEDQVAKRGTTVQLECRVKHDPSLKLTVSWLKDDEPLYIGNRMKKEDDSLTIFGVAERDQGSYTCMASTELDQDLAKAYLTVLADQATPTNRLAALPKGRPDRPRDLELTDLAERSVRLTWIPGDDNNSPITDYVVQFEEDQFQPGVLHDHSKFPGSVNSAVLHLSPYVNYDFRVIAVNEVGSSHPSLPSERYRTSGAPPESNPSDVKGEGTRKNNMEITWTPMNATSAFGPNLRYYIVKWRRRETRETWNNVTVWGSRYVVGQTPVYVPYEIRVQAENDFGKGPEPETVIGYSGEDLPSAPRRFRVRQPNLETINLEWDHPEHPNGILIGYTLRYVPFNGTKLGKQMVENFSPNQTKFSVQRADPVSRYRFSLSARTQVGSGEAATEESPTPPNEATPTAAPPTLPPTTVGTTGLVSSTDATALAATSEATTVPIIPTVVPTTVATTIATTTTTTAAATTTTTTESPPTTTTGTKIHETAPDEQSIWNVTVLPNSKWANITWKHNFRPGTDFVVEYIDSNHTKKTVPVKAQAQPIQLTDLFPGMTYTLRVYSRDNEGISSTVITFMTSTAYTNNQTDIATQGWFIGLMCAIALLVLILLIVCFIKRSRGGKYPVREKKDVPLGPEDPKEEDGSFDYSDEDNKPLQGSQTSLDGTIKQQESDDSLVDYGEGGEGQFNEDGSFIGQYTVRKDKEETEGNESSEATSPVNAIYSLA

SEQ ID NO: 2864 - DNA, 4955 bp, Homo sapiens
  ref <308>: DATABASE ACCESSION NUMBER: EMBL / AB018299
  ref <309>: DATABASE ENTRY DATE: 2002-05-12
ccaagcattcagaatgagctgacgcagccgccaaccatcaccaagcagtcagcgaaggatcacatcgtggacccccgtgataacatcctgattgagtgtgaagcaaaagggaaccctgcccccagcttccactggacacgaaacagcagattcttcaacatcgccaaggacccccgggtgtccatgaggaggaggtctgggaccctggtgattgacttccgcagtggcgggcggccggaggaatatgagggggaatatcagtgcttcgcccgcaacaaatttggcacggccctgtccaataggatccgcctgcaggtgtctaaatctcctctgtggcccaaggaaaacctagaccctgtcgtggtccaagagggcgctcctttgacgctccagtgcaaccccccgcctggacttccatccccggtcatcttctggatgagcagctccatggagcccatcacccaagacaaacgtgtctctcagggccataacggagacctatacttctccaacgtgatgctgcaggacatgcagaccgactacagttgtaacgcccgcttccacttcacccacaccatccagcagaagaaccctttcaccctcaaggtcctcaccacccgaggagttgcagaaagaacaccaagcttcatgtatccccagggcaccgcgagcagccagatggtgcttcgtggcatggacctcctgctggaatgcatcgcctccggggtcccaacaccagacatcgcatggtacaagaaaggtggggacctcccatctgataaggccaagtttgagaactttaataaggccctgcgtatcacaaatgtctctgaggaagactccggggagtatttctgcctggcctccaacaagatgggcagcatccggcacacgatctcggtgagagtaaaggctgctccctactggctggacgaacccaagaaccttattctggctcctggcgaggatgggagactggtgtgtcgagccaatggaaaccccaaacccactgtccagtggatggtgaatggggaacctttgcaatcggcaccacctaacccaaaccgtgaggtggccggagacaccatcatcttccgggacacccagatcagcagcagggctgtgtaccagtgcaacacctccaacgagcatggctacctgctggccaacgcctttgtcagtgtgctggatgtgccgcctcggatgctgtcgccccggaaccagctcattcgagtgattctttacaaccggacgcggctggactgccctttctttgggtctcccatccccacactgcgatggtttaagaatgggcaaggaagcaacctggatggtggcaactaccatgtttatgagaacggcagtctggaaattaagatgatccgcaaagaggaccagggcatctacacctgtgtcgccaccaacatcctgggcaaagctgaaaaccaagtccgcctggaggtcaaagaccccaccaggatctaccggatgcccgaggaccaggtggccagaaggggcaccacggtgcagctggagtgtcgggtgaagcacgacccctccctgaaactcaccgtctcctggctgaaggatgacgagccgctctatattggaaacaggatgaagaaggaagacgactccctgaccatctttggggtggcagagcgggaccagggcagttacacgtgtgtcgccagcaccgagctagaccaagacctggccaaggcctacctcaccgtgctagctgatcaggccactccaactaaccgtttggctgccctgcccaaaggacggccagaccggccccgggacctggagctgaccgacctggccgagaggagcgtgcggctgacctggatccccggggatgctaacaacagccccatcacagactacgtcgtccagtttgaagaagaccagttccaacctggggtctggcatgaccatcccaagtaccccggcagcgttaactcagccgtcctccggctgtccccgtatgtcaactaccagttccgtgtcattgccatcaacgaggttgggagcagccaccccagcctcccatccgagcgctaccgaaccagtggagcaccccccgagtccaatcctggtgacgtgaagggagaggggaccagaaagaacaacatggagatcacgtggacgcccatgaatgccacctcggcctttggccccaacctgcgctacattgtcaagtggaggcggagagagactcgagaggcctggaacaacgtcacagtgtggggctctcgctacgtggtggggcagaccccagtctacgtgccctatgagatccgagtccaggctgaaaatgacttcgggaagggccctgagccagagtccgtcatcggttactccggagaagatttacccagtgcccctaggcgtttccgagtccggcagcccaacctggagacaatcaacctggaatgggatcatcctgagcatccaaatgggatcatgattggatacactctcaaatatgtggcctttaacgggaccaaagtaggaaagcagatagtggaaaacttctctcccaatcagaccaagttcacggtgcaaagaacggaccccgtgtcacgctaccgctttaccctcagcgccaggacgcaggtgggctctggggaagccgtcacagaggagtcaccagcacccccgaatgaagctactccaaccgcagcttacaccaacaaccaagcggacatcgccacccagggctggttcattgggcttatgtgcgccatcgccctcctggtgctgatcctgctcatcgtctgtttcatcaagaggagtcgcggcggcaagtacccagtacgagaaaagaaggatgttccccttggccctgaagaccccaaggaagaggatggctcatttgactatagtgatgaggacaacaagcccctgcagggcagtcagacatctctggacggcaccatcaagcagcaggagagtgacgacagcctggtggactatggcgagggtggcgagggtcagttcaatgaagacggctccttcatcggccagtacacggtcaaaaaggacaaggaggaaacagagggcaacgaaagctcagaggccacgtcacctgtcaatgctatctactctctggcctaacggagcccacccaggcacagccaccactttgcaagtgggaggaggggagaaggggagacaaaaccactgcagacctaccacgaagccaccaccaccttcagtaacaagggtacgatatgggggtctgccaagctgtgaggaccagtagccaccaagccacccacaagccccctcccaatgaccccccttcagccccgggtgccaccagtgtgggagagctggagccgtggctgagctcagctggagggagcctggccccttgcccggtctcgcagccaccccgagcgttccaccacactgtccgcccttggcctcggcacacgctcaccttttctgttggttacgggacttctcattgtcttaatttcgctttgtgcatcttcccctccagacccaatgtctctgttttcttttccttttgaaaaagagtccctggaaaagaaagaataagtggattctcccccaggagaatcctttttgcaaagataggcaaaaaggattgaatccataccagaacacgtagacaggctgtaatattcaaaccacctctgggccaatgcatttccaaaggatgcctttctcgccatatgcctcccctggcccccagcccctctgcctcggccttgtcagttgctgagctgggcttggctcctttctggaaaatgacagtatttttggcagggagaaggtgcgcaggcctccttgctgctctctggtttggttgggaggtgtgtttacctcttgctcctcattcctcccctgcccttttctctggaatatctaagatgtgagctgcattgactctgaagacgtttgaggaacaggagtgggcactgatagaaaggacttcaacgccagtgactgtgtacctccagcagaagaaaatcaggtgtctggtcttgggggcactgtgctcacctctagagagaagaaaaaggctgggtttggacttcatgcctcctcactggtgaaacccaggatgtagatagagggccacacccaccctgtccagagtagagggcacctgtccacgtggccagggcccatgctgccaccctcgaggagatggaaccctgtgatgcaaaagctttgctggtgtgtttggggcataaggcactgctccccttccatctctagcagatatcatcttctcagccaattctgtaggacactgaggctcttgtttgacatggtgtgtggatggggacttgccccaagactgagcaggtctgccctttcattggggtgtatacatatcaggggaccctgaggtggcaccgtactcagtgttgtgatgcccccacctagggaggactcaatgctctttgtatgccttatgcagcgctgatctgtccctggagttcccaggttcccagctccccccctgcaagccttgaagcctccagcaacgtctatctccaggagagcagggcagcctatgcaagtgttccggcaggaccagaagtggccactcaacacacgtcctcaccagtcaccccaaatggagacactcgcagacctgcagttctcagaccgaaggtgctgccttcatcctccccacctaatgcatttttgaaaccaaaggtacctagcctcagagacagagaaggagagggggagatcttgagtctaagaggaaccctttagctgtttctgcagctgaggtcagtttcaggagggtgaagctgatccccaggaatggatcagctgccatgggcacagcctccgatttgagcctctccggctgccagccagggggcctgggccagaccagggctctgtccttccgtgactttattaaagcaacatttgccacatgtttaagccgc

SEQ ID NO: 2865 - protein, 836 aa, Homo sapiens
  ref <308>: DATABASE ACCESSION NUMBER: SWISS-Prot / BAA34476
  ref <309>: DATABASE ENTRY DATE: 2003-02-01
HNGDLYFSNVMLQDMQTDYSCNARFHFTHTIQQKNPFTLKVLTTRGVAERTPSFMYPQGTASSQMVLRGMDLLLECIASGVPTPDIAWYKKGGDLPSDKAKFENFNKALRITNVSEEDSGEYFCLASNKMGSIRHTISVRVKAAPYWLDEPKNLILAPGEDGRLVCRANGNPKPTVQWMVNGEPLQSAPPNPNREVAGDTIIFRDTQISSRAVYQCNTSNEHGYLLANAFVSVLDVPPRMLSPRNQLIRVILYNRTRLDCPFFGSPIPTLRWFKNGQGSNLDGGNYHVYENGSLEIKMIRKEDQGIYTCVATNILGKAENQVRLEVKDPTRIYRMPEDQVARRGTTVQLECRVKHDPSLKLTVSWLKDDEPLYIGNRMKKEDDSLTIFGVAERDQGSYTCVASTELDQDLAKAYLTVLGRPDRPRDLELTDLAERSVRLTWIPGDANNSPITDYVVQFEEDQFQPGVWHDHSKYPGSVNSAVLRLSPYVNYQFRVIAINEVGSSHPSLPSERYRTSGAPPESNPGDVKGEGTRKNNMEITWTPMNATSAFGPNLRYIVKWRRRETREAWNNVTVWGSRYVVGQTPVYVPYEIRVQAENDFGKGPEPESVIGYSGEDYPRAAPTEVKVRVMNSTAISLQWNRVYSDTVQGQLREYRAYYWRESSLLKNLWVSQKRQQASFPGDRLRGVVSRLFPYSNYKLEMVVVNGRGDGPRSETKEFTTPEGVPSAPRRFRVRQPNLETINLEWDHPEHPNGIMIGYTLKYVAFNGTKVGKQIVENFSPNQTKFTVQRTDPVSRYRFTLSARTQVGSGEAVTEESPAPPNEGRCMAAAPGVKGPS

SEQ ID NO: 2866 - DNA, 400 bp, Rattus norvegicus
  ref <308>: DATABASE ACCESSION NUMBER: EMBL / L11035
  ref <309>: DATABASE ENTRY DATE: 2000-03-04
ctggggaccttgctgttggttctgtgccttcggtcggagtgggtaagagtcaacagaagactgataaagcagcaggttaagcaaaactctccatcgctgattgttcaagagggagggacagctatactgaattgtgactatgataatgacatgtttgactattttgcttggtacaaaaaataccctgccaacagccccacattcctcatatctgtacgttcgaataaggataagaatgaagacggaagattcacagttttccttaacaaaaccggcaaacacttctcattgcacatcacagcctcccagcctgaggactctgcagtgttcctctctgcggcaacagcaagtggagacagactcacccttgggaaaggaactcagctgaccatccagccct

SEQ ID NO: 2867 - DNA, 387 bp, Homo sapiens
  ref <308>: DATABASE ACCESSION NUMBER: EMBL / AF327018
  ref <309>: DATABASE ENTRY DATE: 2001-11-03
agcatgtttgattatttcctatggtacaaaaaataccctgctgaaggtcctacattcctgatatctataagttccattaaggataaaaatgaagatggaagattcactgttttcttaaacaaaagtgccaagcacctctctctgcacattgtgccctcccagcctggagactctgcagtgtacttctgtgcagcaagcacttatatgggaggaggtgctgacggactcacctttggcaaagggactcatctaatcatccagccctatatccagaaccctgaccctgccgtgtaccagctgagagactctaaatccagtgacaagtctgtctgcctattcaccgattttgattctcaaacaaatgtgtcacaaagtaagaattctgat

SEQ ID NO: 2868 - DNA, 643 bp, Rattus norvegicus
  ref <308>: DATABASE ACCESSION NUMBER: EMBL / L11319
  ref <309>: DATABASE ENTRY DATE: 2000-03-04
aaagggcagcggttcctcttggtgattgtatcgcgccctcttgctgctaattaccgcgttctccattcctccacatgctgtctctagactttctagatgatgtacggcgaatgaacaagaggcagctgtactaccaagtcctaaattttggaatgattgtctcctcggcactaatgatctggaaggggctgatgttgataaccggaagtgagagtccaattgtagtggtgctcagtggcagcatggagcctgcgtttcacagaggggatctccttttcctcacgaaccgagttgaagatcctatacgtgtgggggaaatcgttgttttcaggatagaaggaagagagattcccatagtgcatcgagtcttgaagatccatgaaaagcaagatgggcatatcaagtttttaaccaaaggagataataatgccgttgatgaccgaggcctctataaacaaggacaacactggctggagaagaaagatgttgtagggagagcaagagggtttgttccgtacattggaatcgtgacgatcctcatgaatgactatcctaaatttagttatgcagtactgtttctgctgggtttatttgtgctggtccatcgtgagtaagaagccggcctcgctggtcctgggaggct

SEQ ID NO: 2869 - protein, 179 aa, Rattus norvegicus
  ref <308>: DATABASE ACCESSION NUMBER: SWISS-Prot / P42667
  ref <309>: DATABASE ENTRY DATE: 2002-06-15
MLSLDFLDDVRRMNKRQLYYQVLNFGMIVSSALMIWKGLMLITGSESPIVVVLSGSMEPAFHRGDLLFLTNRVEDPIRVGEIVVFRIEGREIPIVHRVLKIHEKQDGHIKFLTKGDNNAVDDRGLYKQGQHWLEKKDVVGRARGFVPYIGIVTILMNDYPKFSYAVLFLLGLFVLVHRE

SEQ ID NO: 2870 - DNA, 504 bp, Homo sapiens
  ref <308>: DATABASE ACCESSION NUMBER: EMBL / AF090315
  ref <309>: DATABASE ENTRY DATE: 1998-09-23
atgaacaagcggcagctctgttatcaagtcctaaattttggaatgattgtctcatcggcactaatgatctggaaggggttaatggtaataactggaagtgaaagtccgattgtagtggtgctcagtggcagcatggaacctgcatttcatagaggagatcttctctttctaacaaatcgagttgaagatcccatacgagtgggagaaattgttgttttcaggatagaaggaagagagattcctatagttcaccgagtcttgaagattcatgaaaagcaaaatgggcatatcaagtttttgaccaaaggagataataatgcggttgatgaccgaggcctctataaacaaggacaacattggctagagaaaaaagatgttgtggggagagccaggggatttgttccttatattggaattgtgacgatcctcatgaatgactatcctaaatttaggtatgcagttctctttttgctgggtttattcgtgctggtccatcgtgagtaa

SEQ ID NO: 2871 - protein, 179 aa, Homo sapiens
  ref <308>: DATABASE ACCESSION NUMBER: SWISS-Prot / P21378
  ref <309>: DATABASE ENTRY DATE: 2002-06-15
MLSLDFLDDVRRMNKRQLYYQVLNFGMIVSSALMIWKGLMVITGSESPIVVVLSGSMEPAFHRGDLLFLTNRVEDPIRVGEIVVFRIEGREIPIVHRVLKIHEKQNGHIKFLTKGDNNAVDDRGLYKQGQHWLEKKDVVGRARGFVPYIGIVTILMNDYPKFKYAVLFLLGLFVLVHRE

SEQ ID NO: 2872 - DNA, 643 bp, Rattus norvegicus; identical to SEQ ID NO: 2868
  ref <308>: DATABASE ACCESSION NUMBER: EMBL / L11319
  ref <309>: DATABASE ENTRY DATE: 2000-03-04

SEQ ID NO: 2873 - protein, 179 aa, Rattus norvegicus; identical to SEQ ID NO: 2869
  ref <308>: DATABASE ACCESSION NUMBER: SWISS-Prot / P42667
  ref <309>: DATABASE ENTRY DATE: 2002-06-15

SEQ ID NO: 2874 - DNA, 504 bp, Homo sapiens; identical to SEQ ID NO: 2870
  ref <308>: DATABASE ACCESSION NUMBER: EMBL / AF090315
  ref <309>: DATABASE ENTRY DATE: 1998-09-23

SEQ ID NO: 2875 - protein, 179 aa, Homo sapiens; identical to SEQ ID NO: 2871
  ref <308>: DATABASE ACCESSION NUMBER: SWISS-Prot / P21378
  ref <309>: DATABASE ENTRY DATE: 2002-06-15

SEQ ID NO: 2876 - DNA, 1842 bp, Rattus norvegicus
  ref <308>: DATABASE ACCESSION NUMBER: EMBL / L11694
  ref <309>: DATABASE ENTRY DATE: 2000-03-04
cgccagagccgcagcttctctcgccccgcagcccgtcgccaccatggtgaagatcgtgacagtgaagacgcaggcatatccggatcagaagccgggcaccagcgggttgcggaagcgagtgaaggtgttccagggcaacgctaactatgcggagaatttcatccaaagcatcgtctccaccgtggagccggcgttgaggcaggaggctaccctggttgtgggcggggacggtcgcttctacatgaccgaggccatccagctcatcgtacgcatcgccgcagccaacgggattggccgcctggttattggacagaatggaatcctctccactcctgctgtatcctgcattatccgaaaaatcaaagccattggtgggatcattctgacagctagccacaatccaggagggcccaatggagattttggaattaaattcaatatttctaatgggggtcctgctccagaagcaatcactgataaaattttccaaatcagcaagacaatcgaagaatatgccatttgccctgacttgaaggtagacctcggtgttctggggaagcagcagtttgacttggaaaacaagttcaagcccttcacagtggagatcgtggactcagtcgaggcctatgccacaatgctgagaaacatctttgatttcaacgcactgaaggagctactctctggcccaaacagactgaagatccgcatcgacgccatgcacggagttgtgggaccgtacgtcaagaagatcctctgtgaagaacttggtgcccccgcaaactcagctgtgaactgtgttcccctggaggattttggaggccaccaccctgaccccaacctcacctacgctgctgacctggtggaaaccatgaagtcaggagagcatgatttcggggctgcctttgatggtgatggggataggaacatgattctgggcaagcacgggttctttgtgaacccttctgactctgtggctgtcattgcagccaacatcttcagcattccgtatttccagcagactggggtccgcggcttcgcacgcagcatgcccaccagtggtgctctggaccgggtagcaaacgccacaaagatcgcttcgtatgagaccccaactggctggaagttttttgggaatttgatggatgcaagcaagctttccctctgtggagaggagagctttgggactggttcagaccacatccgagagaaagatggactgtgggctgtcctggcctggctctccattctggccacccgcaaacagagggtggaggacattctcaaagaccactggcagaagtttggtcggaacttcttcaccaggtatgactacgaggaggtggaagccgagggggcaaacaaaatgatgaaggacctggaggccctgatgctggaccgctcctttgtggggaagcagttctcagcaaacgataaagtctacacggtggagaaagctgataacttcgaatatagtgacccagtagatggaagcatttcaaaaaatcagggcttgcggcttatttttgcagatggttctcgtatcatcttcagactgagcggcaccgggagtgctggggctaccatccggctctatattgatagctacgagaaggacgctgccaagatcaaccaggacccccaggtcatgctggcacccctgatctccattgctctgaaagtgtcccagctccaggagaggacaggccgcactgccccaactgtcatcacctagagagatggctggatgtggcacatcctccccaggaactgtccacactgcctgattgaagagcacagacagaacagtgtattcgacctggcctttagactcatcttatttta

SEQ ID NO: 2877 - protein, 561 aa, Rattus norvegicus
  ref <308>: DATABASE ACCESSION NUMBER: SWISS-Prot / P38652
  ref <309>: DATABASE ENTRY DATE: 2001-10-16
VKIVTVKTQAYPDQKPGTSGLRKRVKVFQGNANYAENFIQSIVSTVEPALRQEATLVVGGDGRFYMTEAIQLIVRIAAANGIGRLVIGQNGILSTPAVSCIIRKIKAIGGIILTASHNPGGPNGDFGIKFNISNGGPAPEAITDKIFQISKTIEEYAICPDLKVDLGVLGKQQFDLENKFKPFTVEIVDSVEAYATMLRNIFDFNALKELLSGPNRLKIRIDAMHGVVGPYVKKILCEELGAPANSAVNCVPLEDFGGHHPDPNLTYAADLVETMKSGEHDFGAAFDGDGDRNMILGKHGFFVNPSDSVAVIAANIFSIPYFQQTGVRGFARSMPTSGALDRVANATKIASYETPTGWKFFGNLMDASKLSLCGEESFGTGSDHIREKDGLWAVLAWLSILATRKQRVEDILKDHWQKFGRNFFTRYDYEEVEAEGANKMMKDLEALMLDRSFVGKQFSANDKVYTVEKADNFEYSDPVDGSISKNQGLRLIFADGSRIIFRLSGTGSAGATIRLYIDSYEKDAAKINQDPQVMLAPLISIALKVSQLQERTGRTAPTVIT

SEQ ID NO: 2878 - DNA, 2487 bp, Homo sapiens
  ref <308>: DATABASE ACCESSION NUMBER: EMBL / BC019920
  ref <309>: DATABASE ENTRY DATE: 2002-09-02
cctttcccctcccgccggacctgccaggaggtgggctggcgcggagggagggccctgtcccctgtccctttaaggaggagggccaaacgccggcctagagtgcggcgtagcccccacccgccgtgccctcaccccagagcagctgcagcctcagccggccgcccctccgccagccaagtccgccgctctgacccccggcagcaagtcgccaccatggtgaagatcgtgacagttaagacccaggcgtaccaggaccagaagccgggcacgagcgggctgcggaagcgggtgaaggtgttccagagcagcgccaactacgcggagaacttcatccagagtatcatctccaccgtggagccggcgcagcggcaggaggccacgctggtggtgggcggggacggccggttctacatgaaggaggccatccagctcatcgctcgcatcgctgccgccaacgggatcggtcgcttggttatcggacagaatggaatcctctccacccctgctgtatcctgcatcattagaaaaatcaaagccattggtgggatcattctgacagccagtcacaacccagggggccccaatggagattttggaatcaaattcaatatttctaatggaggtcctgctccagaagcaataactgataaaattttccaaatcagcaagacaattgaagaatatgcagtttgccctgacctgaaagtagaccttggtgttctgggaaagcagcagtttgacttggaaaataagttcaaacccttcacagtggaaattgtggattcggtagaagcttatgctacaatgctgagaagcatctttgatttcagtgcactgaaagaactactttctgggccaaaccgactgaagatccgtattgatgctatgcatggagttgtgggaccgtatgtaaagaagatcctctgtgaagaactcggtgcccctgcgaactcggcagttaactgcgttcctctggaggactttggaggccaccaccctgaccccaacctcacctatgcagctgacctggtggagaccatgaagtcaggagagcatgattttggggctgcctttgatggagatggggatcgaaacatgattctgggcaagcatgggttctttgtgaacccttcagactctgtggctgtcattgctgccaacatcttcagcattccgtatttccagcagactggggtccgcggctttgcacggagcatgcccacgagtggtgctctggaccgggtggctagtgctacaaagattgctttgtatgagaccccaactggctggaagttttttgggaatttgatggacgcgagcaaactgtccctttgtggggaggagagcttcgggaccggttctgaccacatccgtgagaaagatggactgtgggctgtccttgcctggctctccatcctagccacccgcaagcagagtgtggaggacattctcaaagatcattggcaaaagtatggccggaatttcttcaccaggtatgattacgaggaggtggaagctgagggcgcaaacaaaatgatgaaggacttggaggccctgatgtttgatcgctcctttgtggggaagcagttctcagcaaatgacaaagtttacactgtggagaaggccgataactttgaatacagcgacccagtggatggaagcatttcaagaaatcagggcttgcgcctcattttcacagatggttctcgaatcgtcttccgactgagcggcactgggagtgccggggccaccattcggctgtacatcgatagctatgagaaggacgttgccaagattaaccaggacccccaggtcatgttggccccccttatttccattgctctgaaagtgtcccagctgcaggagaggacgggacgcactgcacccactgtcatcacctaagaagacaggcctgatgtggtacgtccctccacccccggacccatccaagtcatctgattgaagagcatgacagaaacaaaatgtattcaccaagcattttaggatttgactttttcactaaccagttgacgagcagtgcatttacaaggcactgccaaacaagatgcccttgggagctgtgagggaaagaggacctgcgggcttagatcaatctcaattccttttcatgccctcctgcattgctgctgcgtgggtatttgtctccttagccatcaggtacagtttacactacaatgtaagctataggtggagcatcagcagtgagtgaggccattcttcatccttaggatgtggcaatgaaatgatggtgcaagttcctttctcttttgtgaatctttccccccatttcctgtttacatgtaacccaacaaaatgcaatttctagtgccttctgtccaatcagttctttcctctgagtgagacgtacttggctacagatttctgccttgttttgcgacattgtcccattcacacagatattttgggataataaaggaaaataagctacaaaaaaaaaaaaaaaaa

SEQ ID NO: 2879 - protein, 561 aa, Homo sapiens
  ref <308>: DATABASE ACCESSION NUMBER: SWISS-Prot / P36871
  ref <309>: DATABASE ENTRY DATE: 2002-06-15
VKIVTVKTQAYQDQKPGTSGLRKRVKVFQSSANYAENFIQSIISTVEPAQRQEATLVVGGDGRFYMKEAIQLIARIAAANGIGRLVIGQNGILSTPAVSCIIRKIKAIGGIILTASHNPGGPNGDFGIKFNISNGGPAPEAITDKIFQISKTIEEYAVCPDLKVDLGVLGKQQFDLENKFKPFTVEIVDSVEAYATMLRSIFDFSALKELLSGPNRLKIRIDAMHGVVGPYVKKILCEELGAPANSAVNCVPLEDFGGHHPDPNLTYAADLVETMKSGEHDFGAAFDGDGDRNMILGKHGFFVNPSDSVAVIAANIFSIPYFQQTGVRGFARSMPTSGALDRVASATKIALYETPTGWKFFGNLMDASKLSLCGEESFGTGSDHIREKDGLWAVLAWLSILATRKQSVEDILKDHWQKYGRNFFTRYDYEEVEAEGANKMMKDLEALMFDRSFVGKQFSANDKVYTVEKADNFEYSDPVDGSISRNQGLRLIFTDGSRIVFRLSGTGSAGATIRLYIDSYEKDVAKINQDPQVMLAPLISIALKVSQLQERTGRTAPTVIT

SEQ ID NO: 2880 - DNA, 1460 bp, Rattus norvegicus
  ref <308>: DATABASE ACCESSION NUMBER: EMBL / L11930
  ref <309>: DATABASE ENTRY DATE: 2000-03-04
gtccgaagcaggtggaacattatggctgacatgcaaaatcttgtagaaagattggagagggcagtgggccgcctggaggcggtgtcacatacttctgacatgcactgtggatatggagacagtccttcaaaaggagcagttccatatgtgcaagcatttgactcgctgcttgccaatcccgtggcggagtacttgaagatgagtaaggagattgggggagatgtgcagaaacacgcggagatggtccacacaggcctgaagttggagcgagctctcctggttacagcttctcagtgccagcagccagccggtaataaactctcggatttgttggcccctatctcggagcagatccaggaagttataaccttccgggagaagaaccgaggcagcaagtttttcaatcatctatcagctgtcagtgaaagcatccaggccctgggctgggtggctctggctgcgaaacccggcccctttgtgaaagagatgaatgatgccgccatgttttacacaaaccgagtcctcaaggagtacagagatgtggataaaaagcatgtggactgggttagagcttacttgagtatatggacagaactgcaggcttacatcaaggagttccataccactggcctggcctggagcaagacggggcctgtggcaaaagaactgagtggattgccatctggaccctctgtgggatcaggcccacctcctcccccaccaggccctcctcctcccccagttcctaccagttctggctctgacgactctgcttcacgctcagcactgtttgcacagattaatcagggggaaagcatcacacatgccctgaaacatgtatctgatgacatgaagactcacaagaaccctgccctgaaagctcagagtggtccagttcggagtggccccaaaccattctctgcacctaaaccccaaactagcccctcccccaaaccagccacaaagaaggagccagctctgctggaactggaaggcaagaaatggagagtggaaaaccaggagaatgtttccaacctggtgatcgatgacactgagctgaagcaggtggcttacatctacaagtgtgtcaacacgacattgcaaatcaagggcaaaatcaattccattacagtagataactgtaagaagcttggcctggtgtttgatgacgtggtgggcattggtgagataatcaatagtagggatgtcaaagttcaggtgatgggaaaagtgccaaccatttccattaacaaaacagatggctgccacgcttacctgagtaagaactccctggactgcgagatagtcagtgccaaatcttctgagatgaacgtcctcattcctacagaaggcggtgattttaacgagttcccagtccctgagcagttcaagaccttgtggaacggacagaagttggtcaccacagtgacagaaatcgctggataagtgaattgcatggg

SEQ ID NO: 2881 - protein, 474 aa, Rattus norvegicus
  ref <308>: DATABASE ACCESSION NUMBER: SWISS-Prot / Q08163
  ref <309>: DATABASE ENTRY DATE: 1996-10-01
MADMQNLVERLERAVGRLEAVSHTSDMHCGYGDSPSKGAVPYVQAFDSLLANPVAEYLKMSKEIGGDVQKHAEMVHTGLKLERALLVTASQCQQPAGNKLSDLLAPISEQIQEVITFREKNRGSKFFNHLSAVSESIQALGWVALAAKPGPFVKEMNDAAMFYTNRVLKEYRDVDKKHVDWVRAYLSIWTELQAYIKEFHTTGLAWSKTGPVAKELSGLPSGPSVGSGPPPPPPGPPPPPVPTSSGSDDSASRSALFAQINQGESITHALKHVSDDMKTHKNPALKAQSGPVRSGPKPFSAPKPQTSPSPKPATKKEPALLELEGKKWRVENQENVSNLVIDDTELKQVAYIYKCVNTTLQIKGKINSITVDNCKKLGLVFDDVVGIGEIINSRDVKVQVMGKVPTISINKTDGCHAYLSKNSLDCEIVSAKSSEMNVLIPTEGGDFNEFPVPEQFKTLWNGQKLVTTVTEIAG

SEQ ID NO: 2882 - DNA, 1500 bp, Homo sapiens
  ref <308>: DATABASE ACCESSION NUMBER: EMBL / M98474
  ref <309>: DATABASE ENTRY DATE: 2000-03-04
gcggccgcattgcggagagcggctgatcgcagtccggaggtgaggcggaactctgagcaggtggtccattatggctgacatgcaaaatctggtagaaagattggagagggcagtgggccgcctggaggcagtatctcatacctctgacatgcaccgtgggtatgcagacagtccttcaaaagcaggagcagctccatatgtgcaggcatttgactcgctgcttgctggtcctgtggcagagtacttgaagatcagtaaagagattgggggagacgtgcagaaacatgcggagatggtccacacaggtttgaagttggagcgagctctgttggttacagcttctcagtgtcaacagccagcagaaaataagctttccgatttgttggcacccatctcagagcagatcaaagaagtgataacctttcgggagaagaaccgaggcagcaagttgtttaatcacctgtcagctgtcagcgaaagtatccaggccctgggctgggtggctatggctcccaagcctggcccttatgtgaaagaaatgaatgatgccgccatgttttatacaaaccgagtcctcaaagagtacaaagatgtggataagaagcatgtagactgggtcaaagcttatttaagtatatggacagagctgcaggcttacattaaggagttccataccaccggactggcctggagcaaaacggggcctgtggcaaaagaactgagcggactgccatctggaccctctgccggatcaggtcctcctccccctccaccaggcccccctcctcccccagtctctaccagttcaggctcagatgagtctgcttcccgctcagcactgttcgcgcagattaatcagggggagagcattacacatgccctgaaacatgtatctgatgacatgaagactcacaagaaccctgccctgaaggctcagagtggtccagtacgcagtggccccaaaccattctctgcacctaaaccccaaaccagcccatcccccaaacgagccacaaagaaggagccagctgtacttgaactggagggcaagaagtggagagtggaaaatcaggaaaatgtttccaacctggtgattgaggacacagagctgaaacaggtggcttacatatacaagtgtgtcaacacgacattgcaaatcaagggcaaaattaactccattacagtagataactgtaagaaacttggcctggtattcgatgacgtggtgggcattgtggagataatcaacagtaaggatgtcaaagttcaggtaatgggtaaagtgccaaccatatccatcaacaaaacagatggctgccatgcttacctgagcaagaattccctggattgtgaaatagtcagtgccaaatcttccgagatgaatgtcctcattcctacagaaggcggtgactttaatgaattcccagttcctgagcagttcaagaccctatggaacgggcagaagttggtcaccacagtgacagaaattgctggataagc

SEQ ID NO: 2883 - protein, 475 aa, Homo sapiens
  ref <308>: DATABASE ACCESSION NUMBER: SWISS-Prot / Q01518
  ref <309>: DATABASE ENTRY DATE: 2002-06-15
MADMQNLVERLERAVGRLEAVSHTSDMHRGYADSPSKAGAAPYVQAFDSLLAGPVAEYLKISKEIGGDVQKHAEMVHTGLKLERALLVTASQCQQPAENKLSDLLAPISEQIKEVITFREKNRGSKLFNHLSAVSESIQALGWVAMAPKPGPYVKEMNDAAMFYTNRVLKEYKDVDKKHVDWVKAYLSIWTELQAYIKEFHTTGLAWSKTGPVAKELSGLPSGPSAGSGPPPPPPGPPPPPVSTSSGSDESASRSALFAQINQGESITHALKHVSDDMKTHKNPALKAQSGPVRSGPKPFSAPKPQTSPSPKRATKKEPAVLELEGKKWRVENQENVSNLVIEDTELKQVAYIYKCVNTTLQIKGKINSITVDNCKKLGLVFDDVVGIVEIINSKDVKVQVMGKVPTISINKTDGCHAYLSKNSLDCEIVSAKSSEMNVLIPTEGGDFNEFPVPEQFKTLWNGQKLVTTVTEIAG

SEQ ID NO: 2884 - DNA, 2171 bp, Rattus norvegicus
  ref <308>: DATABASE ACCESSION NUMBER: EMBL / L12025
  ref <309>: DATABASE ENTRY DATE: 2000-03-04
ccttgccgctcgctgctagcttggatccgcgtggactacagggactgaatcggacccggaaccacatggccccactcgccggtgcctctcgctcccgggtgtggtcagcggggctactgaggctgctgctgctgtcctgctttacgctccagaaagcgggtggggagatagctgtgcaggtgctctccaattcgaccggcttcttgggagggtctacagtcttgcactgtagtctggcttccaaagacaatgtgacaatcactcagctaacatggatgaagagggatccagatggatcccacccttccgtgcctgtcttccaccccaagaaggggcccagcatctctgatccagagagggtgaagttcttggttgccaaggtgtacgaggatctgaggaacgcatctctggccatctcgaacttgcgtgtagaagacgaaggcatctatgagtgtcagattgccacgttccccacaggcagtaagagcgccaatgtctggctgaaggtgttcgcccgacctaaaaacacagcagaggccctggagccctctcccaccttgatgccgcaggacgtggccaaatgcatctctgctgatggtcaccctcctggacgaatcacgtggtcctcgaatgtgaatggaagctaccgtgaaatgaaggaaacagggtcccagccgggcaccaccacagttatcagctacctctccatggtgccttctagccaggcagatggcacgaacatcacctgcacagtggaacatgaaagcttccaggagccggaccagcagccattgatcctttccctaccttatccacccgaagtgtccatctctggctatgaaggcaactggtacattggcctcactaacgtgaacctgacctgtgaagctcgcagcaaaccaccgcccaccaactatagctggagcacggccacgggtccccttcccaactccactcatttccaggaaaacggcagtcacctgctaatctccaccgtggatgacctcaataacacgatctttgtgtgcaaagccatcaatgccctagggtctgggcagggccaagtgaccatcctagttaaagaggcatctgagattctgccgccaaagacaagcttaggcactggctacatcattgccatcgtcttttgtgtcctgatcatcggagtagtagcaggcattgtattctggaaatacaggcgtggttgtggtcggcagtccaggaccttagacagggagaacgtccgctattcagcagcgaatggcgtctctgtcccaaacgtggagacgaacaacttgaggtgatggtgctggggtagacagaactaaggaacttgaagacataacaactggaaccctacttccacaaaagaaaaagcctccagagagacttgactgtccagtgtggcgaacatagcaaggttgggggtctccttggccgctgccgaattccgcattgtcgaaaggactcatggaacccggtgtgctgactcacacttgacatctcagcaagcgagggccacataaagcaaggttgagtctagcacggctgtagagagaagccctgtctatacacaggcaagctaaggggctttgagacagtcagaaactgaagtctttctttgggtaaggtaaatcctctacctcgtgtatgtgacaaacttgaaagacttctacctctgagactcaagtgcggactctctttatagctgactcagctggggctaacccctctctcctctctggacaaggtctcagagtgtagccaaagctagaccgaaactcacagaggtccgtctgtctctacctcccaagtgctgcagttaaaggtttgtgtgtgccacactcctttgctaggtctttttaataaagtaaatatttaataaagtaatatatttataaaaaaactagttataatatatattttttgagacagtgtttcctgtagcccaggctgacctcaaacttactatgtagccaagaatgatagtaaactaatttattttaatttgtcttcaagcttaaacatagcccaacccctgctcctttccctctcttctctcaatccattttcgtcttctttttcttcccagacactattctgatgtatgtcttcattgcaaacattttattgaccttcgtaaaaatgtgtgaaccacagataaaaaaaag

SEQ ID NO: 2885 - protein, 412 aa, Rattus norvegicus
  ref <308>: DATABASE ACCESSION NUMBER: SWISS-Prot / AAB80767
  ref <309>: DATABASE ENTRY DATE: 2003-02-01
MAPLAGASRSRVWSAGLLRLLLLSCFTLQKAGGEIAVQVLSNSTGFLGGSTVLHCSLASKDNVTITQLTWMKRDPDGSHPSVPVFHPKKGPSISDPERVKFLVAKVYEDLRNASLAISNLRVEDEGIYECQIATFPTGSKSANVWLKVFARPKNTAEALEPSPTLMPQDVAKCISADGHPPGRITWSSNVNGSYREMKETGSQPGTTTVISYLSMVPSSQADGTNITCTVEHESFQEPDQQPLILSLPYPPEVSISGYEGNWYIGLTNVNLTCEARSKPPPTNYSWSTATGPLPNSTHFQENGSHLLISTVDDLNNTIFVCKAINALGSGQGQVTILVKEASEILPPKTSLGTGYIIAIVFCVLIIGVVAGIVFWKYRRGCGRQSRTLDRENVRYSAANGVSVPNVETNNLR

SEQ ID NO: 2886 - DNA, 1254 bp, Homo sapiens
  ref <308>: DATABASE ACCESSION NUMBER: EMBL / M24407
  ref <309>: DATABASE ENTRY DATE: 2000-03-04
atggcccgagccatggccgccgcgtggccgctgctgctggtggcgctactggtgctgtcctggccacccccaggaaccggggacgtcgtcgtgcaggcgcccacccaggtgcccggcttcttgggcgactccgtgacgctgccctgctacctacaggtgcccaacatggaggtgacgcatgtgtcacagctgacttgggcgcggcatggtgaatctggcagcatggccgtcttccaccaaacgcagggccccagctattcggagtccaaacggctggaattcgtggcagccagactgggcgcggagctgcggaatgcctcgctgaggatgttcgggttgcgcgtagaggatgaaggcaactacacctgcctgttcgtcacgttcccgcagggcagcaggagcgtggatatctggctccgagtgcttgccaagccccagaacacagctgaggttcagaaggtccagctcactggagagccagtgcccatggcccgctgcgtctccacagggggtcgcccgccagcccaaatcacctggcactcagacctgggcgggatgcccaatacgagccaggtgccagggttcctgtctggcacagtcactgtcaccagcctctggatattggtgccctcaagccaggtggacggcaagaatgtgacctgcaaggtggagcacgagagctttgagaagcctcagctgctgactgtgaacctcaccgtgtactaccccccagaggtatccatctctggctatgataacaactggtaccttggccagaatgaggccaccctgacctgcgatgctcgcagcaacccagagcccacaggctataattggagcacgaccatgggtcccctgccaccctttgctgtggcccagggcgcccagctcctgatccgtcctgtggacaaaccaatcaacacaactttaatctgcaacgtcaccaatgccctaggagctcgccaggcagaactgaccgtccaggtcaaagagggacctcccagtgagcactcaggcatatcccgtaacgccatcatcttcctggttctgggaatcctggtttttctgatcctgctggggatcgggatttatttctattggtccaaatgttcccgtgaggtcctttggcactgtcatctgtgtccctcgagtacagagcatgccagcgcctcagctaatgggcatgtctcctattcagctgtgagcagagagaacagctcttcccaggatccacagacagagggcacaaggtga

SEQ ID NO: 2887 - protein, 417 aa, Homo sapiens
  ref <308>: DATABASE ACCESSION NUMBER: SWISS-Prot / P15151
  ref <309>: DATABASE ENTRY DATE: 2002-06-15
MARAMAAAWPLLLVALLVLSWPPPGTGDVVVQAPTQVPGFLGDSVTLPCYLQVPNMEVTHVSQLTWARHGESGSMAVFHQTQGPSYSESKRLEFVAARLGAELRNASLRMFGLRVEDEGNYTCLFVTFPQGSRSVDIWLRVLAKPQNTAEVQKVQLTGEPVPMARCVSTGGRPPAQITWHSDLGGMPNTSQVPGFLSGTVTVTSLWILVPSSQVDGKNVTCKVEHESFEKPQLLTVNLTVYYPPEVSISGYDNNWYLGQNEATLTCDARSNPEPTGYNWSTTMGPLPPFAVAQGAQLLIRPVDKPINTTLICNVTNALGARQAELTVQVKEGPPSEHSGISRNAIIFLVLGILVFLILLGIGIYFYWSKCSREVLWHCHLCPSSTEHASASANGHVSYSAVSRENSSSQDPQTEGTR

SEQ ID NO: 2888 - DNA, 1700 bp, Rattus norvegicus
  ref <308>: DATABASE ACCESSION NUMBER: EMBL / L12381
  ref <309>: DATABASE ENTRY DATE: 2001-12-17
ctttaactttttttacttagaacaattgtccgtgtattttacatgtgttacttttatatgtcatcaatgtagagtaaccgttctacttgctttttgttcaggttgcagaattcagctacgatggggaacgtttttgaaaagttgtttaaaagcctattcgggaaaaaggaaatgcggattctcatggtgggcttagatgcagctggcaaaacgacgatcttgtacaaactgaagctgggagagattgtgacaaccatccccaccataggtttcaacgtggagaccgtagaatataaaaacatcagcttcacagtctgggatgttggtggccaggacaaaatcagacctttgtggcgacattacttccagaacactcaaggtctgatattcgtggttgatagtaacgacagagagcgggtcaatgaggcccgggaagaactgaccagaatgctagcagaagatgagctcagagacgcagtcttattggtgtttgtaaacaaacaggatcttcctaatgctatgaacgcagcagagatcacagacaagcttggcttacattcacttcgccagagaaactggtacattcaggctacctgtgcgaccagtggagatgggctttacgaaggcctggactggctctccaaccaactcaagaaccagaagtgatcagaagcagcccattccccatgccttgtggcaaaggcagctggcctttcccgtgtgcatgtgagtgcgtgaggagccatgtggccgtgtggctgggagtggggcagctttctcacaccgtgccttatccacgctatacgaacaccagtactccattttaagaaaaccagtgttacatttggaatgctaccgtccatttcacgagctttgatggtcttttcgctgaggcctccccggtgtgatagccagaatatctctaggctggaaaagaagagagctggaggcaggcaggtcccgttgttgccatcctgggtttggcctctccacacactcggaatcccgttggactttggtgtccttttacaaaaagaaaggaagggctgccattctttccattgtgccaaagctagcagctcacttgtagtgctttaaagctgtcaagaagaaggatacgttattaccacagtgtgagaggttcagaggggaatacttccccagagttctgttagttcaaactgacgcatttagctgttttagtccaaggaatcagtgacctttttcattagagtatcaagactgtaacactagagaagtttccagcctgtcccatacttgccaaacggaaactctgtgggctgctggcccaacaggaggccagaactcttccctaagcctcctggtccacagcggagtaaaggttgtggggagtgaagtgaggtagctcttgtgtctggcatcacgtctcagtcccctgaggctgcttctcccacttctctgctctgtgctgagtgttcttcacatgcagcagacagtgctcctggtggagttgtcactgtgtccccttgtccaggtctactgtgggcttttgattagtatctgtttccagaaccgcacacccgtgagttctgagtgtgtgtgagaaagtcaggaggttaatttagaagatgaaggtcccagtggcccccatactccctgggtggtgctaaactttgctctgagaagcgccttttcttcagactgctctcactctccct

SEQ ID NO: 2889 - protein, 181 aa, Rattus norvegicus
  ref <308>: DATABASE ACCESSION NUMBER: SWISS-Prot / P16500
  ref <309>: DATABASE ENTRY DATE: 1998-12-15
MGNVFEKLFKSLFGKKEMRILMVGLDAAGKTTILYKLKLGEIVTTIPTIGFNVETVEYKNISFTVWDVGGQDKIRPLWRHYFQNTQGLIFVVDSNDRERVNEAREELTRMLAEDELRDAVLLVFVNKQDLPNAMNAAEITDKLGLHSLRQRNWYIQATCATSGDGLYEGLDWLSNQLKNQK

SEQ ID NO: 2890 - DNA, 589 bp, Homo sapiens
  ref <308>: DATABASE ACCESSION NUMBER: EMBL / BE514791
  ref <309>: DATABASE ENTRY DATE: 2000-08-08
ttcctacctgcttatacttggtaaccgagggaatttctaagacttcttgctcatttctgaggtattgtctttatatcctgacactatgaatgctacttggatgcctcttaagggtctcttctgcagggtccccatgaattgtggctgaagttgtgcacaaacaagtatctccagtgacaggagtgccttctgaggcagccattgcatcttcatctgctgacactctgctaggctgacttctgtagttttcaccactgatcttcaggtccacctcacagagctctataaaacgcttaaatcctctttacatcatagactttcagctacttgaagatagccagtcagccgctacgtgactcttttctccaggatctccctaatactatgaacgcggcagagataacggacaagctcggcctccattccctccgctacagaaactggcacattcaggctacttgtgccactactggacatgggctttacgaaggcctgaactggctcgccaaccagttccagaaccagaactgatcagaaggatctattctttgtgccttgtggccacatcagctagcctctgctgtgtgca

SEQ ID NO: 2891 - protein, 181 aa, Homo sapiens
  ref <308>: DATABASE ACCESSION NUMBER: Refseq / NP_001649
  ref <309>: DATABASE ENTRY DATE: 2000-10-31
MGNIFANLFKGLFGKKEMRILMVGLDAAGKTTILYKLKLGEIVTTIPTIGFNVETVEYKNISFTVWDVGGQDKIRPLWRHYFQNTQGLIFVVDSNDRERVNEAREELMRMLAEDELRDAVLLVFANKQDLPNAMNAAEITDKLGLHSLRHRNWYIQATCATSGDGLYEGLDWLSNQLRNQK

SEQ ID NO: 2892 - DNA, 1058 bp, Rattus norvegicus
  ref <308>: DATABASE ACCESSION NUMBER: EMBL / L12384
  ref <309>: DATABASE ENTRY DATE: 2001-12-17
cctccttctgctgttgctccccatccccccgcggccggccggttccagccctcgccccgcgtcccctgcccgcgcccccgccccgggccccgccatgggcctcacggtgtccgcgctcttttcgcggatcttcgggaagaagcagatgcggatccttatggttggcttggatgcggctggcaagactaccatcctgtacaaactgaagttgggggagattgtcaccaccatccccaccataggcttcaatgtggaaacagtggaatataagaacatctgtttcacagtctgggatgtcggaggccaggataagattcggcctttgtggcggcactacttccagaacactcagggcctcatctttgtggtggacagcaatgaccgggagcgggtccaggagtctgctgatgaactccagaagatgctgcaggaggatgagcttcgggatgcggtgctgttggtgtttgccaacaagcaggacatgcccaatgccatgcctgtgagcgaactgactgacaagctggggcttcaacacttgcgtagccgcacgtggtacgtccaggccacctgtgccacccaaggcacaggcctgtatgatggtctggactggctgtcccatgagctatcaaagcgctagccagccaggggcaggcccctgctgcccggaagctcccgcgtgcatcccgggatggccagactcccgggactcctcaggcagtgcccttccttcccacttttcctccccacagacaggcctctgctcctgtgcctgcctgcatgctctctcttgttgttggagcctggagccttgctctctgggcacagagggttctgctctcctgcctgctgggacctgtggaagggcttcctggccaaggccccctcttccaggggaggagcagggatctggatttaatttcgttttggttttggtttttttggtttttttctgttttgggtgtacccttggggccaggtttggggggaggaaagtgagggctccgggtggtgctatgatgtgggactggatattgagtaataaatttgctgtggtttgt

SEQ ID NO: 2893 - protein, 179 aa, Rattus norvegicus
  ref <308>: DATABASE ACCESSION NUMBER: SWISS-Prot / P26437
  ref <309>: DATABASE ENTRY DATE: 2002-06-15
GLTVSALFSRIFGKKQMRILMVGLDAAGKTTILYKLKLGEIVTTIPTIGFNVETVEYKNICFTVWDVGGQDKIRPLWRHYFQNTQGLIFVVDSNDRERVQESADELQKMLQEDELRDAVLLVFANKQDMPNAMPVSELTDKLGLQHLRSRTWYVQATCATQGTGLYDGLDWLSHELSKR

SEQ ID NO: 2894 - DNA, 957 bp, Homo sapiens
  misc_feature (1)..(957): n=a, c, g or t
  ref <308>: DATABASE ACCESSION NUMBER: EMBL / BI837414
  ref <309>: DATABASE ENTRY DATE: 2001-10-08
cgccatgggcctcaccgtgtccgcgctcttttcgcggatcttcgggaagaagcagatgcggattctcatggttggcttggatgcggctggcaagaccacaatcctgtacaaactgaagtgggggagatgtcaccaccatcccaaccataggcttcaatgtagaaacagtggaatataagaacatctgtttcacagtctgggacgtgggaggccaggacaagattcggcctctgtggcggcactacttccagaacactcaggtggagtgntgggaggggactttctaaccccacgggaaaaggtgttagggctgggagaacagaantgttggcctaggctgggcccccaggccaaggaaaaaacccttccccacttctaccccttctgtttggctatcccctactcactcttcagaactcaccttagtcttccccagcttggacttctctttagaagcaggattctgggaccaggctgcctgatttagccctcataacatgtctttatttccttgcacatctttggataaactacttcctctttgcagtggggtctctagtttgtgccatgactcctgtagagcttctatagagttctgtaaacttctgtagagtttactagatgagaaggattgacacaattacaaatgggaagaaaacagaaagggccacactacggtatgtcccaggcagaagtgattgcttctcctttcttccttccttcctgcccagggcctcatctttgttggtggacagtaatgaccgggagcgggtccaagaatctgctgatgaactccagaagaatgctgnagggaggacggagctgcgggatgcagtgctgctgggatttgcaacaagcaggacatggcccaaggcctggccgggagcgagctgactgacaagcgggagaacagacattacgcagcggacggggaatgtccaggccactgggcaccca

SEQ ID NO: 2895 - protein, 179 aa, Homo sapiens; identical to SEQ ID NO: 2893

SEQ ID NO: 2896 - DNA, 3296 bp, Rattus norvegicus
  ref <308>: DATABASE ACCESSION NUMBER: EMBL / L13151
  ref <309>: DATABASE ENTRY DATE: 2000-03-04
gggggggacgcgcctgggtggggcggctcgcagcccgggcctggtggcccccggggctcccgggcggcggggtagctaggggagagcgggcttcaacatgatggcggccgaggcgggcagtgaggaaggcggcccggcgaccgcggggaccggcggcgccgcggccacgggctccagcgcctacccagcagcgtgccgggtaaagttacccgcggcccctccgatggcagtcgccccgtgtcctgggctggcggacaccgacctggctgcggccctcggtgggggagccgcgtcggggtccgggttcctggggaccgggccggtgtctggtgtcctggggggcgccgcgctgaccggcggtgctgcagctggcgtggcgggtgctgcagccgctggacctgccggagacatcgctctcaccaaggggactctctctctgcctgctgagactctcgggccgggcggcggattccctcctctgccgcctcctcctctgttgcctcctttgggctccggtctggggacagtggatgaaggtgactccttggatggaccagaatacgaggaggaagaggtggccataccgctgaccgcacctccaactaaccagtggtatcatggaaaacttgatagaactatagcagaagaacgcctcaggcaggcagggaaatctggaagctaccttataagagagagtgatcggaggccagggtcctttgtactttcatttcttagccagacaaatgttgtcaatcattttaggattattgctatgtgtggtgattactacattggtggaaggcgtttttcttcactctcagacctaataggatattacagtcacgtttcttgtttacttaaaggagaaaaattactctacccagttgcaccaccagagccagtagaagatagaagacgtgtacgagccattctgccctacacaaaagtaccagacactgatgaaataagtttcttaaagggagatatgttcattgttcacaatgagttagaagatggatggatgtgggttacaaacctaagaacagatgagcaaggccttattgttgaggacctagtggaagaggtgggccgagaagaagatccacatgaaggcaaaatatggttccatgggaagatttccaaacaagaagcttataatttattaatgacagttggccaagtctgcagctttcttgtgaggccctcagataatactcctggagattattccctgtattttcggaccaatgaaaatatccagcgatttaaaatttgtccaacacctaacaatcagttcatgatgggaggccgctattataacagtattggggacatcatagaccactatcggaaagaacagattgttgaaggctattatcttaaggaacctgtaccaatgcaggatcaaggacaagtactcaatgacactgtggatgggaaggaaatctataatacaattcgtcgtaaaacaaaggatgcattttataaaaatattgttaaaaaaggttatcttctgaagaagggcaaaggaaaacgttggaaaaatttatattttatcttagagggcagtgatgcccaacttatttattttgaaagtgaaaaacgagctacaaaaccaaaagggctaatagatctcagtgtatgttctgtctacgttgtccatgatagtctcttcggcaggccaaactgttttcagatagtcgttcagcactttagtgaagaacattacatcttttactttgcaggagaaactccagaacaagcagaggattggatgaaaggcctgcaagcattttgcagtttacggaaaagtagcccagggacatctaataaacgccttcgtcaggtcagcagccttgtattacatattgaagaagctcataaactaccagtaaaacacttcactaatccatattgtaacatctacttgaatagtgtccaagtagcaaaaactcatgcaagggaggggcaaaacccagtatggtcagaggagtttgtctttgatgatcttcctcctgacatcaatagatttgaaatcacacttagtaataaaacaaagaaaagtaaagatccagatatcttatttatgcgttgccagttgagcaggttacagaaaggacatgccacagatgaatggtttctgctaagttctcatataccactaaaaggtattgaaccaggatctctgcgtgttcgagcacgatactctatggaaaaaatcatgccagaagaagagtacagtgaatttaaagagcttatactgcagaaggaacttcacgtagtctatgctctatcacacgtatgtggacaagaccgaacactactggccagcatcctactgaaaatatttcttcatgaaaagcttgagtcattgttgttatgcacactaaatgacagagagataagtatggaagatgaagccactaccctatttcgagctacaacacttgcgagtaccttgatggagcagtacatgaaagccacggccacgcagtttgttcatcatgctttgaaagactccattttaaagataatggaaagcaagcaatcatgtgagttaagtccatcaaagttagaaaaaaatgaagatgtgaacactaatttagcacacctattgagcatactttcagagcttgtggagaaaatattcatggcttcagaaatacttccaccgacactgagatatatttatgggtgtttacagaaatcagttcagcataagtggcctacaaataacaccatgagaacacgagttgttagtggttttgtttttcttcggcttatctgcccagctatcctgaatccacggatgtttaatatcatctcagattctccatctcctattgctgcaagaacactgacattagtggctaaatctgtgcagaatttagcaaatcttgtggaatttggagctaaggagccttatatggaaggtgtcaatccattcatcaaaagtaataaacatcgcatgatcatgtttttagatgaacttgggaatgtacctgagcttccggacactacagaacattctagaactgacctgtctcgtgacttagcagcattgcatgagatttgtgtagctcattcagatgaactgagaacactcagtaatgagcgtggtgtacagcagcatgtactgaaaaagcttctggcaataacagaactgcttcaacaaaagcaaaaccagtatacaaaaaccaatgatgtcaggtagcagcccggtgttctgcatggattcggcatgcccaacgtggtaattcacatcaccatgtctcctttgctcttgccaaaaagcc

SEQ ID NO: 2897 - protein, 1039 aa, Rattus norvegicus
  misc_feature (1)..(1039): Xaa=Unknown amino acid
MMAAEAGSEEGGPATAGTGGAAATGSSAYPAACRVKLPAAPPMAVAPCPGLADTDLAAALGGGAASGSGFLGTGPVSGVLGGAALTGGAAAGVAGAAAAGPAGDIALTKGTLSLPAETLGPGGGFPPLPPPPLLPPLGSGLGTVDEGDSLDGPEYEEEEVAIPLTAPPTNQWYHGKLDRTIAEERLRQAGKSGSYLIRESDRRPGSFVLSFLSQTNVVNHFRIIAMCGDYYIGGRRFSSLSDLIGYYSHVSCLLKGEKLLYPVAPPEPVEDRRRVRAILPYTKVPDTDEISFLKGDMFIVHNELEDGWMWVTNLRTDEQGLIVEDLVEEVGREEDPHEGKIWFHGKISKQEAYNLLMTVGQVCSFLVRPSDNTPGDYSLYFRTNENIQRFKICPTPNNQFMMGGRYYNSIGDIIDHYRKEQIVEGYYLKEPVPMQDQGQVLNDTVDGKEIYNTIRRKTKDAFYKNIVKKGYLLKKGKGKRWKNLYFILEGSDAQLIYFESEKRATKPKGLIDLSVCSVYVVHDSLFGRPNCFQIVVQHFSEEHYIFYFAGETPEQAEDWMKGLQAFCSLRKSSPGTSNKRLRQVSSLVLHIEEAHKLPVKHFTNPYCNIYLNSVQVAKTHAREGQNPVWSEEFVFDDLPPDINRFEITLSNKTKKSKDPDILFMRCQLSRLQKGHATDEWFLLSSHIPLKGIEPGSLRVRARYSMEKIMPEEEYSEFKELILQKELHVVYALSHVCGQDRTLLASILLKIFLHEKLESLLLCTLNDREISMEDEATTLFRATTLASTLMEQYMKATATQFVHHALKDSILKIMESKQSCELSPSKLEKNEDVNTNLAHLLSILSELVEKIFMASEILPPTLRYIYGCLQKSVQHKWPTNNTMRTRVVSGFVFLRLICPAILNPRMFNIISDSPSPIAARTLTLVAKSVQNLANLVEFGAKEPYMEGVNPFIKSNKHRMIMFLDELGNVPELPDTTEHSRTDLSRDLAALHEICVAHSDELRTLSNERGVQQHVLKKLLAITELLQQKQNQYTKTNDVRX

SEQ ID NO: 2898 - DNA, 4307 bp, Homo sapiens
  ref <308>: DATABASE ACCESSION NUMBER: EMBL / M23379
  ref <309>: DATABASE ENTRY DATE: 2000-03-04
cctcagcctggggagctgaaggggagacgcgtctgggtggggctgctcggagcccgggcctggtggcccctggggctcccgggcgggcagggtagggcagagtagagcgggcttcaacatgatggcggccgaggccggcagtgaggagggcggcccggtaacagccggagctggaggaggcggcgcggcagcgggctccagtgcctatcccgcagtgtgtcgggtgaagatacccgcggccctgcctgtggcagccgccccctatcctgggctggtggagaccggagtggctggaactctgggtggcggagccgctttggggtcagagttcctaggagccgggtctgtggcaggggcactggggggagctggactgacagggggaggtactgctgctggcgtagctggtgctgctgctggcgtggccggtgctgctgttgctggacctagtggagacatggctctcaccaaactgcccacttcgttgcttgctgagactctcgggccaggcggcggttttccccctctgccccctcccccttacctgccccctttgggggcgggcctcgggacagtggacgaaggtgactctctggatggaccagaatacgaggaggaagaggtggccataccgttgaccgctcctccaactaaccagtggtatcacggaaaacttgacagaacgatagcagaagaacgcctcaggcaggcagggaagtctggcagttatcttataagagagagtgatcggaggccagggtcctttgtactttcatttcttagccagatgaatgttgtcaaccattttaggattattgctatgtgtggagattactacattggtggaagacgtttttcttcactgtcagacctaataggttattacagtcatgtttcttgtttgcttaaaggagaaaaattactttacccagttgcaccaccagagccagtagaagatagaaggcgtgtacgagctattctaccttacacaaaagtaccagacactgatgaaataagtttcttaaaaggagatatgttcattgttcataatgaattagaagatggatggatgtgggttacaaatttaagaacagatgaacaaggccttattgttgaagacctagtagaagaggtgggccgggaagaagatccacatgaaggaaaaatatggttccatgggaagatttccaaacaggaagcttataatttactaatgacagttggtcaagtctgcagttttcttgtgaggccctcagataatactcctggcgattattcactttatttccggaccaatgaaaatattcagcgatttaaaatatgtccaacgccaaacaatcagtttatgatgggaggccggtattataacagcattggggacatcatagatcactatcgaaaagaacagattgttgaaggatattatcttaaggaacctgtaccaatgcaggatcaagaacaagtactcaatgacacagtggatggcaaggaaatctataataccatccgtcgtaaaacaaaggatgccttttataaaaacattgttaagaaaggttatcttctgaaaaagggcaaaggaaaacgttggaaaaatttatattttatcttagagggtagtgatgcccaacttatttattttgaaagcgaaaaacgagctaccaaaccaaaaggattaatagatctcagtgtatgttctgtctatgtcgttcatgatagtctctttggcaggccaaactgttttcagatagtagttcagcactttagtgaagaacattacatcttttactttgcaggagaaactccagaacaagcagaggattggatgaaaggtctgcaggcattttgcaatttacggaaaagtagtccagggacatccaataaacgccttcgtcaggtcagcagccttgttttacatattgaagaagcccataaactcccagtaaaacattttactaatccatattgtaacatctacctgaatagtgtccaagtagcaaaaactcatgcaagggaagggcaaaacccagtatggtcagaagagtttgtctttgatgatcttcctcctgacatcaatagatttgaaataactcttagtaataaaacaaagaaaagcaaagatcctgatatcttatttatgcgctgccagttgagccgattacagaaagggcatgccacagatgaatggtttctgctcagctcccatataccattaaaaggtattgaaccagggtccctgcgtgttcgagcacgatactctatggaaaaaatcatgccagaagaagagtacagtgaatttaaagagcttatactgcaaaaggaacttcatgtagtctatgctttatcacatgtatgtggacaagaccgaacactactggccagcatcctactgaggatttttcttcacgaaaagcttgaatcgttgttgttatgcacactaaatgacagagaaataagcatggaagatgaagccactaccctatttcgagccacaacacttgcaagcaccttgatggagcagtatatgaaagccactgctacacagtttgttcatcatgctttgaaagactctattttaaagataatggaaagcaagcagtcttgtgagttaagtccatcaaagttagaaaaaaatgaagatgtgaacactaatttaacacacctattgaacatactttcagagcttgtggagaaaatattcatggcttcagaaatacttccaccgacattgagatatatttatgggtgtttacagaaatctgttcagcataagtggcctacaaataccaccatgagaacaagagttgttagtggttttgtttttcttcgactcatctgtcctgccatcctgaatccacggatgttcaatatcatctcagattctccatctcctattgctgcaagaacactgatattagtggctaaatctgtgcagaacttagcaaatcttgtggaatttggagctaaggagccctacatggaaggtgtcaatccattcatcaaaagcaacaaacatcgtatgatcatgtttttagatgaacttgggaatgtacctgaacttccggacactacagagcattctagaacggacctgtcccgtgatttagcagcattgcatgagatttgcgtggctcattcagatgaacttcgaacgctcagtaatgagcgtggtgcacagcagcacgtattgaaaaagcttctggctataacagaactgcttcaacaaaaacaaaaccagtatacaaaaaccaatgatgtcaggtagcagccttcgccccagtgttctgcatggattcagcatgtccaacatggtaattcacttcagtttaatgtctcctttgctcttgccaaaaaatagcacacttttccacattccagtgatgtgtgagctatgcaaacaaaatccaagattctgctggtgaataactatgccagcaaccttgtaagctatctgtgcaggatatttgcactatttccacatggaatcaatctttaacaacctctgagccttggtgtacagaccacctttcacaaaacgaaatgctatgactgtatcttgatatctcgaactttcaaaatatattttcagtacacccagttgccaaagttttgctgtctcttagagaaagaactatgaaatcaactgacaagaaacacattcttattgacaattgtgtataactggattgcagactgttcttactgtaactacttcctgattaggaatatgaccatttgactgttcaatgattatttgtatttacagtttccagagtttgtcattataataggaacaatctttgctgtatacttttaaaaaatactctgctatttctcttgctggaactgttgaaagaaaatatatagaatgatctattgctcatcagctttattttttaaacatacgacttattttgttgaaattgtcaaagactgtatttagatctcataatgctttgttaaatgtttacaagtaaatagtttgaattcagtaaatattattggttgttgtattgatcaatgcatgttacccattcaaccattttatagactaccaatttcttttatgttaactagaatgcttttgttaaaagttatttgttcattatttgtgctacccctttgattatgcagacaacctcatcagctgcctaacttatccatctttgaacttctgactacttgttgtatctgctggatatttagttcaactgtatagttttatttacttctgtatgtgtatttttgtgaagtattcacaaaggttaagttaaaataaaaccaagggatatcttgcaaaaaaaaaaaaa

SEQ ID NO: 2899 - protein, 1047 aa, Homo sapiens
  ref <308>: DATABASE ACCESSION NUMBER: SWISS-Prot / P20936
  ref <309>: DATABASE ENTRY DATE: 2002-06-15
MMAAEAGSEEGGPVTAGAGGGGAAAGSSAYPAVCRVKIPAALPVAAAPYPGLVETGVAGTLGGGAALGSEFLGAGSVAGALGGAGLTGGGTAAGVAGAAAGVAGAAVAGPSGDMALTKLPTSLLAETLGPGGGFPPLPPPPYLPPLGAGLGTVDEGDSLDGPEYEEEEVAIPLTAPPTNQWYHGKLDRTIAEERLRQAGKSGSYLIRESDRRPGSFVLSFLSQMNVVNHFRIIAMCGDYYIGGRRFSSLSDLIGYYSHVSCLLKGEKLLYPVAPPEPVEDRRRVRAILPYTKVPDTDEISFLKGDMFIVHNELEDGWMWVTNLRTDEQGLIVEDLVEEVGREEDPHEGKIWFHGKISKQEAYNLLMTVGQVCSFLVRPSDNTPGDYSLYFRTNENIQRFKICPTPNNQFMMGGRYYNSIGDIIDHYRKEQIVEGYYLKEPVPMQDQEQVLNDTVDGKEIYNTIRRKTKDAFYKNIVKKGYLLKKGKGKRWKNLYFILEGSDAQLIYFESEKRATKPKGLIDLSVCSVYVVHDSLFGRPNCFQIVVQHFSEEHYIFYFAGETPEQAEDWMKGLQAFCNLRKSSPGTSNKRLRQVSSLVLHIEEAHKLPVKHFTNPYCNIYLNSVQVAKTHAREGQNPVWSEEFVFDDLPPDINRFEITLSNKTKKSKDPDILFMRCQLSRLQKGHATDEWFLLSSHIPLKGIEPGSLRVRARYSMEKIMPEEEYSEFKELILQKELHVVYALSHVCGQDRTLLASILLRIFLHEKLESLLLCTLNDREISMEDEATTLFRATTLASTLMEQYMKATATQFVHHALKDSILKIMESKQSCELSPSKLEKNEDVNTNLTHLLNILSELVEKIFMASEILPPTLRYIYGCLQKSVQHKWPTNTTMRTRVVSGFVFLRLICPAILNPRMFNIISDSPSPIAARTLILVAKSVQNLANLVEFGAKEPYMEGVNPFIKSNKHRMIMFLDELGNVPELPDTTEHSRTDLSRDLAALHEICVAHSDELRTLSNERGAQQHVLKKLLAITELLQQKQNQYTKTNDVR

SEQ ID NO: 2900 - DNA, 3296 bp, Rattus norvegicus; identical to SEQ ID NO: 2896
  ref <308>: DATABASE ACCESSION NUMBER: EMBL / L13151
  ref <309>: DATABASE ENTRY DATE: 2000-03-04

SEQ ID NO: 2901 - protein, 1039 aa, Rattus norvegicus; identical to SEQ ID NO: 2897
  misc_feature (1)..(1039): Xaa=Unknown amino acid

SEQ ID NO: 2902 - DNA, 4307 bp, Homo sapiens; identical to SEQ ID NO: 2898
  ref <308>: DATABASE ACCESSION NUMBER: EMBL / M23379
  ref <309>: DATABASE ENTRY DATE: 2000-03-04

SEQ ID NO: 2903 - protein, 1047 aa, Homo sapiens; identical to SEQ ID NO: 2899
  ref <308>: DATABASE ACCESSION NUMBER: SWISS-Prot / P20936
  ref <309>: DATABASE ENTRY DATE: 2002-06-15

SEQ ID NO: 2904 - DNA, 558 bp, Rattus norvegicus
  ref <308>: DATABASE ACCESSION NUMBER: EMBL / L13406
  ref <309>: DATABASE ENTRY DATE: 2000-03-04
ttttcagcagccaagagtttgttgaagaaaccggatggggtaaaggagtcaactgagagctcaaataccaccattgaggatgaagacgtgaaagcacgaaagcaagagatcatcaaagtcactgagcagctgattgaagctatcaacaatggggacttcgaggcttacacgaaaatctgtgatccaggcctcactgcctttgaacccgaagcattgggcaacttagtggaagggatggactttcacagattctactttgaaaatgctttgcccaaaatcaataaaccaatccacactatcatcctgaaccctcacgtacacctggtaggggatgatgcagcctgcatagcatacattcggctcacacagtacatggatggaaatggaatgccaaagacaatgcagtcagaagagactcgagtgtggcaccgccgtgatgggaagtggcagaatattcactttcatcgttcggggtccccaacagtccccatcaagccaccctgtattccaaatgggaaagaaaacttctcaggaggcacctctttgtggcaaaacatc

SEQ ID NO: 2905 - protein, 533 aa, Rattus norvegicus
  ref <308>: DATABASE ACCESSION NUMBER: SWISS-Prot / AAA41479
  ref <309>: DATABASE ENTRY DATE: 2002-06-15
MASTTTCTRFTDEYQLFEELGKGAFSVVRRCMKIPTGQEYAAKIINTKKLSARDHQKLEREARICRLLKHPNIVRLHDSISEEGFHYLVFDLVTGGELFEDIVAREYYSEADASHCIQQILESVNHCHLNGIVHRDLKPENLLLASKSKGAAVKLADFGLAIEVQGDQQAWFGFAGTPGYLSPEVLRKDPYGKPVDMWACGVILYILLVGYPPFWDEDQHRLYQQIKAGAYDFPSPEWDTVTPEAKDLINKMLTINPAKRITASEALKHPWICQRSTVASMMHRQETVDCLKKFNARRKLKGAILTTMLATRNFSAAKSLLKKPDGVKINNKANVVTSPKENIPTPALEPQTTVIHNPDGNKESTESSNTTIEDEDVKARKQEIIKVTEQLIEAINNGDFEAYTKICDPGLTAFEPEALGNLVEGMDFHRFYFENALPKINKPIHTIILNPHVHLVGDDAACIAYIRLTQYMDGNGMPKTMQSEETRVWHRRDGKWQNIHFHRSGSPTVPIKPPCIPNGKENFSGGTSLWQNI

SEQ ID NO: 2906 - DNA, 1500 bp, Homo sapiens
  ref <308>: DATABASE ACCESSION NUMBER: Refseq / NM_001221
  ref <309>: DATABASE ENTRY DATE: 2002-05-14
atggcttcgaccaccacctgcaccaggttcacggacgagtatcagcttttcgaggagcttggaaagggggcattctcagtggtgagaagatgtatgaaaattcctactggacaaggatatgctgccaaaattatcaacaccaaaaagctttctgctagggatcatcagaaactagaaagagaagctagaatctgccgtcttttgaagcaccctaatattgtgcgacttcatgatagcatatcagaagagggctttcactacttggtgtttgatttagttactggaggtgaactgtttgaagacatagtggcaagagaatactacagtgaagctgatgccagtcattgtatacagcagattctagaaagtgttaatcattgtcacctaaatggcatagttcacagggacctgaagcctgagaatttgcttttagctagcaaatccaagggagcagctgtgaaattggcagactttggcttagccatagaagttcaaggggaccagcaggcgtggtttggttttgctggcacacctggatatctttctccagaagttttacgtaaagatccttatggaaagccagtggatatgtgggcatgtggtgtcattctctatattctacttgtggggtatccacccttctgggatgaagaccaacacagactctatcagcagatcaaggctggagcttatgattttccatcaccagaatgggacacggtgactcctgaagccaaagacctcatcaataaaatgcttactatcaaccctgccaaacgcatcacagcctcagaggcactgaagcacccatggatctgtcaacgttctactgttgcttccatgatgcacagacaggagactgtagactgcttgaagaaatttaatgctagaagaaaactaaagggtgccatcttgacaactatgctggctacaaggaatttctcagcagccaagagtttgttgaagaaaccagatggagtaaaggagtcaactgagagttcaaatacaacaattgaggatgaagatgtgaaagcacgaaagcaagagattatcaaagtcactgaacaactgatcgaagctatcaacaatggggactttgaagcctacacaaaaatctgtgacccaggccttactgcttttgaacctgaagctttgggtaatttagtggaagggatggattttcaccgattctactttgaaaatgctttgtccaaaagcaataaaccaatccacactattattctaaaccctcatgtacatctggtaggggatgatgccgcctgcatagcatatattaggctcacacagtacatggatggcagtggaatgccaaagacaatgcagtcagaagagactcgtgtgtggcaccgccgggatggaaagtggcagaatgttcattttcatcgctcggggtcaccaacagtacccatcaagccaccctgtattccaaatgggaaagaaaacttctcaggaggcacctctttgtggcaaaacatctga

SEQ ID NO: 2907 - protein, 499 aa, Homo sapiens [sequence omitted]

SEQ ID NO: 2908 - DNA, 558 bp, Rattus norvegicus; identical to SEQ ID NO: 2904
  ref <308>: DATABASE ACCESSION NUMBER: EMBL / L13406
  ref <309>: DATABASE ENTRY DATE: 2000-03-04

SEQ ID NO: 2909 - protein, 533 aa, Rattus norvegicus; identical to SEQ ID NO: 2905
  ref <308>: DATABASE ACCESSION NUMBER: SWISS-Prot / AAA41479
  ref <309>: DATABASE ENTRY DATE: 2002-06-15

SEQ ID NO: 2910 - DNA, 1500 bp, Homo sapiens; identical to SEQ ID NO: 2906
  ref <308>: DATABASE ACCESSION NUMBER: Refseq / NM_001221
  ref <309>: DATABASE ENTRY DATE: 2002-05-14

SEQ ID NO: 2911 - protein, 499 aa, Homo sapiens [sequence omitted]

SEQ ID NO: 2912 - DNA, 2410 bp, Rattus norvegicus
  ref <308>: DATABASE ACCESSION NUMBER: EMBL / L13619
  ref <309>: DATABASE ENTRY DATE: 2000-06-03
tacgctgctttggtggcgtgcacctctcacggtgtgcctagccgccgatgcccaggctgcacgatcacgtctggagctacccaagcgcgggcgctgcgaggccgtacagcctcccgcgaggcatgattgcggcggccctctgtccgcagggccccggagcccccgagcccgagcccgcgccccggggccagcgagagggaaccgcaggcttcagcgcacgacccggcagctggcaccacgacctggtgcagcggagcctcgtgctcttctcatttggcgtggtcctggctctggtgctcaacctgctgcagatccagcggaatgtcacgctcttcccggacgaggtgatagccaccatcttctcctccgcctggtgggtgcccccgtgctgtggcacggcagccgctgttgtcggcttattgtatccctgtattgacagtcacctgggagaaccacacaagttcaagagagagtgggccagtgtcatgcgatgtatcgcggtgtttgttggcatcaaccatgccagtgccaaattagatttcgccaataatgtgcagctgtccctgactctggcagccctatccttgggcttgtggtggacgtttgatcgatcccgaagtggcctggggctcgggatcaccatcgccttcctagccacgctgatcactcagtttcttgtttataatggcgtctaccagtacacgtccccagatttcctctatatccgttcttggctcccttgtatatttttctcaggaggtgtcacagtgggaaacataggacgacagttagctatgggtgttccagaaaagcctcacagtgactgagtttgagcacatgattcagggcggaagcagaatgtggagacactggtcctgggtgtggtgaagaggatctttttctcaatgttccatttagactgggctgatgataaatgactcctaaagatgcgttcacgtagtctaaatagcaagtggaggcaaggactacttacctaaagtcttaccttgctcacccaccctcacacctgtctgcactggaacattctatcccaggctgtatgtgagagttgggtaagggggccggtttcccgagtattagatttcactcatcattcaaagcaaaatgccatatttcaaagccttgaatcaaaatgaattaccaactagcagttttatatcagtgcccaaaggagagaggttgatggtgcttaacagagatgaagtatgtgcagtaagaatatttatccagaattaaaatatagggttgtgtaaagaggggctaagggcagcagtaagttggaggaagatcatgctccccggaggacccagtgcagccacatctccaggtctcgctcaggctggcgctcacacgtgggtctcatcagtgtgggaactatgctgtttactgacaggaggcttgtagacaatcttactgacagcccaggacaacacaaagtcaggattctgcattgcgatgctggacttttcatctcaatttaagtgaagttttatccaagatctggagcatctaagagtgaatagctgtctgctgtttcagtcgtaatgagccgaaattgtgtctctgtcactccagagtggagaggacttttccacagccctatggagcttgcaatctgtgattgccttgtaaaaggttgagtgtgcacgtcactgcgttcggtgcgcagtgtcctgtgtgtgttggacagcgtagaacacatgggaccttgcaagtattgggtcttcaacttcaagtgcaatgtgtatgaaaccaatctgagccttgtattctcttaaatatttattatttttttttaaccgcgcgagctgttctggagaagggttctcgggtcatttcagagctgtgtgaggcacactcagcaatactgtgtcagccgtgacgctccccagtcacaccctccactacaccctagtcctttgacatactccaggtttgtaagtttagtgatttttacttacaaatttacccttttttgcattctaaaattgtgtttaaattatatggaagtacttggtgtaggcagtcattggtccccgggcagcagaagctctgcctgtggaatcgggtttgggttcactctgcagggctcctcatagaggctttgcttatttgttttgaggaaaatgtctggagtaaacctttgttttctgaaactactttagctaaaagaaaatgggtgttctagactttggaatggttcttaaagtttcctggaaataaaaataatgattggcacttcaaagacattctttagccaagacttcagtgtctagcagaaaccacaagtgactagaagagcaagtgatcttggtgatgcacttgattgtatacaatgagtattttttctcttaaactggaaataaatctgttagaaataatatagcca

SEQ ID NO: 2913 - protein, 259 aa, Rattus norvegicus
  ref <308>: DATABASE ACCESSION NUMBER: SWISS-Prot / Q08755
  ref <309>: DATABASE ENTRY DATE: 2001-10-16
MPRLHDHVWSYPSAGAARPYSLPRGMIAAALCPQGPGAPEPEPAPRGQREGTAGFSARPGSWHHDLVQRSLVLFSFGVVLALVLNLLQIQRNVTLFPDEVIATIFSSAWWVPPCCGTAAAVVGLLYPCIDSHLGEPHKFKREWASVMRCIAVFVGINHASAKLDFANNVQLSLTLAALSLGLWWTFDRSRSGLGLGITIAFLATLITQFLVYNGVYQYTSPDFLYIRSWLPCIFFSGGVTVGNIGRQLAMGVPEKPHSD

SEQ ID NO: 2914 - DNA, 1469 bp, Homo sapiens
  ref <308>: DATABASE ACCESSION NUMBER: EMBL / BC001880
  ref <309>: DATABASE ENTRY DATE: 2001-07-13
ccgcggcccgccatataaacccgcgcgcccgccaggcgctgcggccgtcccgggccgtgactcctcctttcccccgccccgcctccgttcggagagccggcgggcgggcgcctctcggccaggaagcgcctcttggacgcgtgtgaccgatgcccagattgcacgaccacttctggagctgctcctgtgcgcacagcgcgaggcgccgaggccccccgcgagccagcgccgcggggctggcggccaaggttggggagatgatcaacgtttccgtgtccgggccctccctgctggcggcccacggtgccccggacgctgaccccgcgcccaggggccgcagtgctgcgatgagcggccccgagcccggcagcccctaccccaacacctggcatcatcgcctgttgcagaggagcctcgtgctcttctcggttggggtggtcctagccctggtgctcaacctgctgcagatccagaggaatgtcactctcttccccgaggaggtgatcgccaccatcttttcctccgcctggtgggtccctccctgctgcgggacagcagctgctgttgttggcctactgtacccctgtatcgacagtcacctcggagaaccccacaaatttaagagagaatgggccagtgtcatgcgctgcatagcagtttttgttggcattaaccacgccagtgctaaattggattttgccaataatgtccagctgtccttgactttagcagccctatctttgggcctttggtggacatttgatcgttccagaagtggccttgggctggggatcaccatagcttttctagctacgctgatcacgcagtttctcgtgtataatggtgtctatcagtatacatccccagatttcctctatattcgttcttggctcccttgtatatttttctcaggaggcgtcacggtggggaacataggacgacagttagctatgggtgttcctgaaaagccccatagtgattgagtcttcaaaaccaccgattctgagagcaaggaagattttggaagaaaatctgactgtggattatgacaaagattatcttttttcttaagtaatctatttagatcgggctgactgtacaaatgactcctggaaaaaactcttcacctagtctagaatagggaggtggagaatgatgacttaccctgaagtcttcccttgactgcccgcactggcgcctgtctgtgccctggagcattctgcccaggctacgtgggttcaggcaggtggcagcttcccaagtattcgatttcattcatgtgattaaaacaagttgccatatttcaaagccttgaactaagactcaattaccaacccgcagttttgtgtcagtgcccaaaggaggtaggttgatggtgcttaacaaacatgaagtatggtgtaataggaataatatttatccaaaagatttttaaaaatagggctgtgtttaaaaaaaaaaaaaaaaaa

SEQ ID NO: 2915 - protein, 277 aa, Homo sapiens
  ref <308>: DATABASE ACCESSION NUMBER: SWISS-Prot / O15503
  ref <309>: DATABASE ENTRY DATE: 2002-06-15
MPRLHDHFWSCSCAHSARRRGPPRASTAGLPPKVGEMINVSVSGPSLLAAHGAPDADPAPRGRSAAMSGPEPGSPYPNTWHHRLLQRSLVLFSVGVVLALVLNLLQIQRNVTLFPEEVIATIFSSAWWVPPCCGTAAAVVGLLYPCIDSHLGEPHKFKREWASVMRCIAVFVGINHASAKLDFANNVQLSLTLAALSLGLWWTFDRSRSGLGLGITIAFLATLITQFLVYNGVYQYTSPDFLYIRSWLPCIFFSGGVTVGNIGRQLAMGVPEKPHSD

SEQ ID NO: 2916 - DNA, 2410 bp, Rattus norvegicus; identical to SEQ ID NO: 2912
  ref <308>: DATABASE ACCESSION NUMBER: EMBL / L13619
  ref <309>: DATABASE ENTRY DATE: 2000-06-03

SEQ ID NO: 2917 - protein, 259 aa, Rattus norvegicus; identical to SEQ ID NO: 2913
  ref <308>: DATABASE ACCESSION NUMBER: SWISS-Prot / Q08755
  ref <309>: DATABASE ENTRY DATE: 2001-10-16

SEQ ID NO: 2918 - DNA, 1469 bp, Homo sapiens; identical to SEQ ID NO: 2914
  ref <308>: DATABASE ACCESSION NUMBER: EMBL / BC001880
  ref <309>: DATABASE ENTRY DATE: 2001-07-13

SEQ ID NO: 2919 - protein, 277 aa, Homo sapiens; identical to SEQ ID NO: 2915
  ref <308>: DATABASE ACCESSION NUMBER: SWISS-Prot / O15503
  ref <309>: DATABASE ENTRY DATE: 2002-06-15

SEQ ID NO: 2920 - DNA, 2410 bp, Rattus norvegicus; identical to SEQ ID NO: 2912
  ref <308>: DATABASE ACCESSION NUMBER: EMBL / L13619
  ref <309>: DATABASE ENTRY DATE: 2000-06-03

SEQ ID NO: 2921 - protein, 259 aa, Rattus norvegicus; identical to SEQ ID NO: 2913
  ref <308>: DATABASE ACCESSION NUMBER: SWISS-Prot / Q08755
  ref <309>: DATABASE ENTRY DATE: 2001-10-16

SEQ ID NO: 2922 - DNA, 1469 bp, Homo sapiens; identical to SEQ ID NO: 2914
  ref <308>: DATABASE ACCESSION NUMBER: EMBL / BC001880
  ref <309>: DATABASE ENTRY DATE: 2001-07-13

SEQ ID NO: 2923 - protein, 277 aa, Homo sapiens; identical to SEQ ID NO: 2915
  ref <308>: DATABASE ACCESSION NUMBER: SWISS-Prot / O15503
  ref <309>: DATABASE ENTRY DATE: 2002-06-15

SEQ ID NO: 2924 - DNA, 2410 bp, Rattus norvegicus; identical to SEQ ID NO: 2912
  ref <308>: DATABASE ACCESSION NUMBER: EMBL / L13619
  ref <309>: DATABASE ENTRY DATE: 2000-06-03

SEQ ID NO: 2925 - protein, 259 aa, Rattus norvegicus; identical to SEQ ID NO: 2913
  ref <308>: DATABASE ACCESSION NUMBER: SWISS-Prot / Q08755
  ref <309>: DATABASE ENTRY DATE: 2001-10-16

SEQ ID NO: 2926 - DNA, 1469 bp, Homo sapiens; identical to SEQ ID NO: 2914
  ref <308>: DATABASE ACCESSION NUMBER: EMBL / BC001880
  ref <309>: DATABASE ENTRY DATE: 2001-07-13

SEQ ID NO: 2927 - protein, 277 aa, Homo sapiens; identical to SEQ ID NO: 2915
  ref <308>: DATABASE ACCESSION NUMBER: SWISS-Prot / O15503
  ref <309>: DATABASE ENTRY DATE: 2002-06-15

SEQ ID NO: 2928 - DNA, 1356 bp, Rattus norvegicus
  ref <308>: DATABASE ACCESSION NUMBER: EMBL / L14462
  ref <309>: DATABASE ENTRY DATE: 2000-06-16
cccggagctgtcgatcggggacaaagcgcggccgcccgcgccccccgagccgcccgagccggggccagccccccgcgactgacatgatgtttccgcaaagccggcactcgggctcctcccacctcccccagcagctcaagttcaccacctccgactcctgcgaccgcatcaaggatgagttccagctgctacaagcgcagtaccacagcctgaagctggagtgtgacaagctggccagcgagaagtcagagatgcaaaggcattacgtcatgtactatgagatgtcttacggattgaacatcgagatgcacaaacaggctgaaattgtgaagaggctgaatgggatttgcgcccaggttctaccctatttgtcccaggagcatcagcagcaggtcctgggagctatcgagagagccaagcaggtcacggctcccgagctgaactccatcatccgacagcagctccaggctcaccagctgtcccagctccaggcgctggccctgcccctgacaccgctgcctgtcgggctccagccgccatccctccctgcggtcagcgcaggcacaggcctgctgtcactctctgctctgggctctcagacccacctctccaaggaggacaagaacggacacgatggggacacccaccaggaggatgatggagagaagtccgattagctcctggggagagggagggggaggggggataccaggggagacaggcacagagagcacagtgttctgagggccacactgcacacagctcggtccctacccaagcttccacctccagtcctggttccagctgtgcaccctgggcctaggagacgccagagggacagcccaggctacagggaaaattccccaccttcaacatttccccgggctacagccaccaatctcggcccagaatgtacacaacgctagccgcccctttccaccctgtgcaccccgaatttgccccctttccccttctctgcttcctgcactgcacacctgctaggcccagacccctccccccagctcacccagctctggttccctcaaccgcggaaagaaagcattggctcgggactgcagtgggggtgggcaccccacaaacttccctctccccttccccaaataaacgtgagggttaaaagtcggtttgtttattatttctttttcgtcccagtactctatagctaccatctaagagagaaaaagaaggaagccctggagcgagcgagggtctgtctgtgcatatagttagatttttctggtcgcctcgctttgcaccgagaggtggagggccgctgtactgagggtggggtctagctgtgccttcaaaataaaaacatgaaaaggtcaaaaaaaa

SEQ ID NO: 2929 - protein, 197 aa, Rattus norvegicus
  ref <308>: DATABASE ACCESSION NUMBER: SWISS-Prot / Q06195
  ref <309>: DATABASE ENTRY DATE: 2001-10-16
MMFPQSRHSGSSHLPQQLKFTTSDSCDRIKDEFQLLQAQYHSLKLECDKLASEKSEMQRHYVMYYEMSYGLNIEMHKQAEIVKRLNGICAQVLPYLSQEHQQQVLGAIERAKQVTAPELNSIIRQQLQAHQLSQLQALALPLTPLPVGLQPPSLPAVSAGTGLLSLSALGSQTHLSKEDKNGHDGDTHQEDDGEKSD

SEQ ID NO: 2930 - DNA, 31737 bp, Homo sapiens
  ref <308>: DATABASE ACCESSION NUMBER: EMBL / AC005944
  ref <309>: DATABASE ENTRY DATE: 2000-03-03
gatccgtccgcctcagcctcccaaaatgctaggattacaggcttgaaccaccgcgcccggcctgcttttgttttttaataaagacagtgtctcgttctgtagccaggctggagttcagtggcgcgatcatggctccttgcagcctcaaactccggggctcaagcaatcctcccgcctcagcctccagagtagctgggactacaggcacacaacaccacgcctgactattttttggatttttagtagagatagggttgtgccatctcagccaggctggtcttgaactcctggcctcaagtgatcctcccaccttggcctcccaaagtgctcggattacaggcatgagccactgcactccgccttatttttattttttgtagagatgatgtcttcctatgttgcccaggctggtcttgaactcctgggttcaagtgattctccaatctcagcctcccaaagtgctggggttacaggtgtgtgccagcgtgtctggctggactcagggtctttgtgtgggaactggggtagggatgttgcgaaacccaccctgcttttggtgggtgagagtcagaggaggccttcagaaaagtgacttctagggagtctcagagaattagaatgcctgggaggggaaataaagagaaccctgttccaggcagagggaacagcatgtgaaaaggcctcaaggcaagggacagcaagatgtttcaccttggctgcagcctgttgagtaggagtgaaaggagggatgggtagggtctcctgggccgaggtgaagaatttcgaattaattccaagggcagtgagagccaaagataatctttttttttttttttttttttttgagacagaatctcactctgtcagccacgctggagtacagtggcatgatcatagttcactacagccttgacctctagggctccagcaatcctcctcactcagcctcccaagtagctgggaccacaggtgcacaacactatgcccggctgattctttttttttttttttgagacggagtcttgctctgttgcccaggctggagtgcagtggtgcgatctcagctcactgcaagctcctcctcccgggttcacgccattctcctgcctcagcctcccgagtagctgggaccacaggcgcctgccaccacgcccggctaattttttgtatttttagtagagacggggtttcaccgtgttagccaggatggtctcgatctcctgaccttgtgatccacccgccttggcctcccaaagtgctgggattacaggcataagccaccgcgcctggccataattcttatatttttgtagagatagggtctcactatgttgcttaggctggtcttgaactcccagcctcaagcgatcctctcaccttggcttcccaaagtgctgagattacaggtgtgagccaccaggagcagcctatcttttttcatgactgtgtagtattctgctgtgtgaccatgtcacaatccatctatttgattgggggcaattatgacaaattacagcagctctaaacactcttgttcaggtctgtttttttgttttgttttgttttgttttgtttgagatggagtttcactctgtcacctaggctggaatgcagtggcgcaatctcagctcactgcaacctccgcctcccgggttcaagcgattctcctgcctcagcctcctgagtagctgggactgcacggctgccaccacacccgactaatttttgtatttttagtagagatggggtttcactatgttggccaggctggtcttgaacccctgacctgaggtgatccactcacctcggcctcccaaagtgctgggattacaggcgtgagccaccgcgcctggccaattgttcgggtctttttgatggactcatatgacatttccgttgggagatggatccaagaggggaattgctggattatgtggtgccaagtggccttctgaagtagaggtaagagtttacccttgctggccgggcgcggtggctcacgcctgtaatcccagcactttgggaggccaaggcgggtggatcacgacgtcaggagatcgagaccatcctggctaacatggtgaaaccccgtctctactaaaaatacaaaaaaaaattagctgggcgtggtggcgggcgcctgtaatcccagctacttgggaggctgaggcaggagaatggcgtgaacccgggaggcagagcttgcagtgagccgagccgagattgtgccactgcactccagcctgggcgacagagcaagactccatctcaaaaaagaaaaggaaataagaagaatttacccttgccaaggggtgtgcctaggcgtgttcaggtttcaacaagggtaaatgtcagcaggggatgatcccttgcaactggcatttttagaggcactttggctgcagtggagatggggtgggacctgccaggaggctggtgtgatcagccagccctgtcccctccactcccagccctctcctcagggacatgagacattttccccaatgtcggctgtccatctccacccttgtcagctcccctcagctcggacttcctcctgccgtgaagtccctccagagtagaaatggccatctcccatttgctgggtgggcagcaacatgttcccttggcccaagtcccagaggagccaggggctgaggccaagatgggaaaactgggggcaatcccctttccttctggcttccccacggctggtgcagcttgggtgaggcggtgggggttggggggcttctggctgttccttagaggatggaggctcagctggggcgagtcagtgttctctctgagtatactggccaggcacgggggctcacgcctgtaatcccagcactttgggaggctgaggcgggaggactgcttgagcccaggagtttgagacctgggtaacatggtgaaacctcatttctacaaaaaaaaaaaaaaaaaaaattatatatatatatatatatatatatatatatatatatatatatatatatatatatatatacaaaagattaggcgagtatggtggtgcatgcccactgtcccagctcaggaggctgaggctgaggtgggaggatcactttagctcagggaagttgaggctgcagtgagctgtgatcacaccactgcactctagcctgggcaacagagtgagaccctgtctcaaaaaaacaaacaaacaaacaaaaaaaacccacccagaaccgaaaagaagtgtacctgtgtgggcactggggcctcctctttctctaagggaagagaatgtcctttaggtcttcagatctcgggtgcagaaatcagctctgccactgactcacttattttattattaaaaaaaaatttttttttaggagatggggtcttgctatgttgctcaggttgtccttgcactcccggcctcaggcaatcctcccacctcagcctccccacttactagcttagggatcccttcgcctttttaagcccccttaactgcctgtctaaacatcaaccacctgggccatgctgtgtgacctgaagtcttcagctcaccctctctgggctaggcatcagagcagtgtaggccaaatgcagaagcgtgacccaccaactctttttttttgagacagcgtcttgttctgtcgcccaggctgaagtgcagaggcatcatctcagctcactgcaacctctgcctcccgggttcaagcaattcttgtgtcccagcctcctaagcagctggaattacaggtgcacgccaccatgcccggctactttttgtattttttttttttttgagatggagttttgctcttgttgcccaggctggagtgcagtggtgcgatctcagctcaccgcaacctccttgaattcaagtgattcttctgcctcagcctcttaagtagctgggatcacagttgcccaccaccacgcccagcttttttgtatttttagtacagacagggtttcaccatgttggccaggctggtctcgaactcctggcctcaagtgatctgcctgcctcagcctcccaaagtgttgggatgacaggcgtgagccacaccgcaccgggccacagctaggaactcctgatgttctaggaggatgtctcacattggaaggaaccccgtcctcccccgggggcagccacaacacagaggcagggacacagcaccgaagcttctcacatctttattggaaaggcacagctaagcccacccttgatacagcattttccacttctctctgtagagatcagacgattgaacacgagataagctgactatatacagacacaggtgtgggtgttgcttttttttaaaaacacttttgtctttttttttttttaatatcccctttcttaaaagacaagctagtatactggaaaaagaaaaaaataataataaaataaaaaccaagacaactttagtaccctcatctttatttgggaaggggagggggaatcctgggtcgcccaccctcaccctgctcctcccagctcagctaagctcgtccctcgtgcccccccttttgtgggcgatgggagaggaccaggtgggcgtggaggtgtctggaactagcagaggtggtgagtggggcaggtggaggtgggagcatacctgggacccggggtcgggggagactcggggtgcccaggacgggaaaggggcagctagcattgcgtgcatgcagtaccagggtgagagggctgtggcccaggcagactgtcggttacacatgttcaaaacgggggaagggccggggctgctgcgcttcgcgaggtcttgctcccttgggacctggtctcccatctgaccctccaggccttagcttgcctcacatgtcagggcaggtatccacctaaccaggctgcaggggaggaggagggaagccgggaatggggtaggaagaaagctagaggtggcctgcaagctgggctggggcccccgccggcggccaccataaatactatgggagtttagccaatcccgagctccgctgtgtcttgtgctaaacattcctttctctccgtgcctctgtctcccctctgtcccccctcccaacctccctgtcccggccccctgctaatccgacttctcgccatcatcctcctggtgggtgtcaccatcgtgcccgttcttgtcttccttggagaggtgggcctgggaacccagcgcggacagcgagaggaggccggtgcctgcgctgaccgccggcagcgaaggcggctgcagccccacgggtagtggggtcaagggcagggccagggcctgcagctgggacagctggtgggcttggagctgctgctgcagggcgggggaggggaacattagctgcctggggcccacctgtcccccgcccacccgcccaggtccccatacatactcggatgatagagttcagctcgggagcggtgacctgcttggccctctcaatggctcccaagacctgctgctggtgctggaagggggtcgggggagaggagaggcagtgattcctcctgatcctgggagaggagagggggacggccctgaggccaggaggagccccactaccaagtgggccatcatgtctgctcctcccagtggttttcaaccccatcagaaagcaccctccctctctccaactgcttcctttcaccaagctcgtctcttcgtctggccaacagagacaaatggaaaagtgcagaaaacaattaaaagggttttgtgctaagtagttaggaaacagcttttgagtgagcccgggagaaaccctggatcctgacctatcctatgtgcacagccacctgcaaagatgtgaaacatgtgaatgtttgtgcagtacacaacctgcccaactgtacagggacgtcctgatcctaggagctccaagactgtgccctgagtctggccaaattgagcccttctcctaccatggctggggagggcccaatgaattctggcagggctggctggggaatgggctcagattcagggcagttcctccctgagctctccccaaacacctgactctgtggccagcagatgctagaatctaccaatctccctttttgccttggctaccaggaagcctctgttctgaagggctccaagtgcccttttctctagggctttcattgggtcctgctaagacttgtccctgggcaaagcagggcacccaaaggatcctgagatacccacagggattgaagaggaagttacaaacttttgacagtaaacttggcagggacaggagatgggccttacatggccctggggaggggcggcctcgcatcctgagcctcagaacccaagaaaggagaagaggagctgggcgtcaggttcatctgggtgtgtgtgtgcatgtggtaatgtgtgctcaggatcacgtgtgcccacgtgtagctgcacattcctgcatgcgtgtccctgtgctgtctgcacacacgtgtatccgtgtctgcatctgtgtatctcccgtgtgttgatgtgctcgtgcctatctgtgtggctgtgtccatgtgtgaccaccctgtgctaccccttcccccacaatcccctaacaccctctagtccttggtcctgtgcagcccgcatggcctggaggaggatgtctcaagagggtgaaaggaggaagagagatgagaaaaaaacattcctggtgcagtttaggcccatctgacatttctacctatgacatgactcactccagctgggaattccagagcagggtgaggcccgccccccacacgcctgcacccctggagtgtctctggcccggggattcttctgcacaggccggctctggtgttcagagccagggaggtccagagaggggaggcgtgtgccctggggcgcccagcacaccacccaagatggctgcagtggacaggggctgggcaagtgcggggccccctcacaacccctccccaaggccctggctcttacctcttgggagaggtagggcaggacctgggcacaaatcccgttcagccttttgacgatctcagcctggaacacacagatgaagccggcttcagtcctgggcgggtggcaggtgcaggctagccacaggaggcctgcgcggggcccggcccagccctgccacttgcggcttctaagaggggctaggtctggccagggtgggatgagcaaagccgtgttcgggcccgagggcagccagtcagtggcaaaggtggggctggacaccggctgtcgcctgcagcttagagtgaggtaagtgcaggatgaggccagactgcacattcctcgggggtcggccactcaggcccctggcaggtagtaagcgcttgtgcgaatgtagggagggctgggggccgtaggctgtggggaaggtctctgcccctccccaccaccgggagaaacactcccagggaggcctgaaaaagaggcggggcgggggggaggagagcgggagcttggggagggcttaggaggtaacaggataaccgggctggcttggtgcccagccgagggccggccgctacctgcctgggggtgcccaaggcggggctggaggtggggggaggagggggaaggaggaggaggaggaggaggaggaggagatgggcgtacctgtttgtgcatctcgatgttcaagccgtaggacatctcgtagtactgtatgggggagagagagggggagcgggagatgggggtggggaaggatggggggacacggagacaaagagataggggagtggcagagacagacaaaggggggagacagcaagagacagctgagggcaggaaagaaaggagaggcaggtgggagggaaagaggagggagagacgcccacacccagcatcccagcccgccctggagaggggcagggggccgctggggctgcggatggagactgggggcactttaggtccctagccctggcctggctcctcccccactccatgtgcaccgcgagaacacgcattccagggctcctaatcttgtatctttctatgtcttgtctgcgggtgggcccagacgccagggaagtttgcctgcctaggtataaacagtgaggggtaaacaaagcctgctggctctggggccagcagctacccccaccccaagccccagatctcaccctgcccctcccctgctctaaaccctcccatggctccctgtcacccctgggggaaaaccaagttcattcccaggccttcacgtagtttctctgtctctgtctggtgaactcctactcatcctgcaagaccccagctgtgtgccccatttctccatatagtcttcctcaggcaggtcctaggtccctctctctgaccccagccctattcttctggctgggagggtcagggtctggctctgcctcccccacagtctgggagatttgggtactgggctgagaccccagcatcgctgctcgagggccaggccaagggtgggtaagggaggggatttttgatgcagaaatcgtcacctggcagttacaaaaccgagcaagtggttctggcagcagcaatgcagtgtcacacatcagccccccgaaatgggtagggctcagaccccctcccacaggcttcttctttgagctcgggcccaaaggggttaagcgtgtggacgctgggaccttggcggtggggagggactcggctgctcccccacgtcagttcctggctgttggctttcacagccggtgagcctccctctcctccctcctccgctgccaaggacagccgggggacctggcagggccggtctgcaacccggcggtttggcacctcggccactgcctcggccatctgccaggctagcgaggcaggctcagcccagcaggggccggctgaatggagaacaggccccgatcctcgcgcttcccaggggaggtggccggggttgagggagcagctgcccgtggtggaggggatgtggagggccctgtcgcccgcccccaacactggacctgggggcggagtgacgttaccatcacatagtgacgctgcatctctgacttctcactggccaacttgtcacattcgagcttgaggctgaggaggcacaggggggagatggggtggttagtggcggctgggcgggagccccccaccctccgttatccaggggaggaaactgaggctccaagtcccctgtaagggcaagatcagccaattctcagagggtcaagcaataattttttttttaaattgagacgggggtctccctatgttgcccaggctggtctcaaaaactcctgggctcaagcaatcctccttcctcggcctcccaaagtgcttggggttacagatatgagccacccaccgtgcctggtcaatgaagccgtaaactttcataggggctgaggacattgaattgaggggcagggaagttggtaagagttgagctctctgtgatgctgcggggaggggagagcatcagggcccctgactgtaagaagggggtgatgaaaccacccttgcagatctggttggggggaaataagcaacattatagtaacattataggaacaacagaagttagagggggcacggtaacgctagctctgagagtctcacgagccttcacctctcacggtcccgacgaggcccgcaacgtcattgtcacgctccttttatagatgacacagtggacacccagagagggtgaggaactggctcaaggtcacacagccaagcagcagcccaagctctcaaccacaggggaaaattttccagacccaaatagaacgtacaaagaggctgagagggtctggggctgcaaggcggctcccggctggacttcccaaggggaccctagcttcatggggggcctggacttcccaggcagacccctcagctccctcttagtccttcctaacagccttttttctttagctgggacaaaacacaccatttctcccactccacctggccagtccgggtggctgacaccagagcttcctacaggccctcccgggaaggatgagctgtggggcgtttctcaaagcccccatgagggcgtcatggccggagggaagagagcaggcaggagggcctcccagtccaggaaaagaactggtgatggtggtgggggaggtgtcctttaacctacttaaatccaacccagcacaggggccctgcggacctggctgtggcttacctgcttctgccatccccaccccctctcggactgggttcaaagctcagcccttcgtcttccctgctgtgtgactctaggcaaactccactacctctctgggcttcatttcctcctctgtgaggtaccactaacaacctcgcagggtggggtggagaagagtcaatgaattcagacaagaaaagttctagaacagtacctggcatacagtaagcatcccataaatgcacatggatcttaggataccccaggaacctggcattttgctccaccggagaagagtgtgccgggttagggatgctttggccgccaccaatttttctctagttttcttttaaaatgtgcatttgttgctaccattaaaaacaaaaacaaaaacaaaaaaaaaccggggctgggtgcagtggctcacgcctgtaatcccagcattttgggaggccaaggcgggtggatcacttgaggtcaggagtttgagaccagcctggccaacataacgaaagcccgtctctaccgaaaatacaaaaattagccgggtgtggtggtgcacgcctgtaatcccagctacttgggaggctgaaacagaagaatcgcttgaatcccaaaggtggaggttgcagtgagccgagatcgcgccactgcactccagcctggcgacagagcaagactccgtctcaaaaaaataaaataaaataaaaaagaagtttcactccaaagcctgcatttctggcctttcttgaaaaataggatggtctggccacccaggggctgttacgcctcgaacatccggtgtgtgcctctgatatggtagggtccctcgttggacagcaggaagcccaggcccagcggatggagaccccaaagctcagagagggcttccggcttagcagaggtcacacagcactgtgaccgccatctgatcccttccctgtggaatcaggtcagccccggggctcaccaggcggtatccaacccttcatatcgaggaacccgcacaaaagcttctggggcctgcatggaaagctgactccagcaccttcgactgtcagtgtctcagtttgcccagcttgagaatgggtacgacagtcggacgacaggaaggatgaagcacgaggaggcacgaacggtcttgagcacacagggagtacccaaaaaggtgggatatttgcagcagcaacaacaaaatcgagattcccctttctacttggaggaaatccaggatccttccaggaacacttctggggtgggcacgcttcagtttagagagggccccaaggccaaacgggggtttgagcatagcctgactttctccagattcccaggcccggcgtgcccctccagagcagggcaggcgagaacctatatccttaaaccaggagagagacctggtgcaaacctcagccttgccacttcctcaatgctatggacacccccgaggaaataacatcataacatctctgggcttaagtttctttttttctttcttttttttttttttttttttttttgagacagagtctccctgttacccaggctggagagcagtggctccatctctgctcactgcaacctccgcctcacgggttcaagcaagtttcctgcctcagccacccgagtagctgggattacaggcgcccgccaccacacccagctaactatgtatttttggtagagacggggtttcaccatgttggccaggctggtctcgaactcctgacctcaagtgatccaccttcctcggcctcccaaagtgctgggattacaggcatgagccaccacgcctggcctgggcttaagtttctttaagtgtaagaggactaaatagttccttccccttagataccgcagcgtggcaagctcttcagaaacgccagatttctgaaagaagcagcaccttggagaatctgacgggtgctgggaaccctttctccaaaactgggcaaagagagagatgaccaggctgcagaatgtttctgttttgggggttgagggatggcgagtccgtgccgtaactccaattgttggaaggtcttttatccaatgggggacttgggggtattggggaggagggaggggctctgaagccacacagctgaatctttgggcaaattatttaactatttttgtgcctcggttttctcctctacaaaatggggctgtttaaaataaatgaattcagtatttgtcaagtgattaggtcagagtctagcatatattattttcccaatctccaggcctcagccttgccatctgcgcagaagaaatggggggactcacattctcgggacgcagggacccccagtcccccagctcacctgtggtactgagcttgcagtagctgaaattcgtctttgatgcggtcgcaggagtccgaggtggtgaatttgagttgctggggtaggtgcgaggagccctgtagggatggggcggcccgggtcaggcccaggcgtgggctggacccccctcaagggccggctaggagggagcggccgcgcagctgcggcgccccccctcctgccccacttcctgggcccgtgtttacggcccctggcgcgaccccacccgcgcttcctgccccccgcctctcccgggggaagccgagcgggtgggtgcgcccggagccgccccgtcccccgccacccccaggcagtgggggtgcgttttaaggcccgccctagatggggggcagggtgcgccctctaccgccctccaaagcgccgggagggagtgcacatccgaggggggtagaaacgcgccctagggagccccctccccaagttggggggcagcgattcctccctgcaaagtcctcttgggggaggggtctctctctcggtgctcgaaatcttccgggggggcccaaccccagattcccagcgcccttcctcggggacacgctcttccgggaggggtgcgcctcggatcaccccccccaccacaggcccccaaaggatccccgggctagaggtgcctcgcggggcttccggagcgccccaggcccgaggccaaggccgtccgaggccctgactgtcccggcgggttggggggggggggcgccaagccgggagctgcggcgggggggctcggggcccggaagctggggtggatcgggaactggagggggggtgtccgggggccggcggcaggaggggaggggggtcgcgccgggctgggagctggagagggaagacagggccggggagttggggggggcgccgggccggaggcaccgggcctgggggttggggggcgcggggccgggagccgggggtcgggggcgtagggcccggatccggggtgggggcgccggccggacgggccccgcttaccgaatgcctgctttgtggaaacatcatgtcaatcgcggcggggggcgcgggctgcgccccggctgtgcgccccggctcgggctgctgggggcgccgggcggccgcgcctttgtcccggcgccgatcggcagctcccggggccgccgccgcctcccgcgcccggcctcgcccgcttcctgcgccccctccccgcgcgcccggccccggcgcgccccgggccccgcttcctgcgcgcccggcgcccctccccgcccctccccgccgcccgcctccccgctccccggccccaccgctattgtctaatggcggcgacgccggcagtggccgcggctcggctgctgcggaggcttcggctccacctgccgccgcccgtgccccgtgcgcgccgccgaggggggggacgcgcgcgcccggggaggcctgcggatccccacgccggcccgcctccccgtggcccgcccgccgcggtgaccttgggcccggcccgcccccgccccgggcagcggcccccgccaccctctcctacccggcagccggccgggcctcggtttccccatctgtcaaagaaaagggacccggctgcccgcgtcgaagccgccggccctgctgtggcacgacctggacgcgtgccacggacgtgctctgtgaccttggctctggctgggcggtggttcttgctgagccttagtttccttttctgcagaaaggcagcggtaatgccgccttcctgagggaagccattcttgtgacacatttatagaacgcctactgtgtgccaggccccgctgctccagggccctggggtggggcggggcgggggtgggtccctgccctggtggtggtgcctggagacagacagagacaaattcacaagctgaattcctggcaggtcagatggtggggacagttctgcagaaaaaccagccgggagaatggcagggtaggaaggtgcaaagttaaagaggtgggagggaggatcagagacggcttcctccacccctaaagcgacctgaagaaggagggagaacagggggatggggtacagaggtagtcagaggcaggaccaacaggtgcaaaggccctggggcaggactgtgcctggcagcagagtgcccggggggaggtcaggaaggccggagggaggcagggccgggggcttcgtgcttttgtccagggcccccccaccccacagcagggcttgtgcttgggttaatatttactgctgcattttgagatttctaatcatttttgaacaaggggcctttgagttttcttttgcactgggccctgctaactctgtagctggtgaagcaggccagtccagcaaggacttgtgggtcttggggaggacttgggattttgctctgagtgaggtaggagccctggaaggctgtgggaggaggagggacgggacctggtggttggttggtttgttttttgagatggagtttcgctcttgttgcccaggctggagtacaatggcacaatctcagctcaccgcatcctgggttcaagtgattcctgcctcagcctcccgagtagctggattacaggcacgtgccaccacgccccgctaattttggagttttagtagagacggggtttctccatgttggtcaggctggtcttgaactcccgacctcagatgatctgcccgcctcggcctcccaaagtgctgggattacaggcgtgagccaccgtgatcagctgtttgtttgtttttgagatggagtctcactctgttgcccaggctggagtgcagtgatgtgatgttggctgactgcagcctctgccacccggattcaagtgattctcctgcctctgcctcctgagtagctgggattacaggtgcgcatcaccacgcctggctaatttttgtatatttagtagagacaggtttcaccatattggccagactggtcttgaaatcctgacatcaggtgatcctcccgcctccacctcccagagtgcagggattacaggtgtgagccactgcgcctggccctggacttgggcttttgctctgagtgaggtgggaatcctggagagccgtgggaagaggagggatgggacctggtggcggttattaaaggatccctctctctgccacgcagagaacaggtcccaaagaggctactgaaataaggctatgacattaaggtccccctttggcaggtgcgaaacacagtctcttcatcatcgtcatccactaggcagcctgctcccttgaatgaatgcaattgatttgggccttgggtgttcccatctgtaaaatagacttggaaccccaggctccttaccttggcaggtaagggtgatagccttcagtgatcaagattaataatctttaaagcagtgttttaatatttttattaaaaaaaaattttttttttgaggtggagtctcactgtgtggcccaggctggagtgcagtggtgccatctcggctcactgcaagctccacctcccgggtttatgccattctcctgcctcagcctcccgagtagctggggctacaggcgcccaccaccacgcccggctaattttttgtatttttagtagagacggagtttcactgtgttagccaggatggtctcgatctcctgacctcgtgatctgcctgcctcggcctcccaaagtcctgggattacaggcgcgagccaccacacccggcctaaaaaaattttttcagacacagtcctctgttgcataggctagagtgcagtggtgcaatcatagctcactgcagcctcccactcctgggctcaagtgatcctccgacctcagcatcctgagtagctgggactacaggagtgcaccaccatgcccagctaattttaacattttttgtaagccgggagcagtggctcatgcctgtagtcccagcactttgggaagccgaggccagtggatcacaagctcaggagttcgagaccagcctggccaacatggtgaaacctcgtcactactacaaatacaaaaattaccggggtgttttggcgggcgcctctaattccagctacttggaggctgaggcaggagaatcgctggaagctgggaggtggtggttgcagtgagccaagatcgcgccactgtactccagcctgggtgacagagtgagactctgtctcaaaaaaaaaaaaaaaaaaaagatgaggctagaaaggattaggattttggatttttaagattactactacttggtggccgggtgtggtggctcacacctgtaatctcagcgctttgggaggccgaggcaggcggatcacctgaggtgaggagcttgagaccagcctgaccaacatggagaaactccgtctctactaaaaatacaaaattagcctggcatggtggctcacgcctgtaatcctagccacttgggaggctgaggcaggagaattgcttgaacctgggaggtggaggttgcggtgagccaagattgtgccactgcactccagcctgggcgacaagagcgaaactctgtctcaaaaaaaaaagaaacaaagaaacagagattaatactacttagtaacagccaagccttcaaccaaccgcaacacccttgtttttcctgcagggccctgagagactgcgttcctagactgcccctgaagccagtcctgccgctagcacccctgccaccccacccccactgccgtggggaccagacaccccctctcctgggaggccacctgccagtgtttatttaggcaggcgccttccggtatcagtgtgcccgcccagtgaccaaacagccccattttcgaagcccccacactgtcaggggaagcagaactggacacagataccttgagcacggtgaggtgagggctgggccacccacagggacctaggcctgtgaaggagagagtcattgtgaaatcatcgtttttagaaaataggttttttttctgcatagaaggcagcccagaatggtggcccacactataaataatcaaccaagccacacaggtctgtatgtttttgctccgcaccaggggctgccttaagcactttaacctttaggtacagttgtcacacccattttagagatggggggaaaacaggccggcagggtggctcaggcctgtcatcccagcactttaggaggccgaggcaagcagatcacttgaggatcaggagtttgatactagcctggccaacatggcgaaaccccgtctctactaaaaatacaaaaattaaggcgtggtggtgggcgcctgtaatcccagctactctggaggctgaggcaggagaagcgcttgaacccggaaggcggaggtttcagtgagccgagatcgtgccactgcactccagcctgggcgacagaatgagactctgtctccaaaaataaaaaataaaaaaaaagaaaacgaaaaaaaatggggaaagtgagtcacagagaagtgaagtgacttggccaagtgggtagggggcagaaccacgatgttatcccaggcctttgatcttgaccttgggcctttgagcactctgcagtgtggcttctggccgggacacgatggcagcacgtgctgctgggctgaggagctgggattttacctggagggcactagggagccacaggaggttttagagcaagattcttcagttagcgccatcgcattccaccctgggcgacagagggagactccatctcaaaaaataaaagtagattgcatcaaaatagtgtttatcctgatgacttaggtatttggcatccccttagcttttttatttttttttgagacagggttcttactctgtcacccacgctggagcgcagtggtgtgacttcggctcactgaagcctcgacctcccaggctcaagcaatctgcccacctcagcttctcgagtatccgggatgaaaagcgtgtgccaccacgcccggctaatttttgtttttcatagagatggggtttcaccatgttacccagactggtcttgaacttctgggctccagcagtctgccctcctgggcctcccaaagtgctgggattacaggtgtgagccaccacgcctggcccctcttaagtttgacacctgaaaaaaggacctcactctcggccgggcgggctcacacctgtaatcccagcactttgggaggccgaggcgggcagatcatctgaggtcgggagttcgcgaccagcctgaccaacatggataaaccccgtctctactaaaactacaaaattagccgggcgtggtggtgggtgcctgtaataccagctgctcaggaggctgaggcaggagaatcgcttgaacccaggaggcagaggttgcggtgagccgagatcacaccattgcactccagcctgggcgacaagaatgaaactccatctcaaaaaaagaagaaaaaaaaaaaggacctcactctcaagtacactcatcctggtcctagccctgcctcagtcaaatagcaaagtctgctttttggacattctggcccagatcattcattctcttggggggcaaggggcgtcctgggcactgcagggtgctgagcggtgtccctggcctctactcactccatgccaggggcacccccgagatgttccgcccacaggtgtccccagacatcacccagtgtcccgtggggggcacaatgacacgagaatgagcacccctggcttagagcatggaagaaacagggcagctggtggtagaagattctccccggtagtgtgatgggaggattaggcgagagatgggcagcctgggctgggcccatggcaaagagcttttttggggagcataacaagaacagaatgcagatggcgggagggtgaggaagggcagacagcttgccgcaggagggaatgtgtaattaattggcgagaattggggtttaagcacatcacagtgtctgggtggctgccactgagcccccctaccccacacacataaccccccacccccgtccctgaccccacgtgtccggctcacggtccttcctctccctgggattctcagggccacatctggggccaaggcggggcggggatctgtctcatggatccaatcgtctgagaccaggctcaaggcctggttacaaatgagcgctgggccccgcggcctccagggcagagcctggcgctggcgcgtgatggatggggccgcatggccattaatcacaggccggggaggaaacaggtggccgccgtgcagaagcagggacctccctctgctgggcccgggtggaggtaggactcagctgtccagccctggggttgagctcccggactgctgctacctggccgggtgacgtggggccatgagagctcactgctcaagaccttagggtcaccccactgctactcccaaatgcagcttcagatacttagagagcagttactgtgtgtcaggcatgcttgtaagtggaggttctgagcagtgaccaaggagagaaatccccccactccaccttttggagctgataagcttaaaacttttatttatttatatttttggagacggagtttagctcttgttgcccaggctgcagtgcagtggcacgatctcggctcactgcaacctctgcctcccaggttcaagcgattctcctgcctcagcctcccgaatagctgggattacaggcgtgagccaccacgcctggctaattgtttgtatttttagtagagatggtgtttctccatgttggccaggctggtcttgaactcctgacctcaggtgatccacccgcctcggccccccaaagtgctgggattacaggcgtgagccactgcacctggccccattcttgattgaagtgtcactctctcaatgaagctgccttcagcttccctatttgactgaggcagggctaggaccagggtgaatgtacctgggagtgaggtcctttcttaaggcataaaacttaagagaggcagggtgaggtggctcacgcctgtaatctcagcactttgggaggccaaggagggcagattgcttgatcccagaagttcaagaccagcctgggtaacatggtgaaaccccaactctacaaaaaacaaacaaacaaaaattagccaggtgtggtggcgtgtgcctgttgtcccagccactcaggaggctgaggtgggaggattgctttagcccgggaggctgaggctgcagtgagccaaaatcacaccattgcactccagcgtgggtgacagagtgagaccctgtctcaaaaaaaagaaagaaggctgggcgcggtggctcacgcctgtaatcccagcactttgggaggccgagactggcggatcacaaggctaggagatggagaccatcctggcgtgcgcgcacacacacacacacacacacacacacacgccgggcgtggtggcgggtgcctgtagtcccagctactcgggaggctgaggcaggagaatggcgtgaccccgggaggtggagcttgcagtgagccgagatcgcaccactgcactccagcctgggcaacagagtgagactccgtctcaaaagaaaaaaaaaaaagaaagaaaaaaaaagttaaggggatgccaaatacctaagtcatcaggataaacactgttttgatgcaatctacgtgtttttttgtttgtttgttttgttttttgagacagagtctcgctctgtcgcccaggctggagtgcagtggcatgatctcggctcactgcaagctccgcctcccgggttcacgccactctgctgcctcagcctcccgagtagctgggactacaggcgcacgccgccacgcctggctaattttgtttgcatttttagtagagacggggtttcaccgtgttagccaggatgctctcaatctcctgacctcgtgatccacccccctcggcctcccaaagtgcagggattacaggcgtgagccaccacgaccggcccactttttttttttttttttttttttgacggagtctggctctgtcgcccaggctggagtgcaatggcgcaatctcggctcactgcaacctctgtgatccactcacctccccttcccaagtgctgggattaccggcatgaaccaccgcgcccagccaacaatattttaacaaatcaaaattaatgaaaaaaaatccacaatgaacaaaatatcaaaatgttaaataaaaatcttgcataactcactcagactgcctcctaggcccagctcatagaggcctcaacccatattccgcgtgcaggtcatgaggtcagcgttttccctgctccatgggacacagcactgtctgacgtgtaatgcggtttgtgtgtttactttcttgaatgtaggccccgggaggcagggggtttggtgagtcctggtcacttttgtatcctcaatacctagaacagggcctggctcagtataaatgcccaatagttactgaatgagtgaatgaataaatgaatgggttaagatgacacaccaggttgttgcagaattaaatgagataagaccctggaagtaattagcacacagcacccagttggctcctgacatccttaatctacaccttatggcctgagtacaatgttctgattggccagccctgggtcacatgacatccttgagacaaattttatggctcgagtagaatgctctgattggccagccttgggtcacatgacttttcttttttctttttctttttttttttttttttttgagacagagtcttgctctctcgcccaggcaggagtgcagtggccggatctctgctcactgcaaactccgcttcccggtttcacgccgttctcctgcctcagcctcctgagtagctgggactacaggcgcccgccaccacgcccggctaattttttgtatttttagtagggacggggtttcactgtgttagccaggatggtcttgatctcctgacctcgtgatccacccgcctcagcctcccaaagtgctgggattacaggtgtgggccagcaggcctggcctggacaattacttcctctgagaggccttctctaaccagtcatatggaaaaaacaaaaaatattgttattatatcactctattttattgttatctatttttatttatttatgtttatttaacattttgatatttatttatttttgagacggagtctcgctctgtcacccaggctggagtgcagtggcatgatctcggctcactgcaacctccgactcccgggttcaagtgattctcctgcctcagcctccttagtagctgagattacaggcatgtgccaccacgcccggctaattttgtagttttagtagagacggggtttctccatgttagtcaggctggtctcgaactcctgacctcaggtgatcccccccgcctcagcctcccaaagtgctgggattacaggcatgagacaccgcgcctggcccaatttttgtatttttagtagagatgggatttcaccttgttggccaggctggtctccaactcctgacctcaggtgatctgcctgcctcagcttcccaaagtgctggaattacaggtgtgagccactgcaccctggctgggctgatttttttttttttccaagagtcagggtctcactatgttgcccaggcttgtcttgaactcttggggtcaagcagtcctcccaccttggccttccagagtgctgggattacaggcatgaaccatcgtgcctggcctaattttattttatttttttagtcagtgtcttgggctgtcatgcaggctggagaacagtggtgccatcatagctgattgcagcctcgaattcctggcctcaagtgaccctcccacctcagcccctcaaagtgctgggactagatgcgtgagccaccaggcaggccagctgtcatctttattatctgtcaccctgaaagatccatgagagtaaggagcggactgccttctgcactgctgtgtcccagggcacagcttggggtctggcaaagaatttctactcagtgcaaacatcaggtcttagtgaaatgaaagaatgagttagtatttatttatctggagatggagtcttgctctgtcccccaggctggagtgcagtggcatgatctggatctcggctcactgcaacctctgcctctcctcccgagttcaagcaattctcctgcctcagcctcccaaatggctgggattaaagatgtgtgccaccatgcctggctaatttttgtgtttttttgtttgtttgtttttggagacggagtcttgctctgttgccagactggagtgcagtggcgcgatcttggctcactgcaacctccaccttctgggttcaagtgattcccctgcctcagcctccccagcagctgggattacaggagtgtgccgccatgcctggctaattttttgtatgttagtagatatggggtttcaccatgttggccaggagggtctcgatttcctgaccttgtgatccgcccgcctcagcctcccaaagtgctgggattacaggcgtgagccaccgtgccctgccttaattttttattcttagtagagacagggttttgccatgttgaccaggctgctctcaaactcttgacctcaggtgatccacctgccttggcctcccaaagtactgggattacaggcgtgagccactgtgcctggctgacagtaattatttattatccccatattccagatgaggaaactgtggctcacaaaggggcgatcatggattttgtctgccttcctctccacccccagagctctgtcacacaacatggctttattgaacacttgcacgcctggtcttcgtctagatattagggatacagtgacccacatagctccaaccttacagcctagcaggggagccagacattaataaaatcactatacaaacatatgtggttataatccctcagcaatcccattggctccagctttaccaatatacccagaatccaatcaattcccactaactatagggttaccatcctggctcatatccccatcaacttgttcagtgcagcagtctctcatctcacgtcgtattttttgagtggatgtgacaacggaataacaataacaaaaaaaaaaaaacggaatggcttaagtccatggaactgaacattcatgacattagggctgacttcaggcatggcttgatccaggggctccaacattatcgggatcctgtgtcactgtgcatagctgggacagctgtctcccatggcagcaaacaaacaccgttccccagcagctgtaagctttcatcctcccagctcagcaactccagccaattccttctgcttaattacagcatgtctcaggactcattctcattggccaggcttaggtgacatgacatccctgatataatccctatgttctggctggaatactctgattggccaatcttgggtcacatgacttttccatttcaatctttttttttttttttttttggaggggggagatggagtctcattatgttgctcaggctggagtgcagtggcatgatcctggcttactgcaacctccacctcccgggttcaagtgattctccttcctcagcatccaagtagctgggactacaggcgcatgccaccacacctgtctaatttttatatttttagtagagacagggtttcagcatgttggccaggatggtctcaatctcctgacctcgtgatccacccgcctcggccgcacaaagtgctgggattacaggcatgagccactgcgcctggcctaatttttgtatttttctagagatggtatttcaccatgtaggccaggctggtctcgaactcctgacctcgtgatctgcccgcctcagttccccgaagtgcagggattacaggcatgagacaccacgcctggcctgttgtggttttgagatgggggtctttttatgttgcccaggctggtcttgaactcctagactcaagccacccgcccccccttggctgcccaaagtgttgtgattacaggcatgagccactgcactgggccaaatgtgttttgtttttgtgcttttcaccgtccccagcgcccccagctgccggccttgggagcctggtgttggcaggactgtgagtcactgttggggtgtttaagggcctttaaaaggtgttcccagcatttcccgggggctgtgcactaattaggtgattagtaggctgactcctgcagatgtctccctggggataccgggggactgtggggagcagggaagtgtggctgcctacttggcctgccctccagaggccccattgcctccccatagacacccaaggggtaagtgccagcctcagctttacgacaggtgggctctgtgtctctggacaagtggctgtccctctctggtcccatctatctgctttcccatctatctagtgggctgtgggcatatactatggtcctgtaggagccagagccactattcttgctctgttactcagatacctctaacctctcctcccagcaaaataatcatcccctttatcataaatggctgaggtttaccaaattttctcagagccccagcactgatccaggccttcaaggtaggcgcagttattactactttttttttttttttttttttaaatttcagagacagggtctggctctgtcccccaggctggagtgcagtgcatgatcatagttcactgcgcctccacctcccaggctcaaatgatcctcccagctcagcttcctgagtagctgggactacaggtgcacaccaccacacctggctaattttaaatttttttgtagagaaggggtctccctatgttacccagactggttttgaaatactgggctcaatcgatccacctgcctcggcctcccaaattgttgggatcacatttgtgagccactgtacctggccaaattttgtggggttttttgttgtttgtttttttgagacagagtcttgctctgttgcccaggctggagtgcagtggcatgatcttggctcactgcaacgtccacctcccaggctcaagcaattctcctgcttcagcctcccgagtagctggcattccagctgcccatgaccacacccagctgatttttgtatttttagtagagatggggtttcaccagtttggccaggctggttttgaactcctgacctcaaatgatccgcccacctcagcctcccaaagacctggggttacaggcatgagccacaaaaattgagtccaatctctgctcacaccagagaccaggataaactcccaatgggccagacagcgtaaaccagggggccccagctcctgggactcacctcctctctccctccccactgagggtgtggatttcaatgtgtacagcctcctagacccagtagggcagatgatcatgggacacagagtctcttgggggggtccgtggaatcccataacccagggggtctcaaccagggtgattctgctcccagggggcactgggtgatgtctggggacatttgtggttgtcacaatggtgggtactcttggcatggagtgggtggaggccacggatgctgctcagcaccctgcagtgcccaagacggcttcatcccagagaactatctggctccaaatgtccacagcggccaggggagagacctcattccagagctcgatagccaccaaccatgcatggttacttaggtttacactgagatggatggaaacgggccaggctgtaattaaccccagcgctttgggaggtcgaggcgggaggattgattgaacccaggaggtcgaggctgctgtgagctatgatcgcggccctgcattccagcctaggtagcagtgacaagctgtagatagatagatagatagatagatagatagataaaaatgagatgaaagatgcatttcctcagttgccctggccacggttcaggggctcagcagcccaccagtgaccaccacgtgggacgccacggagctagaatgtaggcgatgtggcagaaagtcctagcgggccgcgcagcgcggagacctccccgggtgcaaacgctccccgccccccacccacgcggcgcccgtgccgccggccgctgttccacggatgcccacacgggggcagtgtgtcatcaggatctcgcgcaccttggctcaggtcgcctgcacctgccctctccccaggagggtgagccaggccgctgggggtttggagacagcagcccctcggcttacaaatcctttgcgagcacctgctgtgtgccaggctgtgtgctgggacagctcagtaaatcagagagtcttatccatgctttctcaccgtggactttacgggagggatggttctctggggtggggctgtcctgggcactgcagggtgctgagcagcgtccctggcctccactcactccatgccaggcgcacgccccagtcgtgacaaccacagatgtccccagacatcacccagtgccccctgggagcagaatcatcctccaggttagaatccctgggttaggggattccgcagacccccaagagactctggatcccatgatcctctgccctgctgaggtcccaggtggctacacacattgaaatccacaccctgagtggggagggagagaggaggtgaatcccaagggtccccatggtttgtaccatctgccccatcgggagcttattctgctttctggtgtgagcagggagcagactcaattttccccccaaataattaactaagagatccccattctagacactgtggacattcaaggctggattgtcctctaggatgaggccgccttgggcactgcagggtcctgagcggagtccctggcatccacccactccatgccagcagcacctcctccaagtcccgacaaccagaaatgtccccagacactgctgtcaatctcttgatcaaggggtgcaaaatcaccgccacctgagaattcctttcttttttttttaattttttttgagacagagtctcgctctgtcaaccaggctggagtgcagtggcacgatctcggttcactgcaagctctgcctcccaggttcatgccattctcctgcctcagcctcccgagtagctgggactacaggtgcccaccaccacatccagctaattttttgtatttttagtagagacggggtttcaccatgttagccaggatggtctcgatctcctgacctcgtggtccgcctgcctcagcctcccaaagtgctgggattacaggcgtgagccaccgcagccggccaaaaattcctttctagtgaatcaactcatcacacatataaatatttatttgtttattttatttttatttagtttttttgagatggagtcttgctgttgtcgcccaggctagaatgcaatggcacgatctcggctcactgcaacctccacctcccgggttcaagttattctcctgcctcagcctcccgggtagctgggattacaggcacctaccactgtaccctgctaatttttgtatttttagtagagacgaggttttgccacattggccaggctggtcttgaactcctgacctcatgatccacccacctcagcctcccaaagtgttgtgattacaggtgtaagccaccgtgcccagcccacacataaatatatttaaattatgaaataagcagttatggccaggcgcagtgtctcacgcctgtaatcccagcactttgggaggccgagatgggcggatcacgaggtcaggagataaagaccatcctggctaacacagtgaaaccccgtctctactaaaaatacaaaaaaattagccgggtgtggtggcgggcgcctgtagtcccagctactcgggaggctgaggcaggagaatggcgcgaacccaggaggtggagtttgcagtgagctgagatcgcgccactgcactccagcctgggtgactaagtgagactccatttcaaaagaaagaaagaaagaaagaaagagagagagagagagagagagagagagagaaagaaaggaaggaaggaaggaaggaaggaagaaagaaaggaaggaagaaagaaagaaagaaaggaagaaagaaagaaagaagcagttatatgaggtgagggagctgtaaacttttcttgaccatcacatctccacccaggtaaaagtgattctcctgcctcagcctcctgagtagctgggactccaagtgcccgccaccatgcctggctaatttttgtattttttagtagagatggggtttcgccatattggccagtctggtctcgaactcctggcctcaggtgatccgcccgcctcggcctcccaaacacacatatacacacatgtactcaggacagaggtttaagtacctgcataaccccaataaaaattgcacaagataactcttcgctctgcaaagcaccacgcactgtgatgtttcctattctacttcatttaaaaaatatatatgggtcatgatccactgaattgatttctccacccacagactgaaaaaaataataattaaaatagcgactgggaatcacgcactccagaaacatccccaggcccttccactgtagaaaaaaatgaatgagccaggcaccaaggctcacacctgtaatcccagcactttgggaggcctaggtgggcagatgacctgaggtcaggagttcaagaccagcctggccaacatggtgaaacaccatctctattaaaaatgcaaaaattagccgggtgtggtggtgggagcctgtaatcccagctactcaggaggctgaggcaggagaatcgcttgaacctggaaggcggaggttgcagtgagccgatatcgtgccattgcattccagcatgggtgacaagaacaaaactccatctcaaaaaaataaattaaaaaaaaaatagtggtagcccggcacggtggctcacacctgtaatctcagcactttgggaggctgaggtgggaggatagcttgagcccaggaggttgaagctgaagtgagccatgattgcaccactgcactccagcctgggtgacagagtgagactctgactcaaaagtaaataaataaatataaatgcctccttctcactttatttatctgtctattttccaaatagattcatggattctctctctctctcttttttttttttttagatggagtttcgctgtcgcccaggctggagtgcagtggcatgatctcagctcactgcaacctccgcctcctgggttcaagcaattcttgtgactcagcctccctagtacctggaattgcaggcatgcatcaccacacccagctagtttttgtatttttagtagagacgagagtttgccatgttggccaggctggtctcgaactcctgatctcaggttatctccttgcctctacctcccaaagtgctgggattactgcagcctcccgagtagctgggactacaggtgtatgccatcatgcctggcagattttattttatttttttgtggagacaggttctccctgacaagcccaggctggtcttgaacgcttggcctcaagtgatgtgcctgccttggcctcccaaggttttgagactacaggcatgagacaccttgccaggcccagaaggaggggtttagaaggagtaacagggatagacaaagttacattgtgtagggacagagctcacactgtgggtagacagttccaggcagaaggcacaggctgtgcaaaggccctggggtaggactgtgcctgactagttagaggaacactaaggagacctgtgtgactggaggaaagggagacagggaggaggggaggacggggaggggctggtgcaggcccttgtgggccatggggcggacttgggcttttcctgaaggaaggtgggagccatggagggctgtgagccgaggagggacaggccctgactcagatttgaattcagttatgaaggccgagtgtggtggctcatgcctgtaatcccagcactttggtaggctgagtggggaggatcacttgaggtcaggagttcgagaccagcctggccaacatggtgaaaccccggctctactaagatatacaaaaattagccagacgtggtggcacgcacctgcagtcccagctactcaggaggctgaggcacaagaatcgcttgaacccaggagaggaaggttgcagcgagccgagattgtgccactgtactccagacagggcaacagaataatgctccatcagaaaaataaatacataaataaaataacaataattcagtgtgactttaacatgaagaggcttctccactaaatccatgtctgcagaaaccgggcacgagctgtccctggctgtgcgtggggatgtctgtggatggtcagacctccctgggctcggaatgggcttgtttcaaatgcagcttcctggggctggctctccgcacagtctaattcagcaaaggcggggcagagtctgagctgtgaccccgtgtcccgggtgtttcccgaatcat

SEQ ID NO: 2931 - protein, 197 aa, Homo sapiens
  ref <308>: DATABASE ACCESSION NUMBER: SWISS-Prot / AAC72103
  ref <309>: DATABASE ENTRY DATE: 2002-06-15
MMFPQSRHSGSSHLPQQLKFTTSDSCDRIKDEFQLLQAQYHSLKLECDKLASEKSEMQRHYVMYYEMSYGLNIEMHKQAEIVKRLNGICAQVLPYLSQEHQQQVLGAIERAKQVTAPELNSIIRQQLQAHQLSQLQALALPLTPLPVGLQPPSLPAVSAGTGLLSLSALGSQAHLSKEDKNGHDGDTHQEDDGEKSD

SEQ ID NO: 2932 - DNA, 1356 bp, Rattus norvegicus; identical to SEQ ID NO: 2928
  ref <308>: DATABASE ACCESSION NUMBER: EMBL / L14462
  ref <309>: DATABASE ENTRY DATE: 2000-06-16

SEQ ID NO: 2933 - protein, 197 aa, Rattus norvegicus; identical to SEQ ID NO: 2929
  ref <308>: DATABASE ACCESSION NUMBER: SWISS-Prot / Q06195
  ref <309>: DATABASE ENTRY DATE: 2001-10-16

SEQ ID NO: 2934 - DNA, 31737 bp, Homo sapiens; identical to SEQ ID NO: 2930
  ref <308>: DATABASE ACCESSION NUMBER: EMBL / AC005944
  ref <309>: DATABASE ENTRY DATE: 2000-03-03

SEQ ID NO: 2935 - protein, 197 aa, Homo sapiens; identical to SEQ ID NO: 2931
  ref <308>: DATABASE ACCESSION NUMBER: SWISS-Prot / AAC72103
  ref <309>: DATABASE ENTRY DATE: 2002-06-15

SEQ ID NO: 2936 - DNA, 1210 bp, Rattus norvegicus
  ref <308>: DATABASE ACCESSION NUMBER: EMBL / L15011
  ref <309>: DATABASE ENTRY DATE: 2000-03-04
gaacagccgcggcggcccggctggcgcgcggctctccatcctcgctcggtctccaccgctccaggggcggatggggtgggctgagccggggctgccacagcctccgccactaccgccgccacccggggaagaccagagcaaagcagcgacgagtcccaagaaagagaaagagagaggggctgcagggcggccggtccccgtctaggaccaaggagcgcggcgatgtgagctatgagtgcgccgtggacactgtcaccggagccgctgccgccatcgacggggcctccggtgggcgcgggcctggacgtcgagcaacgcacggtgttcgccttcgtgctctgcctgctcgtggtgttggttctgttgatggtgcgctgtgtacgcatactgctagacccctacagccgcatgcccgcctcgtcctggaccgaccacaaggaggcgcttgaacgtgggcagttcgactatgcgttggtgtgatgaggaaccagtcccgggcaggtccttagagagatcccacaagggtcggccccgtggagggtgcccccagcctggactgcgctcagggttatgcctagatgccctagctcagagttgagggcgttcggagaagtccagcccttacccaccttaaccacccatcttccatcctggccaggccagaaccccccacctggtgcctttatctgccctgtccccttctctacacactcatcctcaatgctgatccctcaacactgaatccctagtgagcgaagcacccggcaccaacctcagccttccccaacaaccaggcatgttacatcctttcctgggaatgcggactcctcttatctcttattcctttccccctgttatggtcatcagcagtgtcagtgcacttcttgagttctggccctggcaggcaggctctcttcgactcacattggacactgcctacctataatgcacggtacagcctgccccagagacagaccccaaaactccaccatggctgctgcttgtgttgataatgtctggcacttatgtgcaggagtacaaggaggctcattcccttcccagacccggccccagcacaggttagagtgcctttcctttcctttgccccacctctcctatctccccccatgtccccatgcccttccctgcctatcacacctccctggctctgaacggtggtgatgataataaaaactattattgagtgctt

SEQ ID NO: 2937 - protein, 82 aa, Rattus norvegicus
  ref <308>: DATABASE ACCESSION NUMBER: SWISS-Prot / P41237
  ref <309>: DATABASE ENTRY DATE: 2002-06-15
MSAPWTLSPEPLPPSTGPPVGAGLDVEQRTVFAFVLCLLVVLVLLMVRCVRILLDPYSRMPASSWTDHKEALERGQFDYALV

SEQ ID NO: 2938 - DNA, 990 bp, Homo sapiens
  ref <308>: DATABASE ACCESSION NUMBER: EMBL / BC024148
  ref <309>: DATABASE ENTRY DATE: 2002-09-02
ggcacgaggggtgttcgccttcgtgctctgcctgctcgtggtgctggtgctgttgatggtgcgctgcgtgcgcatcctgctcgacccctacagccgcatgcccgcctcgtcctggaccgaccacaaggaggcgctcgagcgcgggcagttcgactacgcgttggtgtgaggggcgcggcgccccctagccggccctgcgccggggtctcagagggccggcccggcggggggcgccgcggggccaggactgcgctcaggatcccgccccggagcccccagcccgggggagagggggagggagttgggagaagcccagcccctccccctcgagacccctcccatgtcccttcctggcctggccggagccccacctcgtgcctttatccgccctgtcccttcctctctgcgcatctcacccgcccggctggcccccacccccgactctgaatcccgggcgggaggaggacccccgcaccgccccctccccagcgtgtaagtggctctgctattgtgcgtccctggaagtggggacccccttgtccctcctccctcccctgttgtctggccgtcgtcaaccccaccttgactgagtgttgagcccgtccttgggctctggtccctgcggggcaggctctcccgggcccacggggcggacgctgcataccaatttgccctgcaccgcctgtcccggagacggagcccgaaggcctgccatggcggctgtgtcgaggatgcgtggcgcctgccgtggcgggacagcgtgggcaggctcatttctgcccccaacccgggccccaggacaggtcagcgcgccctgccccggtgcccaccgctgccccccatccgccctcctgccacttgcccctgacccccctgccgtgcctcccgcagccctcccatgccgttccactcctccctgcctttgagccgaacatgataataaaagctattattgagcgcttaaaaaaaaaaaaaaaaaaaaaaaaaaaa

SEQ ID NO: 2939 - DNA, 2299 bp, Rattus norvegicus
  ref <308>: DATABASE ACCESSION NUMBER: EMBL / L15354
  ref <309>: DATABASE ENTRY DATE: 2000-06-16
ccactgcagcttttctctgttgcttaaggctttcggttacttctctttctctaagcgagcgttctttgttggtgacccgagttgctagtccagaaggaacagactgagtgagcgaggcgccatgacaaccctggatgacaagttgctgggggagaaattgcagtactactacagcaccagtgaggatgaggacagtgaccatgaagacaaagacagaggcaggggagccccagccagtagttccacgcctgcggaggctgagctggcaggcgaaggcatttcagtcaatacaggtccaaaaggggtgatcaatgactggcgccgcttcaagcagttggagacagaacagagggaggagcagtgccgggagatggagcggctgatcaaaaagctgtctatgagctgcaggtcccatctggatgaagaggaggagcagcagaaacagaaggacctccaggagaaaatcagtgggaagatgactctgaaggagtgtggtatgatggacaagaatttggatgatgaagagtttctgcagcagtatcggaagcagaggatggacgagatgcggcagcagcttcataaagggccccaattcaagcaagtgcttgagatccccagtggagaaggatttttagatatgattgataaagaacagaaaagcacccttatcatggttcatatttatgaagatggtgtcccagggactgaagccatgaatggctgcatgatctgccttgccgcagagtaccccactgtcaaattctgccgagtgaggagctcggttattggggccagcagtcgttttacccggaatgcccttcctgctctgctcatctacaaggcgggtgaattgattggcaattttgttcgtgtcactgaccagctgggcgaagatttctttgctgtagaccttgaagctttcctgcaggaatttggattgctcccagaaaaggaagtcttggtgctgacatctgtgcgaaactctgccacctgtcacagtgaagacagcgatctagaaatagattgaactgataatccagttctgtagctgtctcattgtttgggctagaggacacatgtctgtatttatttctgtccttcctgtcttctggctttacagctgctctttgtagtctggtttagtatgtggaaagtcaagaaactcagattaaatcagaatcctgactcactttgtggctagcagtaaagcgatttctaattatatagacaggaagctgggttcttgagctgtttacatctctagcgtgacatctctgaaattgtttccagtcaatattgacatggcacccttgaaggcaatgtcttgaaaattgtcttctgatgacctcagaattccaccaggtctgagagtagaattccctagtgagtgtgtttctgtgcagtgtaaacagtgcatttccataatcacttgattgcaaatcatgtttacttgcaatcagactgtacttattttctccagatccttttctaccagggtccatacaaggttgggaatatagctcagtggtgaactcttaacctagcatacacgtagctccaaggtatctgattcccacccagcactgtcaaaactaaaggttccagatggtgcctgatgctgtagttagcagtggtctctgctgagggagtcactggtccagtccagcataatgaagtatgaacaggaagggatgttttcttgctgactgctgtcatgatgttgggaagcaggcatcctattgactgacactggtgtgtatagagcttgaaaacctcagtaggaggacctttctgtatcctgctcatcagcatcttttcctctgttatttagcaaggtaatgctttgtttaacctttttaactttttaaaaagctttttttgcctattagaaaaaaattcatatttactagaggaaaattggccaaaatacagatgcaaaaatggtttaaaaatataattctgccacctgaatactgtatgttttggtaccattcatatatagggttttttttttaatgtattctagggttttttttttatggattcataggctttggtttgtctttaaatgacattgggatcattctgagcatactgtcagatagtgtgatcagttactaacagaagtttttcatgctattaaatactcttctgtaatattttaataactgttgatattccattgatttgctgaaatctggtgtttgggttttagaaagatagcaaacttttttattataaactttctattatgaaacatgtttatcatagaacatacaataaaaattaagttaaaaag

SEQ ID NO: 2940 - protein, 301 aa, Rattus norvegicus
  ref <308>: DATABASE ACCESSION NUMBER: SWISS-Prot / Q63737
  ref <309>: DATABASE ENTRY DATE: 2001-10-16
MTTLDDKLLGEKLQYYYSTSEDEDSDHEDKDRGRGAPASSSTPAEAELAGEGISVNTGPKGVINDWRRFKQLETEQREEQCREMERLIKKLSMSCRSHLDEEEEQQKQKDLQEKISGKMTLKECGMMDKNLDDEEFLQQYRKQRMDEMRQQLHKGPQFKQVLEIPSGEGFLDMIDKEQKSTLIMVHIYEDGVPGTEAMNGCMICLAAEYPTVKFCRVRSSVIGASSRFTRNALPALLIYKAGELIGNFVRVTDQLGEDFFAVDLEAFLQEFGLLPEKEVLVLTSVRNSATCHSEDSDLEID

SEQ ID NO: 2941 - DNA, 1192 bp, Homo sapiens
  ref <308>: DATABASE ACCESSION NUMBER: EMBL / AL117602
  ref <309>: DATABASE ENTRY DATE: 2001-03-10
gggcttttctctttagcgctcagggcgctgacccactgctcttcctcttaagaaagtgctccattccttccggcgcccggagctgctggcccaaagggatccggagcgagctagggcagacaccatgaccacccttgatgataagttgctgggggagaaactgcagtactactatagcagcagtgaggatgaggacagtgaccacgaggacaaggaccgaggcagatgtgccccagccagcagttctgtgcctgcagaggctgagctggcgggcgaaggcatctcagttaacacaggcccaaaaggtgtgatcaatgactggcgccgcttcaagcagttggagacagagcagagggaggagcagtgccgggagatggaaaggctgatcaagaagctgtcaatgacttgcaggtcccatctggatgaagaggaggagcaacagaaacagaaagacctccaggagaagatcagtgggaagatgactctgaaggagtttgccataatgaatgaggaccaagatgatgaagagtttctgcagcagtaccggaagcagcgaatggaagagatgcggcagcagcttcacaaggggccccaattcaagcaggtttttgagatctccagtggagaagggtttttagacatgattgataaagaacagaaaagcattgtcatcatggttcatatttatgaggatggcattccagggaccgaagccatgaatggttgcatgatctgccttgccgcagagtacccagctgtcaagttctgcaaggtggagagctcagttattggcgccagcagtcagttcaccaggaatgcccttcctgccctgctgatctataaggggggtgaattgatcggcaattttgttcgtgttactgaccagctgggggatgatttctttgctgtggaccttgaagcttttctccaggaatttggattactcccagaaaaggaagtcttggtgctgacatctgtgcgtaactctgccacgtgtcacagtgaggatagcgacctggaaatagattgaactgatagtctagttgcatagatttctcattgtttgggttggaatacacgtcattgtttatttttgttcctttgtcttctggcttttcagctgttctttgtagtcccttttattatgcataaaataaagaaattcttagattaaaaaaaaaaaaaaaaaaaa

SEQ ID NO: 2942 - protein, 301 aa, Homo sapiens
  ref <308>: DATABASE ACCESSION NUMBER: SWISS-Prot / Q13371
  ref <309>: DATABASE ENTRY DATE: 2001-10-16
MTTLDDKLLGEKLQYYYSSSEDEDSDHEDKDRGRCAPASSSVPAEAELAGEGISVNTGPKGVINDWRRFKQLETEQREEQCREMERLIKKLSMTCRSHLDEEEEQQKQKDLQEKISGKMTLKEFAIMNEDQDDEEFLQQYRKQRMEEMRQELHKGPQFKQVFEISSGEGFLDMIDKEQKSIVIMVHIYEDGIPGTEAMNGCMICLAAEYPAVKFCKVKSSVIGASSQFTRNALPALLIYKGGELIGNFVRVTDQLGDDFFAVDLEAFLQEFGLLPEKEVLVLTSVRNSATCHSEDSDLEID

SEQ ID NO: 2943 - DNA, 1964 bp, Rattus norvegicus
  ref <308>: DATABASE ACCESSION NUMBER: EMBL / L15619
  ref <309>: DATABASE ENTRY DATE: 2000-03-04
ggctgccgcggcccggtcggctttctgcgctgtagcggtctctgccgttccttggaagcacagctccccttccccgccccagtcccagtccccgtccggccgcggacataaagatgagtagctctgaggaggtgtcctggatttcctggttctgtgggctccgtggtaatgaattcttctgtgaggtggatgaagactacatccaggacaaatttaatcttactggactcaatgagcaggtgcctcactatcgacaagccctagacatgatcttggacctggaacctgatgaagagctggaagacaaccccaaccagagtgacttgattgagcaggcggccgagatgctctatgggttgatccacgcccgctacatcctcaccaaccggggcattgcacaaatgttggaaaagtaccagcaaggagactttggctactgtcctcgagtatactgtgagaaccagccgatgcttcccatcggcctttcggacatcccaggagaggccatggtgaagctctactgccccaagtgcatggacgtgtacacacccaagtcctctaggcaccaccacacggatggcgcatacttcggcactggtttccctcacatgctcttcatggtgcatcccgagtaccggcccaagcggccggccaaccagtttgtgcccaggctctacggtttcaagatccatccaatggcctaccagctgcagctccaagccgccagcaacttcaagagcccagtcaagacgattcgctgagtgccctcccacctcctctgcctgtgacaccaccgtccctccgctgccaccctttcaggaagtctatggtttttagtttaaattaaaggaattgttactgtggtggggatatgaaataaaggaagagaaggctaaaaaaaaaaaaaaaaaccgaattcggcatctcacctaggtgtatacagctgcacattaccaatggctgcagaacacccaatcatgacctctagtgctttatagcaaaagtgtaaagtggtacctgggtgaccagcattgccatggttacatccatttgcgtaatcaagcagctgtgcaactgctcttctaacagatgaacagctgcatgcatctccagcaggcatggattgtctcttgtctatgatcctcagtgcgttcacttagagtatttctagagtttgagtccttgccgtgatagagccatgtagggaatgcactgattgcatgttaccccaagcgtcatgaaaccttccgacacggtgacctatttaatggtcttgtttgttgacatgacaaattaacattcttagagttacatctcgaaaaaagcatttgtgatagataagccctttgagccttgtggctaaatttttgtggctttgtttaactttcaaaggttatatatgcactaaccttttttgatggctaagtaggctttaaattacagtaaattttttcaaataaaactggctgtaaaatatattttgaattagagttgttcactttttcatagctacttatgtttttttcccaataatttatttcacatctctaccagtgaacgcagcccatcactagaaaatgaccttgtcctgatttcagtttcaactattagttttaaagctcactgttgaataagaggaagtggtggtgcattttaaattgactttcatgtgcttttaaaatatgacagatctccttgataatgtacttttatttgatctcaagttgtataaaaccaataaatttgtgttactttgattgcagtagtatcttatgcatagtgattccatgttatatgcagactagttaggcaactgttttcttagttacaagcttcacttttgtgcagttaaaaaaacaaaagtaggctacagtctgtgccatgttgatgtacagtttctgaaattgttttacaagactttgataataaaacccttaaactcacaaaaaaaaaaaaaaaaaacc

SEQ ID NO: 2944 - protein, 215 aa, Rattus norvegicus
  ref <308>: DATABASE ACCESSION NUMBER: SWISS-Prot / P13862
  ref <309>: DATABASE ENTRY DATE: 2002-06-15
MSSSEEVSWISWFCGLRGNEFFCEVDEDYIQDKFNLTGLNEQVPHYRQALDMILDLEPDEELEDNPNQSDLIEQAAEMLYGLIHARYILTNRGIAQMLEKYQQGDFGYCPRVYCENQPMLPIGLSDIPGEAMVKLYCPKCMDVYTPKSSRHHHTDGAYFGTGFPHMLFMVHPEYRPKRPANQFVPRLYGFKIHPMAYQLQLQAASNFKSPVKTIR

SEQ ID NO: 2945 - DNA, 648 bp, Homo sapiens
  ref <308>: DATABASE ACCESSION NUMBER: Refseq / NM_001320
  ref <309>: DATABASE ENTRY DATE: 2002-10-04
atgagcagctcagaggaggtgtcctggatttcctggttctgtgggctccgtggcaatgaattcttctgtgaagtggatgaagactacatccaggacaaatttaatcttactggactcaatgagcaggtccctcactaccgacaagctctagacatgatcttggacctggagcctgatgaagaactggaagacaaccccaaccagagtgacctgattgagcaggcagccgagatgctttatggattgatccacgcccgctacatccttaccaaccgtggcatcgcccagatgttggaaaagtaccagcaaggagactttggttactgtcctcgtgtgtactgtgagaaccagccaatgcttcccattggcctttcagacatcccaggtgaagccatggtgaagctctactgccccaagtgcatggatgtgtacacacccaagtcatcaagacaccatcacacggatggcgcctacttcggcactggtttccctcacatgctcttcatggtgcatcccgagtaccggcccaagagacctgccaaccagtttgtgcccaggctctacggtttcaagatccatgcgatggcctaccagctgcagctccaagccgccagcaacttcaagagcccagtcaagacgattcgctga

SEQ ID NO: 2946 - protein, 215 aa, Homo sapiens; identical to SEQ ID NO: 2944

SEQ ID NO: 2947 - DNA, 1964 bp, Rattus norvegicus; identical to SEQ ID NO: 2943
  ref <308>: DATABASE ACCESSION NUMBER: EMBL / L15619
  ref <309>: DATABASE ENTRY DATE: 2000-03-04

SEQ ID NO: 2948 - protein, 215 aa, Rattus norvegicus; identical to SEQ ID NO: 2944
  ref <308>: DATABASE ACCESSION NUMBER: SWISS-Prot / P13862
  ref <309>: DATABASE ENTRY DATE: 2002-06-15

SEQ ID NO: 2949 - DNA, 648 bp, Homo sapiens; identical to SEQ ID NO: 2945
  ref <308>: DATABASE ACCESSION NUMBER: Refseq / NM_001320
  ref <309>: DATABASE ENTRY DATE: 2002-10-04

SEQ ID NO: 2950 - protein, 215 aa, Homo sapiens; identical to SEQ ID NO: 2944

SEQ ID NO: 2951 - DNA, 2455 bp, Rattus norvegicus
  ref <308>: DATABASE ACCESSION NUMBER: EMBL / L16764
  ref <309>: DATABASE ENTRY DATE: 2000-03-04
agagaagcagagaagcagagcaagcggcgcgttcccgaacctcgggcaagaccagcctctcccagagcatccccaccgcgaacgcacccttctccagagcataccccagcggaggccacccttccccagagcatccccgccgccaagcgcaaccttccagaagcagaccgcagcgacatggccaagaaaacagcgatcggcatcgacctgggcaccacctactcgtgcgtgggcgtgttccagcacggcaaggtggagatcatcgccaacgaccagggcaaccgcacgacccccagctacgtggccttcaccgacaccgagcggctcatcggggacgccgccaagaaccaggtggcgctgaacccgcagaacaccgtgttcgacgcgaagcggctgatcggccgcaagttcggcgacccggtggtgcagtcggacatgaagcactggcccttccaggtggtgaacgacggcgacaagcccaaggtgcaggtgaactacaagggcgagaaccggtcgttctacccggaggagatctcgtccatggtgctgaccaagatgaaggagatcgccgaggcgtacctgggccacccggtgaccaacgcggtgatcaccgtgcccgcctacttcaacgactcgcagcggcaggccaccaaggacgcgggcgtgatcgcgggtctgaacgtgctgcggatcatcaacgagcccacggcggccgccatcgcctatgggctggaccggaccggcaagggcgagcgcaacgtgctcatcttcgacctggggggcggcacgttcgacgtgtccatcctgacgatcgacgacggcatcttcgaggtgaaggccacggcgggcgacaccgacctgggcggggaggacttcgacaaccggctggtgagccacttcgtggaggagttcaagaggaagcacaagaaggacatcagccagaacaagcgcgcggtgcggcgcctgcgcacggcgtgcgagagggccaagaggacgctgtcgtccagcacccaggccagcctggagatcgactctctgttcgagggcatcgacttctacacgtccatcacgcgggcgcggttcgaggagctgtgctcggacctgttccgcggcacgctggagcccgtggagaaggccctgcgcgacgccaagctggacaaggcgcagatccacgacctggtgctggtgggcggctcgacgcgcatccccaaggtgcagaagctgctgcaggacttcttcaacgggcgcgacctgaacaagagcatcaatccggacgaggcggtggcctacggggcggcggtgcaggcggccatcctgatgggggacaagtcggagaacgtgcaggacctgctgctgctggacgtggcgccgctgtcgctgggtctggagaccgcgggcggcgtgatgacggcgctcatcaagcgcaactccaccatccccaccaagcagacgcagaccttcaccacctactcggacaaccagcccggggtgctgatccaggtgtacgagggcgagagggccatgacgcgcgacaacaacctgctggggcgcttcgagttgagcggcatcccgccggctcccaggggcgtgccccagatcgaggtgaccttcgacatcgacgccaacggcatcctgaacgtcacggccacggacaagagcaccggcaaggccaacaagatcaccatcaccaacgacaagggccgcctgagcaaggaggagatcgagcgcatggtgcaggaggccgagcgctacaaggcggaggacgaggtgcagcgcgagagggtggctgccaagaatgcgctcgagtcctacgccttcaatatgaagagcgccgtggaggacgagggtctcaagggcaagatcagcgaggctgacaagaagaaggtgctggacaagtgccaggaggtcatctcctggctggactctaacacgctggctgagaaagaggagttcgtgcacaagcgggaggagctggagcgggtgtgcaacccgatcatcagcgggctgtatcagggtgcgggtgctcccggggctgggggcttcggggcccaggcgcccaagggaggctctgggtcggggcccaccatcgaggaggtggattagaggcttttctggctctcagggtgttggctagagacagactcttgatggctgctggtgcacgattcttatcaagttactccttctctccggagttcagtttaaagttacagccttttatacggtaattgatttgagtttgttacattttgtatgctcgtgggttttttatatattcaaattaaggttgcatgttctttgcgtttaatctaagtagctgtgtaaaaatggtgtttccttcctgcgaacacctcagcactgccaccctgtgtacagttttttccttgcatccctacaaactgagaaaaaaagttatcttttgtaacttaaacattcaaaataaaatgttacaagt

SEQ ID NO: 2952 - protein, 641 aa, Rattus norvegicus
  ref <308>: DATABASE ACCESSION NUMBER: SWISS-Prot / Q07439
  ref <309>: DATABASE ENTRY DATE: 2001-10-16
MAKKTAIGIDLGTTYSCVGVFQHGKVEIIANDQGNRTTPSYVAFTDTERLIGDAAKNQVALNPQNTVFDAKRLIGRKFGDPVVQSDMKHWPFQVVNDGDKPKVQVNYKGENRSFYPEEISSMVLTKMKEIAEAYLGHPVTNAVITVPAYFNDSQRQATKDAGVIAGLNVLRIINEPTAAAIAYGLDRTGKGERNVLIFDLGGGTFDVSILTIDDGIFEVKATAGDTDLGGEDFDNRLVSHFVEEFKRKHKKDISQNKRAVRRLRTACERAKRTLSSSTQASLEIDSLFEGIDFYTSITRARFEELCSDLFRGTLEPVEKALRDAKLDKAQIHDLVLVGGSTRIPKVQKLLQDFFNGRDLNKSINPDEAVAYGAAVQAAILMGDKSENVQDLLLLDVAPLSLGLETAGGVMTALIKRNSTIPTKQTQTFTTYSDNQPGVLIQVYEGERAMTRDNNLLGRFELSGIPPAPRGVPQIEVTFDIDANGILNVTATDKSTGKANKITITNDKGRLSKEEIERMVQEAERYKAEDEVQRERVAAKNALESYAFNMKSAVEDEGLKGKISEADKKKVLDKCQEVISWLDSNTLAEKEEFVHKREELERVCNPIISGLYQGAGAPGAGGFGAQAPKGGSGSGPTIEEVD

SEQ ID NO: 2953 - DNA, 2388 bp, Homo sapiens
  ref <308>: DATABASE ACCESSION NUMBER: EMBL / BC002453
  ref <309>: DATABASE ENTRY DATE: 2001-07-13
ggcacgaggcctttttcgagagtgactcccgttgtcccaaggcttcccagagcgaacctgtgcggctgcaggcaccggcgcgtcgagtttccggcgtccggaaggaccgagctcttctcgcggatccagtgttccgtttccagcccccaatctcagagcggagccgacagagagcagggaaccggcatggccaaagccgcggcgatcggcatcgacctgggcaccacctactcctgcgtgggggtgttccaacacggcaaggtggagatcatcgccaacgaccagggcaaccgcaccacccccagctacgtggccttcacggacaccgagcggctcatcggggatgcggccaagaaccaggtggcgctgaacccgcagaacaccgtgtttgacgcgaagcggctgatcggccgcaagttcggcgacccggtggtgcagtcggacatgaagcactggcctttccaggtgatcaacgacggagacaagcccaaggtgcaggtgagctacaagggggagaccaaggcattctaccccgaggagatctcgtccatggtgctgaccaagatgaaggagatcgccgaggcgtacctgggctacccggtgaccaacgcggtgatcaccgtgccggcctacttcaacgactcgcagcgccaggccaccaaggatgcgggtgtgatcgcggggctcaacgtgctgcggatcatcaacgagcccacggccgccgccatcgcctacggcctggacagaacgggcaagggggagcgcaacgtgctcatctttgacctgggcgggggcaccttcgacgtgtccatcctgacgatcgacgacggcatcttcgaggtgaaggccacggccggggacacccacctgggtggggaggactttgacaacaggctggtgaaccacttcgtggaggagttcaagagaaaacacaagaaggacatcagccagaacaagcgagccgtgaggcggctgcgcaccgcctgcgagagggccaagaggaccctgtcgtccagcacccaggccagcctggagatcgactccctgtttgagggcatcgacttctacacgtccatcaccagggcgaggttcgaggagctgtgctccgacctgttccgaagcaccctggagcccgtggagaaggctctgcgcgacgccaagctggacaaggcccagattcacgacctggtcctggtcgggggctccacccgcatccccaaggtgcagaagctgctgcaggacttcttcaacgggcgcgacctgaacaagagcatcaaccccgacgaggctgtggcctacggggcggcggtgcaggcggccatcctgatgggggacaagtccgagaacgtgcaggacctgctgctgctggacgtggctcccctgtcgctggggctggagacggccggaggcgtgatgactgccctgatcaagcgcaactccaccatccccaccaagcagacgcagatcttcaccacctactccgacaaccaacccggggtgctgatccaggtgtacgagggcgagagggccatgacgaaagacaacaatctgttggggcgcttcgagctgagcggcatccctccggcccccaggggcgtgccccagatcgaggtgaccttcgacatcgatgccaacggcatcctgaacgtcacggccacggacaagagcaccggcaaggccaacaagatcaccatcaccaacgacaagggccgcctgagcaaggaggagatcgagcgcatggtgcaggaggcggagaagtacaaagcggaggacgaggtgcagcgcgagagggtgtcagccaagaacgccctggagtcctacgccttcaacatgaagagcgccgtggaggatgaggggctcaagggcaagatcagcgaggcggacaagaagaaggttctggacaagtgtcaagaggtcatctcgtggctggacgccaacaccttggccgagaaggacgagtttgagcacaagaggaaggagctggagcaggtgtgtaaccccatcatcagcggactgtaccagggtgccggtggtcccgggcctgggggcttcggggctcagggtcccaagggagggtctgggtcaggccccaccattgaggaggtggattaggggcctttccaagattgctgtttttgttttggagcttcaagactttgcatttcctagtatttctgtttgtcagttctcaatttcctgtgtttgcaatgttgaaattttttggtgaagtactgaacttgctttttttccggtttctacatgcagagatgaatttatactgccatcttacgactatttcttctttttaatacacttaactcaggccattttttaagttggttacttcaaagtaaataaactttaaaattcaaaaaaaaaaaaaaaaaa

SEQ ID NO: 2954 - protein, 105 aa, Homo sapiens
  ref <308>: DATABASE ACCESSION NUMBER: SWISS-Prot / P01842
  ref <309>: DATABASE ENTRY DATE: 2002-06-15
QPKAAPSVTLFPPSSEELQANKATLVCLISDFYPGAVTVAWKADSSPVKAGVETTTPSKQSNNKYAASSYLSLTPEQWKSHRSYSCQVTHEGSTVEKTVAPTECS

SEQ ID NO: 2955 - DNA, 455 bp, Rattus norvegicus
  ref <308>: DATABASE ACCESSION NUMBER: EMBL / L17077
  ref <309>: DATABASE ENTRY DATE: 2000-03-04
gatctccttctcgctagagcctccttcacagcatggctgtcctggtgctgttgctctgcctggtgacatttccaacctgtgtcctgtcccaggtgcagttgaaggaatcaggacctggtctggtgcagccctcacagaccctgtccctcacctgcactgtctctgggttctcactaaccaacaacaatgtgaactgggtgcgacaggctacaggaagaggtctggagtggatgggaggagtctgggctggtggagccacagattacaattcagctctcaaatcccgactgaccatcactagggacacctccaagagccaggttttcttaaaaatgcacagtctgcaatctgaagacacagccacttactactgtgccagagacgggggctatagcagctctaccctctatgctatggatgcctggggtcaaggaacttcagtcactgtctcctca

SEQ ID NO: 2956 - DNA, 831 bp, Rattus norvegicus
  ref <308>: DATABASE ACCESSION NUMBER: EMBL / L17127
  ref <309>: DATABASE ENTRY DATE: 2000-03-04
ggcacgagtgactaagatggaagcgttttgggagtcacggactggccactgggcggaggtccggggcagttttaccggcgtcccgtcacccccagctgcctcatggatccgatgtctgcgcctgcgaggtccatcactcggacccagaatccgatgctgactgggacatccgtactaggggtgaagttcgactgcggagtggtgattgctgcagacatgctgggctcctacggctccctggctcgtttccgcattatctctcgtattatgcgagtcaacgacagcactatgctaggtgcttcaggagactatgctgatttccagtatttgaagcaagttctcggccagatggtgattgatgaggagctgttcggagatggacatagctatagtcctagagctatccattcatggttgacaagggccatgtacagtcgccgctccaagatgaaccctctgtggaacaccaaggtcattggaggctatgctggtggagaaagctttcttggttatgtggacatgcttggtgtagcttatgaagccccttcactagccactggttatggtgcatacttggctcagcctctgcttcgagaagttctagagaagcaaccggtgctgagtcagacagaggcccgagagcttgtggagcgctgcatgcgagtgctgtactaccgagacgctcgttcgtataaccggtttcaagttgctactgtaactgaaaaaggtgtggagatagaaggaccactgtcagcacagaccaactgggacattgctcacatgatcagtggctttgaatgaaatccagatgaagtgtccagagttaagctt

SEQ ID NO: 2957 - protein, 263 aa, Rattus norvegicus
  ref <308>: DATABASE ACCESSION NUMBER: SWISS-Prot / P34067
  ref <309>: DATABASE ENTRY DATE: 2002-06-15
MEAFWESRTGHWAGGPAPGQFYRVPSTPSCLMDPMSAPARPITRTQNPMVTGTSVLGVKFDCGVVIAADMLGSYGSLARFRNISRIMRVNDSTMLGASGDYADFQYLKQVLGQMVIDEELFGDGHSYSPRAIHSWLTRAMYSRRSKMNPLWNTKVIGGYAGGESFLGYVDMLGVAYEAPSLATGYGAYLAQPLLREVLEKQPVLSQTEARELVERCMRVLYYRDARSYNRFQVATVTEKGVEIEGPLSAQTNWDIAHMISGFE

SEQ ID NO: 2958 - DNA, 974 bp, Homo sapiens
  ref <308>: DATABASE ACCESSION NUMBER: EMBL / BC008314
  ref <309>: DATABASE ENTRY DATE: 2001-07-13
gagagagagagaactagtctcgagttttttttttttttttttgctaccgtgactaagatggaagcgtttttggggtcgcggtccggactctgggcggggggtccggccccaggacagttttaccgcattccgtccactcccgattccttcatggatccggcgtctgcactttacagaggtccaatcacgcggacccagaaccccatggtgaccgggacctcagtcctcggcgttaagttcgagggcggagtggtgattgccgcagacatgctgggatcctacggctccttggctcgtttccgcaacatctctcgcattatgcgagtcaacaacagtaccatgctgggtgcctctggcgactacgctgatttccagtatttgaagcaagttctcggccagatggtgattgatgaggagcttctgggagatggacacagctatagtcctagagctattcattcatggctgaccagggccatgtacagccggcgctcgaagatgaaccctttgtggaacaccatggtcatcggaggctatgctgatggagagagcttcctcggttatgtggacatgcttggtgtagcctatgaagccccttcgctggccactggttatggtgcatacttggctcagcctctgctgcgagaagttctggagaagcagccagtgctaagccagaccgaggcccgcgacttagtagaacgctgcatgcgagtgctgtactaccgagatgcccgttcttacaaccggtttcaaatcgccactgtcaccgaaaaaggtgttgaaatagagggaccattgtctacagagaccaactgggatattgcccacatgatcagtggctttgaatgaaatacagatgcattatccagaactgaagttgccctacttttaactttgaacttggctagttcaaagatagactcttcttttgtaaagtaaataaattcttcaaaaaaaaaaaaaaaaaaaaa

SEQ ID NO: 2959 - protein, 264 aa, Homo sapiens [sequence omitted]

SEQ ID NO: 2960 - DNA, 831 bp, Rattus norvegicus; identical to SEQ ID NO: 2956
  ref <308>: DATABASE ACCESSION NUMBER: EMBL / L17127
  ref <309>: DATABASE ENTRY DATE: 2000-03-04

SEQ ID NO: 2961 - protein, 263 aa, Rattus norvegicus; identical to SEQ ID NO: 2957
  ref <308>: DATABASE ACCESSION NUMBER: SWISS-Prot / P34067
  ref <309>: DATABASE ENTRY DATE: 2002-06-15

SEQ ID NO: 2962 - DNA, 974 bp, Homo sapiens; identical to SEQ ID NO: 2958
  ref <308>: DATABASE ACCESSION NUMBER: EMBL / BC008314
  ref <309>: DATABASE ENTRY DATE: 2001-07-13

SEQ ID NO: 2963 - protein, 264 aa, Homo sapiens [sequence omitted]

SEQ ID NO: 2964 - DNA, 1011 bp, Rattus norvegicus
  ref <308>: DATABASE ACCESSION NUMBER: EMBL / L17318
  ref <309>: DATABASE ENTRY DATE: 2000-03-04
cactccagagtcacctgcaagatgctggtggtcctgctcacagcagccttgctagtcctgagctcagctcagggcgtagatgaagaagtcgtctatgaagactcatctcagcagttagagttagagcagcagagccagggacatggccaacatcatccaaaaccacctcctggtggattgcccccaagacctcctgcttctgatgaaaatggtgatggtgatgataacgatgatggtgatgatgatggcagtggggatgatgtaaacagaccagagagaccaccgcagcacggaggcaatcaccaccatcctcaccatccacccccagcagcaggccctcagagacccccacagcctggaagtcctcaaggcccgccccctcctggaggcccacagcaaagaccccctcaaggaccacccccacaaggaggccctcagagacccccacagcctggaagtcctcaaggcccgccccctcctggaggcccacagcaaagaccccctcaaggaccacccccacagggaggccctcagagacccccacagcctggaagtcctcaaggcccgccccctcctggaggcccacagcaaagagcccctcaaggaccacccccacagggaggccctcagagacccccacagcctggtagccctcaaggcccgcccccgcctggaggcccacagcaaagaccccctcaaggaccacccccgcagggaggccctcagagacccccgcagcctggtagccctcaaggcccgccccctcctggaggccctcagcaaagaccccctcaaggaccacccccacagggaggccctcagagaccacctcaacctggaaacccacaaggaccaccccagcagggaggccagcaacagtcaagtttcctgtggtcattttctgcataaccatctggtttctgagcagagagaaggtgaacaaaagacagatgccttcaatatcattcctgtagaaaagtgattccaataaaatatttagcatacaaaaaa

SEQ ID NO: 2965 - protein, 296 aa, Rattus norvegicus
  misc_feature (1)..(296): Xaa=Unknown amino acid
MLVVLLTAALLVLSSAQGVDEEVVYEDSSQQLELEQQSQGHGQHHPKPPPGGLPPRPPASDENGDGDDNDDGDDDGSGDDVNRPERPPQHGGNHHHPHHPPPAAGPQRPPQPGSPQGPPPPGGPQQRPPQGPPPQGGPQRPPQPGSPQGPPPPGGPQQRPPQGPPPQGGPQRPPQPGSPQGPPPPGGPQQRAPQGPPPQGGPQRPPQPGSPQGPPPPGGPQQRPPQGPPPQGGPQRPPQPGSPQGPPPPGGPQQRPPQGPPPQGGPQRPPQPGNPQGPPQQGGQQQSSFLWSFSAX

SEQ ID NO: 2966 - protein, 1970 aa, Homo sapiens
  ref <308>: DATABASE ACCESSION NUMBER: SWISS-Prot / P24928
  ref <309>: DATABASE ENTRY DATE: 2001-10-16
MHGGGPPSGDSACPLRTIKRVQFGVLSPDELKRMSVTEGGIKYPETTEGGRPKLGGLMDPRQGVIERTGRCQTCAGNMTECPGHFGHIELAKPVFHVGFLVKTMKVLRCVCFFCSKLLVDSNNPKIKDILAKSKGQPKKRLTHVYDLCKGKNICEGGEEMDNKFGVEQPEGDEDLTKEKGHGGCGRYQPRIRRSGLELYAEWKHVNEDSQEKKILLSPERVHEIFKRISDEECFVLGMEPRYARPEWMIVTVLPVPPLSVRPAVVMQGSARNQDDLTHKLADIVKINNQLRRNEQNGAAAHVIAEDVKLLQFHVATMVDNELPGLPRAMQKSGRPLKSLKQRLKGKEGRVRGNLMGKRVDFSARTVITPDPNLSIDQVGVPRSIAANMTFAEIVTPFNIDRLQELVRRGNSQYPGAKYIIRDNGDRIDLRFHPKPSDLHLQTGYKVERHMCDGDIVIFNRQPTLHKMSMMGHRVRILPWSTFRLNLSVTTPYNADFDGDEMNLHLPQSLETRAEIQELAMVPRMIVTPQSNRPVMGIVQDTLTAVRKFTKRDVFLERGEVMNLLMFLSTWDGKVPQPAILKPRPLWTGKQIFSLIIPGHINCIRTHSTHPDDEDSGPYKHISPGDTKVVVENGELIMGILCKKSLGTSAGSLVHISYLEMGHDITRLFYSNIQTVINNWLLIEGHTIGIGDSIADSKTYQDIQNTIKKAKQDVIEVIEKAHNNELEPTPGNTLRQTFENQVNRILNDARDKTGSSAQKSLSEYNNFKSMVVSGAKGSKINISQVIAVVGQQNVEGKRIPFGFKHRTLPHFIKDDYGPESRGFVENSYLAGLTPTEFFFHAMGGREGLIDTAVKTAETGYIQRRLIKSMESVMVKYDATVRNSINQVVQLRYGEDGLAGESVEFQNLATLKPSNKAFEKKFRFDYTNERALRRTLQEDLVKDVLSNAHIQNELEREFERMREDREVLRVIFPTGDSKVVLPCNLLRMIWNAQKIFHINPRLPSDLHPIKVVEGVKELSKKLVIVNGDDPLSRQAQENATLLFNIHLRSTLCSRRMAEEFRLSGEAFDWLLGEIESKFNQAIAHPGEMVGALAAQSLGEPATQMTLNTFHYAGVSAKNVTLGVPRLKELINISKKPKTPSLTVFLLGQSARDAERAKDILCRLEHTTLRKVTANTAIYYDPNPQSTVVAEDQEWVNVYYEMPDFDVARISPWLLRVELDRKHMTDRKLTMEQIAEKINAGFGDDLNCIFNDDNAEKLVLRIRIMNSDENKMQEEEEVVDKMDDDVFLRCIESNMLTDMTLQGIEQISKVYMHLPQTDNKKKIIITEDGEFKALQEWILETDGVSLMRVLSEKDVDPVRTTSNDIVEIFTVLGIEAVRKALERELYHVISFDGSYVNYRHLALLCDTMTCRGHLMAITRHGVNRQDTGPLMKCSFEETVDVLMEAAAHGESDPMKGVSENIMLGQLAPAGTGCFDLLLDAEKCKYGMEIPTNIPGLGAAGPTGMFFGSAPSPMGGISPAMTPWNQGATPAYGAWSPSVGSGMTPGAAGFSPSAASDASGFSPGYSPAWSPTPGSPGSPGPSSPYIPSPGGAMSPSYSPTSPAYEPRSPGGYTPQSPSYSPTSPSYSPTSPSYSPTSPNYSPTSPSYSPTSPSYSPTSPSYSPTSPSYSPTSPSYSPTSPSYSPTSPSYSPTSPSYSPTSPSYSPTSPSYSPTSPSYSPTSPSYSPTSPSYSPTSPSYSPTSPSYSPTSPNYSPTSPNYTPTSPSYSPTSPSYSPTSPNYTPTSPNYSPTSPSYSPTSPSYSPTSPSYSPSSPRYTPQSPTYTPSSPSYSPSSPSYSPTSPKYTPTSPSYSPSSPEYTPTSPKYSPTSPKYSPTSPKYSPTSPTYSPTTPKYSPTSPTYSPTSPVYTPTSPKYSPTSPTYSPTSPKYSPTSPTYSPTSPKGSTYSPTSPGYSPTSPTYSLTSPAISPDDSDEEN

SEQ ID NO: 2967 - DNA, 494 bp, Rattus norvegicus
  ref <308>: DATABASE ACCESSION NUMBER: EMBL / L18948
  ref <309>: DATABASE ENTRY DATE: 2000-03-04
cggcacgagctccttagctttgagcaagaagatggctgccaaaacaggatctcagctggagcgcagcataagcaccatcatcaatgttttccatcagtactctaggaagtatggacatcctgacaccctgaacaaggcggaattcaaagaaatggtgaataaggacttgccaaattttctgaagagggagaaaagaaatgaaaatctcctaagagacatcatggaggacctggacacaaaccaggacaatcaactgtcctttgaggagtgtatgatgctgatgggaaagttgatctttgcctgtcatgagaagctgcatgagaacaacccacgtgggcatgaccacaggcacggcaaaggctgtgggaagtaattaagaggtcgccatgtaacatctgcccaaccaagtctaaagggaatagcttactaaatgaccttggttctggggctgggaaataatttaaaaatgaataaataaagtctttatccattcc

SEQ ID NO: 2968 - protein, 112 aa, Rattus norvegicus
  ref <308>: DATABASE ACCESSION NUMBER: SWISS-Prot / P50116
  ref <309>: DATABASE ENTRY DATE: 2001-10-16
AAKTGSQLERSISTIINVFHQYSRKYGHPDTLNKAEFKEMVNKDLPNFLKREKRNENLLRDIMEDLDTNQDNQLSFEECMMLMGKLIFACHEKLHENNPRGHDHSHGKGCGK

SEQ ID NO: 2969 - DNA, 462 bp, Homo sapiens
  ref <308>: DATABASE ACCESSION NUMBER: EMBL / X06233
  ref <309>: DATABASE ENTRY DATE: 1993-09-12
aaaacactctgtgtggctcctcggctttgacagagtgcaagacgatgacttgcaaaatgtcgcagctggaacgcaacatagagaccatcatcaacaccttccaccaatactctgtgaagctggggcacccagacaccctgaaccagggggaattcaaagagctggtgcgaaaagatctgcaaaattttctcaagaaggagaataagaatgaaaaggtcatagaacacatcatggaggacctggacacaaatgcagacaagcagctgagcttcgaggagttcatcatgctgatggcgaggctaacctgggcctcccacgagaagatgcacgagggtgacgagggccctggccaccaccataagccaggcctcggggagggcaccccctaagaccacagtggccaagatcacagtggccacggccacggccacagtcatggtggccacggccacagccacccat

SEQ ID NO: 2970 - protein, 114 aa, Homo sapiens
  ref <308>: DATABASE ACCESSION NUMBER: SWISS-Prot / P06702
  ref <309>: DATABASE ENTRY DATE: 2002-06-15
MTCKMSQLERNIETIINTFHQYSVKLGHPDTLNQGEFKELVRKDLQNFLKKENKNEKVIEHIMEDLDTNADKQLSFEEFIMLMARLTWASHEKMHEGDEGPGHHHKPGLGEGTP

SEQ ID NO: 2971 - DNA, 1062 bp, Rattus norvegicus
  ref <308>: DATABASE ACCESSION NUMBER: EMBL / L19112
  ref <309>: DATABASE ENTRY DATE: 2001-02-13
atatcacaagtgtgcagatgggattaacgtccacatggagatatggaacaggaccagggattggcaccgtgaccatggtcagctgggggcgcttcatctgcctggtcttggtcaccatggcaaccttgtccctggcccggccctccttcagtttagttgaagataccactttagaaccagaagatgccatctcatctggagatgacgaggacgacacagatagctccgaagactttgtcagtgagaacaggagcaaccagagagcaccgtactggaccaacaccgaaaagatggagaagcggctccatgctgtccctgccgccaacactgtgaagttccgctgtccagccggggggaatccaacacccacaatgaggtggctaaaaaacgggaaggagtttaagcaggagcatcgcatcggaggctataaggtacgaaaccagcactggagccttattatggaaagtgtggtcccatcagacaaaggcaattacacctgcctggtggagaatgaatacgggtccatcaaccacacctaccaccttgatgttgttgagcgatcaccacaccggcccatcctccaagctggactgcctgcaaatgcctccacggtggtcggaggggacgtagaatttgtctgcaaggtttatagtgatgcccagccccatatccagtggatcaaacatgtggaaaagaacggcagtaaatatggacctgatgggctgccctacctcaaggtcctgaaggccgccggtgttaacaccacggacaaagaaattgaggttctctatattcggaatgtaacttttgaggatgctggggaatatacgtgcttggcgggtaattctatcgggatatcctttcactctgcatggttgacagttctgccagcacctgtgagagagaaggagatcacagcttccccagattacctggagatagctatttacagcataggggtcttcttaatcgcctgcatggtggtgacagtcatcttttgccgaatgaagaccacgaccaagaagccagacttcagcagccagccggctgtgcacaagctga

SEQ ID NO: 2972 - DNA, 1475 bp, Homo sapiens
  ref <308>: DATABASE ACCESSION NUMBER: EMBL / U11814
  ref <309>: DATABASE ENTRY DATE: 1999-07-02
tcttctgcgtttggagttgctccccgcaaccccgggctcgtcgctttctccatcccgacccacgcggggccggggacaacacaggtcgcggaggagcgttgccattcaagtgactgcagcagcagcgcagcgcctcggttcctgagcccaccgcagctgaaggcattgcgcgtagtccatgcccgtagaggaagtgtgcagatgggattaacgtccacatggagatatggaagaggaccggggattggtaccgtaaccatggtcagctggggtcgtttcatctgcctggtcgtggtcaccatggcaaccttgtccctggcccggccctccttcagtttagttgaggataccacattagagccagaagagccaccaaccaaataccaaatctctcaaccagaagtgtacgtggctgcgccaggggagtcgctagaggtgcgctgcctgttgaaagatgccgccgtgatcagttggactaaggatggggtgcacttggggcccaacaataggacagtgcttattggggagtacttgcagataaagggcgccacacctagagactccggcctctatgcttgtactgccagtaggactgtagacagtgaaacttggtacttcatggtgaatgtcacagatgccatctcatccggagatgatgaggatgacaccgatggtgcggaagattttgtcagtgagaacagtaacaacaagagagcaccatactggaccaacacagaaaagatggaaaagcggctccatgctgtgcctgcggccaacactgtcaagtttcgctgcccagccggggggaacccaatgccaaccatgcggtggctgaaaaacgggaaggagtttaagcaggagcatcgcattggaggctacaaggtacgaaaccagcactggagcctcattatggaaagtgtggtcccatctgacaagggaaattatacctgtgtagtggagaatgaatacgggtccatcaatcacacgtaccacctggatgttgtggagcgatcgcctcaccggcccatcctccaagccggactgccggcaaatgcctccacagtggtcggaggagacgtagagtttgtctgcaaggtttacagtgatgcccagccccacatccagtggatcaagcacgtggaaaagaacggcagtaaatacgggcccgacgggctgccctacctcaaggttctcaagcactcggggataaatagttccaatgcagaagtgctggctctgttcaatgtgaccgaggcggatgctggggaatatatatgtaaggtctccaattatatagggcaggccaaccagtctgcctggctcactgtcctgccaaaacagcaaggccgccggtgttaacaccacggacaaagagattgaggttctctatattcggaatgtaacttttgaggacgctggggaatatacgtgcttggcgggtaattctattgggatatcctttcactctgcatggt

SEQ ID NO: 2973 - protein, 821 aa, Homo sapiens
  ref <308>: DATABASE ACCESSION NUMBER: SWISS-Prot / P21802
  ref <309>: DATABASE ENTRY DATE: 2002-06-15
MVSWGRFICLVVVTMATLSLARPSFSLVEDTTLEPEEPPTKYQISQPEVYVAAPGESLEVRCLLKDAAVISWTKDGVHLGPNNRTVLIGEYLQIKGATPRDSGLYACTASRTVDSETWYFMVNVTDAISSGDDEDDTDGAEDFVSENSNNKRAPYWTNTEKMEKRLHAVPAANTVKFRCPAGGNPMPTMRWLKNGKEFKQEHRIGGYKVRNQHWSLIMESVVPSDKGNYTCVVENEYGSINHTYHLDVVERSPHRPILQAGLPANASTVVGGDVEFVCKVYSDAQPHIQWIKHVEKNGSKYGPDGLPYLKVLKAAGVNTTDKEIEVLYIRNVTFEDAGEYTCLAGNSIGISFHSAWLTVLPAPGREKEITASPDYLEIAIYCIGVFLIACMVVTVILCRMKNTTKKPDFSSQPAVHKLTKRIPLRRQVTVSAESSSSMNSNTPLVRITTRLSSTADTPMLAGVSEYELPEDPKWEFPRDKLTLGKPLGEGCFGQVVMAEAVGIDKDKPKEAVTVAVKMLKDDATEKDLSDLVSEMEMMKMIGKHKNIINLLGACTQDGPLYVIVEYASKGNLREYLRARRPPGMEYSYDINRVPEEQMTFKDLVSCTYQLARGMEYLASQKCIHRDLAARNVLVTENNVMKIADFGLARDINNIDYYKKTTNGRLPVKWMAPEALFDRVYTHQSDVWSFGVLMWEIFTLGGSPYPGIPVEELFKLLKEGHRMDKPANCTNELYMMMRDCWHAVPSQRPTFKQLVEDLDRILTLTTNEEYLDLSQPLEQYSPSYPDTRSSCSSGDDSVFSPDPMPYEPCLPQYPHINGSVKT

SEQ ID NO: 2974 - DNA, 5412 bp, Rattus norvegicus
  ref <308>: DATABASE ACCESSION NUMBER: EMBL / L19180
  ref <309>: DATABASE ENTRY DATE: 2000-03-04
cagggcggaggctggaggccactgccaagcatggcgcccacctggagacccagcgtggtgtctgtggtgggtcctgtggggctcttccttgtactgctggccagagggtgcttggctgaagagccacccagatttatcagagagcccaaggatcagattggtgtgtcaggaggcgtggcctccttcgtgtgccaggccacaggtgaccctaagccacgggtgacctggaacaagaagggcaagaaagtgaactcacagcgctttgagaccattgactttgacgagagctcgggggccgtgctgaggatccagccacttcggacaccccgggatgagaacgtgtacgagtgtgtggcccagaactcggtgggggagatcacagttcatgcgaagctcaccgtcctgcgagaggaccagctgcctcctggcttccccaacattgacatgggcccccagttgaaggttgtagagcgcacacgcacagccaccatgctctgtgctgccagcggaaaccctgaccctgagatcacctggttcaaggacttcctgcctgtggaccccagtgccagcaatgggcggatcaagcagcttcggtcaggtgccctgcagattgagagcagcgaggagacagaccagggcaagtacgagtgtgtggccaccaaacaggcgggggtgcgctactcatcacctgccaacctctacgtgcgagtccgccgtgtggccccccgcttctccatcctgcccatgagccacgagatcatgcccggtgggaatgtgaatatcacttgtgtggctgtgggctcacccatgccctacgtgaagtggatgcagggggcagaggacctgacgcctgaggatgacatgcccgtgggtcggaatgtcctcgaactcacggatgtcaaagactcagccaactatccttgtgtggccatgtccagcctgggagtgatcgaggccgttgctgacatcactgtaaaatctctccccaaagcccctgggactcccgtggtgacggagaacactgctaccagtatcactgtcacatgggacgcaggcaatcctgaccctgtgtcctactacgtattgagtataatcaaagccaggatgggccgtatcagatcaaagaagacatcaaccaccacgcgctacagcatcggcggcctgagccccaactctgagtatgagatctgggtgtcagctgtcaactccatcggccaggcccccagtgagtcggtggtgacccgcacaggcgagcaggcaccagccagtgctcccaggaatgttcaggcgcgcatgctcagtgccaccaccatgattgtgcagtgggaggagcccgtggagcccaatggcctgatccgtggctaccgcgtctactacaccatggagcccgagcatccggtgggcaactggcagaagcacaatgtggacgacagtcttctgaccactgtgggcagcctgctagaggatgagacctacactgtgagagtgctcgccttcacatcggtgggcgatgggccactgtcagaccccatccaggtcaagacccagcagggagtgcccggccagcccatgaacttgcgggctgaggccaagtcagagaccagcattgggctctcgtggagtgcaccacggcaggagagtgtcattaagtatgaactgctcttccgggagggcgaccgaggccgagaggtggggcgaaccttcgacccaaccacagcctttgtggtggaggacctcaagcccaatacggagtacgcgttccggctggcggctcgctcgccgcagggcctgggcgccttcaccgcggttgtgcgccagcgcacactgcaggccatctcccccaagaacttcaaggtgaagatgatcatgaaaacttcagtgctgctaagctgggagttccctgacaactataactcacccacgccctacaagatccagtacaatggactcacactggacgtggatggccgcactaccaagaagctgatcacgcacctcaagccacacaccttctataacttcgtgctcaccaaccgtggcagcagcctgggaggcctgcagcagacggtcaccgccaggaccgccttcaacatgctcagtggcaagcctagtgtcgccccaaagcctgacaacgatggttccattgtggtctacctgcctgatggccagagtcccgtgacagtgcagaactacttcattgtgatggtcccacttcggaagtctcgtggtggccagttccctatcctactacctagtccagaggacatggatctggaggagctcatccaggacctctcccggctgcagagcagcctgcgccactcaagacagctggaggtgcctcggccttacatcgccgctcggttctccatcctgccagctgtcttccatcctgggaaccagaagcaatatggtggctttgacaacaggggcttggagccaggccaccgttatgtcctctttgtacttgctgtgctgcagaagaatgagcctacatttgcagccagtcccttctcagaccccttccaactggacaacccagacccgcagcccattgtggatggcgaggagggcctcatctgggtgatcgggcccgtgctggccgtggtcttcatcatctgcatcgtaattgccatcctgctgtacaagaacaagcctgacagcaaacgcaaggactcagagccccgcaccaaatgcttattgaacaatgcagacctcgccccccatcaccccaaggaccctgtggaaatgcgacgtatcaacttccagacgccaggtatgctcagccacccgcccattcccatcacagacatggctgaacacatggagagactcaaagccaacgacagcctcaagctctcccaggagtatgagtccatcgaccctggccagcagttcacttgggaacattcgaacctggaggccaacaagccaaagaaccgatacgccaatgtcatcgcctatgaccattcacgagtcatcctgcagcctttagaaggcatcatgggtagtgattacatcaatgccaactatgttgacggctatcggcggcagaacgcatacatcgccacgcaggggcccctgcctgagacctttggggacttctggcggatggtgtgggagcagcggtcagccactgtggtcatgatgacacggctggaggagaaatcacgggtcaaatgtgaccagtactggcctaaccgaggcaccgagacatacggcttcatccaggtcaccctactagatactatggagctggccaccttctgtgtcaggaccttttctctacacaagaatggctctagtgagaagcgtgaggtacgacattttcagttcacagcatggcctgaccacggggtacccgagtaccccacacccttcctggcgtttctgcgcagagtcaagacctgcaacccgcctgacgctggcccagttgtggtccactgcagcgcgggtgtggggcgtactggctgcttcattgtaattgatgccatgttggagcgcatcagaacagagaagacggtggatgtgtacggacacgtgacactcatgcggtcacagcgcaactacatggtgcagacagaggatcagtatagcttcatccacgaggcactgctggaggctgtgggctgtggcaataccgaggtccccgcgcgcagcctctacacctatatccagaagctggcccaggtggagcctggcgagcatgtcacaggaatggagcttgagttcaagaggcttgcagctccaaggcacacacttcgagattcattcactgccagcctgccttgcaacaagtttaagaaccgcctggtgaacatcctgccgtacgagagctcgcgtgtctgcctgcagcccattcgtggtgtcgagggctctgactacatcaatgccagcttcatcgacggctacagacagcagaaagcctacattgcaacgcagggtccactggcagagaccacagaggacttctggcgtgccctgtgggagaacaactccactattgtggtaatgctcaccaagctccgcgagatgggccgggagaagtgccaccagtactggccagctgagcgctctgcccgctaccagtactttgtggttgacccgatggcagagtataacatgccagagtacattctgcgtgagtttaaggtcacagatgcccgggatggccagtcccggaccgtccgacagttcacggactggccagagcagggtgcacccaagtcaggggaaggcttcattgacttcatcggccaagtgcataagaccaaggagcagtttggccaggatggccccatctcggtgcactgtagtgctggagtgggcaggaccggagtattcatcactctgagcatcgtgctggagcgaatgcgctacgagggggtggtggacattttccagacagtgaaggtgcttcggacccagcggcctgccatggtgcagacagaggatgagtaccagttctgcttccaggcggcgttggaattgggcagctttgatcattatgcaacataagccatgggccccgcaacgcctcgacccagctccaagtgccctgcatgtgagcccagccctcggtgctggtgggaggcggcccagggaggaaacctcctctccctggagacagcactgccttctaagggcacattcctcattccttctgactccaaaacgaggttccagggtggggggtagggtggagagtagaggagccactgctcccatagctggggtcacaagggacagaactctgctcccacacttccctgcctgcctgcctgtcagcaacattcttttttttcatttttttaactgtagtgtatttttcttcatcttctttttttttttaagaaaaaaaaaacaatgcgcagtcaaattttgaaaacaacgagacacgttggctctgtttgtcgctctgtggagggccaacttttcatagtaagtgtgtcgtgtggcggctctgtgcaacaactttgatggcttctgtgtgcattcttcccacatgtccccgtgtgaatggctcacgtaggttttctttttaccctttttactttttttttaaatcaatcttcagacatatcagatgtgaaggggtgatggctggagcacctgggccaggctgcaggacatggccaccaggacacagtggctggcctcactgcccagtccctgccgcaccagagagggtctttgtcctctcctgactcatgccccgcatggaggacccccgggactacggacacttggggacacgcagccccctagagcaagtgaggtctctctttgtaggagagtgggtcagcactcgtccccgcttgttttttgggcagaagcgggtgacagccctgtatgtagataaaccaagtttgtattaataaagattcgtccgacctaaaaaaaaaaaaaaaa

SEQ ID NO: 2975 - protein, 1496 aa, Rattus norvegicus
  misc_feature (1)..(1496): Xaa=Unknown amino acid
MAPTWRPSVVSVVGPVGLFLVLLARGCLAEEPPRFIREPKDQIGVSGGVASFVCQATGDPKPRVTWNKKGKKVNSQRFETIDFDESSGAVLRIQPLRTPRDENVYECVAQNSVGEITVHAKLTVLREDQLPPGFPNIDMGPQLKVVERTRTATMLCAASGNPDPEITWFKDFLPVDPSASNGRIKQLRSGALQIESSEETDQGKYECVATKQAGVRYSSPANLYVRVRRVAPRFSILPMSHEIMPGGNVNITCVAVGSPMPYVKWMQGAEDLTPEDDMPVGRNVLELTDVKDSANYPCVAMSSLGVIEAVADITVKSLPKAPGTPVVTENTATSITVTWDAGNPDPVSYYVLSIIKARMGRIRSKKTSTTTRYSIGGLSPNSEYEIWVSAVNSIGQAPSESVVTRTGEQAPASAPRNVQARMLSATTMIVQWEEPVEPNGLIRGYRVYYTMEPEHPVGNWQKHNVDDSLLTTVGSLLEDETYTVRVLAFTSVGDGPLSDPIQVKTQQGVPGQPMNLRAEAKSETSIGLSWSAPRQESVIKYELLFREGDRGREVGRTFDPTTAFVVEDLKPNTEYAFRLAARSPQGLGAFTAVVRQRTLQAISPKNFKVKMIMKTSVLLSWEFPDNYNSPTPYKIQYNGLTLDVDGRTTKKLITHLKPHTFYNFVLTNRGSSLGGLQQTVTARTAFNMLSGKPSVAPKPDNDGSIVVYLPDGQSPVTVQNYFIVMVPLRKSRGGQFPILLPSPEDMDLEELIQDLSRLQSSLRHSRQLEVPRPYIAARFSILPAVFHPGNQKQYGGFDNRGLEPGHRYVLFVLAVLQKNEPTFAASPFSDPFQLDNPDPQPIVDGEEGLIWVIGPVLAVVFIICIVIAILLYKNKPDSKRKDSEPRTKCLLNNADLAPHHPKDPVEMRRINFQTPGMLSHPPIPITDMAEHMERLKANDSLKLSQEYESIDPGQQFTWEHSNLEANKPKNRYANVIAYDHSRVILQPLEGIMGSDYINANYVDGYRRQNAYIATQGPLPETFGDFWRMVWEQRSATVVMMTRLEEKSRVKCDQYWPNRGTETYGFIQVTLLDTMELATFCVRTFSLHKNGSSEKREVRHFQFTAWPDHGVPEYPTPFLAFLRRVKTCNPPDAGPVVVHCSAGVGRTGCFIVIDAMLERIRTEKTVDVYGHVTLMRSQRNYMVQTEDQYSFIHEALLEAVGCGNTEVPARSLYTYIQKLAQVEPGEHVTGMELEFKRLAAPRHTLRDSFTASLPCNKFKNRLVNILPYESSRVCLQPIRGVEGSDYINASFIDGYRQQKAYIATQGPLAETTEDFWRALWENNSTIVVMLTKLREMGREKCHQYWPAERSARYQYFVVDPMAEYNMPEYILREFKVTDARDGQSRTVRQFTDWPEQGAPKSGEGFIDFIGQVHKTKEQFGQDGPISVHCSAGVGRTGVFITLSIVLERMRYEGVVDIFQTVKVLRTQRPAMVQTEDEYQFCFQAALELGSFDHYATX

SEQ ID NO: 2976 - DNA, 6363 bp, Homo sapiens
  ref <308>: DATABASE ACCESSION NUMBER: EMBL / U35234
  ref <309>: DATABASE ENTRY DATE: 1999-06-30
cggccagcctccagacgttgccccatctgacgctcggctcgaggcctctctgtgagggaccggggggccatccccctccagggcggagatcggaggtcgctgccaagcatggcgcccacctggggccctggcatggtgtctgtggttggtcccatgggcctccttgtggtcctgctcgttggaggctgtgcagcagaagagccccccaggtttatcaaagaacccaaggaccagatcggcgtgtcggggggtgtggcctctttcgtgtgtcaggccacgggtgaccccaagccacgagtgacctggaacaagaagggcaagaaggtcaactctcagcgctttgagacgattgagtttgatgagagtgccggggcagtgctgaggatccagccgctgaggacaccgcgggatgaaaacgtgtacgagtgtgtggcccagaactcggttggggagatcacagtccatgccaagcttactgtcctccgagaggaccagctgccctctggcttccccaacatcgacatgggcccacagttgaaggtggtggagcggacacggacagccaccatgctctgtgcagccagcggcaaccctgaccctgagatcacctggttcaaggacttcctgcctgtggatcctagtgccagcaatggacgcatcaaacagctgcgatcagaaacctttgaaagcactccgattcgaggagccctgcagattgaaagcagtgaggaaaccgaccagggcaaatatgagtgtgtggccaccaacagcgccggcgtgcgctactcctcacctgccaacctctacgtgcgagagcttcgagaagtccgccgcgtggccccgcgcttctccatcctgcccatgagccacgagatcatgccagggggcaacgtgaacatcacctgcgtggccgtgggctcgcccatgccatacgtgaagtggatgcagggggccgaggacctgacccccgaggatgacatgcccgtgggtcggaacgtgctggaactcacagatgtcaaggactcggccaactacacctgcgtggccatgtccagcctgggcgtcattgaggcggttgctcagatcacggtgaaatctctccccaaagctcccgggactcccatggtgactgagaacacagccaccagcatcaccatcacgtgggactcgggcaacccagatcctgtgtcctattacgtcatcgaatataaatccaagagccaagacgggccgtatcagattaaagaggacatcaccaccacacgttacagcatcggcggcctgagccccaactcggagtacgagatctgggtgtcggccgtcaactccatcggccaggggccccccagcgagtccgtggtcacccgcacaggcgagcaggccccggccagcgcgccgcggaacgtgcaagcccggatgctcagcgcgaccaccatgattgtgcagtgggaggagccggtggagcccaacggcctgatccgcggctaccgcgtctactacaccatggaaccggagcaccccgtgggcaactggcagaagcacaacgtggacgacagcctgctgaccaccgtgggcagcctgctggaggacgagacctacaccgtgcgggtgctcgccttcacctccgtcggcgacgggcccctctcggaccccatccaggtcaagacgcagcagggagtgccgggccagcccatgaacctgcgggccgaggccaggtcggagaccagcatcacgctgtcctggagccccccgcggcaggagagtatcatcaagtacgagctcctcttccgggaaggcgaccatggccgggaggtgggaaggaccttcgacccgacgacttcctacgtggtggaggacctgaagcccaacacggagtacgccttccgcctggccgcccgctcgccgcagggcctgggcgccttcacccccgtggtgcggcagcgcacgctgcagtccaaaccgtcagccccccctcaagacgttaaatgtgtcagcgtgcgctccacggccattttggtaagttggcgcccgccgccgccggaaacgcacaacggggccctggtgggctacagcgtccgctaccgaccgctgggctcagaggacccggaacccaaggaggtgaacggcatccccccgaccaccactcagatcctgctggaggccttggagaagtggacccagtaccgcatcacgactgtcgctcacacagaggtgggaccagggcccgagagctcacccgtggtcgtccgcaccgacgaggatgtgcccagcgcgccgccgcggaaggtggaggcggaggcgctcaacgccacggccatccgcgtgctgtggctcggccctgtgcccggccggcagcacggccagatccgcggctaccaggtccactacgtgcgcatggagggcgccgagggccgcgggccgccgcgcatcaaggacgtcatgctggccgatgcccagtgggagacggatgacacggccgaatatgagatggtcatcacaaacttgcagcctgagaccgcgtactccatcacggtagccgcctacaccatgaagggcgatggcgctcgcagcaaacccaaggtggttgtgaccaagggagcagtgttgggccgcccaaccctgtcggtgcagcagacccccgagggcagcctgctggcacgctgggagcccccggctggcaccgcggaggaccaggtgctgggctaccgcctgcagtttggccgtgaggactcgacgcccctggccaccctggagttcccgccctccgaggaccgctacacggcatcaggcgtgcacaagggggccacgtatgtgttccggcttgcggcccggagccggggcggcctgggcgaggaggcagccgaggtcctgagcatcccggaggacacgccccgtggccacccgcagattttggaagccgccggcaacgcctcggccgggaccgtccttctccgctggctgccacccgtgcccgccgagcgcaacggggccatcgtcaaatacacggtggccgtgcgtgaggccggtgccctgggccctgcccgagagactgagctgccggcagcggctgagccgggcgcggagaacgccgtcacgctgcagggcctgaagcccgacacggcctatgacctccaagtgcgagcccacacgcgccggggccctggccccttcagcccccccgtccgctaccggacgttcctgcgggaccaagtctcgcccaagaacttcaaggtgaaaatgatcatgaagacatcagttctgctcagctgggagttccctgacaactacaactcacccacaccctacaagatccagtacaatgggctcacactggatgtggatggccgtaccaccaagaagctcatcacgcacctcaagccccacaccttctacaactttgtgctgaccaatcgcggcagcagcctgggcggcctccagcagacggtcaccgcctggactgccttcaacctgctcaacggcaagcccagcgtcgcccccaagcctgatgctgacggcttcatcatggtgtatcttcctgacggccagagccccgtgcctgtccagagctatttcattgtgatggtgccactgcgcaagtctcgtggaggccaattcctgaccccgctgggtagcccagaggacatggatctggaagagctcatccaggacatctcacggctacagaggcgcaccgtgcggcactcgcgtcagctggaggtgccccggccctatattgcagctcgcttctctgtgctgccacccacgttccatcccggcgaccagaagcagtatggcggcttcgataaccggggcctggagcccggccaccgctatgtcctcttcgtgcttgccgtgcttcagaagagcgagcctacctttgcagccagtcccttctcagaccccttccagctggataacccggacccccagcccatcgtggatggcgaggaggggcttatctgggtgatcgggcctgtgctggccgtggtcttcataatctgcattgtcattgctatcctgctctacaagaacaaacccgacagtaaacgcaaggactcagaaccccgcaccaaatgcctcctgaacaatgccgacctcgcccctcaccaccccaaggaccctgtggaaatgagacgcattaacttccagactccagattcaggcctcaggagccccctcagggagccggggtttcactttgaaagcatgcttagccacccgccaattcccatcgcagacatggcggagcacacggagcggctcaaggccaacgacagcctcaagctctcccaggagtatgagtccatcgaccctggacagcagttcacatgggaacattccaacctggaagtgaacaagccgaagaaccgctatgccaacgtcatcgcctatgaccacttccgtgtcatcctccagcccattgaaggcatcatgggcagtgattacatcaatgccaactatgtggacggctaccggcgtcagaacgcgtacattgccacgcaggggccgctgcctgagacctttggggacttctggcgtatggtgtgggagcagcggtcggcgaccatcgtcatgatgacgcggctggaggagaagtcacggatcaagtgtgatcagtattggcccaacagaggcacggagacctacggcttcatccaggtcacgttgctagataccatcgagctggccacattctgcgtcaggacattctctctgcacaagaatggctccagtgagaaacgcgaggtccgccagttccagtttacggcgtggccggaccatggcgtgcccgaatacccaacgcccttcctggctttcctgcggagagtcaagacctgcaacccgccagatgccggccccatcgtggttcactgcagtgccggtgtgggccgcacaggctgctttatcgtcatcgacgccatgcttgagcggatcaagccagagaagacagtcgatgtctatggccacgtgacgctcatgaggtcccagcgcaactacatggtgcagacggaggaccagtacagcttcatccacgaggccctgctggaggccgtgggctgtggcaacacagaagtgcccgcacgcagcctctatgcctacatccagaagctggcccaggtggagcctggcgaacacgtcactggcatggaactcgagttcaagcggctggctaactccaaggcccacacgtcacgcttcatcagtgccaatctgccttgtaacaagttcaagaaccgcctggtgaacatcatgccctatgagagcacacgggtctgtctgcaacccatccggggtgtggagggctctgactacatcaacgccagcttcattgatggctataggcagcagaaggcctacatcgcgacacaggggccgctggcggagaccacggaagacttctggcgcatgctgtgggagaacaattcgacgatcgtggtgatgctgaccaagctgcgggagatgggccgggagaagtgtcaccagtactggccggccgagcgctctgcccgctaccagtactttgtggtagatccgatggcagaatacaacatgcctcagtatatcctgcgagagttcaaggtcacagatgcccgggatggccagtcccggactgtccggcagttccagttcacagactggccggaacagggtgtgccaaagtcgggggagggcttcatcgacttcattggccaagtgcataagactaaggagcagtttggccaggacggccccatctctgtccactgcagtgccggcgtgggcaggacgggcgtcttcatcacgcttagcatcgtgctggagcggatgcggtatgaaggcgtggtggacatctttcagacggtgaagatgctacgaacccagcggccggccatggtgcagacagaggatgagtaccagttctgttaccaggcggcactggagtacctcggaagctttgaccactatgcaacctaaagccatggtcccccccaggcccgacaccactggccccggatgcctctgcccctcccgggcggacctcctgaggcctggacccccagtgggcagggcaggaggtggcagcggcagcagctgtgtttttctgcaccatttccgaggacgacgcatcccctcgagcccccccaccggccccggccgccccagcgacctccctggcaccggccgccgccttcaaatacttggcacattcctcctttccttccaattccaaaaccagattccggggtggggggtggggggatggtgagcaaataggagtgctccccagaaccagaggagggtggggcacagaccatagacggacccctcgtcctcccccagcggtggtagggggacccggggggctcctccccgctctgcacc

SEQ ID NO: 2977 - protein, 1949 aa, Homo sapiens
  misc_feature (1)..(1949): Xaa=Unknown amino acid
MAPTWGPGMVSVVGPMGLLVVLLVGGCAAEEPPRFIKEPKDQIGVSGGVASFVCQATGDPKPRVTWNKKGKKVNSQRFETIEFDESAGAVLRIQPLRTPRDENVYECVAQNSVGEITVHAKLTVLREDQLPSGFPNIDMGPQLKVVERTRTATMLCAASGNPDPEITWFKDFLPVDPSASNGRIKQLRSETFESTPIRGALQIESSEETDQGKYECVATNSAGVRYSSPANLYVRELREVRRVAPRFSILPMSHEIMPGGNVNITCVAVGSPMPYVKWMQGAEDLTPEDDMPVGRNVLELTDVKDSANYTCVAMSSLGVIEAVAQITVKSLPKAPGTPMVTENTATSITITWDSGNPDPVSYYVIEYKSKSQDGPYQIKEDITTTRYSIGGLSPNSEYEIWVSAVNSIGQGPPSESVVTRTGEQAPASAPRNVQARMLSATTMIVQWEEPVEPNGLIRGYRVYYTMEPEHPVGNWQKHNVDDSLLTTVGSLLEDETYTVRVLAFTSVGDGPLSDPIQVKTQQGVPGQPMNLRAEARSETSITLSWSPPRQESIIKYELLFREGDHGREVGRTFDPTTSYVVEDLKPNTEYAFRLAARSPQGLGAFTPVVRQRTLQSKPSAPPQDVKCVSVRSTAILVSWRPPPPETHNGALVGYSVRYRPLGSEDPEPKEVNGIPPTTTQILLEALEKWTQYRITTVAHTEVGPGPESSPVVVRTDEDVPSAPPRKVEAEALNATAIRVLWLGPVPGRQHGQIRGYQVHYVRMEGAEGRGPPRIKDVMLADAQWETDDTAEYEMVITNLQPETAYSITVAAYTMKGDGARSKPKVVVTKGAVLGRPTLSVQQTPEGSLLARWEPPAGTAEDQVLGYRLQFGREDSTPLATLEFPPSEDRYTASGVHKGATYVFRLAARSRGGLGEEAAEVLSIPEDTPRGHPQILEAAGNASAGTVLLRWLPPVPAERNGAIVKYTVAVREAGALGPARETELPAAAEPGAENAVTLQGLKPDTAYDLQVRAHTRRGPGPFSPPVRYRTFLRDQVSPKNFKVKMIMKTSVLLSWEFPDNYNSPTPYKIQYNGLTLDVDGRTTKKLITHLKPHTFYNFVLTNRGSSLGGLQQTVTAWTAFNLLNGKPSVAPKPDADGFIMVYLPDGQSPVPVQSYFIVMVPLRKSRGGQFLTPLGSPEDMDLEELIQDISRLQRRTVRHSRQLEVPRPYIAARFSVLPPTFHPGDQKQYGGFDNRGLEPGHRYVLFVLAVLQKSEPTFAASPFSDPFQLDNPDPQPIVDGEEGLIWVIGPVLAVVFIICIVIAILLYKNKPDSKRKDSEPRTKCLLNNADLAPHHPKDPVEMRRINFQTPDSGLRSPLREPGFHFESMLSHPPIPIADMAEHTERLKANDSLKLSQEYESIDPGQQFTWEHSNLEVNKPKNRYANVIAYDHFRVILQPIEGIMGSDYINANYVDGYRRQNAYIATQGPLPETFGDFWRMVWEQRSATIVMMTRLEEKSRIKCDQYWPNRGTETYGFIQVTLLDTIELATFCVRTFSLHKNGSSEKREVRQFQFTAWPDHGVPEYPTPFLAFLRRVKTCNPPDAGPIVVHCSAGVGRTGCFIVIDAMLERIKPEKTVDVYGHVTLMRSQRNYMVQTEDQYSFIHEALLEAVGCGNTEVPARSLYAYIQKLAQVEPGEHVTGMELEFKRLANSKAHTSRFISANLPCNKFKNRLVNIMPYESTRVCLQPIRGVEGSDYINASFIDGYRQQKAYIATQGPLAETTEDFWRMLWENNSTIVVMLTKLREMGREKCHQYWPAERSARYQYFVVDPMAEYNMPQYILREFKVTDARDGQSRTVRQFQFTDWPEQGVPKSGEGFIDFIGQVHKTKEQFGQDGPISVHCSAGVGRTGVFITLSIVLERMRYEGVVDIFQTVKMLRTQRPAMVQTEDEYQFCYQAALEYLGSFDHYATX

SEQ ID NO: 2978 - DNA, 5412 bp, Rattus norvegicus; identical to SEQ ID NO: 2974
  ref <308>: DATABASE ACCESSION NUMBER: EMBL / L19180
  ref <309>: DATABASE ENTRY DATE: 2000-03-04

SEQ ID NO: 2979 - protein, 1496 aa, Rattus norvegicus; identical to SEQ ID NO: 2975
  misc_feature (1)..(1496): Xaa=Unknown amino acid

SEQ ID NO: 2980 - DNA, 6363 bp, Homo sapiens; identical to SEQ ID NO: 2976
  ref <308>: DATABASE ACCESSION NUMBER: EMBL / U35234
  ref <309>: DATABASE ENTRY DATE: 1999-06-30

SEQ ID NO: 2981 - protein, 1949 aa, Homo sapiens; identical to SEQ ID NO: 2977
  misc_feature (1)..(1949): Xaa=Unknown amino acid

SEQ ID NO: 2982 - DNA, 1780 bp, Rattus norvegicus
  ref <308>: DATABASE ACCESSION NUMBER: EMBL / L19341
  ref <309>: DATABASE ENTRY DATE: 2000-03-04
tgtgctgggtgtgccccagagctggctttgactgtacgctgtcaggctctccctggacctcacggaacagcattgccagccacacggcttccaacaaatcacctcttttcatgctgtttggcacagatcgaatctacaggttatacaatggtcgatggagcaatgatcctttctgtgctaatgatgatggctctcccttccccgagtatggaagatgaggagcccaaggtcaacccgaagctttacatgtgtgtgtgtgagggcctctcctgcgggaacgaggaccactgtgagggccagcagtgtttttcctccctgagcgtcaatgatggcttccgcgtctaccagaagggctgctttcaggtctatgagcaggggaagatgacgtgtaagaccccgccgtcgcctggccaggctgtggagtgctgccaaggggactggtgcaacaggaacgtcacggcccggctgcccactaaagggaaatccttccctggatcgcagaacttccacctggaagttggccttatcatcctctccgtggtgtttgcggtatgccttttcgcttgcatccttggcgttgctctcaggaagtttaaaaggcgcaatcaagagcgcctgaaccccagagacgtggagtacggtactatcgaagggctcatcaccaccaacgtcggagatagcactctagcggaattactagatcactcatgtacatcaggaagtggctccggtcttccttttctggtacagagaactgtggctcgacagataaccctgttggagtgtgtcgggaagggccggtatggagaagtgtggaggggcagctggcaaggcgaaaatgttgctgtgaagatcttctcctcccgtgatgagaagtcgtggttcagggagacagaattgtacaacacggttatgctgaggcatgagaatatcttaggtttcattgcttcagacatgacctctagacactccagtacccagctgtggctcattacacattaccacgaaatgggatcgttgtatgactaccttcagctcaccactctggacacggttagctgccttcggatcgtgttgtccatagccagcggccttgcacacttgcacatagagatatttgggacccaggggaagtctgccatcgcccaccgagatctaaagagcaaaaacatcctcgtgaagaagaacggacagtgctgcatagcagatttgggcctggcagtcatgcattcccagagcacgaatcagcttgatgtgggaaacaacccccgtgtggggaccaagcgctacatggcccctgaagtgcttgatgaaaccatccaagtggattgctttgattcttataagagggtcgatatttgggcctttggcctcgttctgtgggaagtggccaggaggatggtgagcaatggtatagtggaagattacaagccaccattctatgatgttgttcccaatgacccaagttttgaagatatgaggaaagttgtctgtgtggatcaacagaggccaaacatacctaacagatggttctcagacccgacattaacttctctggcgaagctgatgaaagaatgctggtaccagaacccatccgccagactcacagctctacgtatcaaaaagactttgaccaaaattgataactccctagacaaattaaaaactgactgttgacattgtcaccggtgtcaagaaggagagtcaatgctgtcattgtccagctgggacctaatgctggcctgactggttgtcagaacagaatccatctgtccccctc

SEQ ID NO: 2983 - protein, 509 aa, Rattus norvegicus
  ref <308>: DATABASE ACCESSION NUMBER: SWISS-Prot / P80201
  ref <309>: DATABASE ENTRY DATE: 2001-10-16
MVDGAMILSVLMMMALPSPSMEDEEPKVNPKLYMCVCEGLSCGNEDHCEGQQCFSSLSVNDGFRVYQKGCFQVYEQGKMTCKTPPSPGQAVECCQGDWCNRNVTARLPTKGKSFPGSQNFHLEVGLIILSVVFAVCLFACILGVALRKFKRRNQERLNPRDVEYGTIEGLITTNVGDSTLAELLDHSCTSGSGSGLPFLVQRTVARQITLLECVGKGRYGEVWRGSWQGENVAVKIFSSRDEKSWFRETELYNTVMLRHENILGFIASDMTSRHSSTQLWLITHYHEMGSLYDYLQLTTLDTVSCLRIVLSIASGLAHLHIEIFGTQGKSAIAHRDLKSKNILVKKNGQCCIADLGLAVMHSQSTNQLDVGNNPRVGTKRYMAPEVLDETIQVDCFDSYKRVDIWAFGLVLWEVARRMVSNGIVEDYKPPFYDVVPNDPSFEDMRKVVCVDQQRPNIPNRWFSDPTLTSLAKLMKECWYQNPSARLTALRIKKTLTKIDNSLDKLKTDC

SEQ ID NO: 2984 - DNA, 2952 bp, Homo sapiens
  ref <308>: DATABASE ACCESSION NUMBER: Refseq / NM_001105
  ref <309>: DATABASE ENTRY DATE: 2000-10-31
gaagcgaatagcgttttcagagatattgggcggctcaagggtcttactctgtcgcccagtctgtaatgcagtgctgtgaccatagcccactgcagcctccacctcccaggctcaagcagtccttcccccctcgccctcatgaatagctgggactacagcctggagcattggtaagcgtcacactgccaaagtgagagctgctggagaactcataatcccaggaacgcctcttctactctccgagtaccccagtgaccagagtgagagaagctctgaacgagggcacgcggcttgaaggactgtgggcagatgtgaccaagagcctgcattaagttgtacaatggtagatggagtgatgattcttcctgtgcttatcatgattgctctcccctcccctagtatggaagatgagaagcccaaggtcaaccccaaactctacatgtgtgtgtgtgaaggtctctcctgcggtaatgaggaccactgtgaaggccagcagtgcttttcctcactgagcatcaacgatggcttccacgtctaccagaaaggctgcttccaggtttatgagcagggaaagatgacctgtaagaccccgccgtcccctggccaagctgtggagtgctgccaaggggactggtgtaacaggaacatcacggcccagctgcccactaaaggaaaatccttccctggaacacagaatttccacttggaggttggcctcattattctctctgtagtgttcgcagtatgtcttttagcctgcctgctgggagttgctctccgaaaatttaaaaggcgcaaccaagaacgcctcaatccccgagacgtggagtatggcactatcgaagggctcatcaccaccaatgttggagacagcactttagcagatttattggatcattcgtgtacatcaggaagtggctctggtcttccttttctggtacaaagaacagtggctcgccagattacactgttggagtgtgtcgggaaaggcaggtatggtgaggtgtggaggggcagctggcaaggggaaaatgttgccgtgaagatcttctcctcccgtgatgagaagtcatggttcagggaaacggaattgtacaacactgtgatgctgaggcatgaaaatatcttaggtttcattgcttcagacatgacatcaagacactccagtacccagctgtggttaattacacattatcatgaaatgggatcgttgtacgactatcttcagcttactactctggatacagttagctgccttcgaatagtgctgtccatagctagtggtcttgcacatttgcacatagagatatttgggacccaagggaaaccagccattgcccatcgagatttaaagagcaaaaatattctggttaagaagaatggacagtgttgcatagcagatttgggcctggcagtcatgcattcccagagcaccaatcagcttgatgtggggaacaatccccgtgtgggcaccaagcgctacatggcccccgaagttctagatgaaaccatccaggtggattgtttcgattcttataaaagggtcgatatttgggcctttggacttgttttgtgggaagtggccaggcggatggtgagcaatggtatagtggaggattacaagccaccgttctacgatgtggttcccaatgacccaagttttgaagatatgaggaaggtagtctgtgtggatcaacaaaggccaaacatacccaacagatggttctcagacccgacattaacctctctggccaagctaatgaaagaatgctggtatcaaaatccatccgcaagactcacagcactgcgtatcaaaaagactttgaccaaaattgataattccctcgacaaattgaaaactgactgttgacattttcatagtgtcaagaaggaagatttgacgttgttgtcattgtccagctgggacctaatgctggcctgactggttgtcagaatggaatccatctgtctccctccccaaatggctgctttgacaaggcagacgtcgtacccagccatgtgttggggagacatcaaaaccaccctaacctcgctcgatgactgtgaactgggcatttcacgaactgttcacactgcagagactaatgttggacagacactgttgcaaaggtagggactggaggaacacagagaaatcctaaaagagatctgggcattaagtcagtggctttgcatagctttcacaagtctcctagacactccccacgggaaactcaaggaggtggtgaatttttaatcagcaatattgcctgtgcttctcttctttattgcactaggaattctttgcattccttacttgcactgttactcttaattttaaagacccaacttgccaaaatgttggctgcgtactccactggtctgtctttggataataggaattcaatttggcaaaacaaaatgtaatgtcagactttgctgcattttacacatgtgctgatgtttacaatgatgccgaacattaggaattgtttatacacaactttgcaaattatttattacttgtgcacttagtagtttttacaaaactgctttgtgcatatgttaaagcttatttttatgtggtcttatgattttattacagaaatgtttttaacactatactctaaaatggacattttcttttattatcagttaaaatcacattttaagtgcttcacatttgtatgtgtgtagactgtaactttttttcagttcatatgcagaacgtatttagccattacccacgtgacaccaccgaatatattatcgatttagaagcaaagatttcagtagaattttagtcctgaacgctacggggaaaatgcattttcttcagaattatccattacgtgcatttaaactctgccagaaaaaaataactattttgttttaatctactttttgtatttagtagttatttgtataaattaaataaactgttttcaagtc

SEQ ID NO: 2985 - protein, 509 aa, Homo sapiens
  ref <308>: DATABASE ACCESSION NUMBER: SWISS-Prot / Q04771
  ref <309>: DATABASE ENTRY DATE: 2001-10-16
MVDGVMILPVLIMIALPSPSMEDEKPKVNPKLYMCVCEGLSCGNEDHCEGQQCFSSLSINDGFHVYQKGCFQVYEQGKMTCKTPPSPGQAVECCQGDWCNRNITAQLPTKGKSFPGTQNFHLEVGLIILSVVFAVCLLACLLGVALRKFKRRNQERLNPRDVEYGTIEGLITTNVGDSTLADLLDHSCTSGSGSGLPFLVQRTVARQITLLECVGKGRYGEVWRGSWQGENVAVKIFSSRDEKSWFRETELYNTVMLRHENILGFIASDMTSRHSSTQLWLITHYHEMGSLYDYLQLTTLDTVSCLRIVLSIASGLAHLHIEIFGTQGKPAIAHRDLKSKNILVKKNGQCCIADLGLAVMHSQSTNQLDVGNNPRVGTKRYMAPEVLDETIQVDCFDSYKRVDIWAFGLVLWEVARRMVSNGIVEDYKPPFYDVVPNDPSFEDMRKVVCVDQQRPNIPNRWFSDPTLTSLAKLMKECWYQNPSARLTALRIKKTLTKIDNSLDKLKTDC

SEQ ID NO: 2986 - DNA, 2074 bp, Rattus norvegicus
  ref <308>: DATABASE ACCESSION NUMBER: EMBL / L19699
  ref <309>: DATABASE ENTRY DATE: 2000-03-04
cggcggctccctcagctcctcatctgggccatctgtccgtgtgtcgctgcctcagaccagcaggatggctgccaacaaaggcaagagccagggctccctggtccttcacaaggtcatcatggtcggcagtgggggagtcggcaagtcagccctgacgctccagttcatgtatgacgagtttgtagaagactatgagcccaccaaagccgacagttacagaaagaaggtggttctcgacggagaagaggttcagatagacatcctggacacagccggccaggaggactatgcggccatccgtgacaactacttccgaagcggagaaggctttctgctggtgttctccatcacggagcacgagtctttcaccgccacagccgagttcagggaacagatcctccgagtcaaggccgaggaggacaaaatccctctgctggtcgtgggcaacaagtctgacctggaggagcggaggcaggtgcccgtggaggaggcccgaggcaaagcggaagagtggggtgtgcagtatgtggagacatccgcaaagacccgagccaacgtggacaaggtgttctttgatctgatgagagaaatccgggcaaagaagatgtcggaaaacaaggacaagaacggcaggaaaagcggcaagagcaagaagagtttcaaagagcggtgctgcttgctgtgagcgggccgcggacagagcgagcggagaaggccacattgcagcgcgccgagcccaggtggcctccccctggctccccgtctccagcagctgtaattcactatcacttcttgaagatggacagatacctgtgcaaaccagtggctggcaggagaaagacgcacttcgtctgtgcgtctgtgcgatgcatctgctaacgttgccaggagctttgagagtctgccccctcccaccctccctgaaccgtgactgtcaccagactctagggtcaggaatctgagttgtgttgacaagaaagaggattgccacggcggcttgtccccccctgttctaggacatggtcatcttttgttggaaaatcaaaatgcttcacattagcagggcgtgctggtgcacccctgtagtcccagaactctagaaggtaaggcagggagggtagcctgagcccaaggccccaaggcctgggctacctagcaagaccctgtctctaaaaggaaaaagaactaacatcttattttcttagatttaaaaagagggtctctggcaagacccctcgttagttcttatcagtttagaagtagacagggggcggaaaacctaagctcaggtaatactgaaaaagccaaaacaatttgttttttttttttttttctgttttaaaagataaacttctgtgacttggaagcagaattagaaagatgaacttcacttggtccagataggctgaaccaagcctcctggcgtttgtagagaagtgggacgctgttcccttcatacttaaatgccagccaggtgctggctgtgggcttccctccctaacacccttacttagtagtgaggaaactttgtgtgggggagatgtagcctgtgccccagaacaagctttcttttttctgactggatcatctcaccttttctggttccctcccactccagccataggcctgttctttttcttcctttctgaaaaatgtgaccagttcaaattatgtcccaggacacgggccagcgccagctacctctgcagactctacaagcggaagaggggaaggctcagaagggagggccatctcctgtagctcccggcagttggttctggtgacactgacatgaaccaggttccagaggctcacacccactctctgttaagcctcctctcggggaaggggactctgggactgggggctgccactgagcacacacactcctcccattttccagaagtgaacatttcacttttggtgccgaatgtgaatctgggtgggaagagcgggagcccttctaatggatttttttttacagagttatggaatccaaggtctgatccctggaaacttgtgtcacttccaaagaatcatgggctttttcgaattaaaaaaaattacacttttc

SEQ ID NO: 2987 - protein, 206 aa, Rattus norvegicus
  ref <308>: DATABASE ACCESSION NUMBER: SWISS-Prot / P36860
  ref <309>: DATABASE ENTRY DATE: 1996-10-01
MAANKGKSQGSLVLHKVIMVGSGGVGKSALTLQFMYDEFVEDYEPTKADSYRKKVVLDGEEVQIDILDTAGQEDYAAIRDNYFRSGEGFLLVFSITEHESFTATAEFREQILRVKAEEDKIPLLVVGNKSDLEERRQVPVEEARGKAEEWGVQYVETSAKTRANVDKVFFDLMREIRAKKMSENKDKNGRKSGKSKKSFKERCCLL

SEQ ID NO: 2988 - DNA, 1327 bp, Homo sapiens
  ref <308>: DATABASE ACCESSION NUMBER: EMBL / M35416
  ref <309>: DATABASE ENTRY DATE: 2000-03-04
gagcccggcagctcaatgacaaatcggtggaggacggctggggtccggccccgggagggcccggggcgcgtttaagagctgcgggccgggtgcggacggcggaggcggcgggactggtccctgctcttcagtgggtcatctgtgtgtcacagcctcagaagaccagcgagatggctgccaacaagagtaagggccagagctccttggccctccacaaggtgatcatggttggcagcggaggcgttggcaagtcagccctgacgcttcagttcatgtatgacgagtttgtagaagactatgaacctaccaaagctgacagttatagaaagaaagtggttcttgatggggaagaagttcagatagatattctggacaccgctgggcaagaggactacgcagccattcgagataactactttcggagtggggaagggtttcttcttgtgttctcaatcacagaacatgaatcctttacagcaactgccgaattcagggaacagattctccgtgtgaaggctgaagaagataaaattccactgctcgtcgtgggaaacaagtctgacctagaggagcggaggcaggtgcctgtggaggaggccaggagtaaagccgaagagtggggcgtgcagtacgtggagacgtcagcgaagacccgggccaacgtggacaaggtgttctttgacctaatgagagaaatcagaacaaagaagatgtcagaaaacaaagacaagaatggcaagaaaagcagcaagaacaagaaaagttttaaagaaagatgttgcttactatgagtgtcaaggtgacggatgaagccagctgctcctaaggacacagggctgggttggtaaagagaaggctatggttgacttcttgcttgtgcttcccactctccccgacttcattcactcaaacttctttaaatggggaaaaatatttgtgactctgtggctggcagaagaaataagcccatgcaagtggaagggctgctttgtcaggaggttgtggaatttctttcttctccccttcttccctcccaaaagcttagctatgtataaagtgccacagataggaaacagctgttaattacaaagagaaagaattgtcatagcatcttattttgttcctagttttataacattaccatccttcgttttgaactacagatgttgtagtgggttttggaggagggagtggagtaagatgccctcccacttttatcagtttagtagtagtactgagaaaaatcccttcagctctaagaacactgaaaaatccaccgattttttgggtaagcttcttggcaataccctgtggatctgaaacagct

SEQ ID NO: 2989 - protein, 206 aa, Homo sapiens
  ref <308>: DATABASE ACCESSION NUMBER: SWISS-Prot / P11234
  ref <309>: DATABASE ENTRY DATE: 2002-06-15
MAANKSKGQSSLALHKVIMVGSGGVGKSALTLQFMYDEFVEDYEPTKADSYRKKVVLDGEEVQIDILDTAGQEDYAAIRDNYFRSGEGFLLVFSITEHESFTATAEFREQILRVKAEEDKIPLLVVGNKSDLEERRQVPVEEARSKAEEWGVQYVETSAKTRANVDKVFFDLMREIRTKKMSENKDKNGKKSSKNKKSFKERCCLL

SEQ ID NO: 2990 - DNA, 2074 bp, Rattus norvegicus; identical to SEQ ID NO: 2986
  ref <308>: DATABASE ACCESSION NUMBER: EMBL / L19699
  ref <309>: DATABASE ENTRY DATE: 2000-03-04

SEQ ID NO: 2991 - protein, 206 aa, Rattus norvegicus; identical to SEQ ID NO: 2987
  ref <308>: DATABASE ACCESSION NUMBER: SWISS-Prot / P36860
  ref <309>: DATABASE ENTRY DATE: 1996-10-01

SEQ ID NO: 2992 - DNA, 1327 bp, Homo sapiens; identical to SEQ ID NO: 2988
  ref <308>: DATABASE ACCESSION NUMBER: EMBL / M35416
  ref <309>: DATABASE ENTRY DATE: 2000-03-04

SEQ ID NO: 2993 - protein, 206 aa, Homo sapiens; identical to SEQ ID NO: 2989
  ref <308>: DATABASE ACCESSION NUMBER: SWISS-Prot / P11234
  ref <309>: DATABASE ENTRY DATE: 2002-06-15

SEQ ID NO: 2994 - DNA, 1227 bp, Rattus norvegicus
  ref <308>: DATABASE ACCESSION NUMBER: EMBL / L19998
  ref <309>: DATABASE ENTRY DATE: 2000-03-04
ggaattcgcaacgcctacacaaagatccctatcactgagcacccggaggcaaggctcagaaccccaggatcagcaacatggagttctcccgtccaccgctagtgcatgtgaagggtatcccactcatcaaatactttgcagagacaattgggccattgcagaacttcacagcctggcctgatgacttgctgatcagcacatacccaaagtctggtactacctggatgagtgagatcctggatatgatctatcagggtggcaagctagagaagtgtggccgcgcccccatctatgcccgggtacccttccttgagttcaaatgtccaggggttccctcaggtcttgaaactttggaagagacaccagccccacggctccttaagacacatctgcccctgtccttgctccctcagagtctgctggatcagaaggtcaaggtgatctacattgcccgaaatgcaaaggatgtggttgtctcctattataacttctacaacatggccaagctgcaccctgatccaggcacctgggacagcttcttggagaacttcatggatggggaagtgtcctatgggtcgtggtaccagcacgtgaaggagtggtgggagctgagacacactcaccctgttctctatctcttctatgaagacataaaggagaaccccaaaagggagatcaagaagattctagagtttttggggcgctctctacccgaggagactgtggattccattgttcaccacacatctttcaagaaaatgaaagagaactgcatgactaactacacaaccatccccactgagattatggaccacaatgtttctcccttcatgaggaaaggtactactggggactggaaaaataccttcactgtagcccagaatgagcgctttgatgcccactatgctaagacaatgacagattgtgacttcaagtttcgttgtgaactatgagtggattatggctatactgggaaccaaggcaaactgacacagcccatcatgatctcaagtaaaatgtgatgtgttcaatctacttgttgtatgcctagaggaaatctgagctaagagaataggattggggatgtggctgaggcagagggttttatcaacgcatgtcaggaaagcaatcagtcccaacacctaaaaagaacctaaagtacaaacatgcaaaaaatagtaagataaactatattttacctgaaagaataaatgccactgggaaatg

SEQ ID NO: 2995 - protein, 291 aa, Rattus norvegicus
  ref <308>: DATABASE ACCESSION NUMBER: SWISS-Prot / P17988
  ref <309>: DATABASE ENTRY DATE: 2001-10-16
MEFSRPPLVHVKGIPLIKYFAETIGPLQNFTAWPDDLLISTYPKSGTTWMSEILDMIYQGGKLEKCGRAPIYARVPFLEFKCPGVPSGLETLEETPAPRLLKTHLPLSLLPQSLLDQKVKVIYIARNAKDVVVSYYNFYNMAKLHPDPGTWDSFLENFMDGEVSYGSWYQHVKEWWELRHTHPVLYLFYEDIKENPKREIKKILEFLGRSLPEETVDSIVHHTSFKKMKENCMTNYTTIPTEIMDHNVSPFMRKGTTGDWKNTFTVAQNERFDAHYAKTMTDCDFKFRCEL

SEQ ID NO: 2996 - DNA, 1176 bp, Homo sapiens
  ref <308>: DATABASE ACCESSION NUMBER: EMBL / L19999
  ref <309>: DATABASE ENTRY DATE: 1999-07-02
cacacagcacccacaatcagccactgcgggcgaggagggcacgaggccaggttcccaagagctcaggaacatggagctgatccaggacacctcccgcccgccactggagtacgtgaagggggtcccgctcatcaagtactttgcagaggcactggggcccctgcagagcttccaggcccggcctgatgacctgctcatcagcacctaccccaagtccggcactacctgggtaagccagattctggacatgatctaccagggtggtgacctggagaagtgtcaccgagctcccatcttcatgcgggtgcccttccttgagttcaaagccccagggattccctcagggatggagactctgaaagacacaccggccccacgactcctgaagacacacctgcccctggctctgctcccccagactctgttggatcagaaggtcaaggtggtctatgttgcccgcaacgcaaaggatgtggcagtttcctactaccacttctaccacatggccaaggtgcaccctgagcctgggacctgggacagcttcctggagaagttcatggtcggagaagtgtcctacggatcctggtaccagcacgtgcaggagtggtgggagctgagccgcacccaccctgttctctacctcttctatgaagacatgaaggagaacccgaaaagggagattcaaaagatcctggagtttgtggggcgctccctgccagaggagaccgtggacttcatggttcagcacacgtcgttcaaggagatgaagaagaaccctatgaccaactacaccaccgtcccccaggagttcatggaccacagcatctcccccttcatgaggaaaggcatggctggggactggaagaccaccttcaccgtggcgcagaatgagcgcttcgatgcggactatgcgaagaagatggcaggctgcagcctcacgttccgctctgagctgtgagaggggctcctggagtcactgcagagggagtgtgcgaatcaaacctgaccaagcggctcaagaataaaatatcaattgagggcccggacggtaggtcatgtctgtaatcccagcaatttggaggctgaggtgggaggatcatttgagcccaggagttcgagaccaacctgggcaacatagtgagattctgttaaaaaaataaaataaaataaaaccaa

SEQ ID NO: 2997 - protein, 295 aa, Homo sapiens [sequence omitted]

SEQ ID NO: 2998 - DNA, 1227 bp, Rattus norvegicus; identical to SEQ ID NO: 2994
  ref <308>: DATABASE ACCESSION NUMBER: EMBL / L19998
  ref <309>: DATABASE ENTRY DATE: 2000-03-04

SEQ ID NO: 2999 - protein, 291 aa, Rattus norvegicus; identical to SEQ ID NO: 2995
  ref <308>: DATABASE ACCESSION NUMBER: SWISS-Prot / P17988
  ref <309>: DATABASE ENTRY DATE: 2001-10-16

SEQ ID NO: 3000 - DNA, 1176 bp, Homo sapiens; identical to SEQ ID NO: 2996
  ref <308>: DATABASE ACCESSION NUMBER: EMBL / L19999
  ref <309>: DATABASE ENTRY DATE: 1999-07-02

SEQ ID NO: 3001 - protein, 295 aa, Homo sapiens [sequence omitted]

SEQ ID NO: 3002 - DNA, 1227 bp, Rattus norvegicus; identical to SEQ ID NO: 2994
  ref <308>: DATABASE ACCESSION NUMBER: EMBL / L19998
  ref <309>: DATABASE ENTRY DATE: 2000-03-04

SEQ ID NO: 3003 - protein, 291 aa, Rattus norvegicus; identical to SEQ ID NO: 2995
  ref <308>: DATABASE ACCESSION NUMBER: SWISS-Prot / P17988
  ref <309>: DATABASE ENTRY DATE: 2001-10-16

SEQ ID NO: 3004 - DNA, 1176 bp, Homo sapiens; identical to SEQ ID NO: 2996
  ref <308>: DATABASE ACCESSION NUMBER: EMBL / L19999
  ref <309>: DATABASE ENTRY DATE: 1999-07-02

SEQ ID NO: 3005 - protein, 295 aa, Homo sapiens [sequence omitted]

SEQ ID NO: 3006 - DNA, 1227 bp, Rattus norvegicus; identical to SEQ ID NO: 2994
  ref <308>: DATABASE ACCESSION NUMBER: EMBL / L19998
  ref <309>: DATABASE ENTRY DATE: 2000-03-04

SEQ ID NO: 3007 - protein, 291 aa, Rattus norvegicus; identical to SEQ ID NO: 2995
  ref <308>: DATABASE ACCESSION NUMBER: SWISS-Prot / P17988
  ref <309>: DATABASE ENTRY DATE: 2001-10-16

SEQ ID NO: 3008 - DNA, 1176 bp, Homo sapiens; identical to SEQ ID NO: 2996
  ref <308>: DATABASE ACCESSION NUMBER: EMBL / L19999
  ref <309>: DATABASE ENTRY DATE: 1999-07-02

SEQ ID NO: 3009 - protein, 295 aa, Homo sapiens [sequence omitted]

SEQ ID NO: 3010 - DNA, 1058 bp, Rattus norvegicus
  ref <308>: DATABASE ACCESSION NUMBER: EMBL / L20427
  ref <309>: DATABASE ENTRY DATE: 2000-03-04
cattaaaatgtggcttagatcttacaggataacgttttcctgtttgaccagactaaaaacttacaggtcctcttggaagaaattatacagtacttcacaaacagttgacagcaaggaggtcaaaaccttccaggccctggctcactcatggtgggatgagcaagggaagtttgcgcctcttcattctatgaatgacctacgggtgccgttcattagagacaatcttttgaaaacaagtactaatcatgatccaggaaagcctttatctgggatgaagattctcgacgttggctgtggcggtgggttattaactgaacctctagggagactgggagcttcagttgttggaatcgatcctgtggctgaaaacattaagatagcacagcaccataaatcatttgatccagtcctggataagaggatacagtaccgagtgtgctccctggaggagaccttgaatgagaatgcagagtgttttgatgctgtcgtggcttctgaagtggtcgagcatgtgaacaaccttgaaatgttcatacagtgctgctatcaagtattgaaacctggtggctctttattcattactacagtgaacaaaacacagctgtcctatgtcttgggaattgttttctcagagcaaattgcaggcattgttccaaaaggcactcatacgtgggagaagtttgtttcacctgaaaagctagaaagcatcttggaaccaaatggtctgtcagttgaaactgtggcaggaatggtctataaccctttctcaggttactggcattggactgaaaataccagccttaactatgcagcccatgctgtgagagccagggctcaggaacacctggagcctgctgagtctgcttgaaagggggaagcagaagcaccccatgccaaagtctccggcagcccaagtgtgcacgaggggcagagaaaatgagaaagctctgaggacagcagtaaatatgcttgaagttgtgttgtttacaaatccaaacatcttactccttttcgggagggattctgaagaacaaaaggtcaataaaaatatctaaatc

SEQ ID NO: 3011 - protein, 286 aa, Rattus norvegicus
  ref <308>: DATABASE ACCESSION NUMBER: SWISS-Prot / Q63159
  ref <309>: DATABASE ENTRY DATE: 2002-06-15
MWLRSYRITFSCLTRLKTYRSSWKKLYSTSQTVDSKEVKTFQALAHSWWDEQGKFAPLHSMNDLRVPFIRDNLLKTSTNHDPGKPLSGMKILDVGCGGGLLTEPLGRLGASVVGIDPVAENIKIAQHHKSFDPVLDKRIQYRVCSLEETLNENAECFDAVVASEVVEHVNNLEMFIQCCYQVLKPGGSLFITTVNKTQLSYVLGIVFSEQIAGIVPKGTHTWEKFVSPEKLESILEPNGLSVETVAGMVYNPFSGYWHWTENTSLNYAAHAVRARAQEHLEPAESA

SEQ ID NO: 3012 - DNA, 1336 bp, Homo sapiens
  ref <308>: DATABASE ACCESSION NUMBER: EMBL / AK056955
  ref <309>: DATABASE ENTRY DATE: 2002-08-06
aaaagaggtgggatcgtttgtcgcgatgtggagtggccgtaagctgggctcctccgggggttggtttttaagagtgctggggcctggaggctgtaatacaaaagctgcgcgtcccttaatttcctcggcggtttatgtgaagaaccagctcagtgggactctacagattaaaccaggggttttcaatgaatacagaaccatatggttcaaatcctacaggacgatcttttcctgtttgaacagaataaagagtttcaggtacccttgggcgagactgtacagtacttcccaaaccactgtcgacagcggtgaggtaaaaaccttcttggccctggctcacaaatggtgggatgaacaaggagtatatgcacctcttcattccatgaatgacctgagggtgccatttattagggacaatcttctgaaaacaattcctaatcaccagccaggaaaacctttgttggggatgaagattcttgacgttggctgtggtggtgggctgttaactgaacctctagggcggcttggggcttcagttattggaatcgaccctgtggatgagaacattaaaacagcacaatgccataaatcatttgatccagtcctggataagagaatagagtacagagtgtgttccctggaagagattgtggaagagactgcagaaacatttgatgctgttgtagcttctgaagttgtagaacatgtgattgatctagaaacatttttacagtgctgctgtcaagtgttaaaacccggtggttctttattcattactacaatcaacaaaacacaactttcctatgccttgggaattgttttttcagagcaaattgcaggtattgtaccaaaaggtactcatacatgggagaagtttgtttcacctgaaacactagagagcattctggaatcaaatggtctgtcagttcaaacagtggtaggaatgctctataaccccttctcaggttactggcattggagtgaaaataccagccttaactatgcagctcatgctgtgaaatccagggtccaggaacacccagcctctgctgagtttgttttaaagggagagacagaagagctccaagctaatgcctgcaccaatccagctgtgcatgaaaagctgaagaaatgaattgtttctgagaactatagtaatatggcttggatatctgatgttttcaaatacaagaaatgtacaatttatcctttgagagagaatcatgaagaaaagaaggtcaataaaaagggctaaaaccttggacaaaagtttttgttatttcgtctaatagctactttcaagggattctgtgaataaaaagttttgtcaagatat

SEQ ID NO: 3013 - protein, 310 aa, Homo sapiens
  ref <308>: DATABASE ACCESSION NUMBER: SWISS-Prot / Q9NZJ6
  ref <309>: DATABASE ENTRY DATE: 2002-06-15
MFKSYRTIFSCLNRIKSFRYPWARLYSTSQTTVDSGEVKTFLALAHKWWDEQGVYAPLHSMNDLRVPFIRDNLLKTIPNHQPGKPLLGMKILDVGCGGGLLTEPLGRLGASVIGIDPVDENIKTAQCHKSFDPVLDKRIEYRVCSLEEIVEETAETFDAVVASEVVEHVIDLETFLQCCCQVLKPGGSLFITTINKTQLSYALGIVFSEQIAGIVPKGTHTWEKFVSPETLESILESNGLSVQTVVGMLYNPFSGYWHWSENTSLNYAAHAVKSRVQEHPASAEFVLKGETEELQANACTNPACIEKLKK

SEQ ID NO: 3014 - DNA, 1608 bp, Rattus norvegicus
  ref <308>: DATABASE ACCESSION NUMBER: EMBL / L20822
  ref <309>: DATABASE ENTRY DATE: 2000-03-04
acggatcagggtgtctacctgggtctctcaaagacacaggttctgtcccctgcaactgctatcaatagcagcagtgacatcgctcctttgcccaccccggtggccctggtcccctcccctcccgacactatgtcctgccgggatcggacccaggagttcctgtctgcctgcaagtcgctgcagagccgtcagaatggaatccaaacaaataaaccagctctgcacgctacccggcagtgcagcgagtttaccctcatggccaggcgcattgggaaagatctcagcaatacatttgccaagctggagaagctaacaatcctggcaaagcgcaagtccctctttgatgataaagcagtagaaattgaggaactaacatacatcatcaaacaggacatcaatagcctcaacaaacaaattgctcagcttcaagattttgtgagggccaagggcagccagagtggccggcatctgcagacccattccaacaccattgtagtttcattgcagtcaaaactggcttccatgtccaatgacttcaagtctgttttggaagtgaggactgaaaatctgaaacagcagaggaaccgtcgggaacagttctccagggcgccagtgtcggcactgcctctggcccccaacaaccttggaggtggtcccatagttctgggaggagagtcccgagcctccagggacgtggccatcgacatgatggaccctagaacaagccagcagcttcagctcattgatgagcaggattcctacatccagagtcgggcagacaccatgcagaacattgagtctacaattgttgagctgggctccatttttcaacaattggcacacatggttaaagaacaggaggaaacaattcagaggattgacgagaatgtgcttggagcccagctggatgttgaggccgcccattcagagatcctcaagtacttccagtcagtcacctccaatcggtggctcatggtcaaaatcttcctcatcctcattgtcttcttcatcatctttgtggtcttccttgcctgaaccctcctccctcattctgagccactccatggagggcctggaacccttctggaaggacaggtggccactattgccactgagcctgtgcagggtagttgggagaaaggccatttccttggaactgctaagaatggccagtgtccctgattccccacccttgtctctggccactctgtcctaccctcaggcccatgaaacacactggttctggatttggcctctgctgtgaagtggcagggaacagaagccagctagggccagtggggaggttgtctctaccatgagatttttataaacccagaccagcctcccctaaaggtaactggcagcaagaggaaacaatgccctccttgccttctggagagtgaggtgaggaagtaaaactatcccagggaccaacttaatcatctgggtcatctagaacttgactgccaccttctcctcaccatgtgaggtgggggggctctgagccctacagttgcacaaacctgactttggctactggtgactctcaatctgccaaacatgctgcagcctgtttcctcccaattacagcaagactgtcagccttca

SEQ ID NO: 3015 - protein, 301 aa, Rattus norvegicus
  ref <308>: DATABASE ACCESSION NUMBER: SWISS-Prot / Q08851
  ref <309>: DATABASE ENTRY DATE: 2002-06-15
MSCRDRTQEFLSACKSLQSRQNGIQTNKPALHATRQCSEFTLMARRIGKDLSNTFAKLEKLTILAKRKSLFDDKAVEIEELTYIIKQDINSLNKQIAQLQDFVRAKGSQSGRHLQTHSNTIVVSLQSKLASMSNDFKSVLEVRTENLKQQRNRREQFSRAPVSALPLAPNNLGGGPIVLGGESRASRDVAIDMMDPRTSQQLQLIDEQDSYIQSRADTMQNIESTIVELGSIFQQLAHMVKEQEETIQRIDENVLGAQLDVEAAHSEILKYFQSVTSNRWLMVKIFLILIVFFIIFVVFLA

SEQ ID NO: 3016 - DNA, 1507 bp, Homo sapiens
  ref <308>: DATABASE ACCESSION NUMBER: Refseq / NM_003164
  ref <309>: DATABASE ENTRY DATE: 2002-05-14
ctcgaggccacgaaggccccgacaccatgtcctgccgggatcggacccaggagtttctgtctgcctgcaagtcgctgcagacccgtcagaatggaatccagacaaataagccagctttgcgtgctgtccgacaacgcagtgaattcaccctcatggccaagcgcattgggaaagaccttagcaacacatttgccaagctggagaagctgacaatcttggcaaagcgcaagtccctctttgatgataaagcagtggaaattgaagagctaacatatatcatcaaacaggacatcaatagcctcaacaaacaaattgctcagctccaggatttcgtgagagccaagggcagccagagtggccggcacctgcagacccactccaacaccattgtggtctccttgcagtcgaaactggcttctatgtccaatgacttcaaatcggttttagaagtgaggacagagaacctgaagcagcagaggagccggagagagcagttctcccgggcacctgtgtcagccctgccccttgcccctaaccacctgggcggtggtgctgtggttctgggggcagagtcccatgcctccaaggatgtcgccatcgacatgatggactctcggaccagccagcagctgcagctcattgacgagcaggattcctacatccagagtcgggcagacaccatgcagaacattgagtcgacaattgttgagttgggctccatctttcagcagttggcacacatggttaaggaacaggaggaaaccattcagaggatcgacgagaacgtgctaggagcccagctggacgttgaggccgcccattcagagatcctcaagtacttccagtctgtcacctccaaccggtggctcatggtcaaaatcttcctcatcctcattgtcttcttcatcatctttgtggtcttccttgcttgaaccctctctactctgaggcactctgttggggtttgggaccctcctgggaaggcaagtggccagtgctgccactgagcctgtgcagggtacttgggagaaaggccctgtttccctggaactgctaagaatgaccactgcccctgatcccccaccccttgcctctggccaccctgtcctccccccaccaccctcaggcctatgaaacacacagggttctagatttgaactctgctgtgaagtgactggaagggagcagaggccagctgggggccagtgggggaggttgtttccactaggagatttttataaaccctctccagcctctcccggaaaggaagcgttggcagcaaagggagatgatgcccttacccaccttcctgtgagtgaagagaggaagcagccccagggaccaattttcccaattgacctctttcttcctctttcaccatgtgaggcagggagccctgagcccttcagctgcctgcacaacccctgacattggctgctggtgactcaatctgccaaatgtgctgcagctcgttttctcccaattacagcaagactgtcagcctcca

SEQ ID NO: 3017 - protein, 301 aa, Homo sapiens
  ref <308>: DATABASE ACCESSION NUMBER: SWISS-Prot / Q13190
  ref <309>: DATABASE ENTRY DATE: 2002-06-15
MSCRDRTQEFLSACKSLQTRQNGIQTNKPALRAVRQRSEFTLMAKRIGKDLSNTFAKLEKLTILAKRKSLFDDKAVEIEELTYIIKQDINSLNKQIAQLQDFVRAKGSQSGRHLQTHSNTIVVSLQSKLASMSNDFKSVLEVRTENLKQQRSRREQFSRAPVSALPLAPNHLGGGAVVLGAESHASKDVAIDMMDSRTSQQLQLIDEQDSYIQSRADTMQNIESTIVELGSIFQQLAHMVKEQEETIQRIDENVLGAQLDVEAAHSEILKYFQSVTSNRWLMVKIFLILIVFFIIFVVFLA

SEQ ID NO: 3018 - DNA, 2094 bp, Rattus norvegicus
  ref <308>: DATABASE ACCESSION NUMBER: EMBL / L20900
  ref <309>: DATABASE ENTRY DATE: 2000-03-04
ggcacgagctccgatctccgctgagaggctcctgggggccggggctccgaggaaaatggttcgatgttattaaaaatgaatcttaagaagaaaaatgaatcacagcagttaaactatggagttctgctacttgtaagaagtggagaagcctgagattacatcactgacccttgatcctccactgagctaaaacaccagctggtaattgcctatgattttatagacttccctccatctgctgggtccaagtgtccgtctgactgctctggtaccggagcatctttatttctgcatctaaacttgtaaaaagcacatcgaatcttgttccccaggagaaaatcttcaatgtaaccattttcaatgtatccgatgatacaagcgcattgtaatctccaggtagaagcagctttatcagtggaaagggtttaatagaacatatcctatcatgctttttctctgccccttctcaaatcatcagcagtagaaaagagaagaaaacatgtcaggacacaaatgttattcctgggagttgcaggatcggtttgctcaagataagtcagttgtcaataagatgcaacagaaatattgggaaacgaatgaggcctttatcaaagccacagggaagaaggaagatgaacatgtcgttgcttctgatgcagacctggatgccaagctagagctgtttcattcgattcagagaacctgtttggacttgtctaaagcaattgtgctctatcaaaagagaatatgtttcttgtctcaagaagaaaatgaactgggaaaatttctccgatcccaaggcttccaggacaaaacccgagcaggaaaaatgatgcaagccacaggaaaggccctctgcttttcctcccagcaaaggttggccttgagaaaccctttgtgtcgatttcaccaagaagtagagacttttagacatcgggccatctccgatacctggctgacagtgaaccgcatggagcagtgccggacagaatatagaggggcgttattgtggatgaaggacgtgtctcaggaactggatccagacctctacaagcaaatggagaagttcaggaaggtacagacacaagtccgcctcgcgaagaagaactttgacaaattgaagatggatgtgtgtcaaaaggtggatcttcttggagcaagcagatgtaacctcttatctcacatgctagcaacatatcagaccactctgctccacttttgggagaaaacttctcacaccatggcagccatccatgagagcttcaaaggctatcaaccatatgaattcacaacgttaaagagcttacaagaccctatgaaaaagctagtcgagaaagaaaagaagaagagctcccggagggaaaaccgggaggctgtggcacaggagccgaggcagttaatttcattggaggaagagaaccagcacaaagaatcctctacttgccagaaggaggagggaaaaagcgttccgtcgtctgtagacaagagttctgcagatgatgcatgctcaggacccatagatgaactattagacgtgaaacctgaggaagcttgcctgggtcccatggcagggaccccagaacctgaaagtggggacaaggacgacctcctgctgttgaacgagatcttcagcacttccagcctggatgaaggggagttcagcagggagtgggctgcggtgttcggagacgaccggctgaaggaaccagcccccatgggggcccagggagagccagaccccaagccccagataggctctgcgttccttccttcacagcttttagaccaaaacatgaaagatctccaggcctctctccaagagcctgccaaggctgcctcggacctgactgcctggttcagcctctttgctgacctcgaccccctatcaaatcctgatgctattgggaaaaccgataaagaacacgaattgctcaatgcatgagtctgcaaccttcaacaggggagccctccggccactccgcaacacctcatccagggcttgcagaagtctaacgtgctcagtacgctgttttaatatttacatgccattttaataaaacgagagggtcaaggccctgtttctatcgctataaa

SEQ ID NO: 3019 - protein, 481 aa, Rattus norvegicus
  misc_feature (1)..(481): Xaa=Unknown amino acid
MSGHKCYSWELQDRFAQDKSVVNKMQQKYWETNEAFIKATGKKEDEHVVASDADLDAKLELFHSIQRTCLDLSKAIVLYQKRICFLSQEENELGKFLRSQGFQDKTRAGKMMQATGKALCFSSQQRLALRNPLCRFHQEVETFRHRAISDTWLTVNRMEQCRTEYRGALLWMKDVSQELDPDLYKQMEKFRKVQTQVRLAKKNFDKLKMDVCQKVDLLGASRCNLLSHMLATYQTTLLHFWEKTSHTMAAIHESFKGYQPYEFTTLKSLQDPMKKLVEKEKKKSSRRENREAVAQEPRQLISLEEENQHKESSTCQKEEGKSVPSSVDKSSADDACSGPIDELLDVKPEEACLGPMAGTPEPESGDKDDLLLLNEIFSTSSLDEGEFSREWAAVFGDDRLKEPAPMGAQGEPDPKPQIGSAFLPSQLLDQNMKDLQASLQEPAKAASDLTAWFSLFADLDPLSNPDAIGKTDKEHELLNAX

SEQ ID NO: 3020 - DNA, 1560 bp, Homo sapiens
  misc_feature (1)..(1560): n=a, c, g or t
  ref <308>: DATABASE ACCESSION NUMBER: EMBL / U37183
  ref <309>: DATABASE ENTRY DATE: 2000-03-04
tacaggatcgatatgctcaagataagtcagttgtaaataagatgcaacagaaatattgggagacgaagcaggcctttattaaagccacagggaagaaggaagatgaacatgttgttgcctctgacgcggacctggatgccaagctagagctgtttcattcaattcagagaacctgtctggacttatcgaaagcaattgtactctatcaaaagaggatatgtttcttgtctcaagaagaaaacgaactgggaaaatttcttcgatcccaaggtttccaagataaaaccagagcaggaaagatgatgcaagcgacaggaaaggccctctgcttttcttcccagcaaaggttggccttacgaaatcctttgtgtcgatttcaccaagaagtggagacttttcggcatcgggccatctcagatacttggctgacggtgaaccgcatggaacagtgcaggacggaatatagaggagcactnttatggatgaaggacgtgtctcaggagcttgatccagacctctacaagcaaatggagaagttcaggaaggtacaaacacaagtgcgccttgcaaaaaaaaactttgacaaattgaagatggatgtttgtcaaaaagtggatcttcttggagcgagcagatgcaatctcttgtctcacatgctagcaacataccagaccactctgcttcatttttgggagaaaacttctcacactatggcagccatccatgagagtttcaaaggttatcaaccatatgaatttactactttaaagagcttacaagaccctatgaaaaaattagttgagaaagaagagaagaagaaaatcaaccagcaggaaagtacagatgcagccgtgcaggagccgagccaattaatttcattagaggaagaaaaccagcgcaaggaatcctctagttttaagactgaagatggaaaaagtattttatctgccttagacaaaggctctacacatactgcatgctcaggacccatagatgaactattagacatgaaatctgaggaaggtgcttgcctgggaccagtggcagggaccccggaacctgaaggtgctgacaaagatgacctgctgctgttgagtgagatcttcaatgcttcctccttggaagagggcgagttcagcaaagagtgggccgctgtgtttggagacggccaagtgaaggagccagtgcccactatggccctgggagagccagaccccaaggcccagacaggctcaggtttccttccttcgcagcttttagaccaaaatatgaaagacttacaggcctcgctacaagaacctgctaaggctgcctcagacctgactgcctggttcagcctcttcgctgacctcgacccactctcaaatcctgatgctgttgggaaaaccgataaagaacacgaattgctcaatgcatgaatctgtacccttcgggagggcactcacatgccgcccccagcagctcccctgggggctagcagaagtataaagtgatcagtatgctgttttaataattatgtgccattttaataaaatgaaagggtcaacggcaaaaaaaaaa

SEQ ID NO: 3021 - protein, 483 aa, Homo sapiens
  ref <308>: DATABASE ACCESSION NUMBER: SWISS-Prot / Q05084
  ref <309>: DATABASE ENTRY DATE: 2002-06-15
MSGHKCSYPWDLQDRYAQDKSVVNKMQQKYWETKQAFIKATGKKEDEHVVASDADLDAKLELFHSIQRTCLDLSKAIVLYQKRICFLSQEENELGKFLRSQGFQDKTRAGKMMQATGKALCFSSQQRLALRNPLCRFHQEVETFRHRAISDTWLTVNRMEQCRTEYRGALLWMKDVSQELDPDLYKQMEKFRKVQTQVRLAKKNFDKLKMDVCQKVDLLGASRCNLLSHMLATYQTTLLHFWEKTSHTMAAIHESFKGYQPYEFTTLKSLQDPMKKLVEKEEKKKINQQESTDAAVQEPSQLISLEEENQRKESSSFKTEDGKSILSALDKGSTHTACSGPIDELLDMKSEEGACLGPVAGTPEPEGADKDDLLLLSEIFNASSLEEGEFSKEWAAVFGDGQVKEPVPTMALGEPDPKAQTGSGFLPSQLLDQNMKDLQASLQEPAKAASDLTAWFSLFADLDPLSNPDAVGKTDKEHELLNA

SEQ ID NO: 3022 - DNA, 863 bp, Rattus norvegicus
  ref <308>: DATABASE ACCESSION NUMBER: EMBL / L21711
  ref <309>: DATABASE ENTRY DATE: 2000-03-04
agcaagtgaggaagagagcgttggttctcccaagacagaagagatgtcttccttcagcacccagactccatacccgaacctagctgtacctttcttcaccagcatcccaaatgggctttacccatccaagtccatcgtcatatcaggcgtggtcttgtcagatgctaagaggttccagatcaaccttcgctgtgggggtgacattgctttccacctgaacccccgttttgatgagaatgctgtggtccgaaacactcagatcaacaactcctgggggcccgaagagcgaagcctgcctgggagtatgcccttcagtcgtggccagagattctcagtgtggatcttatgtgaaggtcactgcttcaaggtggccgtggacggtcagcatatttgtgaatacagccaccgcctgatgaacttgccggatatccagctaacacacgtggagacctaggaaggtctctggcctagggatgaaggctgaggaaccctacctgagtcttgtcacctcttccctgtctcagccctgcctccccaaatcctgtcatcaaagagagcctcattggcaggagttccaggaaggtgacattcccaattcacaccctccacaaagggggagtcctgggctgtgggacacatggctgtgagcccacagtgtcagccattgctcccaagctagtcatcttctgagggaagtgacctccctgggtttgcccctttctctgaccctttcccttcaccctccaggagggccaccttgatgtcatcccactggcctccaactgacccagaatgtccacattaacttttccccaatctttcccaatgcccataaaataaagaatatcaacgcttgtctacac

SEQ ID NO: 3023 - protein, 144 aa, Rattus norvegicus
  ref <308>: DATABASE ACCESSION NUMBER: SWISS-Prot / AAA65445
  ref <309>: DATABASE ENTRY DATE: 2001-10-16
SSFSTQTPYPNLAVPFFTSIPNGLYPSKSIVISGVVLSDAKRFQINLRCGGDIAFHLNPRFDENAVVRNTQINNSWGPEERSLPGSMPFSRGQRFSVWILCEGHCFKVAVDGQHICEYSHRLMNLPDINTLEVAGDIQLTHVET

SEQ ID NO: 3024 - DNA, 863 bp, Rattus norvegicus; identical to SEQ ID NO: 3022
  ref <308>: DATABASE ACCESSION NUMBER: EMBL / L21711
  ref <309>: DATABASE ENTRY DATE: 2000-03-04

SEQ ID NO: 3025 - protein, 144 aa, Rattus norvegicus; identical to SEQ ID NO: 3023
  ref <308>: DATABASE ACCESSION NUMBER: SWISS-Prot / AAA65445
  ref <309>: DATABASE ENTRY DATE: 2001-10-16

SEQ ID NO: 3026 - DNA, 498 bp, Rattus norvegicus
  ref <308>: DATABASE ACCESSION NUMBER: EMBL / L22788
  ref <309>: DATABASE ENTRY DATE: 2000-03-04
cgcgtccgtcctcagttgcctctctgctgccagctctctcccagcactatggccttcaccggcaaatacgaatttgaaagtgagaagaattacgacgagttcatgaagcgcctgggtcttccagaagatgtgattgaaaggggacgtaacttcaagatcatcacagaggtccagcaggatggagagaacttcacctggtcccagtcttactctgggggcaacatcatgagcaacaagttcaccattggcaaagaatgtgaaatgcagaccatggggggcaagaagttcaaggcaaccgtgaagatggagggtggcaaggtggtggcagacttccccaactatcaccagacttcggaggtcgtgggtgacaagttggtggagatctccaccatcggggatgtgacctacgagcgtgtaagcaagagggtggcttgagccaccaggctgggctctgagggactgcaacccatcaataaaagtgcaccatggatcaccact

SEQ ID NO: 3027 - protein, 127 aa, Rattus norvegicus
  ref <308>: DATABASE ACCESSION NUMBER: SWISS-Prot / P80020
  ref <309>: DATABASE ENTRY DATE: 1998-12-15
AFTGKYEFESEKNYDEFMKRLGLPDEVIERGRNFKIITEVQQDGENFTWSQSYSGGNIMSNKFTIGKECEMQTMGGKKFKATVKMEGGKVVADFPNYHQTSEVVGDKLVEISTIGDVTYERVSKRVA

SEQ ID NO: 3028 - DNA, 459 bp, Homo sapiens
  ref <308>: DATABASE ACCESSION NUMBER: EMBL / U19869
  ref <309>: DATABASE ENTRY DATE: 2000-03-04
atccattctcctcatccctctgctctctggcctccagcctcccagcagcatggctttcaccggcaagttcgagatggagagtgagaagaattatgatgagttcatgaagctccttgggatctccagcgatgtaatcgaaaaggcccgcaacttcaagatcgtcacggaggtgcagcaggatgggcaggacttcacttggtcccagcactactccgggggccacaccatgaccaacaagttcactgttggcaaggaaagcaacatacagacaatggggggcaagacgttcaaggccactgtgcagatggagggcgggaagctggtggtgaatttccccaactatcaccagacctcagagatcgtgggtgacaagctggtggaggtctccaccatcggaggcgtgacctatgagcgcgtgagcaagagactggcctaagcagccaggcccggcccagggag

SEQ ID NO: 3029 - protein, 127 aa, Homo sapiens
  ref <308>: DATABASE ACCESSION NUMBER: SWISS-Prot / P51161
  ref <309>: DATABASE ENTRY DATE: 2002-06-15
AFTGKFEMESEKNYDEFMKLLGISSDVIEKARNFKIVTEVQQDGQDFTWSQHYSGGHTMTNKFTVGKESNIQTMGGKTFKATVQMEGGKLVVNFPNYHQTSEIVGDKLVEVSTIGGVTYERVSKRLA

SEQ ID NO: 3030 - DNA, 1124 bp, Rattus norvegicus
  ref <308>: DATABASE ACCESSION NUMBER: EMBL / L23148
  ref <309>: DATABASE ENTRY DATE: 2000-03-04
cggcacgagctaacaccctgttctcagactcctccgcgcctctccgcctgtcctcaggatcatgaaggtcgccagtagcagtgccgcggccaccgcaggccccagctgttcgctgaaggcaggcaggacggcgggcgaagtggtgcttggtctgtcggagcaaagcgttgccatctcgcgctgcgctgggacgcgcctgcccgccttgctggacgaacagcaggtgaacgttctgctctacgacatgaacggctgctactcacgcctcaaggagctggtgcctaccctgcctcagaaccgcaaagtgagcaaggtggagatactgcagcatgttatcgactacatcagggacctgcagctggagctgaactctgagtctgaagtcgcgaccgccggaggccgggggctgcccgtccgggccccgctcagcaccctgaacggcgagatcagtgccttggcggccgaggtgaggtccgagtcagagtattacattattctcctgtgggaaactaaggccacgggaggggggtgtcccccttacttctcaggagcatagttatttaggggcgaccaataggaaaaagctcgcgctttcatcgtgcctcctggagtagagaagtgggaatgcctctcccctccagttctttccagtgggtctcatgccttatctcgctctggtgttcacaggcggcatgtgttccagccgacgaccgcatcttgtgtcgctgaggcggcgcactgaggaaccagatggactccagcccttcaggaggcaagaggaaaaaaagtgctctcggttccccagagcaacccggggaaagacactaccgcggccacgggactcttgacggatctgtccagggggtagagggttgatcaacggagtctcgccctctccacctttcagcctccagagactttgaggagggggttattcaaccccgtgtgtttctgtttttttgaaaaagcagacattttttttaaatggtcacatttcgtgcttctcagatttctgagaaaatgttttgtattgtatattacaatgatcactggctgagaatattgttttacaatagttcttatgggggtgggttttttgttgttattaaacaaacactttagat

SEQ ID NO: 3031 - protein, 164 aa, Rattus norvegicus
  ref <308>: DATABASE ACCESSION NUMBER: SWISS-Prot / P41135
  ref <309>: DATABASE ENTRY DATE: 2001-10-16
MKVASSSAAATAGPSCSLKAGRTAGEVVLGLSEQSVAISRCAGTRLPALLDEQQVNVLLYDMNGCYSRLKELVPTLPQNRKVSKVEILQHVIDYIRDLQLELNSESEVATAGGRGLPVRAPLSTLNGEISALAAEVRSESEYYIILLWETKATGGGCPPYFSGA

SEQ ID NO: 3032 - DNA, 497 bp, Homo sapiens
  ref <308>: DATABASE ACCESSION NUMBER: EMBL / AA689598
  ref <309>: DATABASE ENTRY DATE: 2000-03-03
ttttttttttttagacattttaaatatctttatattaaataataataggaaattaacataatttcaacatttcttaaagtctcacctagttcaacagaatgaaattgtaacaaactgtttcaacagacaacagtatataagcaatggttaggtctcagcatttagaaacaactttttaaatgttttgtttcttggtcatttcattttggcatggaaaagagaggaggcaggcctctgcgtccctgttttccctaaggactgtgcacacttaccgtggttcacacctgcactcggggtgtaaggtgggctgatcttcaccaaagtgaaacagtattatggggcagcactgtaggtcagctgcgcaagtctgtgaaagctggcccagaagaaccaacccacgaccagaaccatcaggctgtgatcacacacgtgccacaaaacatcatccctcaaaacggtgacaaaacacaagacaggccatttgtgaatgtagttgt

SEQ ID NO: 3033 - DNA, 1124 bp, Rattus norvegicus; identical to SEQ ID NO: 3030
  ref <308>: DATABASE ACCESSION NUMBER: EMBL / L23148
  ref <309>: DATABASE ENTRY DATE: 2000-03-04

SEQ ID NO: 3034 - protein, 164 aa, Rattus norvegicus; identical to SEQ ID NO: 3031
  ref <308>: DATABASE ACCESSION NUMBER: SWISS-Prot / P41135
  ref <309>: DATABASE ENTRY DATE: 2001-10-16

SEQ ID NO: 3035 - DNA, 497 bp, Homo sapiens; identical to SEQ ID NO: 3032
  ref <308>: DATABASE ACCESSION NUMBER: EMBL / AA689598
  ref <309>: DATABASE ENTRY DATE: 2000-03-03

SEQ ID NO: 3036 - DNA, 2897 bp, Rattus norvegicus
  ref <308>: DATABASE ACCESSION NUMBER: EMBL / L23219
  ref <309>: DATABASE ENTRY DATE: 2000-03-04
aggcaccaaaccctagtttgccggggcctccggagcagctggctgagggttcctgtcgctgcctgggccgggtgtgacctcccgtccacacagacccagacaccagcctggcaccctgcggtgccaaattaatgcacagtatttctcttccagggtgtgaagccttcctattggaacctcggtgctgggacagtgggactcagagcagctctctagacgccaggtccacgctcatggctgatgatgtcaggtactaacaacgtcgcccaggcccggaagctggtggagcagttgcgcatcgaagctgggatcgaacgcatcaaggtctccaaggcctcgtcagaactgatgagctactgtgagcaacatgcccggaatgaccccttgctggttggtgtaccagcctctgaaaatccattcaaagacaaaaagccttgcataattctctagttctctctctcttcctccctccttcctctccctctctttctccccaccccaaaggtattgtccagtttttcctgtaagaaaaaaatatttgaatcccttctactttgaattttaaaggaacagaaaccattgtgaatgcctggagcctcctgacctagctggagttcgtcctggcctaactttagcctcatccaccccctcccgtcgagaaccactgatgtgacagtttttaagctccccttagttggcctggggaaagggttctgttggccaacggcgagcctagcaagtttgcggaccatagctgcagtcctcgggtcccacataaaacatgcaggtgcggtgtcagaaggctgagatggaaggatccccgaggcttggggactgcatcctagcagccagtaaactccagacagtgagaaacgatgcctccaaacacaaggcagaggaggatacccagccttgacctctggctccacacgcggcacacacaatgcaccctgtactacccagtgtcattctcgagtggccctgtcgtgtgcacggtgacagtgatgccctttctccagagagttggcccattctagaaacgggcatttgggtctccatacaaaggaagcacttgctggtatggccgagtgtgtaactttgtctccgaagcctgagatccatgtgttcattggtgactcctcgtttttctcccagttacacagatggttgtgagggcagaagtgcagatttaattatcttgaggtgattgagaaggaccgatggggttctccatcccacacgtgactgtgcctccagatcccccttcctgggtcaaactattttttaactaactagaacccaagtccctcaatgtgtggactgtggccattttctgcactccttcattgggagattcatctctgaccacacccccaacccctcactgagggattctagacggggctccacccctgaccacgccccagtcccccattgagggattctagaaggggttccacctctgaccatgcctcagccccctactggggattctagaaggggctccaccctgaccacgcccccagacccttactggtaaattctagatggcactccacttctgaggcgggcatcttctctattgtgtgagcagagccctagagtccaggctggcctggactggaactggagatcttcctgcctctggctccggagtacctacctgataggcctgtgttgcatgcctggcatcggattggacggaagatgacagaccgtctgtctatgacagtgacagtggcaggtctagggaggacacagcttaggtgtgccagtgtggtctgcagccatacacaaaggcatctcaagcatttgagactccagttacctctttctcctgccggatcagtgtgggagcagaaatgaagccagtccagttactccctgcagctctggtggaaatctgcttcccaaaccctgtgccaggctcatccctggacagttgctcaaactgcccatgggcaaagtgaatggagctggcagatctggctcctagcctattaggcacaacctaccacctagataaggtggcagccccccccctccccagtccatttgatggaatcagggaaagaagtttgggatgtgactaagggggaggggcactgcaggtgctaagagaggaccctgtttccccctccatgggccacagagagcacagaccaagggtcaggcccctcctgtgcactgactcccaattactggtcagagagggccaggactttggtgagcctgactctcagaacctgtggtggaatcagaaaagccagtgtccctccagaactgcagccacctttcattaggctaggaaccaggtcccagcaggtgtgtctccagctgcactggcaggggacagtgaggagagaggaaaggacatacattctggggaccgggactgcagaacacccagccagtatggtagaaacctgggttccaccccaagctcgcaaaaaaacaggcatgggcactggggatgtagaggcaggaagatcagaacttcagggtctttctcagccacaggatgggctcaaggttagcctgggctgcatgagaccatgtctcaaagacagaaatctcagtgtgctctctcatgttcctaacacgcctgattgtttccctctggaggctgctgtgccagcctggccagcctgcgtttggtcgcagccttgtttctcagctctgggacaaaaactcaaatctgcatctctgcccacacctccagttccccctccccgggtgactcacaggccaaggacaaagtggcctcttgctcccagggagggtaggatgtgctggtgtagcctgtgtacgtcctaagcactggagccctgcctcggcctagagacgcttagggaaaccagaacacatcagagcaattaggagccaagaatggtggc

SEQ ID NO: 3037 - protein, 69 aa, Rattus norvegicus
  ref <308>: DATABASE ACCESSION NUMBER: SWISS-Prot / P43425
  ref <309>: DATABASE ENTRY DATE: 2002-06-15
MMSGTNNVAQARKLVEQLRIEAGIERIKVSKASSELMSYCEQHARNDPLLVGVPASENPFKDKKPCIIL

SEQ ID NO: 3038 - DNA, 992 bp, Homo sapiens
  ref <308>: DATABASE ACCESSION NUMBER: EMBL / BC014466
  ref <309>: DATABASE ENTRY DATE: 2002-09-02
gcgggccggggcggagggttcggctgcgcggcggggctgaggcggccgcggggcccgagcgcagggagtggagcttggtttcgggatctcggtgctgcagacggcgagacctcctgcacagggtgtacagcaagctgtgattcctgggaaaactaaaaaagctctctggacaacggggcccagagctgatggcagacaatgtcagccactaacaacatagcccaggcccggaagctggtggaacagctacgcatagaagccgggattgagcgcatcaaggtctccaaagcggcgtctgacctcatgagctactgtgagcaacatgcccggaacgaccccctgctggtcggagtccctgcctcggagaacccctttaaggacaagaaaccttgtattattttataactgtgttctcatatgttctctctctctctctctctttctctctctctctctgtctctgtctctgtctcaggcagggcatcattcagtaattagctcaaacaaaacatctcaagtccccaaaacctttaattccaaaagaaatcccccctctccccgccaaaaaaggcgttcccaccgcccggatggggtagaatggaccttgtaggtggagatgaattttcaggtccgaccccatggccctctcagtttgggccaaaagggatggaggctttacggccacttcccgttcggaataactgaaatcccccagcgatggggtaacaattttttaaaactctcgattgccgtttcaattgtggaccggcgccgagggggaaagggaggtgacttcgcccggtggcaatagttccgggagaattggccattggtaaaaagacttcatagggtcactggaatgctttgtgttgtttttaagtagaggtaaaattgagatggggggcgggaggtgacatcatgaagttttttggaaatatctctttatttaaaaaattgttactccatacggctaaaaaaaaaaaaaaaaaaaa

SEQ ID NO: 3039 - protein, 68 aa, Homo sapiens
  ref <308>: DATABASE ACCESSION NUMBER: SWISS-Prot / O60262
  ref <309>: DATABASE ENTRY DATE: 2002-06-15
MSATNNIAQARKLVEQLRIEAGIERIKVSKAASDLMSYCEQHARNDPLLVGVPASENPFKDKKPCIIL

SEQ ID NO: 3040 - DNA, 2221 bp, Rattus norvegicus
  ref <308>: DATABASE ACCESSION NUMBER: EMBL / L24051
  ref <309>: DATABASE ENTRY DATE: 2000-03-04
ggagattttccacaagaaaaggttgttttcatgtttgggatccaggaaagcatccaacggagtggaagcagtatgaaggaagagccgctgggcagcggcatgaacgcggtgcggacgtggatgcagggcgccggggtgctggacgccaacacagcggcgcagagcggggtgggtctggcccgggctcactttgagaagcagccgccttctaacctgcggaaatccaacttcttccacttcgtcctggccctctacgacagacagggccagcccgtggagattgagaggacggcctttgtggggttcgtggagaaggaaaaagaagccaacagcgaaaagaccaataatgggatccactaccggctccagctcctctacagcaatgggataaggaccgaacaggatttctacgtgcgcctcatcgactccatgacaaaacaagccatagtgtatgaaggccaagacaagaacccggaaatgtgccgagtactgctcacacacgagatcatgtgcagccgctgttgtgacaagaaaagctgtggcaaccgaaatgagactccctcagatccagtgataattgacagattcttcctgaagtttttccttaagtgtaaccaaaattgcctaaagaatgcggggaacccacgtgacatgcggagattccaggtcgtggtgtctaccacagtcaacgtggatggccatgtcctggcagtctctgataacatgtttgtccacaataactccaaacacgggcggagggctaggaggcttgacccctcggaagcagctactccctgtatcaaagccatcagcccgagtgaaggatggacgacgggaggcgcgactgtgatcatcataggggacaatttctttgatgggttacaggtcatattcggtaccatgctggtctggagtgagttgataactcctcatgccatccgtgttcagacacctcctcggcacatccctggtgttgtggaagtcacattgtcctacaagtccaagcagttctgcaaagggacaccaggcagattcatctatacagcactcaatgaacccaccatcgactatggtttccagaggttacagaaggtcattccccggcatcctggtgacccagagcgtttgccaaaggaagtgatccttaaaagggctgcagatctggttgaagccctgtatgggatgccccacaacaaccaggagattatcctgaagagagctgccgacattgctgaggctctgtacagtgtccctcgaaaccacaaccagctcccggccctcgctaacacttcggtccacgcagggatgatgggcgtgaactccttcagtggacaactggctgtgaatgtctctgaggcatcacaagccaccaatcaaggtttcacccgcaactcaagcagtgtgtcaccacatggatatgtgcctagcaccaccccacagcagaccaactataactctgtcaccacaagcatgaacggctacggctctgccgccatgtccaatttgggcggctccccaaccttcctcaatggctcagctgccaactcaccctacgccattgtgccatccagccccaccatggcctcatctacaagcctcccctccaactgcagcagctcctcgggcatcttctccttctcaccagccaacatggtctctgctgtgaaacagaagagtgctttcgcaccagttgtcagaccccagacctccccgcctcccacctgcaccagcaccaacgggaacagcctgcaagcgatttctggcatgattgtccctcccatgtgaaagaattgccttgaagaattttattaatgaagaggttggatcctgctacgaaagtaatctgacatgagtcccagagtggaacttttaactcaggcctttttaagaggaaatcacacaataactgcagatttttaaacaaagtcaccgaccttgcaaatactgagattggaaaggggacctgccagagcggggtgttggatagagtcggactccccgagtgtctgggggatatatttattctgtattgataaaaaaaagaacaagcccaccttttctttttttctttctcttttctttctttaagcttaactctgcaaccatttgtcttttgtaaaccattaagctacacacaagggccactctaaataagactccatgttttaatttatgatgtttttaaagctatgtaaggggagaatgaagtggtgatatttac

SEQ ID NO: 3041 - protein, 584 aa, Rattus norvegicus
  ref <308>: DATABASE ACCESSION NUMBER: SWISS-Prot / Q63398
  ref <309>: DATABASE ENTRY DATE: 2002-06-15
MFGIQESIQRSGSSMKEEPLGSGMNAVRTWMQGAGVLDANTAAQSGVGLARAHFEKQPPSNLRKSNFFHFVLALYDRQGQPVEIERTAFVGFVEKEKEANSEKTNNGIHYRLQLLYSNGIRTEQDFYVRLIDSMTKQAIVYEGQDKNPEMCRVLLTHEIMCSRCCDKKSCGNRNETPSDPVIIDRFFLKFFLKCNQNCLKNAGNPRDMRRFQVVVSTTVNVDGHVLAVSDNMFVHNNSKHGRRARRLDPSEAATPCIKAISPSEGWTTGGATVIIIGDNFFDGLQVIFGTMLVWSELITPHAIRVQTPPRHIPGVVEVTLSYKSKQFCKGTPGRFIYTALNEPTIDYGFQRLQKVIPRHPGDPERLPKEVILKRAADLVEALYGMPHNNQEIILKRAADIAEALYSVPRNHNQLPALANTSVHAGMMGVNSFSGQLAVNVSEASQATNQGFTRNSSSVSPHGYVPSTTPQQTNYNSVTTSMNGYGSAAMSNLGGSPTFLNGSAANSPYAIVPSSPTMASSTSLPSNCSSSSGIFSFSPANMVSAVKQKSAFAPVVRPQTSPPPTCTSTNGNSLQAISGMIVPPM

SEQ ID NO: 3042 - DNA, 874 bp, Homo sapiens
  ref <308>: DATABASE ACCESSION NUMBER: EMBL / BG535341
  ref <309>: DATABASE ENTRY DATE: 2001-04-04
atgggcggagggctcggaggcttgacccctcggaagctactccctgtatcaaagccatcagcccgagtgaaggatggacgacgggaggtgcgactgtgatcatcataggggggaattagtccgagtggagagagcgagctgagtggttgtgtggtcgcgtctcggaaaccggtagcgcttgcagcatggctgaccaactgactgaagagcagattgcagaattcaaagaagctttttcactatttgacaaagatggtgatggaactataacaacaaaggaattgggaactgtaatgagatctcttgggcagaatcccacagaagcagagttacaggacatgattaatgaagtagatgctgatggtaatggcacaattgacttccctgaatttctgacaatgatggcaagaaaaatgaaagacacagacagtgaagaagaaattagagaagcattccgtgtgtttgataaggatggcaatggctatattagtgctgcagaacttcgccatgtgatgacaaaccttggagagaaagttaacagatgacgaagttgatgaaatgatcagggaagcagatattgatggttgatggtcaagtaaactatgaagagttgtacaaatgatgacagcaagtgaagacctgtcagaatgtgttaacatccctgtacaagctggtcactttgccttttctatggtgggtaacttattcgttaacaagggttgtcttacctaacggtcaaaaaactctgcctgtatagtaattaggactctcattcctccatggtgtctttcccttatctgacgggccatgcccctaaagcgtatttagcaacactgggcacgttagctggctggcagtggctacctcggagaca

SEQ ID NO: 3043 - protein, 148 aa, Homo sapiens
  ref <308>: DATABASE ACCESSION NUMBER: SWISS-Prot / P02593
  ref <309>: DATABASE ENTRY DATE: 2002-06-15
ADQLTEEQIAEFKEAFSLFDKDGDGTITTKELGTVMRSLGQNPTEAELQDMINEVDADGNGTIDFPEFLTMMARKMKDTDSEEEIREAFRVFDKDGNGYISAAELRHVMTNLGEKLTDEEVDEMIREADIDGDGQVNYEEFVQMMTAK

SEQ ID NO: 3044 - DNA, 2015 bp, Rattus norvegicus
  ref <308>: DATABASE ACCESSION NUMBER: EMBL / L24207
  ref <309>: DATABASE ENTRY DATE: 2000-03-04
gcagagcatcagaggcccagctagagggacaacacagaggagtaatttgctgacagacctgcagggatggacctgctttcagctctcacactggaaacctgggtcctcctggcagtcgtcctggtgctcctctacggatttgggacccgcacacatggacttttcaagaaacaggggattcctgggcccaaacctctgcctttttttggcactgtgctgaattactatatgggtttatggaaattcgatgtggagtgccataaaaagtatggaaaaatatgggggttgtttgatggtcaaatgcctctgtttgccatcacggacacagaaatgatcaagaatgtgctagtgaaggaatgcttttctgtcttcacaaaccggcgggattttggcccagtggggattatggggaaagccatctctgtatctaaggatgaggagtggaagagatatagagccttactgtcacccacgttcaccagtggaagactcaaggagatgttccctgtcatcgaacagtatggagacattttggtaaaatacttgaggcaagagaaaggcaaacctgtccctgtgaaagaagtgtttggtgcctacagcatggatgtgatcaccagcacatcatttggagtgaatgttgattccctcaacaacccgaaggatccttttgtggagaaagccaagaagctcttaagaattgatttttttgatccgttgttcttgtcagtagtactctttccattcctcacgccagtatatgagatgttaaacatctgcatgttcccaaaagattcaatagaatttttcaaaaaatttgtgtacagaatgaaggaaacccgcctggattctgtgcagaagcatcgagtggattttcttcagctgatgatgaatgctcataatgattctaaagacaaagaatctcatacagccctatccgatatggagatcacagcccagtcaatcatttttatttttgctggatatgaacccaccagcagcacactttcctttgtcctgcattccctggccactcacccagatacacagaagaaactgcaggaggagatcgacagggctctgcccaataaggcacctcccacctatgatactgtgatggaaatggaatacctggatatggtgttgaatgaaaccctcagattgtatccaattggtaatagacttgagagagtctgtaaaaaagatgttgaaatcaatggtgtgtttatgcccaaagggtcagtggtcatgattccatcttatgctcttcaccgtgatccacagcactggccagagcctgaggaatttcgcccagaaaggttcagcaaggagaacaagggcagcattgatccttatgtatatctgccctttggaaatggacccaggaactgcattggcatgaggtttgctctcatgaatatgaaactcgctctcactaaagttctgcaaaacttctccttccagccttgtaaggaaacacagatacctctgaaattaagcagacaaggacttcttcaaccaacaaaacccattattctaaaggttgtgccacgggatgaaatcataactggatcatgattttccctcaaggagttctgctgaattcgtcagaaatgtggtgtctaagaacaccagaccctttaatttatgtcatgaataaaattcagatgaaattagggcttaatcgactttgttttgattcggtacatctttgatctttctcagtgtctacaatgtacccatctaatataaaggaaatgacaagtcagtgacagaacaggacttaacctttggtgattctcatgggactacctccatttgtttctggttgtctctgttaatttcttttgatagtaaccttgtctctgtaatttgatcaagaattttcatgaaaatgtgaactattgtgacacctttaattgtagatttggtatcagatgttttagatgcattattctacactaaatgttacatggaaaaaatgtgaataaacacttctttaaaaatccccaggggca

SEQ ID NO: 3045 - protein, 504 aa, Rattus norvegicus
  ref <308>: DATABASE ACCESSION NUMBER: SWISS-Prot / P04800
  ref <309>: DATABASE ENTRY DATE: 2002-06-15
MDLLSALTLETWVLLAVVLVLLYGFGTRTHGLFKKQGIPGPKPLPFFGTVLNYYMGLWKFDVECHKKYGKIWGLFDGQMPLFAITDTEMIKNVLVKECFSVFTNRRDFGPVGIMGKAVSVAKDEEWKRYRALLSPTFTSGRLKEMFPIIEQYGDILVKYLKQEAETGKPVTMKKVFGAYSMDVITSTSFGVNVDSLNNPKDPFVEKTKKLLRFDFFDPLFLSVVLFPFLTPIYEMLNICMFPKDSIEFFKKFVYRMKETRLDSVQKHRVDFLQLMMNAHNDSKDKESHTALSDMEITAQSIIFIFAGYEPTSSTLSFVLHSLATHPDTQKKLQEEIDRALPNKAPPTYDTVMEMEYLDMVLNETLRLYPIGNRLERVCKKDVEINGVFMPKGSVVMIPSYALHRDPQHWPEPEEFRPERFSKENKGSIDPYVYLPFGNGPRNCIGMRFALMNMKLALTKVLQNFSFQPCKETQIPLKLSRQGLLQPTKPIILKVVPRDEIITGS

SEQ ID NO: 3046 - DNA, 1707 bp, Homo sapiens
  ref <308>: DATABASE ACCESSION NUMBER: EMBL / J04813
  ref <309>: DATABASE ENTRY DATE: 2002-06-08
gggaagctccaggcaaacagcccagcaaacagcagcactcagctaaaaggaagactcacagaacacagttgaagaaggaaagtggcgatggacctcatcccaaatttggcggtggaaacctggcttctcctggctgtcagcctggtgctcctctatctatatgggacccgtacacatggactttttaagagactgggaattccagggcccacacctctgcctttgttgggaaatgttttgtcctatcgtcagggtctctggaaatttgacacagagtgctataaaaagtatggaaaaatgtggggaacgtatgaaggtcaactccctgtgctggccatcacagatcccgacgtgatcagaacagtgctagtgaaagaatgttattctgtcttcacaaatcgaaggtctttaggcccagtgggatttatgaaaagtgccatctctttagctgaggatgaagaatggaagagaatacggtcattgctgtctccaaccttcaccagcggaaaactcaaggagatgttccccatcattgcccagtatggagatgtattggtgagaaacttgaggcgggaagcagagaaaggcaagcctgtcaccttgaaagacatctttggggcctacagcatggatgtgattactggcacatcatttggagtgaacatcgactctctcaacaatccacaagacccctttgtggagagcactaagaagttcctaaaatttggtttcttagatccattatttctctcaataatactctttccattccttaccccagtttttgaagcattaaatgtctctctgtttccaaaagataccataaattttttaagtaaatctgtaaacagaatgaagaaaagtcgcctcaacgacaaacaaaagcaccgactagatttccttcagctgatgattgactcccagaattcgaaagaaactgagtcccacaaagctctgtctgatctggagctcgcagcccagtcaataatcttcatttttgctggctatgaaaccaccagcagtgttctttccttcactttatatgaactggccactcaccctgatgtccagcagaaactgcaaaaggagattgatgcagttttgcccaataaggcaccacctacctatgatgccgtggtacagatggagtaccttgacatggtggtgaatgaaacactcagattattcccagttgctattagacttgagaggacttgcaagaaagatgttgaaatcaatggggtattcattcccaaagggtcaatggtggtgattccaacttatgctcttcaccatgacccaaagtactggacagagcctgaggagttccgccctgaaaggttcagtaagaagaaggacagcatagatccttacatatacacaccctttggaactggacccagaaactgcattggcatgaggtttgctctcatgaacatgaaacttgctctaatcagagtccttcagaacttctccttcaaaccttgtaaagaaacacagatccccttgaaattagacacgcaaggacttcttcaaccagaaaaacccattgttctaaaggtggattcaagagatggaaccctaagtggagaatgagttattctaaggacttctactttggtcttcaagaaagctgtgccccagaacaccagagatttcaacttagtcaataaaaccttgaaataaagatgggcttaatctaatgta

SEQ ID NO: 3047 - protein, 502 aa, Homo sapiens
  ref <308>: DATABASE ACCESSION NUMBER: SWISS-Prot / P20815
  ref <309>: DATABASE ENTRY DATE: 2002-06-15
MDLIPNLAVETWLLLAVSLVLLYLYGTRTHGLFKRLGIPGPTPLPLLGNVLSYRQGLWKFDTECYKKYGKMWGTYEGQLPVLAITDPDVIRTVLVKECYSVFTNRRSLGPVGFMKSAISLAEDEEWKRIRSLLSPTFTSGKLKEMFPIIAQYGDVLVRNLRREAEKGKPVTLKDIFGAYSMDVITGTSFGVNIDSLNNPQDPFVESTKKFLKFGFLDPLFLSIILFPFLTPVFEALNVSLFPKDTINFLSKSVNRMKKSRLNDKQKHRLDFLQLMIDSQNSKETESHKALSDLELAAQSIIFIFAGYETTSSVLSFTLYELATHPDVQQKLQKEIDAVLPNKAPPTYDAVVQMEYLDMVVNETLRLFPVAIRLERTCKKDVEINGVFIPKGSMVVIPTYALHHDPKYWTEPEEFRPERFSKKKDSIDPYIYTPFGTGPRNCIGMRFALMNMKLALIRVLQNFSFKPCKETQIPLKLDTQGLLQPEKPIVLKVDSRDGTLSGE

SEQ ID NO: 3048 - DNA, 2015 bp, Rattus norvegicus; identical to SEQ ID NO: 3044
  ref <308>: DATABASE ACCESSION NUMBER: EMBL / L24207
  ref <309>: DATABASE ENTRY DATE: 2000-03-04

SEQ ID NO: 3049 - protein, 504 aa, Rattus norvegicus; identical to SEQ ID NO: 3045
  ref <308>: DATABASE ACCESSION NUMBER: SWISS-Prot / P04800
  ref <309>: DATABASE ENTRY DATE: 2002-06-15

SEQ ID NO: 3050 - DNA, 1707 bp, Homo sapiens; identical to SEQ ID NO: 3046
  ref <308>: DATABASE ACCESSION NUMBER: EMBL / J04813
  ref <309>: DATABASE ENTRY DATE: 2002-06-08

SEQ ID NO: 3051 - protein, 502 aa, Homo sapiens; identical to SEQ ID NO: 3047
  ref <308>: DATABASE ACCESSION NUMBER: SWISS-Prot / P20815
  ref <309>: DATABASE ENTRY DATE: 2002-06-15

SEQ ID NO: 3052 - DNA, 1101 bp, Rattus norvegicus
  ref <308>: DATABASE ACCESSION NUMBER: EMBL / L24776
  ref <309>: DATABASE ENTRY DATE: 2000-03-04
agcagctgggtaggcaccatggccgggagcaccaccatcgaggcggtaaagcgcaagatccaggttctgcagcagcaggctgatgatgcggaggagagggctgagcgcctccagcgggaagtggagggagaaaggcgggcccgggagcaggctgaagctgaggtggcttccttgaaccgtaggatccagctggttgaagaggagctggaccgcgcccaggagcgccttgccactgctttgcagaagctggaggaagcggagaaggctgctgatgagagtgagagaggtatgaaggtgattgaaaaccgggctctaaaagatgaagaaaagatggagctccaggaaatccagctgaaggaagcaaagcacattgcagaagaggcagacaggaagtatgaagaggtggctcgtaagttggtgatcattgaaggagacttggaacgcacggaggaacgcgccgagctggcagagtctaagtgttctgagctggaggaggagctgaagaatgtcaccaacaacctcaaatctcttgaggctcaggcggagaagtactctcaaaaagaagacaagtatgaagaagaaataaagattcttactgataaactcaaggaggcggagacccgggctgagtttgctgaaagatcggtagccaagctggaaaagaccattgatgacttggaagatgagctctatgcccagaaactgaagtacaaggccattagcgacgagctggaccacgccctcaatgacatgacctctatataaactgacaccgtttctgctctgtcctggatctacccccctttcaggggtaattgatatgatataaggggcctaggaatacaattgatgttagggcgtttattagaataatgttggtgtactcggctatgaagaatagggcgaatggtcctgcggcgtattcgacgttaaagcctgagactaattctgattctccttctgttaagtcgaagggagctcgatttgtttctgctagggttgaaatgtatcatattatggctattggtcaggcggggattaatagtcagatatgttcttgtgcacttataagtatttctagggagaaggagccgcttatta

SEQ ID NO: 3053 - protein, 350 aa, Rattus norvegicus; identical to SEQ ID NO: 1626
  ref <308>: DATABASE ACCESSION NUMBER: SWISS-Prot / OKRTCB
  ref <309>: DATABASE ENTRY DATE: 2002-06-15

SEQ ID NO: 3054 - DNA, 2945 bp, Homo sapiens; identical to SEQ ID NO: 1627
  ref <308>: DATABASE ACCESSION NUMBER: EMBL / M34181
  ref <309>: DATABASE ENTRY DATE: 2000-03-04

SEQ ID NO: 3055 - protein, 350 aa, Homo sapiens; identical to SEQ ID NO: 1628
  ref <308>: DATABASE ACCESSION NUMBER: SWISS-Prot / P22694
  ref <309>: DATABASE ENTRY DATE: 1995-11-01

SEQ ID NO: 3056 - DNA, 1101 bp, Rattus norvegicus; identical to SEQ ID NO: 3052
  ref <308>: DATABASE ACCESSION NUMBER: EMBL / L24776
  ref <309>: DATABASE ENTRY DATE: 2000-03-04

SEQ ID NO: 3057 - protein, 350 aa, Rattus norvegicus; identical to SEQ ID NO: 1626
  ref <308>: DATABASE ACCESSION NUMBER: SWISS-Prot / OKRTCB
  ref <309>: DATABASE ENTRY DATE: 2002-06-15

SEQ ID NO: 3058 - DNA, 2945 bp, Homo sapiens; identical to SEQ ID NO: 1627
  ref <308>: DATABASE ACCESSION NUMBER: EMBL / M34181
  ref <309>: DATABASE ENTRY DATE: 2000-03-04

SEQ ID NO: 3059 - protein, 350 aa, Homo sapiens; identical to SEQ ID NO: 1628
  ref <308>: DATABASE ACCESSION NUMBER: SWISS-Prot / P22694
  ref <309>: DATABASE ENTRY DATE: 1995-11-01

SEQ ID NO: 3060 - DNA, 2987 bp, Rattus norvegicus
  ref <308>: DATABASE ACCESSION NUMBER: EMBL / L25331
  ref <309>: DATABASE ENTRY DATE: 2000-03-04
gttgcccaaagaaataaatgcattgggaactcagtgtgcaggtccatgccaccaagagaacattacttctggtgatcgtcttctcccaagctccacagtttagctttgtttcagtgccggcggatcgtctccaagactcgactatgcggtccctgctgctcctggcctcgctggcctggcttcttctggcccaggcgaaggacgacgccaagctggaggacaaccttttggtcctcaccgtggccacaaaagagacagagggcttccgccgattcaagcgctcagcccagttcttcaactacaagatccagtcactgggcctgggggaggactggagcgcggccgggggaccatcggcagcaggtggaggacagaaggttcggctgctgaagaaggcactgaaaaagtatgcagacaaggaagacttggttattctcttcgttgacagctatgacgtggtgtttgcctcgggaccccgggaactcttaaagaagttccagcaggccaagagccgggtggtcttctcagcagaggagcttatctaccctgaccggaggctggaggccaagtatcccacagtccccgatggcaaacgattcttgggctctggaggcttcattggttatgctcccagcctcagcaaactggtggccgagtgggagggccaggacaatgacagcgaccagctcttttataccaagatcttcttggacccggagaagagggagcaaatcaatatcagcctggaccatcgctgccgaatcttccagaacctggatggagccttggatgaagttgtactcaagtttgaaatgggccacgtgagagcccggaatctggcctatgacaccctcccagtggtcatccacggcaacgggcccaccaagctgcaggtgaactacctgggcaactacattcctcgattctggaccttcgaaacgggctgcaccgtgtgcgacgagggcctgcgaagcctcaagggcattggggatgaagctctccctaccgtcctggtcggtgtgttcattgagcagcccacaccattcctatccttgttctttcggcggctgctgcacctacgataccctcagaaacagatgcggctcttcattcacaaccaagaacagcaccacaagcttcaggtagagcagttcctggcagagcacggcggtgagtaccagtctgtgaagctagtgggtcccgaggtacgcatggccaacgcagacgccaggaacatgggcgccgacctgtgccgccaggatcaaacatgcacctactacttcagtgtggatgctgacgtggccctgaccgagccgaacagcctacggctcctgattgagcaaaacaagaatgtcattgctccactcatgacccgtcacgggaggctctggtccaacttctggggggcactgagtgcggatgggtactacgcccgctcggaggactacgtggacatcgtgcagggccgtcgtgttggcgtctggaatgtgccttacatctcaaacatctacctgatcaagggcagtgccctgcgggccgagctgcggcacgtagacctgttccactacagcaagctggatcctgacatgagtttctgcgccaatgtccgacagcaggaggtgttcatgttcctgaccaaccggcatacctttggccacctgctgtcgctggataattaccagaccacccacctacataatgatctctgggaggtgttcagcaaccctcaggattggaaagagaagtacatccacgagaattacaccaaggccctggcagggaagctggtggagacgccttgtccggatgtctactggttccccatcttcacggaggtggcctgtgatgagctggtggaggaaatggaacactacggccaatggtctctgggtgacaataaggacaaccgtatccagggtggctatgaaaacgtgcccactattgacatccacatgaaccagatcaccttcgagcgggagtggcacaagttcctggtggagtacatcgcccccctgacagagaagctgtaccccggctactacaccaaggcccagtttgatctagccttcgtcgtccgctataagcctgatgagcagccttccttgatgcctcaccatgacgcctctactttcaccatcaacatagccctgaacagggttggggaagattatgagggtggaggttgccgatttctacgctacaactgctccgtgagagccccaaggaagggctgggccctcatgcaccccgggcggctcacacactaccacgaggggcttcccactaccaagggtacccgctacattgccgtgtccttcgtcgatccctaactgcttgcccagtgcctgcttccattcgacctatctcttcattgacaaccactgcctagcagcctctggggccaaggaacccaatccgacctctgattcctgaattcctgttgctcttgaagctgccagttggaaggattgggtgcaggccagaaatggggcaccccctccaagactggggctgcccgtggtgctcccaccagtctccggagatggtagcaatgtttatcttcctggagttcctaacctcccttcttctctgactttccctggggccagacttctgctggagagttcctggagagtcagaagctttgcctagaggacttctagaagagctagcccccgggatcctgtttcaagattcagtgccaccaagatctgggtcaaccaacttaccccaacttcacccctgcctggactgttgatacgctctcttccaggtttttatcaccggagcaaatagttgtctctattgagactataactcgaaatcctcccggaggggcaggaaagacatctgtgacaatgcttggctcgctgctgaccctgcttgagggaggggcacatgttcacactgtactaggtcaccctgccccgatgcctgtggggacagggacagagatgagagttctattaaattttgttcaaaccaaa

SEQ ID NO: 3061 - protein, 728 aa, Rattus norvegicus
  ref <308>: DATABASE ACCESSION NUMBER: SWISS-Prot / Q63321
  ref <309>: DATABASE ENTRY DATE: 2002-06-15
MRSLLLLASLAWLLLAQAKDDAKLEDNLLVLTVATKETEGFRRFKRSAQFFNYKIQSLGLGEDWSAAGGPSAAGGGQKVRLLKKALKKYADKEDLVILFVDSYDVVFASGPRELLKKFQQAKSRVVFSAEELIYPDRRLEAKYPTVPDGKRFLGSGGFIGYAPSLSKLVAEWEGQDNDSDQLFYTKIFLDPEKREQINISLDHRCRIFQNLDGALDEVVLKFEMGHVRARNLAYDTLPVVIHGNGPTKLQVNYLGNYIPRFWTFETGCTVCDEGLRSLKGIGDEALPTVLVGVFIEQPTPFLSLFFRRLLHLRYPQKQMRLFIHNQEQHHKLQVEQFLAEHGGEYQSVKLVGPEVRMANADARNMGADLCRQDQTCTYYFSVDADVALTEPNSLRLLIEQNKNVIAPLMTRHGRLWSNFWGALSADGYYARSEDYVDIVQGRRVGVWNVPYISNIYLIKGSALRAELRHVDLFHYSKLDPDMSFCANVRQQEVFMFLTNRHTFGHLLSLDNYQTTHLHNDLWEVFSNPQDWKEKYIHENYTKALAGKLVETPCPDVYWFPIFTEVACDELVEEMEHYGQWSLGDNKDNRIQGGYENVPTIDIHMNQITFEREWHKFLVEYIAPLTEKLYPGYYTKAQFDLAFVVRYKPDEQPSLMPHHDASTFTINIALNRVGEDYEGGGCRFLRYNCSVRAPRKGWALMHPGRLTHYHEGLPTTKGTRYIAVSFVDP

SEQ ID NO: 3062 - DNA, 3115 bp, Homo sapiens
  ref <308>: DATABASE ACCESSION NUMBER: Refseq / NM_000302
  ref <309>: DATABASE ENTRY DATE: 2000-10-31
ccaccatatcggtcccgtatttcacattgataaggtcctgtttcatttctcgtgacattgggtagaatgaggatcctgttttcaatgggtcgctttaccctgggactgacagggaggctctgaccatttagccaccaaatgtaggtgtagttctcactcttaggttcaccccgcggccgatcgtcccccatacctcggccatgcggcccctgctgctactggccctgctgggctggctgctgctggccgaagcgaagggcgacgccaagccggaggacaaccttttagtcctcacggtggccactaaggagaccgagggattccgtcgcttcaagcgctcagctcagttcttcaactacaagatccaggcgcttggcctaggggaggactggaatgtggagaaggggacgtcggcaggtggagggcagaaggtccggctgctgaagaaagctctggagaagcacgcagacaaggaggatctggtcattctcttcacagacagctatgacgtgctgtttgcatcggggccccgggagctcctgaagaagttccggcaggccaggagccaggtggtcttctctgctgaggagctcatctacccagaccgcaggctggagaccaagtatccggtggtgtccgatggcaagaggttcctgggctctggaggcttcatcggttatgcccccaacctcagcaaactggtggccgagtgggagggccaggacagcgacagcgatcagctgttttacaccaagatcttcttggacccggagaagagggagcagatcaatatcaccctggaccaccgctgccgtatcttccagaacctggatggagccttggatgaggtcgtgctcaagtttgaaatgggccatgtgagagcgaggaacctggcctatgacaccctcccggtcctgatccatggcaacgggccaaccaagctgcagttgaactacctgggcaactacatcccgcgcttctggaccttcgaaacaggctgcaccgtgtgtgacgaaggcttgcgcagcctcaagggcattggggatgaagctctgcccacggtcctggtcggcgtgttcatcgaacagcccacgccgtttgtgtccctgttcttccagcggctcctgcggctccactacccccagaaacacatgcgacttttcatccacaaccacgagcagcaccacaaggctcaggtggaagagttcctggcacagcatggcagcgagtaccagtctgtgaagctggtgggccctgaggtgcggatggcgaatgcagatgccaggaacatgggcgcagacctgtgccggcaggaccgcagctgcacctactacttcagcgtggatgctgacgtggccctgaccgagcccaacagcctgcggctgctgatccaacagaacaagaatgtcattgccccgctgatgacccggcatgggaggctgtggtcgaacttctggggggctctcagtgcagatggctactatgcccgttccgaggactacgtggacattgtgcaggggcggcgtgttggtgtctggaatgtgccctatatttcaaacatctacttgatcaagggcagtgccctgcggggtgagctgcagtcctcagatctcttccaccacagcaagctggaccccgacatggccttctgtgccaacatccggcagcaggatgtgttcatgttcctgaccaaccggcacacccttggccatctgctctccctagacagctaccgcaccacccacctgcacaacgacctctgggaggtgttcagcaaccccgaggactggaaggagaagtacatccaccagaactacaccaaagccctggcagggaagctggtggagacgccctgcccggatgtctattggttccccatcttcacggaggtggcctgtgatgagctggtggaggagatggagcactttggccagtggtctctgggcaacaacaaggacaaccgcatccagggtggctacgagaacgtgccgactattgacatccacatgaaccagatcggctttgagcgggagtggcacaaattcctgctggagtacattgcgcccatgacggagaagctctaccccggctactacaccagggcccagtttgacctggcctttgtcgtccgctacaagcctgatgagcagccctcactgatgccacaccatgatgcctccaccttcaccatcaacatcgccctgaaccgagtcggggtggattacgagggcgggggctgtcggttcctgcgctacaactgttccatccgagccccaaggaagggctggaccctcatgcaccctggacgactcacgcattaccatgaggggctccccaccaccaggggcacccgctacatcgcagtctccttcgtcgatccctaattggccaggcctgaccctcttggacctttcttctttgccgacaaccactgcccagcagcctctgggacctcggggtcccagggaacccagtccagcctcctggctgttgacttcccattgctcttggagccaccaatcaaagagattcaaagagattcctgcaggccagaggccggaacacacctttatggctggggctctccgtggtgttctggacccagcccctggagacaccattcacttttactgctttgtagtgactcgtgctctccaacctgtcttcctgaaaaaccaaggcccccttcccccacctcttccatggggtgagacttgagcagaacaggggcttccccaagttgcccagaaagactgtctgggtgagaagccatggccagagcttctcccaggcacaggtgttgcaccagggacttctgcttcaagttttggggtaaagacacctggatcagactccaagggctgccctgagtctgggacttctgcctccatggctggtcatgagagcaaaccgtagtcccctggagacagccactccagagaacctcttgggagacagaagaggcatctgtgcacagctcgatcttctacttgcctgtggggaggggagtgacaggtccacacaccacactgggtcaccctgtcctggatgcctctgaagagagggacagaccgtcagaaactggagagtttctattaaaggtcatttaaaccac

SEQ ID NO: 3063 - protein, 727 aa, Homo sapiens [sequence omitted]

SEQ ID NO: 3064 - DNA, 2643 bp, Rattus norvegicus
  ref <308>: DATABASE ACCESSION NUMBER: EMBL / L25387
  ref <309>: DATABASE ENTRY DATE: 2002-08-09
gtgaccaggactcttcgacgtccagcacctcctttccgaagtacctggagcacctctctggggatggcaaagcatggtgtcctgaccagcggcggggagtcccaaggcatgaatgctgctgtccgtgctgtggtgcgcatgggaatgtacacgggggcccaagtgtactttatatacgagggttaccaaggcatggtggatggaggctccaatattgtggaagccaagtgggagtgtgtctccagcattctacaagtgggtgggaccatcatcggcagtgcccgttgccaagccttccgcagccgtgaagggcgtctgaaagccacctgtaacctggtacgcttgggcataaccaacctgtgcgtgatcggtggggacggaagtctcacgggagccaacctcttccggaaggagtggagcggtcttctggaagagctggctaagaatggtgagatcgattcggacacagtgaagaagcacgcctacctcaacgtggtgggcatggtgggctccattgacaatgacttctgtggcacagacatgaccatcggtacagattcagctctgcaccgaattattgaagttgttgatgccatcatgaccactgcccagagccaccagagaaccttcgtcttggaggtgatggggagatactgtggttacttggccttggtgagcgccttggcttgcggtgccgactgggtgttccttccagagtctccgccagaggaaggttgggaggaagaaatgtgcctcaaactctccgagaaccgtgcccgaaagaaaaggctgaatatcatcattgtgtctgaaggagcaatcgacacccaaaataagccaatcacctctgagaaaatcaaggagcttgtggtgacaaatttgggctttgacacccgggtcaccattcttggacatgtccagagaggagggaccccttctgcatttgacaggattttggccagccgtatgggagtggaggctgtccttgccttgctggaagctacccctgagaccccagcctgtgtcgtgtcactgagaggaaatcaagctgtacgcctgcctctgatggagtgcgtgcaaatgacccaggatgtacagaaagcaatggatgaaaggagatttgatgaagccgtaaaactccgaggaaggagttttgagggcaacctgaacacctacaagcgtcttgccattaaggagcctgatgacaagatccccaagagcaattgcaatgtagccatcatcaatgtaggggcacctgccgcgggaatgaatgcagccgtccggtccgctgttcgggttgggattgcagagggccacaagatgttcgcaatctatgacggctttgatggcctcgccaatggccaaatcaaagaaatcggctggggagatgtcggaggttggacaggacaaggagggtccattcttgggacgaaacgcaccctacccggaaagtacttggagaagatcgcagaacagatgcactcgaaaaatatcaatgcccttctgatcattggcggattcgaggcctacctgggactcctagagctggcagctgcccggaacaaacatgaggcattctgtgtccctatggttatggttcctgctactgtctccaacaatgtgccaggttctgatttcagcatcggggcagacacggctctgaacactatcacagacacgtgcgaccgcataaaacagtcagccagtgggaccaagcgccgggtgttcatcattgagaccatgggcggatactgtggctacctggccaacatggggggacttgcagcgggacgcgatgctgcctacatctttgaagaacaatttgatatccgagatttgcagtccaacgtcatgcacttgacggagaaaatgaagaccagcatccagaggggccttgtcctcagaaatgaaaactgcagtgtaaattacaccacggacttcatctaccagctctactcagaggaagggaaaggagtgtttgactgcaggaagaacgtgctaggccacatgcagcaggggggagcaccttctccattcgacagaaactttggaaccaaaatatctgccaaagctatggagtggatctcggccaaactgaagggctcccacggcacagggaaaaaatttgttagtgatgattccatttgtgtcctgggaattcagaagagagacctcctgtttaaaccagtggcagagctaaggaaggctactgactttgagcaccgtatccccaaacaacagtggtggctgaaactgctaccaatctcgaagatcttggcaaagtatgaggcaagctatgacatgtcagacgtaggcaagctggagccggtgcataaccacggagaactatcagccatctgattgaatatgccgtctcctgacctgcacacttacctagggaagcctgtaatgttctccagggaccacccctttttgtaacatagttatttatcagcactctatgcaagaattgttggccgagtattgtcagcagtaataatcagagagcatcacttgctataaccattgacgcaacagaccctaagacatgaaacccagcctcgcgcgattgatcacgtgtcagttttctactgtaccgggtactactgtcttgtgctttaccatgtgtgtatcttgtgggat

SEQ ID NO: 3065 - protein, 786 aa, Rattus norvegicus
  misc_feature (1)..(786): Xaa=Unknown amino acid
  ref <308>: DATABASE ACCESSION NUMBER: SWISS-Prot / AAA17757
  ref <309>: DATABASE ENTRY DATE: 2002-06-15
DQDSSTSSTSFPKYLEHLSGDGKAXGVLTSGGESQGMNAAVRAVVRMGMYTGAQVYFIYEGYQGMVDGGSNIVEAKWECVSSILQVGGTIIGSARCQAFRSREGRLKATCNLVRLGITNLCVIGGDGSLTGANLFRKEWSGLLEELAKNGEIDSDTVKKHAYLNVVGMVGSIDNDFCGTDMTIGTDSALHRIIEVVDAIMTTAQSHQRTFVLEVMGRYCGYLALVSALACGADWVFLPESPPEEGWEEEMCLKLSENRARKKRLNIIIVSEGAIDTQNKPITSEKIKELVVTNLGFDTRVTILGHVQRGGTPSAFDRILASRMGVEAVLALLEATPETPACVVSLRGNQAVRLPLMECVQMTQDVQKAMDERRFDEAVKLRGRSFEGNLNTYKRLAIKEPDDKIPKSNCNVAIINVGAPAAGMNAAVRSAVRVGIAEGHKMFAIYDGFDGLANGQIKEIGWGDVGGWTGQGGSILGTKRTLPGKYLEKIAEQMHSKNINALLIIGGFEAYLGLLELAAARNKHEAFCVPMVMVPATVSNNVPGSDFSIGADTALNTITDTCDRIKQSASGTKRRVFIIETMGGYCGYLANMGGLAAGRDAAYIFEEQFDIRDLQSNVMHLTEKMKTSIQRGLVLRNENCSVNYTTDFIYQLYSEEGKGVFDCRKNVLGHMQQGGAPSPFDRNFGTKISAKAMEWISAKLKGSHGTGKKFVSDDSICVLGIQKRDLLFKPVAELRKATDFEHRIPKQQWWLKLLPISKILAKYEASYDMSDVGKLEPVHNHGELSAI

SEQ ID NO: 3066 - DNA, 2591 bp, Homo sapiens
  ref <308>: DATABASE ACCESSION NUMBER: EMBL / D25328
  ref <309>: DATABASE ENTRY DATE: 2002-06-03
cccggacgtgcggctcccctcggcctcctcgccatggacgcggacgactcccgggcccccaagggctccttgcggaagttcctggagcacctctccggggccggcaaggccatcggcgtgctgaccagcggcggggatgctcaaggtatgaacgctgccgtccgtgccgtggtgcgcatgggtatctacgtgggggccaaggtgtacttcatctacgagggctaccagggcatggtggacggaggctcaaacatcgcagaggccgactgggagagtgtctccagcatcctgcaagtgggcgggacgatcattggcagtgcgcggtgccaggccttccgcacgcgggaaggccgcctgaaggctgcttgcaacctgctgcagcgcggcatcaccaacctgtgtgtgatcggcggggacgggagcctcaccggggccaacctcttccggaaggagtggagtgggctgctggaggagctggccaggaacggccagatcgataaggaggccgtgcagaagtacgcctacctcaacgtggtgggcatggtgggctccatcgacaatgatttctgcggcaccgacatgaccatcggcacggactccgccctgcacaggatcatcgaggtcgtcgacgccatcatgaccacggcccagagccaccagaggaccttcgttctggaggtgatgggacgacactgtgggtacctggccctggtgagtgccttggcctgcggtgcggactgggtgttccttccagaatctccaccagaggaaggctgggaggagcagatgtgtgtcaaactctcggagaaccgtgcccggaaaaaaaggctgaatattattattgtggctgaaggagcaattgatacccaaaataaacccatcacctctgagaaaatcaaagagcttgtcgtcacgcagctgggctatgacacacgtgtgaccatcctcgggcacgtgcagagaggagggaccccttcggcattcgacaggatcttggccagccgcatgggagtggaggcagtcatcgccttgctagaggccaccccggacaccccagcttgcgtcgtgtcactgaacgggaaccacgccgtgcgcctgccgctgatggagtgcgtgcagatgactcaggatgtgcagaaggcgatggacgagaggagatttcaagatgcggttcgactccgagggaggagctttgcgggcaacctgaacacctacaagcgacttgccatcaagctgccggatgatcagatcccaaagaccaattgcaacgtagctgtcatcaacgtgggggcacccgcggctgggatgaacgcggccgtacgctcagctgtgcgcgtgggcattgccgacggccacaggatgctcgccatctatgatggctttgacggcttcgccaagggccagatcaaagaaatcggctggacagatgtcgggggctggaccggccaaggaggctccattcttgggacaaaacgcgttctcccggggaagtacttggaagagatcgccacacagatgcgcacgcacagcatcaacgcgctgctgatcatcggtggattcgaggcctacctgggactcctggagctgtcagccgcccgggagaagcacgaggagttctgtgtccccatggtcatggttcccgctactgtgtccaacaatgtgccgggttccgatttcagcatcggggcagacaccgccctgaacactatcaccgacacctgcgaccgcatcaagcagtccgccagcggaaccaagcggcgcgtgttcatcatcgagaccatgggcggctactgtggctacctggccaacatgggggggctcgcggccggagctgatgccgcatacattttcgaagagcccttcgacatcagggatctgcagtccaacgtggagcacctgacggagaaaatgaagaccaccatccagagaggccttgtgctcagaaatgagagctgcagtgaaaactacaccaccgacttcatttaccagctgtattcagaagagggcaaaggcgtgtttgactgcaggaagaacgtgctgggtcacatgcagcagggtggggcaccctctccatttgatagaaactttggaaccaaaatctctgccagagctatggagtggatcactgcaaaactcaaggaggcccggggcagaggaaaaaaatttaccaccgatgattccatttgtgtgctgggaataagcaaaagaaacgttatttttcaacctgtggcagagctgaagaagcaaacggattttgagcacaggattcccaaagaacagtggtggctcaagctacggcccctcatgaaaatcctggccaagtacaaggccagctatgacgtgtcggactcaggccagctggaacatgtgcagccctggagtgtctgacccagtcccgcctgcatgtgcctgcagccaccgtggactgtctgtttttgtaacacttaagttattttatcagcactttatgcacgtattattgacattaatacctaatcggcgagtgcccatctgccccaccagctccagtgcgtgctgtctgtggagtgtgtctcatgctttcagatgtgcatatgagcagaattaattaa

SEQ ID NO: 3067 - protein, 784 aa, Homo sapiens
  ref <308>: DATABASE ACCESSION NUMBER: SWISS-Prot / Q01813
  ref <309>: DATABASE ENTRY DATE: 2002-06-15
MDADDSRAPKGSLRKFLEHLSGAGKAIGVLTSGGDAQGMNAAVRAVVRMGIYVGAKVYFIYEGYQGMVDGGSNIAEADWESVSSILQVGGTIIGSARCQAFRTREGRLKAACNLLQRGITNLCVIGGDGSLTGANLFRKEWSGLLEELARNGQIDKEAVQKYAYLNVVGMVGSIDNDFCGTDMTIGTDSALHRIIEVVDAIMTTAQSHQRTFVLEVMGRHCGYLALVSALACGADWVFLPESPPEEGWEEQMCVKLSENRARKKRLNIIIVAEGAIDTQNKPITSEKIKELVVTQLGYDTRVTILGHVQRGGTPSAFDRILASRMGVEAVIALLEATPDTPACVVSLNGNHAVRLPLMECVQMTQDVQKAMDERRFQDAVRLRGRSFAGNLNTYKRLAIKLPDDQIPKTNCNVAVINVGAPAAGMNAAVRSAVRVGIADGHRMLAIYDGFDGFAKGQIKEIGWTDVGGWTGQGGSILGTKRVLPGKYLEEIATQMRTHSINALLIIGGFEAYLGLLELSAAREKHEEFCVPMVMVPATVSNNVPGSDFSIGADTALNTITDTCDRIKQSASGTKRRVFIIETMGGYCGYLANMGGLAAGADAAYIFEEPFDIRDLQSNVEHLTEKMKTTIQRGLVLRNESCSENYTTDFIYQLYSEEGKGVFDCRKNVLGHMQQGGAPSPFDRNFGTKISARAMEWITAKLKEARGRGKKFTTDDSICVLGISKRNVIFQPVAELKKQTDFEHRIPKEQWWLKLRPLMKILAKYKASYDVSDSGQLEHVQPWSV

SEQ ID NO: 3068 - DNA, 2643 bp, Rattus norvegicus; identical to SEQ ID NO: 3064
  ref <308>: DATABASE ACCESSION NUMBER: EMBL / L25387
  ref <309>: DATABASE ENTRY DATE: 2002-08-09

SEQ ID NO: 3069 - protein, 786 aa, Rattus norvegicus; identical to SEQ ID NO: 3065
  misc_feature (1)..(786): Xaa=Unknown amino acid
  ref <308>: DATABASE ACCESSION NUMBER: SWISS-Prot / AAA17757
  ref <309>: DATABASE ENTRY DATE: 2002-06-15

SEQ ID NO: 3070 - DNA, 2591 bp, Homo sapiens; identical to SEQ ID NO: 3066
  ref <308>: DATABASE ACCESSION NUMBER: EMBL / D25328
  ref <309>: DATABASE ENTRY DATE: 2002-06-03

SEQ ID NO: 3071 - protein, 784 aa, Homo sapiens; identical to SEQ ID NO: 3067
  ref <308>: DATABASE ACCESSION NUMBER: SWISS-Prot / Q01813
  ref <309>: DATABASE ENTRY DATE: 2002-06-15

SEQ ID NO: 3072 - DNA, 3463 bp, Rattus norvegicus
  ref <308>: DATABASE ACCESSION NUMBER: EMBL / L25605
  ref <309>: DATABASE ENTRY DATE: 1997-02-17
cggtgaggggagccgggcgggtggcagagcagagcaggaggaagcaacggccacagacgcatcgggaccgcgagtcgtagtcgggggatccgcggggcggaggcgggcaccatgggcaaccgcgggatggaagagctcatcccgctggttaacaagctgcaggacgccttcagctccatcggtcagagctgccacctggacctgccgcagatcgccgtggtgggcggccagagcgccggcaagagttcggtgctcgagaacttcgtgggccgggacttccttccacgaggatcaggaattgtcacccggaggcctctcattctgcagctcatcttttccaaaacagaatatgcggagtttttgcactgcaagtccaaaaagtttacagactttgatgaagtccggcaggagatcgaagcagagactgaccgggtcacaggcaccaacaaaggcatctccccggtgcccatcaaccttcgggtctattcaccacacgtgttgaacttgaccctcatcgacctcccaggcatcactaaggtgccagttggggaccagccaccagacatcgagtaccagatcaaggacatgatcctgcagtttatcagccgggagagcagcctcattcttgccgtcacacctgccaacatggacttggccaactcggatgccctcaagctggccaaggaggtggacccccaaggcttgcggaccattggtgtcatcaccaagctagacctgatggatgaaggcacagatgccagggatgtcctggagaacaagctcctgcccttgagaagaggctacatcggcgtggttaaccgcagccagaaagacatcgagggcagaaaggacatccgggcagctctggcagctgagaggaaattcttcctctcccacccagcctaccggcacatggctgaccgcatgggtaccccacacttgcagaaaacactgaaccagcaactgaccaaccacatccgggagtcactgccaaccctgcgcagcaagctgcagagccaactgctgtccctggagaaggaagtggaagagtacaagaatttccggcctgacgaccccacacgcaagaccaaagccctgctgcagatggtccagcagtttggagtggactttgagaagcgaatcgaaggctctggagatcaagtcgacaccctggagctgtctgggggcgcccgcatcaatcgcatcttccacgagcgctttccctttgagctggtgaagatggagtttgacgagaaagacctccgaagagagatcagctacgccattaagaacatccacggagtcagaactgggctcttcacgccggatttggcgttcgaggccattgtgaaaaagcaggtggtcaagctgaaagagccctgtctgaaatgcgtggacctggttatccaggagctaatcagtacagttaggcaatgcaccagcaagctcagttcctacccccgccttcgagaggagaccgaacgcattgtcaccacctacatcagggagcgagaagggagaaccaaggaccagatccttcttctgattgacattgagcagtcctacatcaacacaaaccatgaagacttcattggatttgccaatgcccagcagaggagcacgcagctgaacaagaagagggccatacctaaccagggggagatcttggtgatccgcaggggctggttgaccatcaacaacatcagcttgatgaaaggcggttccaaggagtactggttcgtgctgactgctgagtcgttgtcttggtacaaggatgaagaggaaaaagaaaagaagtacatgctgccactagacaacctcaaaatacgggatgtggagaagggcttcatgtccaacaagcatgtgtttgccatcttcaacacagagcagaggaacgtctacaaggacctgcgacagatcgaactggcttgtgactcccaggaagatgtggacagctggaaggcttcgttcctgcgagctggggtctacccagagaaggaccaggcagagaacgaggatggagcacaagagaacaccttctccatggacccgcagctggagcggcaggtggagaccatccgcaacttggtggactcctatgtggccatcatcaacaagtccatccgggacctcatgccaaagaccatcatgcacctcatgatcaacaacacaaaggccttcatccaccatgagctgctagcctacctgtactcatcagcagaccagagcagcctcatggaggagtcagctgagcaggctcagcggcgggacgatatgctgcgcatgtaccatgcactcaaggaagcgctcaacatcattggggacatcagcaccagcaccgtgtccacgcctgtgcccccacctgtcgatgatacttggctccagaacaccagcagccacagccccactccacagcgcagacctgtgtccagtgtgcacccgccgggccgcccacccgcagtgcggggccccacaccggggcctcccctcattcctatgcctgtgggggccacatcctccttctcggcaccccccatcccatcccggcctggaccacagaatgtgtttgccaacaatgaccccttctctgcgccacctcagataccgtctcggccagcacggattccccctgggatccctccaggagtgcccagcagaagagcgcccgctgcgcccagccggcccaccattatccgcccagccgagccgtccctgctcgactaggctgcaggggacagtgttctgggggggtcctcgtgtacctacagtggtctgggccctgctactgccccccatgctgggaccaggctccccgtgggcaagcctgccctctcctccctagccctagtgcacatgataaggagggagagggtgggaaggaggcccaaacaaacagaacttgggggctttgcactttggggcgagggggagctctggttagcagaacagaaactgcacccttgggaccatctggaaagaaaggtctaggctagtggtggggaactctacatgggctcctccatactgtaagcctttgctctttctgaggtacagaactgtccacctttccctaaggactcctcaggagttagccaggcccaggaggtccagtgctggccacccacctggctcaagttgtatatatatatatagcttctttggccacattaaccacacagcctgagcccagcccagtctccacacccagaggtgcctttgtgccttccaggcctggagtgcctcagctctggcctgcctctctcctcagcccctgttgtggtttgggctgtaagaactctggagacatcaggacctcttggcttccaaccagatgtctcctacagggtgggccctggtgcctctgtacagattctgctcccaacgcttggattgaccactgttaagtgcctgcctctgtatatcctattaataaactaaaataaagggaagccctctcgtggct

SEQ ID NO: 3073 - protein, 870 aa, Rattus norvegicus
  ref <308>: DATABASE ACCESSION NUMBER: SWISS-Prot / P39052
  ref <309>: DATABASE ENTRY DATE: 2002-06-15
MGNRGMEELIPLVNKLQDAFSSIGQSCHLDLPQIAVVGGQSAGKSSVLENFVGRDFLPRGSGIVTRRPLILQLIFSKTEYAEFLHCKSKKFTDFDEVRQEIEAETDRVTGTNKGISPVPINLRVYSPHVLNLTLIDLPGITKVPVGDQPPDIEYQIKDMILQFISRESSLILAVTPANMDLANSDALKLAKEVDPQGLRTIGVITKLDLMDEGTDARDVLENKLLPLRRGYIGVVNRSQKDIEGRKDIRAALAAERKFFLSHPAYRHMADRMGTPHLQKTLNQQLTNHIRESLPTLRSKLQSQLLSLEKEVEEYKNFRPDDPTRKTKALLQMVQQFGVDFEKRIEGSGDQVDTLELSGGARINRIFHERFPFELVKMEFDEKDLRREISYAIKNIHGVRTGLFTPDLAFEAIVKKQVVKLKEPCLKCVDLVIQELISTVRQCTSKLSSYPRLREETERIVTTYIREREGRTKDQILLLIDIEQSYINTNHEDFIGFANAQQRSTQLNKKRAIPNQGEILVIRRGWLTINNISLMKGGSKEYWFVLTAESLSWYKDEEEKEKKYMLPLDNLKIRDVEKGFMSNKHVFAIFNTEQRNVYKDLRQIELACDSQEDVDSWKASFLRAGVYPEKDQAENEDGAQENTFSMDPQLERQVETIRNLVDSYVAIINKSIRDLMPKTIMHLMINNTKAFIHHELLAYLYSSADQSSLMEESAEQAQRRDDMLRMYHALKEALNIIGDISTSTVSTPVPPPVDDTWLQNTSSHSPTPQRRPVSSVHPPGRPPAVRGPTPGPPLIPMPVGATSSFSAPPIPSRPGPQNVFANNDPFSAPPQIPSRPARIPPGIPPGVPSRRAPAAPSRPTIIRPAEPSLLD

SEQ ID NO: 3074 - DNA, 3601 bp, Homo sapiens
  ref <308>: DATABASE ACCESSION NUMBER: Refseq / NM_004945
  ref <309>: DATABASE ENTRY DATE: 2002-11-05
gaccgtgaggccgagccgggagcgggcgtcttgccgaggcccgggcgggcgggagcaacggctacagacgccgcggggccaggtcgttgagggtcggcggcgggcgaggagcgcagggcgctcgggccgggggccgccggcgccatgggcaaccgcgggatggaagagctgatcccgctggtcaacaaactgcaggacgccttcagctccatcggccagagctgccacctggacctgccgcagatcgctgtagtgggcggccagagcgccggcaagagctcggtgctggagaacttcgtgggccgggacttccttccccgcggttcaggaatcgtcacccggcggcctctcattctgcagctcatcttctcaaaaacagaacatgccgagtttttgcactgcaagtccaaaaagtttacagactttgatgaagtccggcaggagattgaagcagagaccgacagggtcacggggaccaacaaaggcatctccccagtgcccatcaaccttcgagtctactcgccacacgtgttgaacttgaccctcatcgacctcccgggtatcaccaaggtgcctgtgggcgaccagcctccagacatcgagtaccgagtcaaggacatgatcctgcagttcatcagccgggagagcagcctcattctggctgtcacgcccgccaacatggacctggccaactccgacgccctcaagctggccaaggaagtcgatccccaaggcctacggaccatcggtgtcatcaccaagcttgacctgatggacgagggcaccgacgccagggacgtcttggagaacaagttgctcccgttgagaagaggctacattggcgtggtgaaccgcagccagaaggatattgagggcaagaaggacatccgtgcagcactggcagctgagaggaagttcttcctctcccacccggcctaccggcacatggccgaccgcatgggcacgccacatctgcagaagacgctgaatcagcaactgaccaaccacatccgggagtcgctgccggccctacgtagcaaactacagagccagctgctgtccctggagaaggaggtggaggagtacaagatctttcggcccgacgaccccacccctaaaaccaaagccctgctgcagatggtccagcagtttggggtggattttgagaagaggatcgagggctcaggagatcaggtggacactctggagctctccgggggcgcccgaatcaatcgcatcttccacgagcggttcccatttgagctggtgaagatggagtttgacgagaaggacttacgacgggagatcagctatgccattaagaacatccatggagtcaggaccgggcttttcaccccggacttggcattcgaggccattgtgaaaaagcaggtcgtcaagctgaaagagccctgtctgaaatgtgtcgacctggttatccaggagctaatcaatacagttaggcagtgtaccagtaagctcagttcctacccccggttgcgagaggagacagagcgaatcgtcaccacttacatccgggaacgggaggggagaacgaaggaccagattcttctgctgatcgacattgagcagtcctacatcaacacgaaccatgaggacttcatcgggtttgccaatgcccagcagaggagcacgcagctgaacaagaagagagccatccccaatcaggtgatccgcaggggctggctgaccatcaacaacatcagcctgatgaaaggcggctccaaggagtactggtttgtgctgactgccgagtcactgtcctggtacaaggatgaggaggagaaagagaagaagtacatgctgcctctggacaacctcaagatccgtgatgtggagaagggcttcatgtccaacaagcacgtcttcgccatcttcaacacggagcagagaaacgtctacaaggacctgcggcagatcgagctggcctgtgactcccaggaagacgtggacagctggaaggcctcgttcctccgagctggcgtctaccccgagaaggaccaggcagaaaacgaggatggggcccaggagaacaccttctccatggacccccaactggagcggcaggtggagaccattcgcaacctggtggactcatacgtggccatcatcaacaagtccatccgcgacctcatgccaaagaccatcatgcacctcatgatcaacaatacgaaggccttcatccaccacgagctgctggcctacctatactcctcggcagaccagagcagcctcatggaggagtcggctgaccaggcacagcggcgggacgacatgctgcgcatgtaccatgccctcaaggaggcgctcaacatcatcggtgacatcagcaccagcactgtgtccacgcctgtacccccgcctgtcgatgacacctggctccagagcgccagcagccacagccccactccacagcgccgaccggtgtccagcatacacccccctggccggcccccagcagtgaggggccccactccagggccccccctgattcctgttcccgtgggggcagcagcctccttctcggcgcccccaatcccatcccggcctggaccccagagcgtgtttgccaacagtgacctcttcccagccccgcctcagatcccatctcggccagttcggatccccccagggattcccccaggagtgcccagcagaagaccccctgctgcgcccagccggcccaccattatccgcccagccgagccatccctgctcgactaggcctcgaggggggcgtgctctcgggggggcctcacgcacccgcggcgcaggagcttcagtggtctggggccctccgccgcccctatgctgggaccaggctcccagtgggcagccctggcctcttggttaacgctggccccggtccagggccggcccctgtgcctggctggacaccgcactgcgcaaaggggccctggagctccaggcagggggcgctggggtgttgcactttgggggatggagtctcagggtggcagaggggggaccagaacccttgacaccatcctgaatgaggggtccagcctgggggggactctaccaaggtcttcttgggctgggaaagcccatgtagggcaggccttctataagtgcgggcaccaagggcgcctacatccccaggccttgctggggtgcaggggtatatcaacttcccattagcaggagctccccagcggcaagcctggcccagtgggctcggtagtgcccagctggcaggcctgaggtgtacatagtccttcccggccatattaaccacacagcctgagcctggcccagcctcggctgccagaggtgcctttgctaggcccggagccgttgcccggccttgcccttgccctattcctctcctcctcctcctcctgggtcccccagggtggctgggcttgggctatgtgggtggtggtggcggggggtcttgggggcctctcagctcccgcccatgcctccctgatgggtgggcccagggcggcctctctctgaggagacctcacccactcctcgctcagtttgaccactgtaagtgcctgcactctgtattctattaataaactaaaataaagggaagagcgtgctggtg

SEQ ID NO: 3075 - protein, 870 aa, Homo sapiens
  ref <308>: DATABASE ACCESSION NUMBER: SWISS-Prot / P50570
  ref <309>: DATABASE ENTRY DATE: 2002-06-15
MGNRGMEELIPLVNKLQDAFSSIGQSCHLDLPQIAVVGGQSAGKSSVLENFVGRDFLPRGSGIVTRRPLILQLIFSKTEHAEFLHCKSKKFTDFDEVRQEIEAETDRVTGTNKGISPVPINLRVYSPHVLNLTLIDLPGITKVPVGDQPPDIEYRVKDMILQFISRESSLILAVTPANMDLANSDALKLAKEVDPQGLRTIGVITKLDLMDEGTDARDVLENKLLPLRRGYIGVVNRSQKDIEGKKDIRAALAAERKFFLSHPAYRHMADRMGTPHLQKTLNQQLTNHIRESLPALRSKLQSQLLSLEKEVEEYKIFRPDDPTPKTKALLQMVQQFGVDFEKRIEGSGDQVDTLELSGGARINRIFHERFPFELVKMEFDEKDLRREISYAIKNIHGVRTGLFTPDLAFEAIVKKQVVKLKEPCLKCVDLVIQELINTVRQCTSKLSSYPRLREETERIVTTYIREREGRTKDQILLLIDIEQSYINTNHEDFIGFANAQQRSTQLNKKRAIPNQGEILVIRRGWLTINNISLMKGGSKEYWFVLTAESLSWYKDEEEKEKKYMLPLDNLKIRDVEKGFMSNKHVFAIFNTEQRNVYKDLRQIELACDSQEDVDSWKASFLRAGVYPEKDQAENEDGAQENTFSMDPQLERQVETIRNLVDSYVAIINKSIRDLMPKTIMHLMINNTKAFIHHELLAYLYSSADQSSLMEESADQAQRRDDMLRMYHALKEALNIIGDISTSTVSTPVPPPVDDTWLQSASSHSPTPQRRPVSSIHPPGRPPAVRGPTPGPPLIPVPVGAAASFSAPPIPSRPGPQSVFANSDLFPAPPQIPSRPVRIPPGIPPGVPSRRPPAAPSRPTIIRPAEPSLLD

SEQ ID NO: 3076 - DNA, 719 bp, Rattus norvegicus
  ref <308>: DATABASE ACCESSION NUMBER: EMBL / L25633
  ref <309>: DATABASE ENTRY DATE: 2000-03-04
gtgacttcctggcacagcccccctggctgttgtcgctacttccactacgatctagctcgaggaaccgtgcgctcggatccagcgaagatgcagagttcgttgaagcccgcgggctccggggttcttcagctactggtctgcttccttctgctatacagtcgcccaagcagctgcagcgacataaatgcccacgatggtcagggccaagtgggatcagagcagctctggacgttccaaggactcgttgcctcagtcttccagtacttacagcttctattccaccacattgtaccccaaggcatgttctggaccgatgacatagcctatgagttaatgaccaaaaaggtggagcacctcagcagactccatccccagtatccatgccggaaggaggggaaggtggtttctcccattgcaaccactggggtgaggggcaagcaagaggagaaacttcgactcttatcgccccaaaagagtccagcagtcaaggtgaatagggaccgatgctttaccaccaaagtaatcccaaaggccaccaaacaagaggtcacccatccctccaagggtttctttgggccattccccactgtgggtctcaaccttgttgctgactgagatctcactgtataagatccttttccccgggaacctcctcactgccctccaaggggcaattcttggatgactcaaatataagtaattaaagttgactttcatgc

SEQ ID NO: 3077 - protein, 175 aa, Rattus norvegicus
  ref <308>: DATABASE ACCESSION NUMBER: SWISS-Prot / P47940
  ref <309>: DATABASE ENTRY DATE: 1996-02-01
MQSSLKPAGSGVLQLLVCFLLLYSRPSSCSDINAHDGQGQVGSEQLWTFQGLVASVFQYLQLLFHHIVPQGMFWTDDIAYELMTKKVEHLSRLHPQYPCRKEGKVVSPIATTGVRGKQEEKLRLLSPQKSPAVKVNRDRCFTTKVIPKATKQEVTHPSKGFFGPFPTVGLNLVAD

SEQ ID NO: 3078 - DNA, 3649 bp, Homo sapiens
  ref <308>: DATABASE ACCESSION NUMBER: Refseq / NM_002846
  ref <309>: DATABASE ENTRY DATE: 2002-02-22
gcggcaagccccgcctcagcccctctggcaggctcccgccagcgtcgctgcggctccggcccgggagcgagcgcccggagctcggaaagatgcggcgcccgcggcggcctgggggtctcgggggatccgggggtctccggctgctcctctgcctcctgctgctgagcagccgcccggggggctgcagcgccgttagtgcccacggctgtctatttgaccgcaggctctgctctcacctggaagtctgtattcaggatggcttgtttgggcagtgccaggtgggagtggggcaggcccggccccttttgcaagtcacctccccagttctccaacgcttacaaggtgtgctccgacaactcatgtcccaaggattgtcctggcacgatgacctcacccagtatgtgatctctcaggagatggagcgcatccccaggcttcgccccccagagccccgtccaagggacaggtctggcttggcacccaagagacctggtcctgctggagagctgcttttacaggacatccccactggctccgcccctgctgcccagcatcggcttccacaaccaccagtgggcaaaggtggagctggggccagctcctctctgtcccctctgcaggctgagctgctcccgcctctcttggagcacctgctgctgcccccacagcctccccacccttcactgagttacgaacctgccttgctgcagccctacctgttccaccagtttggctcccgtgatggctccagggtctcagagggctccccagggatggtcagtgtcggccccctgcccaaggctgaagcccctgccctcttcagcagaactgcctccaagggcatatttggggaccaccctggccactcctacggggaccttccagggccttcacctgcccagctttttcaagactctgggctgctctatctggcccaggagttgccagcacccagcagggccagggtgccaaggctgccagagcaagggagcagcagccgggcagaggactccccagagggctatgagaaggaaggactaggggatcgtggagagaagcctgcttccccagctgtgcagccagatgcggctctgcagaggctggccgctgtgctggcgggctatggggtagagctgcgtcagctgacccctgagcagctctccacactcctgaccctgctgcagctactgcccaagggtgcaggaagaaatccgggaggggttgtaaatgttggagctgatatcaagaaaacaatggaggggccggtggagggcagagacacagcagagcttccagcccgcacatcccccatgcctggacaccccactgccagccctacctccagtgaagtccagcaggtgccaagccctgtctcctctgagcctcccaaagctgccagaccccctgtgacacctgtcctgctagagaagaaaagcccactgggccagagccagcccacggtggcaggacagccctcagcccgcccagcagcagaggaatatggctacatcgtcactgatcagaagcccctgagcctggctgcaggagtgaagctgctggagatcctggctgagcatgtgcacatgtcctcaggcagcttcatcaacatcagtgtggtgggaccagccctcaccttccgcatccggcacaatgagcagaacctgtctttggctgatgtgacccaacaagcagggctggtgaagtctgaactggaagcacagacagggctccaaatcttgcagacaggagtgggacagagggaggaggcagctgcagtccttccccaaactgcgcacagcacctcacccatgcgctcagtgctgctcactctggtggccctggcaggtgtggctgggctgctggtggctctggctgtggctctgtgtgtgcggcagcatgcgcggcagcaagacaaggagcgcctggcagccctggggcctgagggggcccatggtgacactacctttgagtaccaggacctgtgccgccagcacatggccacgaagtccttgttcaaccgggcagagggtccaccggagccttcacgggtgagcagtgtgtcctcccagttcagcgacgcagcccaggccagccccagctcccacagcagcaccccgtcctggtgcgaggagccggcccaagccaacatggacatctccacgggacacatgattctggcatacatggaggatcacctgcggaaccgggaccgccttgccaaggagtggcaggccctctgtgcctaccaagcagagccaaacacctgtgccaccgcgcagggggagggcaacatcaaaaagaaccggcatcctgacttcctgccctatgaccatgcccgcataaaactgaaggtggagagcagcccttctcggagcgattacatcaacgccagccccattattgagcatgaccctcggatgccagcctacatagccacgcagggcccgctgtcccataccatcgcagacttctggcagatggtgtgggagagcggctgcaccgtcatcgtcatgctgaccccgctggtggaggatggtgtcaagcagtgtgaccgctactggccagatgagggtgcctccctctaccacgtatatgaggtgaacctggtgtcggagcacatctggtgcgaggactttctggtgcggagcttctacctgaagaacgtgcagacccaggagacgcgcacgctcacgcagttccacttcctcagctggccggcagagggcacaccggcctccacgcggcccctgctggacttccgcaggaaggtgaacaagtgctaccggggccgctcctgccccatcatcgtgcactgcagtgatggtgcggggaggaccggcacctacatcctcatcgacatggtcctgaaccgcatggcaaaaggagtgaaggagattgacatcgctgccaccctggagcatgtccgtgaccagcggcctggccttgtccgctctaaggaccagtttgaatttgccctgacagccgtggcggaggaagtgaatgccatcctcaaggccctgccccagtgagaccctggggccccttggcgggcagcccagcctctgtccctctttgcctgtgtgagcatctctgtgtacccactcctcactgccccaccagccacctcttgggcatgctcagcccttcctagaagagtcaggaagggaaagccagaaggggcacgcctgcccagcctcgcatgccagagcctggggcatcccagagcccagggcatcccatgggggtgctgcagccaggaggagaggaaaggacatgggtagcaattctacccagagccttctcctgcctacattccctggcctggctctcctgtagctctcctggggttctgggagttccctgaacatctgtgtgtgtccccctatgctccagtatggaagaatggggtggagggtcgccacacccggctccccctgcttctcagccccgggcctgcctctgactcacacttgggcgctctgccctccctggcctcacgcccagcctcctcccaccaccctcccaccatgcgctgctcaacctctctccttctggcgcaagagaacatttctagaaaaaactacttttgtaccagtgtgaataaagttagtgtgttgtctgtgcagctgcaaaaaaaaaaaaaaaaaaa

SEQ ID NO: 3079 - protein, 979 aa, Homo sapiens; identical to SEQ ID NO: 2016
  ref <308>: DATABASE ACCESSION NUMBER: SWISS-Prot / Q16849
  ref <309>: DATABASE ENTRY DATE: 2002-06-15

SEQ ID NO: 3080 - DNA, 719 bp, Rattus norvegicus; identical to SEQ ID NO: 3076
  ref <308>: DATABASE ACCESSION NUMBER: EMBL / L25633
  ref <309>: DATABASE ENTRY DATE: 2000-03-04

SEQ ID NO: 3081 - protein, 175 aa, Rattus norvegicus; identical to SEQ ID NO: 3077
  ref <308>: DATABASE ACCESSION NUMBER: SWISS-Prot / P47940
  ref <309>: DATABASE ENTRY DATE: 1996-02-01

SEQ ID NO: 3082 - DNA, 3649 bp, Homo sapiens; identical to SEQ ID NO: 3078
  ref <308>: DATABASE ACCESSION NUMBER: Refseq / NM_002846
  ref <309>: DATABASE ENTRY DATE: 2002-02-22

SEQ ID NO: 3083 - protein, 979 aa, Homo sapiens; identical to SEQ ID NO: 2016
  ref <308>: DATABASE ACCESSION NUMBER: SWISS-Prot / Q16849
  ref <309>: DATABASE ENTRY DATE: 2002-06-15

SEQ ID NO: 3084 - DNA, 719 bp, Rattus norvegicus; identical to SEQ ID NO: 3076
  ref <308>: DATABASE ACCESSION NUMBER: EMBL / L25633
  ref <309>: DATABASE ENTRY DATE: 2000-03-04

SEQ ID NO: 3085 - protein, 175 aa, Rattus norvegicus; identical to SEQ ID NO: 3077
  ref <308>: DATABASE ACCESSION NUMBER: SWISS-Prot / P47940
  ref <309>: DATABASE ENTRY DATE: 1996-02-01

SEQ ID NO: 3086 - DNA, 3649 bp, Homo sapiens; identical to SEQ ID NO: 3078
  ref <308>: DATABASE ACCESSION NUMBER: Refseq / NM_002846
  ref <309>: DATABASE ENTRY DATE: 2002-02-22

SEQ ID NO: 3087 - protein, 979 aa, Homo sapiens; identical to SEQ ID NO: 2016
  ref <308>: DATABASE ACCESSION NUMBER: SWISS-Prot / Q16849
  ref <309>: DATABASE ENTRY DATE: 2002-06-15

SEQ ID NO: 3088 - DNA, 719 bp, Rattus norvegicus; identical to SEQ ID NO: 3076
  ref <308>: DATABASE ACCESSION NUMBER: EMBL / L25633
  ref <309>: DATABASE ENTRY DATE: 2000-03-04

SEQ ID NO: 3089 - protein, 175 aa, Rattus norvegicus; identical to SEQ ID NO: 3077
  ref <308>: DATABASE ACCESSION NUMBER: SWISS-Prot / P47940
  ref <309>: DATABASE ENTRY DATE: 1996-02-01

SEQ ID NO: 3090 - DNA, 3649 bp, Homo sapiens; identical to SEQ ID NO: 3078
  ref <308>: DATABASE ACCESSION NUMBER: Refseq / NM_002846
  ref <309>: DATABASE ENTRY DATE: 2002-02-22

SEQ ID NO: 3091 - protein, 979 aa, Homo sapiens; identical to SEQ ID NO: 2016
  ref <308>: DATABASE ACCESSION NUMBER: SWISS-Prot / Q16849
  ref <309>: DATABASE ENTRY DATE: 2002-06-15

SEQ ID NO: 3092 - DNA, 2245 bp, Rattus norvegicus
  ref <308>: DATABASE ACCESSION NUMBER: EMBL / L26267
  ref <309>: DATABASE ENTRY DATE: 2000-03-04
agggagattctgaatccccctgagaaagaaacacaaggtgaggggcccagcctgttcatggccagcaccaagaccgaagcaattgccccggcatccaccatggaagacaaggaagaggatgtggggtttcaggataacctctttcttgagaaggcgctgcagctcgccaagcggcatgccaacgccctcttcgactacgcggttacgggagatgtgaagatgctgctggcggtacagcgccatctcaccgcggtgcaggatgagaacggggacagtgtcctacacttagccatcatccaccttcatgctcagctcgtgagggatctgctagaagtgacatctggttcgatctctgatgacatcatcaacatgagaaacgatctgtatcagacacctttgcacttggccgtgatcaccaagcaggaagatgtggtggaggacttgctgagggttggggctgacctgagtcttctggaccgctggggcaactctgtcctgcacctagctgccaaagaaggacatgataaaatcctcggggtcctactcaagaacagcaaggcagcactccttatcaaccaccccaacggggaaggtctgaatgccattcacatagctgtgatgagcaacagcctgtcatgtctgcagctgcttgtggctgctggggcagaagtcaacgctcaggagcagaagtctgggcgcacggcactgcacctggccgtggagtacgacaacatctcgttggccggctgcctgctcctggagggtgacgccctcgtggacagcaccacctacgatgggacgacacctctacacatagcggctggaagagggtccaccaggctggcagctcttctcaaagcagcaggagcagaccccctggtggagaactttgagcctctctatgacctggacgactcttgggagaaggctggagaagatgagggagtagtgccaggcaccacacccctggacatggctgccaactggcaggtatttgacatactaaatgggaaaccatatgagccagtgttcacatctgatgacatactcccacaaggggacattaagcagctgacagaagacacgaggctgcaactctgcaagctcttggaaattcctgatcccgacaagaactgggccactctggcgcagaagttaggtctggggatattgaacaatgccttccggctgagtcccgccccttctaaaactcttatggacaactatgaggtctctggggggaccatcaaagagctggtggaggccctgcgacagatgggctacacagaggccattgaagtgatccaggcagccttccgcaccccggaaaccacagcctccagccccgtgaccactgctcaggcccacttgctgcctctctcgtcctcctccacaagacagcacatagatgagctccgagataatgacagcgtgtgtgacagtggtgtggagacatccttccgcaaactcagcttctcggagtccctcactggagatggcccactgctatctctgaacaaaatgcctcacaattatgggcaggatggacctatagaaggcaaaatttagcctgctggcggttccccacactgtaaaccaaagccctgaaaggccatcatatcgttccgaaggagaaggcaaaaaacgcatcccaaggtgctggaaggtcaccggcctgcagggtcaatcttgatgtcattcgaggccttccgaatttggcttcctttcttggctctgaaatgaaatttagttgtcatatacagatggtgtctagcaatcacggctgcactcggtgtggcttggggtatggtggcttgagcttttccagctgctattggattacacttgctttgtgttgtcactgctgtccctctgctgggtccccgctgtcattaaggtatcgcagtccccacctggtgttctttctagccatctacagtacagtcatgcactcaaattaagattaaggaaaaagatatttttaagtgagtaacttcatgcgcaataaaaaaaagacatggctttttctaatgtggtttatctgtgatttaaaaaaaaaaaacacatgaacttaacaatatttaaaacctgctacaatcagtgctgaaaatagtattttcccccttttctgcattttactattgtaaatatgttttctaaatcaaatactttaaaagaagaaatgttggatttataaatgctattttttattttacttttataataaaagtacaagcacactgtt

SEQ ID NO: 3093 - protein, 522 aa, Rattus norvegicus
  ref <308>: DATABASE ACCESSION NUMBER: SWISS-Prot / Q63369
  ref <309>: DATABASE ENTRY DATE: 2002-06-15
REILNPPEKETQGEGPSLFMASTKTEAIAPASTMEDKEEDVGFQDNLFLEKALQLAKRHANALFDYAVTGDVKMLLAVQRHLTAVQDENGDSVLHLAIIHLHAQLVRDLLEVTSGSISDDIINMRNDLYQTPLHLAVITKQEDVVEDLLRVGADLSLLDRWGNSVLHLAAKEGHDKILGVLLKNSKAALLINHPNGEGLNAIHIAVMSNSLSCLQLLVAAGAEVNAQEQKSGRTALHLAVEYDNISLAGCLLLEGDALVDSTTYDGTTPLHIAAGRGSTRLAALLKAAGADPLVENFEPLYDLDDSWEKAGEDEGVVPGTTPLDMAANWQVFDILNGKPYEPVFTSDDILPQGDIKQLTEDTRLQLCKLLEIPDPDKNWATLAQKLGLGILNNAFRLSPAPSKTLMDNYEVSGGTIKELVEALRQMGYTEAIEVIQAAFRTPETTASSPVTTAQAHLLPLSSSSTRQHIDELRDNDSVCDSGVETSFRKLSFSESLTGDGPLLSLNKMPHNYGQDGPIEGKI

SEQ ID NO: 3094 - DNA, 233 bp, Homo sapiens
  ref <308>: DATABASE ACCESSION NUMBER: EMBL / AI265879
  ref <309>: DATABASE ENTRY DATE: 2000-03-03
ttttttttttttttttttttttttttttttttaaattggctttcccttttattataaaagtaaaaaaaaaaatagcatttataaatccaacattttttcctttaaggttttggatctaaaaaacatttttccaatagcaaaaggcagaaaggggggaaaatcccattttcagcagggatgggacccatgttaaaatatggccaggtttttttttttttttttttttttggcaa

SEQ ID NO: 3095 - protein, 968 aa, Homo sapiens
MAEDDPYLGRPEQMFHLDPSLTHTIFNPEVFQPQMALPTDGPYLQILEQPKQRGFRFRYVCEGPSHGGLPGASSEKNKKSYPQVKICNYVGPAKVIVQLVTNGKNIHLHAHSLVGKHCEDGICTVTAGPKDMVVGFANLGILHVTKKKVFETLEARMTEACIRGYNPGLLVHPDLAYLQAEGGGDRQLGDREKELIRQAALQQTKEMDLSVVRLMFTAFLPDSTGSFTRRLEPVVSDAIYDSKAPNASNLKIVRMDRTAGCVTGGEEIYLLCDKVQKDDIQIRFYEEEENGGVWEGFGDFSPTDVHRQFAIVFKTPKYKDINITKPASVFVQLRRKSDLETSEPKPFLYYPEIKDKEEVQRKRQKLMPNFSDSFGGGSGAGAGGGGMFGSGGGGGGTGSTGPGYSFPHYGFPTYGGITFHPGTTKSNAGMKHGTMDTESKKDPEGCDKSDDKNTVNLFGKVIETTEQDQEPSEATVGNGEVTLTYATGTKEESAGVQDNLFLEKAMQLAKRHANALFDYAVTGDVKMLLAVQRHLTAVQDENGDSVLHLAIIHLHSQLVRDLLEVTSGLISDDIINMRNDLYQTPLHLAVITKQEDVVEDLLRAGADLSLLDRLGNSVLHLAAKEGHDKVLSILLKHKKAALLLDHPNGDGLNAIHLAMMSNSLPCLLLLVAAGADVNAQEQKSGRTALHLAVEHDNISLAGCLLLEGDAHVDSTTYDGTTPLHIAAGRGSTRLAALLKAAGADPLVENFEPLYDLDDSWENAGEDEGVVPGTTPLDMATSWQVFDILNGKPYEPEFTSDDLLAQGDMKQLAEDVKLQLYKLLEIPDPDKNWATLAQKLGLGILNNAFRLSPAPSKTLMDNYEVSGGTVRELVEALRQMGYTEAIEVIQAASSPVKTTSQAHSLPLSPASTRQQIDELRDSDSVCDSGVETSFRKLSFTESLTSGASLLTLNKMPHDYGQEGPLEGKI

SEQ ID NO: 3096 - DNA, 1464 bp, Rattus norvegicus
  ref <308>: DATABASE ACCESSION NUMBER: EMBL / L26268
  ref <309>: DATABASE ENTRY DATE: 2000-03-04
atgcatcccttctacactcgggccgccaccatgataggcgagatcgccgccgcggtgtccttcatctccaagttcctccgcaccaaggggctcacgagcgagcgacagctgcagactttcagccagagcctgcaggaactgctggcagagcattacaaacatcactggttcccagaaaagccgtgcaagggatcaggttaccgttgtattcgcatcaaccataagatggatcctctgattggacaggcagcccagcggattggactgagcagtcaagagttgttcaggcttctcccaagtgaactcacactctgggttgacccctacgaagtgtcctacaggattggagaggatggctccatctgtgtgctgtatgaagcctcaccagcgggaggtagctctcaaaacagcaccaacgtgcaaatggtagacagcagaatcagctgtaaggaggaacttctcttgggcagaacaagcccttccaaaaactacaatatgatgactgtatcaggttaagatatagtctatggatggatcatcttataatggatggatagatttgattttttgctttgggtgggctcctcttggggatggattatggaataaccatgtcacagctgtgaagatctggcacaagatagagtggtaataatttttttttttaaagtgacagtgccatagtttggacagtacctttaagtgatttaagtagcctgtgagtccaagtaaaggatcactttatttggtagggagtgaagtcgcagggtggtttcagtttctcccagaccttatacccaatttgtcacaccagtccctttaaggaaattctgtatttcaaagaaccctcttttgcagtcagtcaaccttgcaggggaatttgcactatttacacttgaaagttaccagtaacttttttttggcagctcaataggaaagctcaatgttctaagcatggtagtactggaaatattacacggagacttttacctagcacttaaaaatgtataaatgtacataaagacacttagtacgcatgacctgggggaaatggtcagaccttgtgtttttggctttgagagtagcaagtgaccggaatctgccatgacaacaggcttttaaaagacccttacaaagacactgtctcaactgtggttagcaccagccagctctctgtacattcgcttgtagttttctaagattgagtgagtaaacttcttatttttagaaagtggaggtctggtttgtaactttccttgtactcaattgggtaagagtctttttccacaaaccgccatctattttgtgaactttgttagtcatcttttatttggtaaattatgaactggtgtaaatttgtacagttcatgtatattgattgtggcaaagttgtacagatttctatattttggatgagaaatttttcttctctctataataaattgtttcttatcttggcatttt

SEQ ID NO: 3097 - protein, 171 aa, Rattus norvegicus
  ref <308>: DATABASE ACCESSION NUMBER: SWISS-Prot / Q63073
  ref <309>: DATABASE ENTRY DATE: 1997-11-01
MHPFYTRAATMIGEIAAAVSFISKFLRTKGLTSERQLQTFSQSLQELLAEHYKHHWFPEKPCKGSGYRCIRINHKMDPLIGQAAQRIGLSSQELFRLLPSELTLWVDPYEVSYRIGEDGSICVLYEASPAGGSSQNSTNVQMVDSRISCKEELLLGRTSPSKNYNMMTVSG

SEQ ID NO: 3098 - DNA, 982 bp, Homo sapiens
  ref <308>: DATABASE ACCESSION NUMBER: EMBL / BC016759
  ref <309>: DATABASE ENTRY DATE: 2001-11-14
ggcacgaggcggagctggaaatgcagctattgaggtcttcgaatgctgcggagctggaggcggaggcagctggggaggtccgagcgatgtgaccaggccgccatcgctcgtctcttcctctctcctgccgcctcctgtctcgaaaataacttttttagtctaaaaaaagaaagacaaaagtagtcgtccgcccctcacgccctctcttcctctcagccttccgcccggtgaggaagcccggggtggctgctccgccgtcggggccgcgccgccgagccccggccgccccgggccgcccccgcacgccgcccccatgcatcccttctacacccgggccgccaccatgataggcgagatcgccgccgccgtgtccttcatctccaagtttctccgcaccaaggggctcacgagcgagcgacagctgcagaccttcagccagagcctgcaggagctgctggcagaacattataaacatcactggttcccagaaaagccatgcaagggatcgggttaccgttgtattcgcatcaaccataaaatggatcctctgattggacaggcagcacagcggattggactgagcagtcaggagctgttcaggcttctcccaagtgaactcacactctgggttgacccctatgaagtgtcctacagaattggagaggatggctccatctgtgtgctgtatgaagcctcaccagcaggaggtagcactcaaaacagcaccaacgtgcaaatggtagacagccgaatcagctgtaaggaggaacttctcttgggcagaacgagcccttccaaaaactacaatatgatgactgtatcaggttaagatatagtctgtggatggatcatctgatgatgatggataaatttgatttttgctttgggtgggctcctcttggggatggattatggaatttaaaccatgtcacagctgtgaagatctggcacaagatagaatggtaaaaaaaaaaaaaaaaaa

SEQ ID NO: 3099 - protein, 171 aa, Homo sapiens
  ref <308>: DATABASE ACCESSION NUMBER: SWISS-Prot / P31607
  ref <309>: DATABASE ENTRY DATE: 2002-06-15
MHPFYTRAATMIGEIAAAVSFISKFLRTKGLTSERQLQTFSQSLQELLAEHYKHHWFPEKPCKGSGYRCIRINHKMDPLIGQAAQRIGLSSQELFRLLPSELTLWVDPYEVSYRIGEDGSICVLYEASPAGGSTQNSTNVQMVDSRISCKEELLLGRTSPSKNYNMMTVSG

SEQ ID NO: 3100 - DNA, 1464 bp, Rattus norvegicus; identical to SEQ ID NO: 3096
  ref <308>: DATABASE ACCESSION NUMBER: EMBL / L26268
  ref <309>: DATABASE ENTRY DATE: 2000-03-04

SEQ ID NO: 3101 - protein, 171 aa, Rattus norvegicus; identical to SEQ ID NO: 3097
  ref <308>: DATABASE ACCESSION NUMBER: SWISS-Prot / Q63073
  ref <309>: DATABASE ENTRY DATE: 1997-11-01

SEQ ID NO: 3102 - DNA, 982 bp, Homo sapiens; identical to SEQ ID NO: 3098
  ref <308>: DATABASE ACCESSION NUMBER: EMBL / BC016759
  ref <309>: DATABASE ENTRY DATE: 2001-11-14

SEQ ID NO: 3103 - protein, 171 aa, Homo sapiens; identical to SEQ ID NO: 3099
  ref <308>: DATABASE ACCESSION NUMBER: SWISS-Prot / P31607
  ref <309>: DATABASE ENTRY DATE: 2002-06-15

SEQ ID NO: 3104 - DNA, 4601 bp, Rattus norvegicus
  ref <308>: DATABASE ACCESSION NUMBER: EMBL / L26986
  ref <309>: DATABASE ENTRY DATE: 2000-03-04
ccagaactcgcgctgtcagtatttgctctggaagtggccacaaccaggaaggaaccgaagagagagcttcatccagcacacctccaaattaactgtttggtgacttgttagtgttaaggataccacctttctcctgccctcccgcggggcgccctgccacctcaccatcacccacacctcctgcctcatcgcgcccgcctccagctcctccccgactccccatgccggcgcaatggagttatccgaagggcgatgattgcagccacagctgctaacttagcacccatcctagccatcggtcacccttggccagcctttctgcagccgccgagacgtgggcgtccagagtccagtgccgcagccaggacccgcccgacgcgcagcagaagcgcggcgcccaggcgcctcttagagaagactgcgccaagacgctgagcctagagccagcccaggagcttgagcgcagaaagggactgcgtggctcagagtgccgaggatttcgtggacaaatagccaccactttcactgcgtatcccaacggagctgattggcgggaaggtggcttgccagtacgcaggggtccactgcaatctgccaggagccccttgctctcgggctcactatgacttgacctgtgggggccctgctcagggctcctgcaatcgagcagcctaggaaagaggggatcgctgccaagcggccttcgggtctctaaaaacccctacccgcaactgccacaaccagtgtctgagcctccctccctgcggaccccagccatggaactctcggatgtgcactgccttagcggcagcgaggaactctataccattcacccgacgcccccggccgcggacggcgggagcggctctcggccgcagcggctgctgtggcagacggcggtgcggcacatcaccgagcagcgcttcatccacggccaccgaggcggcggcggcgggggctcccgcaaagcctcgaaccctgcgggcagcggaccaaaccaccacgcgccgcagctgtctagcgactcggtgctgcctctctattctctgggctccggagagcgagcgcacaacaccggtggcaccaaagtctttccggaacgcagcgggagcggcagtgccagtggcagcgggggtgggggcgacttgggcttcctgcaccttgactgtgccccaagtaactcggatttcttcctcaatgggggatacagctaccgtggggtcattttcccaaccctacgcaactccttcaagtctcgggatctggagcgcctctatcaacgctatttcctgggccagaggcgcaaatcggaggtagtgatgaacgtgctggatgtactaaccaaactcacccttctagtccttcacttgagcctagcctcggctcccatggaccctctcaagggcatcctgctaggctttttcactggcatcgaggtggtgatctgcgccctcgtggtggtcaggaaggacaccacctcccacacttacctgcaatacagcggcgtggtcacttgggtggctatgaccacccagattctggcagcaggcctgggctatgggcttctgggcgacggcataggctacgtgctttttacactcttcgccacctacagcatgcttccgctgcctctcacctgggccatcttggccggcctgggcacatccttgctgcaagtcacacttcaagtgctcatacccagactagcggtcttttccatcaaccaggtcctggcccaggtggtgctcttcatgtgcatgaatacagcaggcatcttcatcagttacctttcagaccgcgcccagcggcaggccttcctggagacccggaggtgtgtggaggccaggctccgcctggagacagagaaccaaagacaggagcggcttgtgctctctgtgctccccaggtttgtcgtcctagaaatgatcaatgacatgaccaatgtggaggacgagcacctgcagcatcagttccaccgcatctacatccatcgctacgagaacgtcagtattctttttgcagatgtcaaaggatttaccaacctctctacgaccttgtctgctcaggagcttgtcaggatgctcaacgagctctttgccagatttgatcggctggcccatgagcatcactgtcttcgcattaaaatcctgggggactgctactactgtgtgtcaggactgcctgagccccgccaggaccatgctcattgctgtgttgaaatgggcctcagcatgatcaaaactatcaggtttgtgaggtccagaacgaagcatgatgttgacatgcgaattggaatccattcaggctctgtgctgtgtggtgtgttgggcctgagaaaatggcagtttgatgtctggtcttgggatgtggacatcgcaaacaaacttgaatctggaggaatccctgggagaattcacatttccaaagccacactggattgcctcagtggtgactataatgtggaagagggccacggtaaggagaggaatgaattcttgaggaagcataatatagagacctatttgattaagcagcccgaggagagtttgctatccttgcctgaagatatagttaaggagtcggtgagctgctcggacaggagaaacagtggggcaacgttcacagaaggatcctggagcccagaactgccattcgacaacatcgtgggcaaacagaatactctggctgccctaacaagaaattcaataaatctgcttccaaaccatctcgcacaagctttgcatgtccagtctgggcctgaggaaattaacaagagaatagagcataccatcgacttgcggagtggcgataagttgagaagagagcatatcaagccattctcactgatgtttaaagactccagcctggagcacaagtattctcaaatgcgggatgaagtattcaagtcaaacttggtctgtgcatttatcgttcttctgtttatcactgcgattcaaagtttgcttccttcttcgaggctgatgcctatgaccatccagttctccatcctgatcatgctgcactccgccctggtcctcatcaccacggcagaagactataagtgtctgcctctcattctccgcaaaacctgttgttggattaacgagacctatttggcccgcaacgtcatcatctttgcttccatcttgattaatttcctgggagccgtcataaatattctgtggtgtgattttgacaagtcgatacccttgaagaacctgactttcaattcctcagctgtgtttacagatatctgctcctacccagagtactttgtcttcactggggtgttggccatggtgacgtgtgcagtatttctccggcttaactctgtcctgaagctggctgtgctgctcattatgatcgccatctacgccctgctgacagagaccatctatgcaggtctctttctgagttatgacaacctgaaccacagtggagaagattttctggggaccaaggaggcatcactgctactgatggccatgttccttcttgctgtattctaccatggacagcagctggagtacacagcccgcctagatttcctgtggcgagtacaggccaaagaggagatcaacgagatgaaggacttgagggaacacaatgagaacatgcttcgcaatatcttacccggccacgtggcccgccacttcctggagaaagacagagacaatgaggagctgtattctcaatcctatgatgccgttggggtaatgtttgcctccattcctggatttgcagacttttactctcagacagaaatgaacaaccagggagtggaatgtctgcgcttgctgaatgagatcattgctgactttgatgagttacttggagaggaccgctttcaggacatagagaagattaagaccattggtagtacatacatggctgtctcaggactgtcaccagagaaacagcaatgtgaagataaatggggacatttgtgtgccctggctgacttctctcttgccctgactgaaagcatacaagagatcaacaagcattcgttcaacaattttgaactccgtattggcatcagccatggctcagtggtagcaggtgtaattggcgctaagaaaccacagtatgacatttggggtaaaactgtgaacttggcaagccgaatggacagcacaggagtgagtggccggatccaagttcctgaggagacctatctcatcctgaaggatcagggctttgccttcgactaccggggagagatatatgtgaagggcatcagcgaacaagaagggaaaatcaaaacatattttctcctgggacgagtccaacccaacccattcatcttacccccaagaagacttcctgggcagtactctctggctgcagttgtccttgggcttgtccagtctctcaacaggcaaaggcagaagcaactactcaatgagaacagcaactctggcatcatcaagagccattacaaccggcggactttgctaacgccaagtgggccagagcctggagcacaggctgaaggcactgacaaatccgatttgccataaaagcattttctttgtgtttctttctctttttttgtatttcttttatatataaaataaatatactaataaaaaggtttg

SEQ ID NO: 3105 - protein, 1248 aa, Rattus norvegicus
  ref <308>: DATABASE ACCESSION NUMBER: SWISS-Prot / P40146
  ref <309>: DATABASE ENTRY DATE: 2002-06-15
MELSDVHCLSGSEELYTIHPTPPAADGGSGSRPQRLLWQTAVRHITEQRFIHGHRGGGGGGSRKASNPAGSGPNHHAPQLSSDSVLPLYSLGSGERAHNTGGTKVFPERSGSGSASGSGGGGDLGFLHLDCAPSNSDFFLNGGYSYRGVIFPTLRNSFKSRDLERLYQRYFLGQRRKSEVVMNVLDVLTKLTLLVLHLSLASAPMDPLKGILLGFFTGIEVVICALVVVRKDTTSHTYLQYSGVVTWVAMTTQILAAGLGYGLLGDGIGYVLFTLFATYSMLPLPLTWAILAGLGTSLLQVTLQVLIPRLAVFSINQVLAQVVLFMCMNTAGIFISYLSDRAQRQAFLETRRCVEARLRLETENQRQERLVLSVLPRFVVLEMINDMTNVEDEHLQHQFHRIYIHRYENVSILFADVKGFTNLSTTLSAQELVRMLNELFARFDRLAHEHHCLRIKILGDCYYCVSGLPEPRQDHAHCCVEMGLSMIKTIRFVRSRTKHDVDMRIGIHSGSVLCGVLGLRKWQFDVWSWDVDIANKLESGGIPGRIHISKATLDCLSGDYNVEEGHGKERNEFLRKHNIETYLIKQPEESLLSLPEDIVKESVSCSDRRNSGATFTEGSWSPELPFDNIVGKQNTLAALTRNSINLLPNHLAQALHVQSGPEEINKRIEHTIDLRSGDKLRREHIKPFSLMFKDSSLEHKYSQMRDEVFKSNLVCAFIVLLFITAIQSLLPSSRLMPMTIQFSILIMLHSALVLITTAEDYKCLPLILRKTCCWINETYLARNVIIFASILINFLGAVINILWCDFDKSIPLKNLTFNSSAVFTDICSYPEYFVFTGVLAMVTCAVFLRLNSVLKLAVLLIMIAIYALLTETIYAGLFLSYDNLNHSGEDFLGTKEASLLLMAMFLLAVFYHGQQLEYTARLDFLWRVQAKEEINEMKDLREHNENMLRNILPGHVARHFLEKDRDNEELYSQSYDAVGVMFASIPGFADFYSQTEMNNQGVECLRLLNEIIADFDELLGEDRFQDIEKIKTIGSTYMAVSGLSPEKQQCEDKWGHLCALADFSLALTESIQEINKHSFNNFELRIGISHGSVVAGVIGAKKPQYDIWGKTVNLASRMDSTGVSGRIQVPEETYLILKDQGFAFDYRGEIYVKGISEQEGKIKTYFLLGRVQPNPFILPPRRLPGQYSLAAVVLGLVQSLNRQRQKQLLNENSNSGIIKSHYNRRTLLTPSGPEPGAQAEGTDKSDLP

SEQ ID NO: 3106 - DNA, 2118 bp, Homo sapiens
  ref <308>: DATABASE ACCESSION NUMBER: EMBL / M83533
  ref <309>: DATABASE ENTRY DATE: 2000-05-04
ctgaggaagcataatatcgaaacttacttaattaagcagcctgaggacagtctgctgtccttgcctgaagatatcgtcaaggagtcagtgagctcctcagaccggagaaacagtggggccacattcactgaaggatcctggagccctgaactgccctttgataatatcgtggggaaacagaatactctggctgccctaacaagaaattcaataaatctgcttccaaaccatcttgcacaagctttgcatgtccagtctgggcctgaggaaattaacaagagaatagaacataccatcgacttgcggagtggcgataaattgagaagagagcatatcaagccattctcactgatgtttaaagactccagcctggagcacaagtattctcaaatgagggatgaagtgttcaagtcaaacttggtctgtgcatttatcgttcttctatttatcacggcaatacaaagtttgcttccttcttcaagagtgatgccaatgaccatccagttctccattctgattatgctgcactcggctctggtcctcatcaccacagcagaggattataaatgtttgcccctcatcctccggaaaacttgctgttggattaatgagacctatttggcccggaacgtcatcatctttgcatccattttgattaatttcctgggtgccatcttaaatatcctgtggtgtgattttgacaagtcgatacccttgaagaacctgactttcaattcctcagctgtgtttacagatatctgctcctacccagagtactttgtcttcacgggggtgttggccatggtgacctgtgcagttttcctccggctgaactccgtcctgaagctggcagtgctgctgatcatgattgccatctatgccctgctcactgagaccgtctacgcaggcctctttctgcgttatgacaacctcaaccacagtggagaagatttcctggggaccaaggaggtatcactgctactgatggccatgttcctcctggctgtgttctaccatggacagcagctggagtacacagcccgcctggacttcctttggcgagtacaggccaaagaggagatcaatgagatgaaggagctgagggaacacaatgagaacatgctccggaatatcttacccagccatgtggcccgccatttcctagagaaggaccgagacaatgaggagctgtattctcaatcctatgatgctgttggggtgatgtttgcctccatcccaggatttgcggacttttactctcagactgaaatgaataaccagggagtggaatgcctgcgcttgctcaatgagatcattgctgacttcgatgagttgcttggtgaagaccgatttcaagacattgaaaagattaagaccattggcagcacctacatggccgtgtcaggcctgtcacctgaaaaacagcaatgtgaagacaagtggggacatttgtgtgctctggctgacttctcactcgccctgacagaaagcatacaggagatcaacaagcattcattcaacaattttgaactccggattggcatcagccacggctcagtggtagctggcgttatcggcgctaagaaaccacagtatgacatttggggcaaaactgtgaacctggcaagccgaatggacagcacgggggttagtggccggatccaagtcccagaggagacctatctcatcctgaaggaccagggctttgcctttgattaccgaggggagatctatgtgaagggtatcagtgaacaggaaggaaaaatcaaaacgtactttcttctgggaagagtccaacccaacccattcatcttgcccccaagaagactgcctgggcagtactccctggccgcggttgtcctgggacttgtccagtccctcaataggcaaaggcagaagcagctactcaatgagaacaacaacacaggaatcatcaagggtcattacaaccggcggactttgttgtcacccagcggcacagagcctggagcccaggctgaaggcaccgacaaatctgatttgccataaaagcattttctttctgtttttttttttttttgtatttcttttatatataaaataaatatactaataaaaaggtttaattttttttagaac

SEQ ID NO: 3107 - protein, 1251 aa, Homo sapiens
  ref <308>: DATABASE ACCESSION NUMBER: SWISS-Prot / P40145
  ref <309>: DATABASE ENTRY DATE: 2000-05-30
MELSDVRCLTGSEELYTIHPTPPAGDGRSASRPQRLLWQTAVRHITEQRFIHGHRGGSGSGSGGSGKASDPAGGGPNHHAPQLSGDSALPLYSLGPGERAHSTCGTKVFPERSGSGSASGSGGGGDLGFLHLDCAPSNSDFFLNGGYSYRGVIFPTLRNSFKSRDLERLYQRYFLGQRRKSEVVMNVLDVLTKLTLLVLHLSLASAPMDPLKGILLGFFTGIEVVICALVVVRKDTTSHTYLQYSGVVTWVAMTTQILAAGLGYGLLGDGIGYVLFTLFATYSMLPLPLTWAILAGLGTSLLQVILQVVIPRLAVISINQVVAQAVLFMCMNTAGIFISYLSDRAQRQAFLETRRCVEARLRLETENQRQERLVLSVLPRFVVLEMINDMTNVEDEHLQHQFHRIYIHRYENVSILFADVKGFTNLSTTLSAQELVRMLNELFARFDRLAHEHHCLRIKILGDCYYCVSGLPEPRQDHAHCCVEMGLSMIKTIRYVRSRTKHDVDMRIGIHSGSVLCGVLGLRKWQFDVWSWDVDIANKLESGGIPGRIHISKATLDCLNGDYNVEEGHGKERNEFLRKHNIETYLIKQPEDSLLSLPEDIVKESVSSSDRRNSGATFTEGSWSPELPFDNIVGKQNTLAALTRNSINLLPNHLAQALHVQSGPEEINKRIEHTIDLRSGDKLRREHIKPFSLMFKDSSLEHKYSQMRDEVFKSNLVCAFIVLLFITAIQSLLPSSRVMPMTIQFSILIMLHSALVLITTAEDYKCLPLILRKTCCWINETYLARNVIIFASILINFLGAILNILWCDFDKSIPLKNLTFNSSAVFTDICSYPEYFVFTGVLAMVTCAVFLRLNSVLKLAVLLIMIAIYALLTETVYAGLFLRYDNLNHSGEDFLGTKEVSLLLMAMFLLAVFYHGQQLEYTARLDFLWRVQAKEEINEMKELREHNENMLRNILPSHVARHFLEKDRDNEELYSQSYDAVGVMFASIPGFADFYSQTEMNNQGVECLRLLNEIIADFDELLGEDRFQDIEKIKTIGSTYMAVSGLSPEKQQCEDKWGHLCALADFSLALTESIQEINKHSFNNFELRIGISHGSVVAGVIGAKKPQYDIWGKTVNLASRMDSTGVSGRIQVPEETYLILKDQGFAFDYRGEIYVKGISEQEGKIKTYFLLGRVQPNPFILPPRRLPGQYSLAAVVLGLVQSLNRQRQKQLLNENNNTGIIKGHYNRRTLLSPSGTEPGAQAEGTDKSDLP

SEQ ID NO: 3108 - DNA, 13553 bp, Rattus norvegicus
  ref <308>: DATABASE ACCESSION NUMBER: EMBL / L27075
  ref <309>: DATABASE ENTRY DATE: 1999-06-29
gatcatccttcctgaggctcctgaatgctgaatacctgaatcccttcccacagctgttctccatccgtgagtggggaccctttaggggggctttgaatgaccctttcataggagttgcatgtacagatattctgcatataagatatttacattatatttataacagtataacagtagcaaaattatagttataaagtagcaacaaaataattttatggttgaaggttgccacaacttgattattaagggtcacagtattaggtaggttgagaacactgctttactacattctgctgaaggttctttttctttctattgtttttgtttgttcgtttgtttgttttttctgtgtgtagccctggtggtcctggaacttggtttgtagaccaggctggccttaaactcacagagatccacctcgctctggctcgcaagtgctggaactaaagatatgtgccaccatgctggactaaaggttattcttttctaaccaaagggataaccaaattcatagagctctacctgcctataaaaaagttattagtgtgtacatgtaggggggcacagtactacagtgtatgtgtgtggaggtctgaggacaattttgtggagccgtttttctttaattgcctatatgtgggtttagccatggaactctcatctttttgcatagtaagtcatttacccactgagccatttgtctgggacactccactggtgattcacattaactagttttctaactagcctgtgaagaccagctagtcccaagggttcatgttgttattccagcatttgggaagctgaggcaggagaatagacatttgaagttgttctcaatttatacaacgagtttacaaacaacctgggctacatattaccctgtctcaaacagaaaaataaatgaccgtaaaagctctgatttctgtcctccagggcctgaatttgagcaacttcatagaagacatttacttagggagaagtgatccctcacagagatttgggtaggttctaggcctttctctcaacttcaggagcaaggggcactataaactgttatttctaaagaataagtatgagggaagggaccaaaaaaatgacatcatcaaggagcacacgctggtcaagcatgggtgtaacaagttcagccagcctttggaggagggcttgggagtgggggaggggggcttgggaaaagtgtttgcccaggagagtgttgcaacattgttgcagggagcttttgacccagggtttttgccagggcatagccatgccacgctgattctctgcactctgggctgatgcatcacctgagccgattagaggatgattctggcctccttcctagagctggaaaattgtttgtttctgggaccgtctgggaagacatactgggactaaggtacaagcaaaagaggctttcactccagggaagcagtaaatcggagttctgatttccaggacgttctgattttatatattctgctccacaagtcgggcacctgttagactgggtgctccacttttggatttggaaaatatgttctacctctcatatgtaacagaaaagaagaggaagctgttcattgctttcagtgtcttagtttgagttgtgggagggagcaagaggttggacagggatggccccagtgctaggttttaatctcagataaatgatcagctccgcccagatccgcgctcaggtgagcccgtaagaggactcgcgttggaactggcgtccttctggcctcactagtttacctcttcctcctatctatgttctacgtcgggcagtctgattgtgtagcgtggtcatgtagtctgattctagtaaattctatggggtgggtttcaggagcggagaggcgccacgtgtgaaaggaaagcagacgtagctttccaaagcaggtctaccgcactggtttggtgtggcgacttacaaacgccagagataagaacgtcagttgctcccaggggagggagggaggggacgccaggtcccgggagaagtgctactgccttttgggccaacaaccccctcccacagctacccaatccagcagctggccggcccagcccctgaagcgatcaggccacagcccccagcctcgtaggttctcctcctagagctgccccgcccatctccccatcctaggccgcccacggcccctcccacttccaagactacaagtcccgtcagccccgggtcaggcatgagggcggggccacgcagcagcgaatggggaggagcctagagctcaggctagggaacgcgtgtgcccaatcgccaggctgcatggcctgtgagctgatggggggcggggaggagcccgcttgggccgggacaaaagccggatccccggcagctgcaggcggctggagcgatccggggagttggggtaagctggtgcttacggacagagagccacactcgggctttctcgaagaggtgagtactgcaatcgtaggcgcgggtgcgaccccctagtccccactaagcttcctgcttccctcccccaacccggaaccacctccgggctcgctggctggaagatcccgtgcgctccctgcacctgctcggaagttttgtgcgggtctcagctttatagcagtcttcgccccagccgcgggccgcatgtctacactgcccccccaccctcagtctttttctagttcctgggagtttgcacattgcttgccaccgaccttgcttctcctccctcctccggattgcctttgcgtgtcctgcttcttctcagctccacccaggaccagctcttgagtctcttcgggttttttgggacacttttttgggccccattcgggttcactaccggatgccggggcgggtagtagagatggcggtggctactctccccacgccggccgctcacaaggcggactcaagcaggcccgtcctcttagttctctggtgaatcccttaagctctatgtcgaagtggagcgagccggccctgaccacgcggggtcgtgctgcttaagagtgcctgaggccttgctgcgaggacttgactccggagcggcggcgctggttgggctctccctgctaaggagctccctaccggtgtagcccccaaacaacagatggtcagagtgctctggagtctggatgagacaagctcctagggtgtgtgtatatgtgttcgtgcgcgcgcgcgtgtgtgcaaaagatgctacctctccctcctgtcaggcctgacagaggtcggattcccaaagcctggtgctttctccagtcttgaagttctgccatgaggggatccctcctgatataattttggaaaggacagcataagggactttagtctgccagcccaccctgtctgtccccgctttaacattgctcagtattttgggtttctttaatatcgagagataacttcccgggaaggatcatttccacctcttagaaagctgcttaaacatccctccggaggttggggggcgaaggaggccttgaagacagagtagctgctctttttaaatctccatttaggcactgtctgctgcagcagagaattctcaagagaattttgccctgttcctttgctatagggattgcttgcttgtcgtgcccttcctcccccccttcccagcccttaaagtgagagtgttttgtccaccctaagaaacatcctcagtgggtcccagaggagctttcttttttttttttttggttctttttttcggagctggggaccgaacccagggccttgtgcttcctaggtaagcgctctaccactgagctaaatcccagcccctgaggagctttcttaaaaagcagtcttcattcattctcctttcctctgggacttgctcctggggctctgtgagtgaatgcagtcctgggtcactcactgtagaaaatagccctttcaactcaaaagcctccctttcttggagagagacagagagagagagaatgtgagtgtgtgtgttcatatatgtacgtgcatagatgcatgcccatgttggattcttaggcatggtttcccatgaagagtttgcaggttgttaccaggtagcattttgatcagcagctgagaaaggctttgggggtgtgtgcagggggtctccgatcccagattcggatgtcctttgtctcactgtccctaacgacagaagtttccatgagtttgagtgtgtgcacacttccctcgggttttccaggctttttagattctgaaaggaattatgagaccacaaggatccattgctctagagagcagcgaatcgatgactgaagttttgattgatctccactgaggcctccctggatggatgagctatactgctgagaagccaggcccttcctccagttagtctatgagccctttgtctggcctaagccacagtactctggtggcacatcttgttttggtaaactggcaaattgttcctgtatcgtctccctgttatgttgtctcctgacagaagacatccttctgcataaccccgcactaagatccgagacctaagaaaattgtgatttccttcatttgctaaggttgtcctttttccttcatctttcacttagttgggtcttgggtctcttttgggaggtactacgtcctggggactgttgtcagtttcctgtcaactgtctttatgagtaggcttggcctaggggcttcctttctcctgcagtgtgtgatcctgtttgttgaaggtgtacgagtggctggaagtggtcagtgtcgcccccctcccctttctgattaaggtgccctggcttcattctgtttgggaggtgggtaggggtgggtgtgcccattcgatttcaggaccagtttttctggtctgagtcgagaaggttgggaaatgtaagtggagtgggtgggggtggaggactctggggcagtggggctggttgggatatctcagtcagaaacaaatgaaggaggaattacaagccatcccaggagaagcccctttccagctacccactttgaaccaggtcccaagctgagtgtgcccattgtggtgaattagagacagaaggtggcggcccagccaggactagcatctgaagcctctccagcgtggcctgttgcagggagttcagtgtggccctgtgacacttggctttcctgggctaggagagaacactagccttcctggatgtgtcagcctgccagctccttaactccccctccttacgtgtacttgactttctctcttgaacaaattcaacagcttccactttgtctctttgggagaggcaggggcaacttgtctagatctaggcatgcacttggcataataatggctttcgttctccatctcatctcagtgttctccacaagcagctctggggagagagggtgtgtctgcaaggtagtgggcaggaaggatgaaagaatatgccttagagattctctggagtcgaggggggccagtcttgggagaaatggcctttctgttgggttgcagtagctgtttcctagagactcatttggaagagtgttaggacccaagtcctaactggtgagtcaggcttcttgggcaagttcattccctcccgctgaatttttgattcttggtagaagaaatgggattgtgaatcttagtggacttgaagcgctcacgtgagatttagttaatctcttccagggctggggagcaaacccagggccttatgtgtgttgggctagcactctaccaatgagcttcatttgcagctcctaagaggagtttctctacacgttaccaaagacagcttgtgccttctccccagttctggcttagtcgaggaatgactattacagagtggtccccagagagacctctgttttgcttagagggttttgctccacactaacagctaagatgactcaatgggtggatgagatgatccgtaggtcatagtttcctgccctgggactgctatgtacttggaggtgggagtctatcctagtaggaacgagctttgaggtaacttcctttcctccctcccatcccaccagggcctgtactctattagggcacaggggatatatgtgagtcagcctgggagtgggaagaaacctggggaggaaacaaggccagcagtgttctaacaggtcataggacataaagagtagttcagtgtgtctgggcccaccttcgagaacagtattcacatttggatctggctcttggagttcctagcttcccctttgatctgaatttttgctctggactgaaggtggttgtggccagctactttgcccagagggaatagagacaaggttaaggggaataagagacaaggttaaggttaagccaagaggaattgcactttttttttgttgttgttgtttgttctcccttccccttcccctccctccccctccttggctcccttcttcctttccttcctctctttctttctctttttgagaccagatctcatatggcctaggctggccttgactctgtgatccttgcccctctacctcccaggtgaggggaattatgggaagacactactgaatctggcaccaccttcatcgtttttaaaatttcttcacctccaggtctaaatctgtgctgctgacagtgaagctgcttgggccacaccttccatcccctcctgtcagggctgcctgccctttttcttcgttttgagaaaagtcaagatctagttttattgtctgggggcagctgggaatagatccaacctgttggggggaagattgtgccttggcctttcttcccaaactgaccaaccgttccccatcgtcgtccccttgcaggtaaaccaggtccctctgcagccatgtcagccaaggcaatttcagagcagaccggcaaagaactcctttacaagtacatctgtaccacctcagccatccagaaccggttcaagtatgcccgggttactcccgacacagactgggcccatctcctgcaggaccacccctggctgcttagccaggtaagcccttattttcagctcaggctctgaggaggagaaagcctttgatttgtcggaggtgtcccaaggagttccatgattgcagattcctctgtgtctgcagctggctgagcagggtcttgccttgactctgggcccttcctttggaaccagacagactggtacccagatcacacctccatttatgaaccgcgtggcctggggcgaatccatttcacttcccttgagttaggttccccacctgtcaaatagggttgacactttatgagctataaggattagcaggaacacccaggaagcatttactgtgctgtccagcagttggtagaagctcagttaaaaaaaaaaatatgcctggtgtggtggtgcctttaatcacaacacttgggaggcagaggcaggaggatctctgtgagtttgagaccagcctggtgtacaaagtgtccaggaatattacacagagaaaccctgtcttggaaagcccccctccaggctcctcccccacccaaaaaaggcttatacctacctcccttccccaaagtggaacatctcaggacatttaagaagtgggaccttcaggctagagagatggctcagtggttaagatcgagtaatcttcttgtagaggacctgggtttggctctagtttccacgttgcagcttacaaccatgggtaactctggttccaggcgagctgatgtcctctcctgcatacatgtaggcaaagaacacctacacataagaatgaatgaatatgggttcggtccccagctccgaaaaaaaaagaaccaaaaaaaaaaaaaaaaaaaagaatgaatgaataaagaaataggaccttgtactttgtgaaaatggctgatgtctgagcatggaggagatcagcctggagttgacgatcccaccatagcatttttggggtggcttcgggaagccctagacttctttggcgggcctagacaaggccttatggtgtttcgttttttcctttctgaggcagctgggatggtagtgaatttcctgtctgcctgtcccctgatggtcaagagatttggctggggtagtcaaggaaagtttccggggcaggaaagtggccctagaggataaatgtctagctagatctggaagcggggtgatcaaagctatacaatttcactgctacatccccgtttccttccccaactccttccattccagagcttggtagtcaagccggaccagctgatcaaacgtcgaggaaagcttggtctagtcggggtcaacctctctctggatggagtcaaatcctggctgaaacctcgactgggacatgaggccaccgtgagtcctggtgtggggtggggaggggtcagggtggtaacaagcagcatggtgacctctagatcaaccaacctatggctcataacctaaccagtcacatagcaacagagaaaaagatggcgtgcacactgccctggctgcagcccagtcttgccggtgagaagatcagtccactgatagtgttttagataaggtgcactgcggttgtaagcccagaacagttaggaagctagaagctgtgaccaccagcatggagatagggctcgtacttactctgagaactgcctgctctccagtttccaaattcagttgtgtgagtttgggatgacgtgcgtaccaggaggatgggagtaaaccgagatggaaaggggagccacatcattattaggcaaaaaagatacgctggtgggagagccatgggtggagacagttactaatgctgaagacttaattcagttctcccacgtccgcgattcctctcagctatgaggatgagagctgagatgaaatgtggcttaggagggttggggatttagctcagtggtagagcgcttgcttagcaactgcaaggccctgggttcagtccccagctccgaaaaaaaaaaaaaagaaatgtggcttaggtaggctaagctgtgctctgaactgtttcttctctttcacagtcttcaaggggggtgggtctgaatcttggcctagcctaggaaggatgcgtttctatctgcttggcacagaatcccgcagatactggtgcttgtctgggataggcatggtcagagaagagctgtttttttttttcctatggctgccctgggaggtggcagtacccattttcctccatgttgggcttcctcaaagcagctcctactgtttgtttccggtccttgtgggtaaagacagatctttgaagttgtgtccaggaatggagagatctgacctctgggttctcaggcccctggggagagagtggcagggctgggtactgaacagtgcccccagggagcaagcacatcatgctctcctccctgcaaactgatgggagggagatgtcacggacatctgagcttggcagcagtgtcagacctggctggagcggctcattacctctgatggatcactgtctggtccctgactcagcagtgatgcacggcaggcggggggcaggtggggggactggggatgaggcctgtctcgcctttcctgccgccagggacccactcaagctgattagctctgcaggccggctgtcttcagccaggaaacacaggaggaaaaagtttacctaatcagccttgggctctcttctctcccacccctcaaggcctagatgcatgtcctcaggctgggtcactatgtcttcctcagggcaaagtagtgtgccgtcaccatcatacccaagttcccatctcccttcttgactgcctgggctagggagattgatcagtgggcaaggtgcttgtcaccaggcctggtgacttgtgtttgatccttgggatccataaggtggagggagagaaccatcttgagttaccctcacatccccactccttgacatgacattcgtatgttcctgtcctcctccccaaacataagtaaaaatattcacgcaaagaggggatcttctaagaactccttaagttcatccgggaccccattgtcctgacttgtggacaagtcactttgccagatgtggtggtagtgcttgggccttgccttcgtgaagaatgtaccacacatctaagcggcatctccctcaatttctccttaggtcggcaaggccaaaggcttcctcaagaactttctgattgagcccttcgtcccccacagtcaggtatgtgaggcagtgccaaattggatcttcttcctccttcagctttctgattgtcctccaaaaatgttgaaaggagaggttacggtgccaaggggagaagccaagggcacaagccaagggcaccagggtctctaaagctccagctgaggcctggaggaaattatgagcaaggagtccagagatgaaggaaggcttggtttgcagcagagcagctagagcaggtaacagggacttcctgttgttggggtcaggacttgagggcaggaccccttcccaagatgggacccagttgaggaagttgaggcctgtcttttgcttgtcgcctaggagaaagtagcacgcagatcgtggggtgaatactttgtgttaggatttagaaatgagaccacagggcttgggttccactcctgggtgaagccctctgaccccttgccagttgagcacccttaccatgctctctgcatgctctgtgtccttgaaaggtggaggagttctacgtgtgcatctatgctacccgggaaggagactacgtcctgttccaccatgaagggggtgtggatgtgggcgatgtggacaccaaagcccagaagctgcttgtgggtgtggacgagaaactgaacgctgaagacattaagagacacctgttggtccacgcccccgaagacaagaaagagttgagttctgagagggacagtgtgggcacagccgggggggggacaagaagtccagtgtgacttcaggggacataggagagagaaagcagagtggaacagctggcgggcatagctctgtcttgaggaaggtagccacttgtgtggggaggctgctgccttgcaatcagtctgcagcatgccagtctcatccctcacctcttgcccctgtctgtctgtctggtgctccctctgtctctgagcttgacagcttctttccacctctgtgtgaggagtgacagccagggagcagggctggcagaggacagtgggggccaaagggtcaggcgtgaagtggggctgaactgtcagacagtgagcctgctgtgtgtaggtgacggggtgggaatgggagctgggtgcctcgtcctgcactgactgattaactggccttctttccctctcccttctagaatcctggccagcttcatctccggcctattcaatttctacgaagatctttacttcacctaccttgagatcaacccccttggtaacatgctttgtttgctgggacgggatggggatggggtgctgcccccatgcctacagtaactctggccctggtgccagaaggcagtacaaaacttctgtgggtacccagggtgtccccataagggtggtctccagtgtcacctccggtttctaagcacccgggactgtaacttattcataccataaccaactgcagcttctttctctggccctaatttgtcctgctctggggaatcctggctttggactgtctatggtgttgtctctgcctgccagttaggctccccaggctctggtctgatcctcctggtacctggaggcctctctcttgggtattggtcaatcatttactacccctaacaccaagaagagctggctgtaggctctcaagctgtgaaggaggcagatggcctggcagaatctggctaggcctctcagggcaaagtccatgaagaagggaattaccaaatttcagctgagaatgcagctcctctaatgggccagatggctgtgtgctaacttaattagctaaatggcgggggacaaatatggatgctcaggtggaggaattgcagatgaatgtgttgccgggggcccagagcactctggggtaccttgcacagacactgagacttcctcagctagaccacagaagcccgggatgtgcacaccttctggtagtagaggtttatgaatggcgtgtgatgctgtgctgctacttgggtttgaacccaaaacctagaccaacagggctcttcgtcgttggtttgggttttgctgttgttttgagttagggccaagtttagtccacactgtcctcaaacccactcactatagccgaggatgagcttgaacttctgtcctgattcccctgtgcttccgtacccggcttccacagttgttatttaagttaattttaaatggttaaagattattttattgatgtctttgtgaggatgtgtgcctatgttggccagaaaagtatgtctgacggctggagttacagttttgagctgcctcacgtgggttctggcacttgaactcatgttctgtagaggagcagcaagctctctttaactatctctcatcccctagttagtattttcttatatatttgtttatttccccccctgtgtcgcgtgtgcgcgcgtgaagcagagaggacagcctatgagagtccggtctctgctcctaccatatggcctggaggcaaatacctttctgcactgatcaatctcacagtcttttatttattctttaatatattatttggtataagggattgaacctatggcctctcccatgtactttttttttttttttttttttggttctttttttcggagctggggaccgaacccagggccttgcgcttcctaggtaagcgctctaccactgagctaaatccccagcccctcccatgtactattaaccccagaaaacagggtgtttttgtttgttcgtttgtttgtttgtttttcatgtcagggctatgggtaggccagtgcttgagtatttaaagcagggagaatggcattcttttgaagatgtcccaaaacttgctatgataactaacaggtctcgtttgacctgttttcaggtcagtgagtggggactgttctgacaggattttccttgtgctggcgacgtatcacaatacgtggttattcggtgtgtgtgagagggcactggcgggagtctggaggggtggttggagagttggtgtctgacactgttttacttttctcctagtggtgaccaaagatggtgtctacatccttgacctggcggccaaggtggacgccactgctgactacatctgcaaagtcaagtggggtgatatagagttccctcccccctttgggcgtgaggcatacccagaggtaaggcagctttgggaaggagatagagggtgatggggcctaggagacagtgactaatcctagatgatcatttggtcccctttttggctctgtatttggcaggaaaggaaagacagagagccatttaattttcttaaaaccccagtgaggttgggggtcggggtggaaatcagccaaggtcctgaatcctggccagaaacccttttagacagcgctctcagtcagcctccccgggcttctgacttgatttgctgctccttgattattccaagtggctcttcccaaccctgatgggaaggaaggttcttctcctggccactggctgagaattttaattgctgcttcccatcccatcctctgagaggtcctcccagcagg

SEQ ID NO: 3109 - DNA, 2622 bp, Rattus norvegicus
  ref <308>: DATABASE ACCESSION NUMBER: EMBL / L27112
  ref <309>: DATABASE ENTRY DATE: 2000-03-04
tgtatgacactacatcatgagtgacagtaaaagcgatggccagttttacagtgtgcaagtggcagactcaactttcactgttctaaaacgttaccagcagttgaaaccaattggctctggagcccaaggaattgtttgtgctgcttttgatacagttcttggaataaatgttgctgtcaagaagttaagtcgtccttttcagaaccaaacgcatgcaaagagagcctaccgtgaacttgtcctcctaaagtgtgtcaatcataaaaatataattagcttgttaaatgtgttcacaccacaaaaaacgctagaagaattccaagatgtgtacttggttatggagttaatggacgctaacttatgtcaggttattcatatggagctggaccatgaaagaatgtcatacctcctctaccagatgctttgtggcattaagcacctgcattcagctggcataattcatagggatttgaagcctagcaacattgtagtaaaatcagactgtactctcaagatccttgactttggcctggcacggacagcctgtaccaactttatgatgactccctatgtggtaactcgctactatcgggctccagaagtcatcctgggcatgggctacaaggagaatgttgatatctggtcagtgggttgcatcatgggagagctggtgaaaggttgtgtgatattccaaggtactgaccatattgatcaatggaataaagttattgaacagctaggaacaccatccgcagagttcatgaagaaacttcagccaactgtaaggaattatgtggaaaacagaccaaagtaccctggaatcaaatttgaagagctctttccagattggatatttccgtcagaatccgaacgagacaaaataaaaacaagtcaagccagagatctgttatcgaaaatgttagtgattgatccggacaagcggatctctgtggacgaagccttgcgccacccgtatattactgtttggtatgaccccgctgaagcagaagcgccaccacctcaaatttatgatgcccagttggaagaaagagagcatgcgattgaagagtggaaagaactaatttacaaagaagtgatggactgggaagaaagaagcaagaatggggtgaaagaccagccttcagatgcagcagtaagcagcaaggctactccttctcagtcgtcatccatcaatgacatctcatccatgtccactgagcacaccctggcctcagacacagacagcagtctcgatgcctcaaccggacccctggaaggctgccgatgaaacctcgcagatggcgcacttgtctgtgaaggactctggcttccatggccctgagcacatgggagctggtggaacaaatcaagaagctccatgttctgcatgtaagaaacacgacgccttgcccccactcagttccagtaggattgcctgcgtagactgtaacatgaggcagacgatgtctggagaaaaagtacaaaccacactgttagaaattttgttcaagatcattcaggtgagcaattagaatagccgagttcttttcaagtcgtgtggtgtccttggtgacagatcatgtgtaactgtggggactcgtatgcatgtgaccacaaatgcttgcttgaacttgcccatgtagcactttgggaatcagtatttaaatgccaaataatcttccaggtagttctgcttctagaataatctcttaatcctctttagtaatttggtgtctgtccacaaaaaaatagattatgtgtgtatgaattggccactatcatattatcatattttacccacttttatggtatgatttattctgtcttttgtatttcagaaggaatataattaaatttatttaataaataaaactacagcttttcttaaatttgtgatgttttaggctgagaattaccactgctttatatcgacactctgtgtcctttaaactgcccactatgggaaactttacgtacagctttctgcatgacaaagttccaagttgtatttcactctgcttaacgacttatgtcaccttgaatcctgaccacacatttcctttttcttggtcctctgaacttggatctagaatccctcacagaacttcaccttctttatcacaaagcaccccatctcagtagaatgaatcggcagattcctgagccccgctgcctaatgtagagctgacagggtggcttccccagaacggtgggtgggtgcatccttccctgagcccacccatcctttgctcccctctctttatttaaggtgaaaggtgattgggtctcatagcctttccttttgtagcattgcctaacttgtctttctcactgacagaagccaccacgtccagccagagcacatggtctcttaggagaccgggcttacttaccatgcatgtttgctgctgtccttttccattttgtggaggcatttcctttttctaagggaattcctcagatgttctagaaacattcagaagaacgcagaagaaatattctagagaattgggggttcattcttgaatattttctgatttaaaactgctcacctgaaattgatactttcagatcctgatcttgtaaattactcgagatttggtaagatgctgagttctctgt

SEQ ID NO: 3110 - protein, 423 aa, Rattus norvegicus
  ref <308>: DATABASE ACCESSION NUMBER: SWISS-Prot / P49186
  ref <309>: DATABASE ENTRY DATE: 2002-06-15
MSDSKSDGQFYSVQVADSTFTVLKRYQQLKPIGSGAQGIVCAAFDTVLGINVAVKKLSRPFQNQTHAKRAYRELVLLKCVNHKNIISLLNVFTPQKTLEEFQDVYLVMELMDANLCQVIHMELDHERMSYLLYQMLCGIKHLHSAGIIHRDLKPSNIVVKSDCTLKILDFGLARTACTNFMMTPYVVTRYYRAPEVILGMGYKENVDIWSVGCIMGELVKGCVIFQGTDHIDQWNKVIEQLGTPSAEFMKKLQPTVRNYVENRPKYPGIKFEELFPDWIFPSESERDKIKTSQARDLLSKMLVIDPDKRISVDEALRHPYITVWYDPAEAEAPPPQIYDAQLEEREHAIEEWKELIYKEVMDWEERSKNGVKDQPSDAAVSSKATPSQSSSINDISSMSTEHTLASDTDSSLDASTGPLEGCR

SEQ ID NO: 3111 - DNA, 1782 bp, Homo sapiens
  ref <308>: DATABASE ACCESSION NUMBER: EMBL / L31951
  ref <309>: DATABASE ENTRY DATE: 2000-03-04
gggcgggcgagggatctgaaacttgcccacccttcgggatattgcaggacgctgcatcatgagcgacagtaaatgtgacagtcagttttatagtgtgcaagtggcagactcaaccttcactgtcctaaaacgttaccagcagctgaaaccaattggctctggggcccaagggattgtttgtgctgcatttgatacagttcttgggataagtgttgcagtcaagaaactaagccgtccttttcagaaccaaactcatgcaaagagagcttatcgtgaacttgtcctcttaaaatgtgtcaatcataaaaatataattagtttgttaaatgtgtttacaccacaaaaaactctagaagaatttcaagatgtgtatttggttatggaattaatggatgctaacttatgtcaggttattcacatggagctggatcatgaaagaatgtcctaccttctttaccagatgctttgtggtattaaacatctgcattcagctggtataattcatagagatttgaagcctagcaacattgttgtgaaatcagactgcaccctgaagatccttgactttggcctggcccggacagcgtgcactaacttcatgatgaccccttacgtggtgacacggtactaccgggcgcccgaagtcatcctgggtatgggctacaaagagaacgttgatatctggtcagtgggttgcatcatgggagagctggtgaaaggttgtgtgatattccaaggcactgaccatattgatcagtggaataaagttattgagcagctgggaacaccatcagcagagttcatgaagaaacttcagccaactgtgaggaattatgtcgaaaacagaccaaagtatcctggaatcaaatttgaagaactctttccagattggatattcccatcagaatctgagcgagacaaaataaaaacaagtcaagccagagatctgttatcaaaaatgttagtgattgatcctgacaagcggatctctgtagacgaagctctgcgtcacccatacatcactgtttggtatgaccccgccgaagcagaagccccaccacctcaaatttatgatgcccagttggaagaaagagaacatgcaattgaagaatggaaagagctaatttacaaagaagtcatggattgggaagaaagaagcaagaatggtgttgtaaaagatcagccttcagatgcagcagtaagtagcaacgccactccttctcagtcttcatcgatcaatgacatttcatccatgtccactgagcagacgctggcctcagacacagacagcagtcttgatgcctcgacgggaccccttgaaggctgtcgatgataggttagaaatagcaaacctgtcagcattgaaggaactctcacctccgtgggcctgaaatgcttgggagttgatggaaccaaatagaaaaactccatgttctgcatgtaagaaacacaatgccttgccctattcagacctgataggattgcctgcttagatgataaaatgaggcagaatatgtctgaagaaaaaaattgcaagccacacttctagagattttgttcaagatcatttcaggtgagcagttagagtaggtgaatttgtttcaaattgtactagtgacagtttctcatcatctgtaactgttgagatgtatgtgcatgtgaccacaaatgcttgcttggacttgcccatctagcactttggaaatcagtatttaaatgccaaataatcttccaggtagtgctgcttctgaagttatctcttaatcctcttaagtaatttgg

SEQ ID NO: 3112 - protein, 424 aa, Homo sapiens [sequence omitted]

SEQ ID NO: 3113 - DNA, 2622 bp, Rattus norvegicus; identical to SEQ ID NO: 3109
  ref <308>: DATABASE ACCESSION NUMBER: EMBL / L27112
  ref <309>: DATABASE ENTRY DATE: 2000-03-04

SEQ ID NO: 3114 - protein, 423 aa, Rattus norvegicus; identical to SEQ ID NO: 3110
  ref <308>: DATABASE ACCESSION NUMBER: SWISS-Prot / P49186
  ref <309>: DATABASE ENTRY DATE: 2002-06-15

SEQ ID NO: 3115 - DNA, 1782 bp, Homo sapiens; identical to SEQ ID NO: 3111
  ref <308>: DATABASE ACCESSION NUMBER: EMBL / L31951
  ref <309>: DATABASE ENTRY DATE: 2000-03-04

SEQ ID NO: 3116 - protein, 424 aa, Homo sapiens [sequence omitted]

SEQ ID NO: 3117 - DNA, 573 bp, Rattus norvegicus
  ref <308>: DATABASE ACCESSION NUMBER: EMBL / L27421
  ref <309>: DATABASE ENTRY DATE: 2000-03-04
atggggaaatccaacagcaagttgaagcctgaagttgtggaggagctgaccagaaaaacctacttcactgaaaaagaagtacagcagtggtacaagggtttcattaaggactgccccagtgggcagctggacgccgctggcttccagaagatctacaaacagttcttcccatttggagaccccaccaagttcgccacgtttgttttcaacgtcttcgacgagaacaaggatggcaggatcgagttctccgaattcatccaggctctatcggtgacctcaagggggaccctggatgagaagttgaggtgggccttcaagctttatgacttggataacgacggctacatcaccagaaacgagatgctggacatagtggatgccatttaccagatggtggggaacaccgtggagctcccagaagaagagaacacaccagagaagagggtggaccggatcttcgccatgatggataagaacgctgatgggaagctaactcttcaggagttccaggaaggctccaaggccgacccctccattgtgcaggcgctgtccctctacgacgggctggtatag

SEQ ID NO: 3118 - protein, 189 aa, Rattus norvegicus
  ref <308>: DATABASE ACCESSION NUMBER: SWISS-Prot / P36610
  ref <309>: DATABASE ENTRY DATE: 2002-06-15
GKSNSKLKPEVVEELTRKTYFTEKEVQQWYKGFIKDCPSGQLDAAGFQKIYKQFFPFGDPTKFATFVFNVFDENKDGRIEFSEFIQALSVTSRGTLDEKLRWAFKLYDLDNDGYITRNEMLDIVDAIYQMVGNTVELPEEENTPEKRVDRIFAMMDKNADGKLTLQEFQEGSKADPSIVQALSLYDGLV

SEQ ID NO: 3119 - DNA, 4341 bp, Homo sapiens
  ref <308>: DATABASE ACCESSION NUMBER: Refseq / NM_014286
  ref <309>: DATABASE ENTRY DATE: 2002-11-05
ccggcccggcccgcccggcccagccgctcctgctgggcgccccaaccgggtccggcccgggggggcgggggccgcggccgccgaggatggggaaatccaacagcaagttgaagcccgaagttgtggaggagctgaccaggaagacctactttaccgagaaggaggtccagcagtggtacaaaggcttcatcaaggactgccccagtgggcagctggatgcggcaggcttccagaagatctacaagcaattcttcccgttcggagaccccaccaagtttgccacatttgttttcaacgtctttgatgaaaacaaggacgggcgaattgagttctccgagttcatccaggcgctgtcggtgacctcacggggaaccctggatgagaagctacggtgggccttcaagctctacgacttggacaatgatggctacatcaccaggaatgagatgctggacattgtggatgccatttaccagatggtggggaataccgtggagctcccagaggaggagaacactcctgagaagagggtggaccggatctttgccatgatggataagaatgccgacgggaagctgaccctgcaggagttccaggaggggtccaaggcagacccgtccattgtgcaggcgctgtccctctacgacgggctggtatagtcccaggctggagctggatgcctgggaaccactcacctccttctgtgccatgaggccacctcagccctgacaccaaccccgtgcgtccacccagccttcttccgcatccacacacagccggctgcccttgacccgggaggccccggctctcctctcccctgtcctgcacccatcccccgcctgaagccaccggctccaattgccagcaacctctgcttgtccggaaaacgacaacacgaaatggaaaaggctacagccctctgcataaaccaaggacttggctgcctcgcaggcagcctccgttcctcccgctctcttgcgcgtgtgcttttgttttttattttgaacagacgttttaaaagaaaaaaaaacaactaccttctgtcctagaagacacagactgacagatggggtgaaggcctggggacctcagagaactctgccttgccctcgtccctcgtccttcggcagccggagaggctgtgggtgggccgagggtgtctaggggttctgcctagtcaacgttatttgtcgtcccatcttttggcagcaaaaccacctgcgtggctaggatgattaattatgaggatgatgattttttttgtgataacagtattgtgctttttgtggggaaagtgaggttttttttttatatacatatataattgatatctttaatttattggttgttaactgttgctgctgcctggtgtgtcctcagctcccagggctgcgggcccaccgtttacatgtgcacgccctgacccacctgcccacgccgacttgggaggatggtggcctgcagcggccaagaagccaaaaaaaattttttttttttcagatactgtgcttgatttttggagaggggagaggtggaaattcctaaatggctaatgcactgttccctccagcccgaatgcctcctgccaaaccccttttccctgctgcctctgtccccgcatccttgttctcccctgggtccgtaacattttttccgaggatgaacaggggacatctttaggtttctcaactcttgctttggtgtttgccgcagcatggaaaacagggcgcctaaggctgggagctggaagaaggggcattgggtacccaggcagagtcaggagaggtggtctttgaagtaagttagcagaaatcaaggggacccccgcctccttgggctggggaggggatttcaagatagttcataactctctcccgctctgccttccctccttcctatctgctttttccagtaaactgcatggtgtccttccctggccttctcttggctcaaaggctgggagggagggaaggagagaagagttccaggcaatcccatcaatatagtccctacacctggggctgcggcccacatgtcttcacggaggcttccagcggtgcctgccactgaggcaggtgcggccccaggaccatcaccaggaatgcgaggccaccctggaccagaggtaggagcccaaggtccggcccttgctctttgattgtgggcagcctcctgccctctctgggtctcagttgccccatctgcagagcgaggaggcccgggctggttggtcttgaaggcccttttccatgccgacatcatgtcactctaggcctggggttcagtttcctgtggctggtgatgctgtggttaagtttgcttgaccccagcagcccgagggactgtctgagtcacagcacagcccctattgcgtggctgctggtgtgtggggtcagttccagcagatgaatgtgtcatgtggcacaccttgtcccttcccgcagcatttcctggttccccccagacccttgagcgctctttgggacccagaaggagtccttgcacagggaaggcttgaggtgagaagccgcttcccagactgtcagggccaggcctgggtctagaattcttgctgctgctttgcagagtcaacagcccatcagcccatgttttagaggggacactttggtcctcggttcccaccctcagcaagcaggcctccagcccgaggaaggcctctgccgtagtgacgttgccgtgtggggctgcgtggctgttccccttggctggagcattcagccaaccccagcgtcccccctgaggcgttcattggcagccccctaggactgcacgctggccccacggtaaccccccctcccccaccaacatcctgcagggatggggtcagtggttccaccttcacaggccactttgaagggtggattctttgaggcccctgccagtcggctccctgctcagctgctggcccgggcgacctgggactcagcaccaacggctgaagtttctcagctgggctctgacctggggtctggggcagggaacgaacatggtggctttgggctgagaggatgagggaggtctttcccaggtcaaattactttcctttggcctctgcctgaggctcgatttgcctctctggtccaatgggactgacactgttgtacaacctgacctgtggctgagggtgtctgggcttaagcatgtggaccccttcggtgtgtctggccttcctccatcgtcctgccctttggccttttggtttgaagccacaggtgtggcttctggccttagcagatggtatgcttgcggaccgcagcccagcatgccggtgggcccacagcccgagccagcccagagctgccggaagggccgcccttcccggccctggcggggtgctggacactggccattttcactagagtttgcctggcagggaccgatctctgccccctcctctccccaggcctctggctgcagtgatgccgcagaatcctgagccaggtgcctcctgagcagcccgtgcgcctctccacagcggcgtttgccacccaatgcggctcgcttcagatgctctgatgcagagggcacgcccatagtccctctgcagagcctcgcactggggccagggcaggcaccagccccaggcggccagtcggccacggcctgtcctcttcctcgtagcgtctgctcctcactttgtgttgatggtgacttaggagaatgttccgattttccatgatctaagcaggccacgtttaaaataacatcaaggcaagcgtacgtgtcaccctctgtactgacatctcctcccctgaaatgcttttcagtttgacagcccgtttcctagacaagtgcacctggggtttcaggaactttgtgttttttcggagggggttggtggggaggtcgggatgcctgggatcccttcctggagaggcaggctgtctctggaaaaagcctccattgcccacccgccaggcggaaagtcaccctgttcccagcgcggtttcagcatttaattttaagggagctaaggaagcgcggcgcgccccctggtggtggtaagccgccaacgcacctgggggctgcaaccccaccggacgggtggtccggagggaggctggagcggggaggcgaggagggggctgtgagtcctcagaggccctgggccaccacatttctggcagcgtttcccagacacccctctgctaggccatccctggatagcaagtgaattaacttaagggcactgtgatgggaagccttgcccccctctttttttttttttttttaatatctgcggaataaacccaatggttaatttttgaatgaataaaaggcttttgttgaataaaaaaaaaaaaaaaaaaaaaaaaaaaa

SEQ ID NO: 3120 - protein, 189 aa, Homo sapiens; identical to SEQ ID NO: 3118

SEQ ID NO: 3121 - DNA, 3185 bp, Rattus norvegicus
  ref <308>: DATABASE ACCESSION NUMBER: EMBL / L27487
  ref <309>: DATABASE ENTRY DATE: 2000-03-04
gaattcgcggccgctgctcttttcctggggtaagctatttgagaaagaaagtaacctaacactaagtgcaggcggggcggggtgatgtaacaggaagctgtgatgtttcccttctgctgctgatcgcttacaatctgacaacactccccatctacccagaacaagccctctcttcgcagcggtgcacttctgctttaggaccggcgggctctgttgcctggacctcacgctgcctgccaagaagctttttgactcttccacacctcttctccgggaactcttttctactatctcagaaaatcaaattccctcctgagactattcacacagaatttccttaggagccgtgggcgggccctatgatgatacaccaacatcttgtgctaccaactgtcaaaaactttggatggtctaacactcaggtcatgacccttgtaattaagaaattctcgaagacaatattgagcatgattcaggagaaaatgtgatttgagtctggagacaattgtgcatgtatatttttcttaagatcttaaaaagaaagagaaaacaaatccagggttgtcggtcactgattgatagaagagaaaacaatattcagacgattgcttatgattgacaagaggtcctgcggccgctacccagcttgaacatatcgcacacttcagttggactctaatgatggataaaaagtgtacactatgttttctgtttctcttgcttcttaatatggctctcatcgcagcagagtcggaagaaggcgcgaaccaaacagacttgggagtcactaggaacaagatcatgacggctcagtatgaatgttaccaaaagatcatgcaggatcccattcaacaaggagaaggcctttactgcaacagaacctgggacggatggctatgctggaatgacgttgcagcaggaaccgagtcaatgcagtactgccctgattactttcaagattttgatccttcagagaaggttacaaagatctgtgaccaagatggaaactggttcagacatccagatagtaacaggacatggacaaactacaccttgtgtaacaacagcacgcatgagaaagagaagacagcactgaatttgttctacctaactataattggacatggattatctattgcctctctgatcatctcactcatcatatttttttatttcaagagcctaagttgccaacggattacattgcataaaaacctgttcttttcatttgtttgtaattcgattgtgacaatcattcacctcacggcagtggccaataaccaggccttagtggccacaaatcctgtgagctgcaaggtgtcccagttcattcatctttacctgatgggctgtaactacttttggatgctctgtgaaggcatttacctgcacacactcattgtggtggctgtgtttgcagagaagcagcacttgatgtggtattattttcttggctgggggtttcctctgcttcctgcctgcatccatgccatcgccagaagcttgtattacaatgacaactgctggatcagctcagacactcatctcctctacatcatccatggtcccatttgtgctgctttactggtaaatctctttttcctattaaatattgtacgtgttctcatcaccaagttgaaagttacacaccaagcagaatccaatctctacatgaaagctgtaagagccactctcatcttggtaccactacttggcattgaatttgtgctttttccatggcggcctgaaggaaaggttgctgaggaggtgtatgactatgtcatgcacattctcatgcactatcagggtcttttggtgtctacaattttctgcttctttaacggagaggttcaagcaattctgagaagaaattggaaccagtataaaatccaatttggcaatggcttttcccactctgatgctctccgcagcgcatcctatacggtgtcaacaatcagcgatgtgcaggggtacagccacgactgccccactgaacacttaaatggaaaaagcatccaggatattgaaaatgttgccttaaaaccagaaaaaatgtatgatctagtgatgtgaaaatacagaaatctcacttgttttgtgtcacttgaacctatgattttatagtcggaagatttaatagcaaatgggtttcttgaataccatgaagaaagccctcaaatgaaatgagaattgtgtggataaatgtttaacaaccctctctctatgggggagaaaagcctcaatttttattgttggccagtaaatactcctaccatagctgatttcaagttaccaacctgacatcaccgaatgtggaattggaaagaaaataagcacaatcaactcttgggagctgacatgcgtcgtcaaacctgcacaacaccgcatgctctcacagatggacctgtgcacactcacacccgcactgaccagaactctgctcctctgtctgagaagatcttgctcagtcttacagacatgaaaggaaagtttggtttttgttataaaactcctcatcctttgtcatttgatggtagtgaacggtttgtccagaaacactttaaccctctttataacttctcctgtagacgagacagagtttgctatctctgtcacctcgtgttcctttctttaagaaaagcaactgagcagaattcccatgggcttctcagttgctgctacatatggttgtatcctgtggcatatccattctgaatcactagggagacgtattgatagaagctacaaacactttgtcagctacctttttgccctctaaatcttgctgcaggagtaggaggaaatcagtcttcctgaatctgtaaatagaaactttggcctttccatttctactgtgtagataagtgatcaaccattttatatgaagggaatcaatgaaggatttatttttatcttgggaatctgagagagagagagagagagagagagagagagagagagagagagagagagattgttgtacaaatgaaactgtaagtactctgtcattttattttattgtttcaaatcaaaacacaacctaagtaactgttttaaagcagatggataatgcaactttatatgcgactaggtgtctgatactgtgtctgggctgatttattttatagaaaaaatggagtactgaattctatatttggtaaatattttaaggcggccgcgaattc

SEQ ID NO: 3122 - protein, 464 aa, Rattus norvegicus
  ref <308>: DATABASE ACCESSION NUMBER: SWISS-Prot / Q63118
  ref <309>: DATABASE ENTRY DATE: 2001-10-16
MMDKKCTLCFLFLLLLNMALIAAESEEGANQTDLGVTRNKIMTAQYECYQKIMQDPIQQGEGLYCNRTWDGWLCWNDVAAGTESMQYCPDYFQDFDPSEKVTKICDQDGNWFRHPDSNRTWTNYTLCNNSTHEKVKTALNLFYLTIIGHGLSIASLIISLIIFFYFKSLSCQRITLHKNLFFSFVCNSIVTIIHLTAVANNQALVATNPVSCKVSQFIHLYLMGCNYFWMLCEGIYLHTLIVVAVFAEKQHLMWYYFLGWGFPLLPACIHAIARSLYYNDNCWISSDTHLLYIIHGPICAALLVNLFFLLNIVRVLITKLKVTHQAESNLYMKAVRATLILVPLLGIEFVLFPWRPEGKVAEEVYDYVMHILMHYQGLLVSTIFCFFNGEVQAILRRNWNQYKIQFGNGFSHSDALRSASYTVSTISDVQGYSHDCPTEHLNGKSIQDIENVALKPEKMYDLVM

SEQ ID NO: 3123 - DNA, 2187 bp, Homo sapiens
  ref <308>: DATABASE ACCESSION NUMBER: EMBL / U17473
  ref <309>: DATABASE ENTRY DATE: 1995-03-04
aattccggaggaccatcaagctctgctaactgaatctcatcctaattgcaggatcacattgcaaagctttcactctttcccaccttgcttgtgggtaaatctcttctgcggaatctcagaaagtaaagttccatcctgagaatatttcacaaagaatttccttaagagctggactgggtcttgacccctgaatttaagaaattcttaaagacaatgtcaaatatgatccaagagaaaatgtgatttgagtctggagaccaattgtgcatatcgtctaataataaaaacccatactagcctatagaaaacaatatttgaaagattgctaccactaaaaagaaaactactacaacttgacaagactgctgcaaacttcaatttgtcaaccacaacttgacaaggttgctataaaacaagattgctacaacttctagtttatgttatacagcatatttcattttggcttaatgatggagaaaaagtgtaccctgtattttctggttctcttgcctttttttatgattcttgttacagcagaattagaagagagtcctgaggactcaattcagttgggagttactagaaataaaatcatgacagctcaatatgaatgttaccaaaagattatgcaagaccccattcaacaagcagaaggcgtttactgcaacagaacctgggatggatggctctgctggaacgatgttgcagcaggaactgaatcaatgcagctctgccctgattactttcaggactttgatccatcagaaaaagttacaaagatctgtgaccaagatggaaactggtttagacatccagcaagcaacagaacatggacaaattatacccagtgtaatgttaacacccacgagaaagtgaagactgcactaaatttgttttacctgaccataattggacacggattgtctattgcatcactgcttatctcgcttggcatattcttttatttcaagagcctaagttgccaaaggattaccttacacaaaaatctgttcttctcatttgtttgtaactctgttgtaacaatcattcacctcactgcagtggccaacaaccaggccttagtagccacaaatcctgttagttgcaaagtgtcccagttcattcatctttacctgatgggctgtaattacttttggatgctctgtgaaggcatttacctacacacactcattgtggtggccgtgtttgcagagaagcaacatttaatgtggtattattttcttggctggggatttccactgattcctgcttgtatacatgccattgctagaagcttatattacaatgacaattgctggatcagttctgatacccatctcctctacattatccatggcccaatttgtgctgctttactggtgaatctttttttcttgttaaatattgtacgcgttctcatcaccaagttaaaagttacacaccaagcggaatccaatctgtacatgaaagctgtgagagctactcttatcttggtgccattgcttggcattgaatttgtgctgattccatggcgacctgaaggaaagattgcagaggaggtatatgactacatcatgcacatccttatgcacttccagggtcttttggtctctaccattttctgcttctttaatggagaggttcaagcaattctgagaagaaactggaatcaatacaaaatccaatttggaaacagcttttccaactcagaagctcttcgtagtgcgtcttacacagtgtcaacaatcagtgatggtccaggttatagtcatgactgtcctagtgaacacttaaatggaaaaagcatccatgatattgaaaatgttctcttaaaaccagaaaatttatataattgaaaatagaaggatggttgtctcactgttttgtgcttctcctaactcaaggacttggacccatgactctgtagccagaagacttcaatattaaatgactttttgaatgtcataaagaagagccttcacatgaaattagtagtgtgttgataagagtgtaacatccagctctatgtgggaaaaaagaaatcctggtttgtaatgtttgtcagtaaatactcccactatgcctgatgtgacgctactaacctgacatcaccaagtgtggaattggagaaaagcacaatcaacttttctgagctggtgtaagccagttccagcacaccattgcatg

SEQ ID NO: 3124 - protein, 461 aa, Homo sapiens [sequence omitted]

SEQ ID NO: 3125 - DNA, 1910 bp, Rattus norvegicus
  ref <308>: DATABASE ACCESSION NUMBER: EMBL / L27651
  ref <309>: DATABASE ENTRY DATE: 1994-12-22
gtccaagggtccatgtggtaagcagactgaaccgtcctagataccaaagagggacaccttgtgggtgggtagcatgggcttcgaagacctgctggacaaggtgggcggctttgggcccttccaacttcggaatctggttctgatggccctgccccgaatgctgctccccatgcactttctcctgcccgtcttcatggccgctgtgcctgcccaccattgtgccctgcccggtgcccctgccaacctcagtcaccaggacttatggctggaagcccatctaccccgggagactgacggcagctttagctcctgcctccgatttgcctatccccagactgtccccaatgtcactttggggacagaggtgtccaactctggggagcctgagggtgagcccctcacggtgccctgctctcagggctgggagtacgaccgctcagaattctcctccaccattgcaactgagtgggatcttgtgtgtcagcagagaggactgaacaaaattacgtccacctgcttcttcattggtgtgctggtgggagccgtggtgtatggatacttgtctgacaggtttggcaggcgccggcttctgctggtggcctacgtgagctccctggtgctgggtctgatgtctgcagcctccatcaactacatcatgttcgtagtcacccgtacactcaccggctcagccctggctggcttcaccatcattgtgctcccactggagttggagtggctggatgtggagcaccgcactgtggccggggtcatcagcaccgtcttctggtcgggaggcgtgctgctgctggcactggtgggctacctgatccggagctggcgctggcttctgctggctgccaccctgccgtgtgtcccaggcatcatcagcatctggtgggttcctgagtctgcacggtggcttctaacccagggtcgtgtggaggaggcaaaaaaatacttgctgagctgtgccaagctcaatgggcggcccgtgggtgagggcagcctgagccaggaggccctgaacaacgtggtcaccatggaaagggcgttgcaaagaccctcatacttagacctgttccgaacatctcagctccgacatatctcactgtgctgcatgatggtgtggtttggagtgaacttttcctactacggcctgactctggacgtgtctgggctggggctgaacgtgtaccagacacagctgctgtttggggctgtggagctcccctccaaaattatggtctacttccttgtgcgccgtctgggacgccgtctcacggaggctgggatgctgctgggcgctgctctgacctttggcaccagcctgctggtatccttggagactaagtcatggatcactgctctggtggtggtggggaaagctttttctgaagctgcttttactacggcctacctgttcacgtccgagttgtaccctactgtgctcagacagacaggattgggacttactgcactcatgggcaggctaggggcctctctggcccgactggcggccttgctggatggagtgtggctgttgctgcccaaagttgcttacggggggattgccctggtggctgcctgcactgcactcctgctgcctgagacgaagaaggcacagctgccagagaccatccaggatgtggagaggaagagtacccaggaggaagatgtgtaggtccgggactgagttggactagcgacagttctccacaggagctgggcacagaaggcagcctcttgtgactgggacatcagactcctccacctaaggatggagctgctcctgatgccctctgcctgtgctctccagcagcagaacaacttcccgcagcactgggccgctgggattctggactcccctctcatggccgggggcttctataaataaagacggttgctcatgg

SEQ ID NO: 3126 - protein, 535 aa, Rattus norvegicus
  ref <308>: DATABASE ACCESSION NUMBER: SWISS-Prot / AAA57157
  ref <309>: DATABASE ENTRY DATE: 2003-02-01
MGFEDLLDKVGGFGPFQLRNLVLMALPRMLLPMHFLLPVFMAAVPAHHCALPGAPANLSHQDLWLEAHLPRETDGSFSSCLRFAYPQTVPNVTLGTEVSNSGEPEGEPLTVPCSQGWEYDRSEFSSTIATEWDLVCQQRGLNKITSTCFFIGVLVGAVVYGYLSDRFGRRRLLLVAYVSSLVLGLMSAASINYIMFVVTRTLTGSALAGFTIIVLPLELEWLDVEHRTVAGVISTVFWSGGVLLLALVGYLIRSWRWLLLAATLPCVPGIISIWWVPESARWLLTQGRVEEAKKYLLSCAKLNGRPVGEGSLSQEALNNVVTMERALQRPSYLDLFRTSQLRHISLCCMMVWFGVNFSYYGLTLDVSGLGLNVYQTQLLFGAVELPSKIMVYFLVRRLGRRLTEAGMLLGAALTFGTSLLVSLETKSWITALVVVGKAFSEAAFTTAYLFTSELYPTVLRQTGLGLTALMGRLGASLARLAALLDGVWLLLPKVAYGGIALVAACTALLLPETKKAQLPETIQDVERKSTQEEDV

SEQ ID NO: 3127 - DNA, 1864 bp, Homo sapiens
  ref <308>: DATABASE ACCESSION NUMBER: EMBL / AF210455
  ref <309>: DATABASE ENTRY DATE: 2001-01-02
atgggctttgaggagctgctggagcaggtgggcggctttgggcccttccaactgcggaatgtggcactgctggccctgccccgagtgctgctaccactgcacttcctcctgcccatcttcctggctgccgtgcctgcccaccgatgtgccctgccgggtgcccctgccaacttcagccatcaggatgtgtggctggaggcccatcttccccgggagcctgatggcacgctcagctcctgcctccgctttgcctatccccaggctctccccaacaccacgttgggggaagaaaggcagagccgtggggagctggaggatgaacctgccacagtgccctgctctcagggctgggagtacgaccactcagaattctcctctaccattgcaactgagtgggatctggtgtgtgagcagaaaggtctgaacagagctgcgtccactttcttcttcgccggtgtgctggtgggggctgtggcctttggatatctgtccgacaggtttgggcggcggcgtctgctgctggtagcctacgtgagtaccctggtgctgggcctggcatctgcagcctccgtcagctatgtaatgtttgccatcacccgcacccttactggctcagccctggctggttttaccatcatcgtgatgccactggagctggagtggctggatgtggagcaccgcaccgtggctggagtcctgagcagcaccttctggacagggggcgtgatgctgctggcactggttgggtacctgatacgggactggcgatggcttctgctagctgtcaccctgccttgtgccccaggcatcctcagcctctggtgggtgcctgagtctgcacgctggcttctgacccaaggccatgtgaaagaggcccacaggtacttgctccactgtgccaggcccaatgggcggccagtgtgtgaggacagcttcagccaggaggctgtgagcaaagtggccgccggggaacgggtggtccgaagaccttcatacctagacctgttccgcacaccacggctccgacacatctcactgtgctgcgtggtggtgtggttcggagtgaacttctcctattacggcctgagtctggatgtgtcggggctggggctgaacgtgtaccagacacagctgttgttcggggctgtggaactgccctccaagctgctggtctacttgtcggtgcgctacgcaggacgccgcctcacgcaagccgggacactgctgggcgcggccctggcgttcggcactagactgctagtgtcctccgatatgaagtcctggagcactgtcctggcagtgatggggaaagctttttctgaagctgccttcaccactgcctacctgttcacttcagagttgtaccctacggtgctcagacagacagggatggggctgactgcactggtgggccggctggggggctctttggccccactggcggccttgctggatggagtgtggctgtcactgcccaagcttacttatggggggatcgccctgctggctgccggcaccgccctcctgctgccagagacgaggcaggcacagctgccagagaccatccaggacgtggagagaaagaggtgtgtgcacaggactgtgtctgtgtacgtgtgataacatgcatatggatgcaggtgctcagatacctgacaccttaggattcagacaggaaactatatctgcacatgtgtacttggtgcatgtatgtgtgcgtgcacaggtgagtgtttcagggtgcatgattgggggcatgtaaactgcaagcataaatgtgtacatgagtgtatgaacacaaatacataaggttgttcaggaaaaaaaaaaaaaaaaaaaaaaaaaaaaaaaaaaaaaaaaaaaa

SEQ ID NO: 3128 - protein, 548 aa, Homo sapiens
  ref <308>: DATABASE ACCESSION NUMBER: SWISS-Prot / AAD37091
  ref <309>: DATABASE ENTRY DATE: 2003-02-01
MGFEELLEQVGGFGPFQLRNVALLALPRVLLPLHFLLPIFLAAVPAHRCALPGAPANFSHQDVWLEAHLPREPDGTLSSCLRFAYPQALPNTTLGEERQSRGELEDEPATVPCSQGWEYDHSEFSSTIATESQWDLVCEQKGLNRAASTFFFAGVLVGAVAFGYLSDRFGRRRLLLVAYVSTLVLGLASAASVSYVMFAITRTLTGSALAGFTIIVMPLELEWLDVEHRTVAGVLSSTFWTGGVMLLALVGYLIRDWRWLLLAVTLPCAPGILSLWWVPESARWLLTQGHVKEAHRYLLHCARLNGRPVCEDSFSQEAVSKVAAGERVVRRPSYLDLFRTPRLRHISLCCVVVWFGVNFSYYGLSLDVSGLGLNVYQTQLLFGAVELPSKLLVYLSVRYAGRRLTQAGTLLGTALAFGTRLLVSSDMKSWSTVLAVMGKAFSEAAFTTAYLFTSELYPTVLRQTGMGLTALVGRLGGSLAPLAALLDGVWLSLPKLTYGGIALLAAGTALLLPETRQAQLPETIQDVERKSAPTSLQEEEMPMKQVQN

SEQ ID NO: 3129 - DNA, 1910 bp, Rattus norvegicus; identical to SEQ ID NO: 3125
  ref <308>: DATABASE ACCESSION NUMBER: EMBL / L27651
  ref <309>: DATABASE ENTRY DATE: 1994-12-22

SEQ ID NO: 3130 - protein, 535 aa, Rattus norvegicus; identical to SEQ ID NO: 3126
  ref <308>: DATABASE ACCESSION NUMBER: SWISS-Prot / AAA57157
  ref <309>: DATABASE ENTRY DATE: 2003-02-01

SEQ ID NO: 3131 - DNA, 1864 bp, Homo sapiens; identical to SEQ ID NO: 3127
  ref <308>: DATABASE ACCESSION NUMBER: EMBL / AF210455
  ref <309>: DATABASE ENTRY DATE: 2001-01-02

SEQ ID NO: 3132 - protein, 548 aa, Homo sapiens; identical to SEQ ID NO: 3128
  ref <308>: DATABASE ACCESSION NUMBER: SWISS-Prot / AAD37091
  ref <309>: DATABASE ENTRY DATE: 2003-02-01

SEQ ID NO: 3133 - DNA, 1814 bp, Rattus norvegicus
  ref <308>: DATABASE ACCESSION NUMBER: EMBL / L27663
  ref <309>: DATABASE ENTRY DATE: 2000-03-04
ccaaggcagaaaagtaactgtcaaatgcgcggctcctttaaccagagcgcccagtccggctccgagagtcatggcgaccgcagcgtctaaccactacagcctgctcacctccagcgcctccatcgtgcacgccgagccgcctggcggcatgcagcagggcgcggggggctaccgcgaggcgcagagcctgcaggtgcagggcgactacggtgcgctgcagagcaacgggcacccgctcagccacgctcactggatcaccgcgctgtcccacggcggcagcggcgggggcggcggcggtggtggaggaggcgggggaggcggcgggggaggcggcgacggctccccgtggtccaccagccccctaggccagccggacatcaagccctcggtggtggtacagcagggtggccgaggcgacgagctgcacgggccaggagcgctgcagcagcagcaccaacagcaacagcagcagcagcaacagcaacagcagcaacaacagcaacagcagcagcagcaacaacagcgaccgccacatctggtgcaccacgctgccaacaaccatcccgggcccggggcatggcggagtgcggcggctgcagctcaccttcctccctccatgggagcttccaacggtggtttgctctattcgcagcccagcttcacggtgaacggcatgctgggcgcaggagggcagccggctgggctgcaccaccacggcctgagggacgcccacgatgagccccatcatgcagaccaccacccgcatccgcactctcacccgcaccagcaaccgcccccgccacctcccccacaaggcccaccgggccacccaggcgcgcaccacgacccgcactcggacgaggacacgccgacctcagacgacctggagcagttcgccaagcaattcaagcagaggcggatcaaactaggatttactcaagcagacgtggggctggcgcttggcaccctgtacggcaacgtcttctcgcagaccaccatctgcaggtttgaggccctgcagctgagcttcaagaacatgtgcaagctgaagcctttgttgaacaagtggttggaagaggcagactcatcctcgggcagccccaccagcatagacaagatcgcttcgcaagggcgcaaacggaaaaagcggacctccatcgaggtgagcgtcaagggggctctggagagccatttcctcaaatgccctaagccctcggcccaggagatcacctccctcgcggacagcttacagctggagaaggaggtggtgagagtttggttttgtaacaggagacagaaagagaaaaggatgacccctcccggagggactctgccgggcgccgaggatgtgtatggggggagtagggacacgccaccacaccacggggtgcagacgcccgtccagtgaactcaagcaggggaggggcagagcttggggctcccctcccctttggtccacagtctcaactgggacctctgttccccctgtaacttctgattgttttttttttttaattattattttcccggtcccttaaaaagagaaaaaaatagagaaattaaggagaaaggaaagtaaaagtaaaacactggactaacctataacaggtagcaggtgtattcatgggttttgacctttgcaagcgagtacccaggcaatgaagtagaatgtctcctagtaagagtgaagtgtgtgtgtgtgtgtgtgtgtgtgtgtgtgtgtctgtgtgtgaaagagagagagagagagagagagagagagagagagagagagagagagagggaggagtcctggtaaaactaaataaattacc

SEQ ID NO: 3134 - protein, 445 aa, Rattus norvegicus
  ref <308>: DATABASE ACCESSION NUMBER: SWISS-Prot / P56222
  ref <309>: DATABASE ENTRY DATE: 2002-06-15
MATAASNHYSLLTSSASIVHAEPPGGMQQGAGGYREAQSLQVQGDYGALQSNGHPLSHAHWITALSHGGSGGGGGGGGGGGGGGGGGGDGSPWSTSPLGQPDIKPSVVVQQGGRGDELHGPGALQQQHQQQQQQQQQQQQQQQQQQQQQQQRPPHLVHHAANNHPGPGAWRSAAAAAHLPPSMGASNGGLLYSQPSFTVNGMLGAGGQPAGLHHHGLRDAHDEPHHADHHPHPHSHPHQQPPPPPPPQGPPGHPGAHHDPHSDEDTPTSDDLEQFAKQFKQRRIKLGFTQADVGLALGTLYGNVFSQTTICRFEALQLSFKNMCKLKPLLNKWLEEADSSSGSPTSIDKIASQGRKRKKRTSIEVSVKGALESHFLKCPKPSAQEITSLADSLQLEKEVVRVWFCNRRQKEKRMTPPGGTLPGAEDVYGGSRDTPPHHGVQTPVQ

SEQ ID NO: 3135 - DNA, 1955 bp, Homo sapiens
  ref <308>: DATABASE ACCESSION NUMBER: EMBL / Z11933
  ref <309>: DATABASE ENTRY DATE: 1997-09-12
gaattccgggaacagaaggcgtcggagcgggcgtcggagctgcccgctgtgggagagagaggagacagaaagagcgagcgaggagagggagcccgaggcgaaaaagtaactgtcaaatgcgcggctcctttaaccggagcgctcagtccggctccgagagtcatggcgaccgcagcgtctaaccactacagcctgctcacctccagcgcctccatcgtgcacgccgagccgcccggcgcgatgcagcagggcgcggggggctaccgcgaagcgcagagcctggtgcagggcgactacggcgctctgcagagcaacggacacccgctcagccacgctcaccagtggatcaccgcgctgtcccacggcggcggcggcgggggcggtggcggcggcggggggggcgggggcggcggcgggggcggcggcgacggctccccgtggtccaccagccccctgggccagccggacatcaagccctcggtggtggtgcagcagggcggccgcggagacgagctgcacgggccaggcgccctgcagcagcagcatcagcagcagcaacagcaacagcagcagcaacagcagcaacagcagcagcagcagcagcaacagcggccgccgcatctggtgcaccacgccgctaaccaccacccgggacccggggcatggcggacggcggcggctgcagcgcacctcccaccctccatgggagcgtccaacggcggcttgctctactcgcagcccagcttcacggtgaacggcatgctgggcgccggcgggcagccggccgggctgcaccaccacggcctgcgggacgcgcacgacgagccacaccatgccgaccaccacccgcacccgcactcgcacccacaccagcagccgccgcccccgccgcccccgcagggtccgcctggccacccaggcgcgcaccacgacccgcactcggacgaggacacgccgacctcggacgacctggagcagttcgccaagcagttcaagcagcggcggatcaaactgggatttacccaagcggacgtggggctggctctgggcaccctgtatggcaacgtgttctcgcagaccaccatctgcaggtttgaggccctgcagctgagcttcaagaacatgtgcaagctgaagcctttgttgaacaagtggttggaggaggcggactcgtcctcgggcagccccacgagcatagacaagatcgcagcgcaagggcgcaagcggaaaaagcggacctccatcgaggtgagcgtcaagggggctctggagagccatttcctcaaatgccccaagccctcggcccaggagatcacctccctcgcggacagcttacagctggagaaggaggtggtgagagtttggttttgtaacaggagacagaaagagaaaaggatgacccctcccggagggactctgccgggcgccgaggatgtgtacggggggagtagggacactccaccacaccacggggtgcagacgcccgtccagtgaactcgagctgggggaggggcagagcgcggggctccccctccccttcggtccttggccctttcccggccctcttgttccctctctaacttctgattgttcttttatttttaattattatttccccgtcccttaaaaagacaaaaaaaataaggcaaaaggaaagcaactaagacactggactatcctttaaaggtagcaggtgtaatgatgtgttttgacctttgcaggcgagtaaccaggcaatggagtggagtgtctcctggagagagtgaggagagtgtgtgatagctagaaagagagagagacagagagatggcaagcactgagataaatacctggcaaaactaaataaattaccaaaaaggaaaaaaaatccaccaaaccatgataaacacaaaatgcagcttcctgatgcttagagttggcacatgctgctgtgtttatttattgtggaggaattc

SEQ ID NO: 3136 - protein, 443 aa, Homo sapiens
  ref <308>: DATABASE ACCESSION NUMBER: SWISS-Prot / P20265
  ref <309>: DATABASE ENTRY DATE: 2002-06-15
MATAASNHYSLLTSSASIVHAEPPGAMQQGAGGYREAQSLVQGDYGALQSNGHPLSHAHQWITALSHGGGGGGGGGGGGGGGGGGGGGDGSPWSTSPLGQPDIKPSVVVQQGGRGDELHGPGALQQQHQQQQQQQQQQQQQQQQQQQQQRPPHLVHHAANHHPGPGAWRTAAAAAHLPPSMGASNGGLLYSQPSFTVNGMLGAGGQPAGLHHHGLRDAHDEPHHADHHPHPHSHPHQQPPPPPPPQGPPGHPGAHHDPHSDEDTPTSDDLEQFAKQFKQRRIKLGFTQADVGLALGTLYGNVFSQTTICRFEALQLSFKNMCKLKPLLNKWLEEADSSSGSPTSIDKIAAQGRKRKKRTSIEVSVKGALESHFLKCPKPSAQEITSLADSLQLEKEVVRVWFCNRRQKEKRMTPPGGTLPGAEDVYGGSRDTPPHHGVQTPVQ

SEQ ID NO: 3137 - DNA, 1814 bp, Rattus norvegicus; identical to SEQ ID NO: 3133
  ref <308>: DATABASE ACCESSION NUMBER: EMBL / L27663
  ref <309>: DATABASE ENTRY DATE: 2000-03-04

SEQ ID NO: 3138 - protein, 445 aa, Rattus norvegicus; identical to SEQ ID NO: 3134
  ref <308>: DATABASE ACCESSION NUMBER: SWISS-Prot / P56222
  ref <309>: DATABASE ENTRY DATE: 2002-06-15

SEQ ID NO: 3139 - DNA, 1955 bp, Homo sapiens; identical to SEQ ID NO: 3135
  ref <308>: DATABASE ACCESSION NUMBER: EMBL / Z11933
  ref <309>: DATABASE ENTRY DATE: 1997-09-12

SEQ ID NO: 3140 - protein, 443 aa, Homo sapiens; identical to SEQ ID NO: 3136
  ref <308>: DATABASE ACCESSION NUMBER: SWISS-Prot / P20265
  ref <309>: DATABASE ENTRY DATE: 2002-06-15

SEQ ID NO: 3141 - DNA, 2638 bp, Rattus norvegicus
  ref <308>: DATABASE ACCESSION NUMBER: EMBL / L27843
  ref <309>: DATABASE ENTRY DATE: 2000-06-03
cacaatcttcaatgagtagacatattcctcagttctgtggtgttctcggtcacacatttatggagtttctgaagggcagtggagactactgccaggcacagcacgacctctatgcagacaagtgaactgtagaaattcattactactccaccaagaagcccccataagagtggatagcctggacacagtcgtgttgaattgaaatctgcagagcattttccaagagctcagacctggatggggtaaacctcagtgcacttcctctgtatcgcctcagtattcctggattgaagagtcactgcttcttgtgaggaggttcatttcattgcccgtttctcccgactcatactcaaagcactgagaatttcaagtggagtatattgaatattgaagtagacttcaggttgttttttggttttgttttggttttttgttttgttttgttttgttttgttttggttttcagtttttgtttggaatcatttctgtattcaattttttaattctttcataaccctattgggtgtttttttaaactaaattaacatggctcgaatgaaccgccctgctcctgtggaagtcacatacaagaacatgagatttcttattacacacaatccaaccaatgcgaccttaaacaaatttatagaggaacttaagaagtatggagttaccacaatagtaagagtatgcgaagcaacttacgacactactcttgtggagaaagaaggcattcatgttcttgactggccttttgatgatggtgcaccaccatccaaccagattgttgatgactggttaagtcttgtgaagattaagtttcgtgaagaacctggttgctgtattgctgtccattgtgtcgcaggccttggcagagctccggtgcttgttgccctagcattaattgaaggtggaatgaaatatgaagatgcagtacaattcataagacaaaagcggcgcggagcttttaacagcaagcaacttctgtacctggagaagtaccgtcctaaaatgcggctccgcttcaaggattccaacggtcatagaaacaactgttgtattcaataaaactggggtgcctgatgccattgccttggaagaggaacttcagatgggacctgatttgttatttacccaatgtgtccacttacctgtggaagctccaggggaatattgaaaaagttttaccaggccacaagcttgacagaattgcaacctctataattgggctatgatcaacacgtttggacacttagcaaaagatttttgctggtcagcatttaaaatgtgcttattatttgtaccaattgacctttcctaaaataaggtattgagtaatgtcattaaatgtactcctgtgccagaatattattagtctataaggaatttagaaggattaggtgccaaaatacccagcacaatacttgtatatttttagcatcatacagaaccaaaattccaagaactaagaactctccagaccttccatggtgtattccttcagtcatttcaaacaccgcagggcttctcttgttatctgcctgctcactctatgtttacatctcccacacttacaccagaacacatcaggtttgcttagctatcttttaagtcttgcaatgattatttaatgtctctgtcttattttgtgctgttttgggaaacctccatttgaaaatcaactttgttacagaagcacatatcttcaataatgtctccagacaaaaagccttatagttaatttaatgtttgcactcgggtgcaacctgacagggagggcctgaacaagaaaggagaggaggctattaaatatttttagtaatatgttgcctttgtcttgtgcagaacatgtagagtatgctctttaatttagtaaatatttttaagacgtagagatacattgttgtagctaaccacttaatcaaaatttctgaaattcttgtgttttccatacctatctgaggttttccaacttgtttgaattatggttttccccttctcttcccaatctcttgcaaaaaagtaaaagtgggatctgctagtgaactgagcagaaatattttatacgccttttgagctatgtaacttaataattggatacttgatcatttgttttattatgtaatcgataaaatggtgatgtgtattaatgttagttcaaccatatatttatactgtctgggaatgtgtggttatagttctgtgggagaaatagtttgtcagtgttcaccagcttgtaaaaacttagtgcgagagcttcaacatctaaataaatgatgaaacgcattcgtcactgaggtcactttgcttaaaattaacttaatttgtagaaaacagtggattcaattattatcatttcagtttatggacaaatttgttagggttaccaagtgcgtttaaaaattgctctttaaaggtctagataattgtgaatcaattgaatgttgggtaccaagggaaaacggtttgtaatagttgatgaccttgatttttaattcaattccaccagtcacttgtagctttatgcagtttccaatccacttttctcatttttaagtttattacttacctgtatatattttgaaattaatttgaacctgcgtatttggcacatgatggcttataaattttaactttc

SEQ ID NO: 3142 - protein, 173 aa, Rattus norvegicus
  ref <308>: DATABASE ACCESSION NUMBER: Refseq / NP_113767
  ref <309>: DATABASE ENTRY DATE: 2002-11-05
MARMNRPAPVEVTYKNMRFLITHNPTNATLNKFIEELKKYGVTTIVRVCEATYDTTLVEKEGIHVLDWPFDDGAPPSNQIVDDWLSLVKIKFREEPGCCIAVHCVAGLGRAPVLVALALIEGGMKYEDAVQFIRQKRRGAFNSKQLLYLEKYRPKMRLRFKDSNGHRNNCCIQ

SEQ ID NO: 3143 - DNA, 2200 bp, Homo sapiens
  ref <308>: DATABASE ACCESSION NUMBER: EMBL / U48296
  ref <309>: DATABASE ENTRY DATE: 1999-08-02
cgggattactgccaggcacagcacgacctctatgcagacaagtgaactgtagaaactgattactgctccaccaagaagcccccataagagtggttatcctggacacagaagtgttgaattgaaatccacagagcattttacaagagttctgacctggatggggtaaacctcagtgcacttcttttctgttggcctcagtattactggattgaagaattgctgcttcttgttaggaggttcatttcacttatcattacttacaacttcatactcaaagcactgagaatttcaagtggagtatattgaagtagacttcagtttctttgcatcatttctgtattcaatttttttaattatttcataaccctattgagtgtttttaactaaataacatggctcgaatgaaccgcccagctcctgtggaagtcacatacaagaacatgagatttcttattacacacaatccaaccaatgcgaccttaaacaaatttatagaggaacttaagaagtatggagttaccacaatagtaagagtatgtgaagcaacttatgacactactcttgtggagaaagaaggtatccatgttcttgattggccttttgatgatggtgcaccaccatccaaccagattgttgatgactggttaagtcttgtgaaaattaagtttcgtgaagaacctggttgttgtattgctgttcattgcgttgcaggccttgggagagctccagtacttgttgccctagcattaattgaaggtggaatgaaatacgaagatgcagtacaattcataagacaaaagcggcgtggagcttttaacagcaagcaacttctgtatttggagaagtatcgtcctaaaatgcggctgcgtttcaaagattccaacggtcatagaaacaactgttgcattcaataaaattggggtgcctaatgctactggaagtggaacttgagatagggcctaatttgttatacatattagccaacatgttggcttagtaagtctaatgaagcttccataggagtattgaaaggcagttttaccaggcctcaagctagacagatttggcaacctctgtatttgggttacagtcaacctatttggatacttggcaaaagattcttgctgtcagcatataaaatgtgcttgtcatttgtatcaattgacctttccccaaatcatgcagtattgagttatgacttgttaaatctattcccatgccagaatcttatcaatacataagaaatttaggaagattaggtgccaaaatacccagcacaatacttgtatatttttagtaccatacagaagtaaaatcccaggaactatgaacactagaccttatgtggtttattccttcaatcatttcaaacattgaaagtagggcctacatggttatttgcctgctcactttatgtttacatctcccacattcataccaatatacgtcaggtttgcttaaccattgattttttttttttttaccaagtcttacagtgattattttacgtgtttccatgtatctcactttgtgctgtattaaaaaaacctccattttgaaaatctacgttgtacagaagcacatgtctttaatgtcttcagacaaaaaagccttacattaatttaatgtttgcactctgaggtgcaacttaacagggagggcctgagaaaagaatgggagggggctattaattattttttagcaaaatgttgcctttgtcttgtgcaaacatgtagaatatgctctttaatctagtaaaatatttttttaaaaggtagagatgctttgttattgtaatcataaacttcctgaaattcttgtaattttttcccatacttatcagaagtgtgtttaccaacttatttttgtttgaaagtgtgattttttttttccttcccaacctctcttgcaaaaaaagaaatgggtttctgctaatgaattgagcagagatctaatattttatatgccttttgagctgtgtaagttaatatttgatacttgacaatttgttttattatgtaattgataaaatggtgatgtgtattaatgttagttcaaccatatatttatactgtctggggatgtgtggttatagttctgtgggagaaataattttgtcagtgttcaccagcttgtaaaaacttagtgcgagagctgaaacatctaaataaataatgacatgcatttatcatcattgaaa

SEQ ID NO: 3144 - protein, 174 aa, Homo sapiens
  misc_feature (1)..(174): Xaa=Unknown amino acid
MARMNRPAPVEVTYKNMRFLITHNPTNATLNKFIEELKKYGVTTIVRVCEATYDTTLVEKEGIHVLDWPFDDGAPPSNQIVDDWLSLVKIKFREEPGCCIAVHCVAGLGRAPVLVALALIEGGMKYEDAVQFIRQKRRGAFNSKQLLYLEKYRPKMRLRFKDSNGHRNNCCIQX

SEQ ID NO: 3145 - DNA, 6878 bp, Rattus norvegicus
  ref <308>: DATABASE ACCESSION NUMBER: EMBL / L28801
  ref <309>: DATABASE ENTRY DATE: 2000-03-04
gccggggctgctaactgaagaggccatggacgcgctcgagtcgttgttggacgaggtggccctggaggggctcgacggcctgtgcctgcccgcgctgtggagccgcctggaatcccgctcgcctgccttccctttgccgctggaaccctacacgcaggagtttctgtggcgggccttagtcacgcacccgggcatcagtttctacgaggagccgcgagagcgacctgacctgcagctccaagaccgatatgaagaaatcgacttggaaactggaattttggagtccaggagggacccagtcactctggaagatgtctaccccattcatatgatcttagagaataaggatggcatccagggctcctgccgatactttaaggagagaaaggacatcaccagtagcatcaggagcaagtgtttgcagcctcgttgtacaatggtagaagccttcagcaggtggggtaagaagctcatcattgtggcttcccaggacatgcgataccgggccttgataggcctagagggggatcctgatctgaagcttcctgatttctcctactgcattttggagcggttaggtcgatcgagatggcaaggggagctgcaacgagaccttcacaccaccgctttcaaggtcgacgctgggaagcttcattatcacaggaaaattttgaacaagaatgggctcattacaatgcagtcacacgtgatccgactgcctactggagcccagcaacactccatcctcctcctccttaaccggtttcatgtagacaggaggagcaagtacgacatcctcatggagaagctgtctatgatgctgagcacacggagcaaccagatcgagactctgggcaagctgagggaggagctgggactgtgtgaaaggacgttcaagcgtctgtaccagtacatgctgaatgctgggctggccaaagtggtgtcccttcccttgcaggagattcaccctgagtgtggtccctgtaagaccaagaaagggactgatgtcatggttcggtgccttaagctcctgaaggagttcaggcgaaagatggaagacgaccatgacgacgatgacgatgaagaggccatctccaaggctgtacctcccgtggacatcgtgtttgagcgggacatgctcacgcagacctacgagctcattgagcgcagaggaacgaaaggaatttcccaagctgagatccgagttgctatgaatgtgggaaaactggaagcaagaatgctgtgtcggctccttcagaggttcaaggttgtcaagggattcatggaagatgaaggccggcagaggaccaccaagtacatttcctgtgtatttgcggaggagagtgacttgagccgccaatatgcgcgtgaaaaggcccgaggagagctgctaaccactgtgagcctcgcctcagtgcaagatgaatccctcatgcctgagggtgaagaggccttcctctctgactccgaaagtgaggaagagagcagctgcagtggcaagcgtaggggccgagggtcccgggggcattcaagagcctctggggatgctgggcctggctctcggcctcatcactccactccagccaagggcgggtggaaagtcctaaatctgcacccattaaagaagcccaaaagtgccgctgtggaaagatcccgccgaagctctgcttgtagggatggcctggacaccagcagctcatccgagctcaatataccctttgaccctcacagcatggacagtcacagtggtgacatcgctgtgattgaggaggtccggcttgataaccccaaggagggtggtggctcccagaagggcggacggcatggctcaggccaggacaagcctcacaaaacataccgactgctaaagcgcagaaatctgattatagaagctgtcaccaacctccgcctgattgagagcctgttcacgattcagaagatgatcatggaccaggagaagcaagagggtgtctccaccaaatgctgtaagaagtccattatccgcttggtgcggaacctgtctgaggagggtctcttgagattgtataggactacagtcattcaagatggcatcaagaagaaggtagacctggtcgtgcacccttccatggaccagaatgaccctcttgtgagaagtgctattgagcaggttcgcttccggatctccaactcaagcacagcaaacagggttaaagttccaccggccccagcaccccaagaggaagcagaagagggaaaccaagaaccagaggtcccaagtagatcagcagactctgaagcgaacacatcctcgaagccagaaagcacacgggtgaaaaagacagatgagaaaatgggcataaccccactcaagaattacaaacctgtcatagttcctggacttgggcgctccatagggttccttcccaagatgccacgccttcgggtgatgcacctgttcctgtggtacctggtgtatgggcatcctgccagccacactggggaacagcctactttccacagtgagaggaaaacaggcaagcaggagcccagcagaccaggggtccagccctcctcaggagatgactgggactcctctgaagccaaaaacagcacagaaagcagctcctgggaggcagaaatggaactctccacagagagagtgtatgtggatgagatctcatggatgcgctacgtccctcccatccccatccacagagacttcggctttggctgggctcttgtcagtgacattcttctctgccttcccctctccatctttgtccaagttgttcaagtcagctacaaggtggataacctggaggattttctgaatgaccctctgaagaagcacacactgatccgcttcctccctaggcacatccggcagcagctactgtataagaggcggtatattttctcggtggtggagaacctgcaacggctgtgctacatggggctgctacagtttggacccacagagaagtttcaggataaagaccaggtctttgttttcctgaagaagaatgcagtcattgtggacaccaccatctgtgacccacattacaacctggcccacagcagccggccttttgagagacgtctctacgtcttggattccatgcaggatgtggaaagctactggtttgacctgcagtgtatctgcctaaacaccccactaggtgtggtgcgttgtccatgtgcacagaagatctgccctgatccgggcagtgacccagaaggcagcttgcggaaggagcaagagagcgccatggacaagcacaacctagagcgcaagtgtgccatgctggagtataccacggggagccgagaagttgtggatgaaggcttagtccctggggatggactgggagctgctgggctggactctagcttctatgcacacctgaagcgcaactgggtctggaccagctatatcatcaacaaagccagaaagaacaacacctccgaaaatgggctcacaggaagactccagactttcctgtctaagcgcccaatgccacttgggtctggaggcagtggccgtctgcctctctggtcagaggggaaagctgatgctgagctctgtgctgacaaagaggaacactttgaactggaccgagaacctacccctggcaggaaccgaaaagtgcgtgggggcaagagtcagaagcggaagcggctgaagaaggagcccatcaggaagaccaagcgaaggagaagaggagagcatccagaagccaaaagcaaaaaactacgctaccaagatgaggctgaccagaacgccctccggatgatgacccggcttcgggtttcttggtccatgcaggaggatgggttactaatgctctgccgaattgccagcaatgtcctcaacaccaaggtgaaaggaccatttgtcacctggcaggtcgtgcgtgacattttgcatgctacctttgaagagtctttggataaaacatctcactcggttggacgaagagctcgctacatagtcaaaaatccccaggcctttatgaactacaaagtctgcctggcagaagtgtaccaagataaggcactcgttggagatttcatgagtcggaaggataactacgaagacccaaaggtctgtgccaaggagtttaaagaatttgtggagaagctgaaagagaagttcagctctggcctgaggaaccccaaccttgagatcccagacacactgcaggaactctttgccaaataccgggtgttggcaatcggagatgaaaaggaccgtgtcaggaaggaggatgaactgaatagtgtggaggacatccacttcctggtgctacagaacctgatccagagcacactgtccctctctaacagccagtccaactcttgccagtccttccagatcttccgcctctaccgggagttccgggagcctgtgctggtgcgggccttcatggagtgccaaaagaggagcctggtcaaccgacgccgtgtcagccactcccagggtcccaagaagaaccgtgctgtgccctttgtgcccatgtcctaccagctctcccagtcatactacaagcttttcacctggcgatttcccaccaccgtctgcaccgaatccttccagttctatgacagactacgggccaacggcatactagaccagcctgatcatttttctttcaaggacatggatagcaatgacccttcaagtgacctggtggcgttttctttggacagccctggaggacactgtgtgacagccctggccctcttctccttgggcctcctctctgtggatgtccgaatcccagagcagattgtggtggtagacagctccatggtggagagtgaggtcatgaagagcttggggaaagatggcggcttggatgatgatgatgaggaggaagacctggatgaaggttcagggaccaagcgtcagagtgtggaagtaaaggcccatcaggcctcacacaccaagtacctgctgatgagaggttactacacagtgcctggcatggtcagcacgcgcaacctgaaccccaatgacagcattgtggtcaattcctgccaggttaaattccgactgcgcaatacccctgcacccacccatcttgggcccactgggcccacagccacaccgctagaagagctccaggctggcccttcctgcctccctgcctcctttaccagcctggtggatccacagctgcacacccgctgcccagaagagtttgcccaccagatggcacagtctgggtacagccctgaggacgtggctgcgtccctagagatcctgcaggctgtggcagctgctgactgcttcggggttgacagggagaagctgagcagacagttctctgccttggagaagatagcggacaagcgcaccaggacgttcctggactatatccaggacctcttggaacagcaacaagtcatggaagttggaggcaacactgtgcgcctagtggccatggcctctgcccagccctggctcctgccttcagtgcgtctgaaagatgtggaaatagacaccaaggcctcaggggatgacagccaatctagactccctgcggggtcttccatcgaagaccacacctctgagggtgcaccaattcctccagtcagctccaatggcactaaaaagcgcccctactgctctattcagagccctgaaactgatgctgaggaagctacaaggctccctgccaagaagcccacattacaagatgtctgtgtggctgccagtcctaggcctggaacagaagagcagacagaggcccaggctcagtttgcagctcctgaagatgcaggtgcagagggccccaggcaggagagccaagagagtgttggtgtctcaggcctagagcagctgggctgtgagttccagcttccagaaaattctgaagaccccagaggacttacagagagcaacatggcccaggtagcatgggagagcggctgtgaaagagtatgttttgtcggtcgcccatggcgtggtgtggacgggcgcctgaacatgcccgtgtgcaaaggcatgatggaagccgtgctgtaccacatcatgtcaaggcccggtgttcctgagagctgcctgctacagtactaccagggcgtcctacagcctgttgctgtgcttgagctgctccggggcttagagtctctcggctgtatccagaagcggatgctgaagaagccagcgagtgtctcactcttctccaggcctgtggtggagggcctaggtcaggccagtgaggccgaggcactctcctgtcaggggagcactgtcaccttttatgaacctactctggactgtaccatccgtctgggccgtgtcttcccccatgacatcaactggaaacaaagtggatccatttatagatgcgtcccaggccagcagaggagcctctgcccgtgcttaattgttccgcctggactgtcccaagagccccgtccttcacacagctgttaccagagctcggcccagcctagcacaggtgtagcaactagcaggtgacttcagtcccctctgctctcggctgctcttggtcccaggtgcccagccttcctgcagccctgtgtcctgccctggactcaggctctagcatcagcagtatctgcaagggatgttgtttagggagcaggctgatgaccaagccctgagtcacctcacacgcaccacaccattcagactcagaggaagacacatcacaggtgtacctggcagagtctgctcctcttaaggtagggcatcccaacttggcctgaactgagctcaggtctccagctcccaagggcccctcccgccagaagcaaggcctgtaggttttgcttttgtttttgttttattttgcgctcttttcactagatacaagcccctggcatgtatttatttattttttaattaaagtaagatgaaatgc

SEQ ID NO: 3146 - protein, 2149 aa, Rattus norvegicus
  misc_feature (1)..(2149): Xaa=Unknown amino acid
MDALESLLDEVALEGLDGLCLPALWSRLESRSPAFPLPLEPYTQEFLWRALVTHPGISFYEEPRERPDLQLQDRYEEIDLETGILESRRDPVTLEDVYPIHMILENKDGIQGSCRYFKERKDITSSIRSKCLQPRCTMVEAFSRWGKKLIIVASQDMRYRALIGLEGDPDLKLPDFSYCILERLGRSRWQGELQRDLHTTAFKVDAGKLHYHRKILNKNGLITMQSHVIRLPTGAQQHSILLLLNRFHVDRRSKYDILMEKLSMMLSTRSNQIETLGKLREELGLCERTFKRLYQYMLNAGLAKVVSLPLQEIHPECGPCKTKKGTDVMVRCLKLLKEFRRKMEDDHDDDDDEEAISKAVPPVDIVFERDMLTQTYELIERRGTKGISQAEIRVAMNVGKLEARMLCRLLQRFKVVKGFMEDEGRQRTTKYISCVFAEESDLSRQYAREKARGELLTTVSLASVQDESLMPEGEEAFLSDSESEEESSCSGKRRGRGSRGHSRASGDAGPGSRPHHSTPAKGGWKVLNLHPLKKPKSAAVERSRRSSACRDGLDTSSSSELNIPFDPHSMDSHSGDIAVIEEVRLDNPKEGGGSQKGGRHGSGQDKPHKTYRLLKRRNLIIEAVTNLRLIESLFTIQKMIMDQEKQEGVSTKCCKKSIIRLVRNLSEEGLLRLYRTTVIQDGIKKKVDLVVHPSMDQNDPLVRSAIEQVRFRISNSSTANRVKVPPAPAPQEEAEEGNQEPEVPSRSADSEANTSSKPESTRVKKTDEKMGITPLKNYKPVIVPGLGRSIGFLPKMPRLRVMHLFLWYLVYGHPASHTGEQPTFHSERKTGKQEPSRPGVQPSSGDDWDSSEAKNSTESSSWEAEMELSTERVYVDEISWMRYVPPIPIHRDFGFGWALVSDILLCLPLSIFVQVVQVSYKVDNLEDFLNDPLKKHTLIRFLPRHIRQQLLYKRRYIFSVVENLQRLCYMGLLQFGPTEKFQDKDQVFVFLKKNAVIVDTTICDPHYNLAHSSRPFERRLYVLDSMQDVESYWFDLQCICLNTPLGVVRCPCAQKICPDPGSDPEGSLRKEQESAMDKHNLERKCAMLEYTTGSREVVDEGLVPGDGLGAAGLDSSFYAHLKRNWVWTSYIINKARKNNTSENGLTGRLQTFLSKRPMPLGSGGSGRLPLWSEGKADAELCADKEEHFELDREPTPGRNRKVRGGKSQKRKRLKKEPIRKTKRRRRGEHPEAKSKKLRYQDEADQNALRMMTRLRVSWSMQEDGLLMLCRIASNVLNTKVKGPFVTWQVVRDILHATFEESLDKTSHSVGRRARYIVKNPQAFMNYKVCLAEVYQDKALVGDFMSRKDNYEDPKVCAKEFKEFVEKLKEKFSSGLRNPNLEIPDTLQELFAKYRVLAIGDEKDRVRKEDELNSVEDIHFLVLQNLIQSTLSLSNSQSNSCQSFQIFRLYREFREPVLVRAFMECQKRSLVNRRRVSHSQGPKKNRAVPFVPMSYQLSQSYYKLFTWRFPTTVCTESFQFYDRLRANGILDQPDHFSFKDMDSNDPSSDLVAFSLDSPGGHCVTALALFSLGLLSVDVRIPEQIVVVDSSMVESEVMKSLGKDGGLDDDDEEEDLDEGSGTKRQSVEVKAHQASHTKYLLMRGYYTVPGMVSTRNLNPNDSIVVNSCQVKFRLRNTPAPTHLGPTGPTATPLEELQAGPSCLPASFTSLVDPQLHTRCPEEFAHQMAQSGYSPEDVAASLEILQAVAAADCFGVDREKLSRQFSALEKIADKRTRTFLDYIQDLLEQQQVMEVGGNTVRLVAMASAQPWLLPSVRLKDVEIDTKASGDDSQSRLPAGSSIEDHTSEGAPIPPVSSNGTKKRPYCSIQSPETDAEEATRLPAKKPTLQDVCVAASPRPGTEEQTEAQAQFAAPEDAGAEGPRQESQESVGVSGLEQLGCEFQLPENSEDPRGLTESNMAQVAWESGCERVCFVGRPWRGVDGRLNMPVCKGMMEAVLYHIMSRPGVPESCLLQYYQGVLQPVAVLELLRGLESLGCIQKRMLKKPASVSLFSRPVVEGLGQASEAEALSCQGSTVTFYEPTLDCTIRLGRVFPHDINWKQSGSIYRCVPGQQRSLCPCLIVPPGLSQEPRPSHSCYQSSAQPSTGVATSRX

SEQ ID NO: 3147 - DNA, 6996 bp, Homo sapiens
  ref <308>: DATABASE ACCESSION NUMBER: EMBL / U02619
  ref <309>: DATABASE ENTRY DATE: 1994-05-11
atggaccaaggcccttggcggtgcgttgcgcacccccggggcgccgcgactgaagtagcaatggacgcgctggagtcgttgttggacgaagtcgctctggaggggctcgatggcctgtgtctgccagcgctgtggagccggctggagacgcgagtgccgcccttcccgctgcctttggaaccctgcacgcaggagtttctctggcgggccctcgccacgcacccgggcatcagcttctatgaggagcctcgggagcgacccgacctacagctccaggaccggtatgaagaaattgatttggaaactggaattttggagtctaggagggacccggtggctttggaggatgtctaccccattcatatgatcttagagaataaggatggcatccagggctcatgccgctactttaaggagaggaaaaacattaccaatgacatcagaaccaagtccttgcagcctcgctgtacaatggtggaaccctttgacaggtgggggaagaaactgatcatcggttccctcccagcccatgcggtacaggcccttgatagcccaggagggggatcccgacctgaagctgcccgacttctcctactgcatcctggaacggctaggccggtccaggtgcaaggggagctccagcgagaccttcacaccactgctttcaaggttgatgctgggaagctgcactatcacagaaaaattttgaacaaaaacgggctgattacaatgcagtcccatgtgatccgattacccactggagcccagcaacactcaatcctcctcctactgaaccggtttcatgtggacaggaggagcaaatacgacatcctcatggagaagctttcggtcatgctgagcacacggactaaccacatagagacgctgggaaagctgagggaagagctggggctgtgcgaaaggacgtttaagcgtctgtaccagtatatgctgaacgccgggctagccaaggtggtgtctcttcgcttgcaagagatccaccctgaatgtggaccttgtaagacaaagaaagggaccgacgtcatggttcggtgcctcaagctgctgaaggaatttaaacggaatgaccatgatgatgacgaggacgaggaggtcatctccaagacagtgcctccagtggacattgtgttcgagcgggatatgctcacacagacctacgacctcattgagcgcagaggcacgaaaggaatttcccaagctgaaatccgagtggctatgaatgtgggaaaactagaagcaagaatgctgtgccgacttcttcaaagattcaaagttgtcaagggattcatggaagacgaaggtcggcagcgaaccaccaagtacatttcctgcgtgtttgcagaggagagcgacctaagccggcagtaccaaagagagaaggcccgcagcgagctcttgaccaccgtgagcctggcgtctatgcaggaggagtcgcttctgcctgaaggcgaggacaccttcctctctgagtcggacagtgaggaggagaggagcagcagcaagcggagaggcagagggtcccagaaagacacaagagcctctgcaaacctccggcccaagacccagcctcatcactccaccccaaccaagggtgggtggaaagttgtaaacctacacccattgaaaaagcagccgccctccttcccaggagctgctgaagagagagcctgccagagccttgccagcagggacagcctcttagataccagcagcgtctcagaacccaacgtgtcctttgtctcccactgtgcggacagcaacagtggtgacatagctgtgatcgaggaggtccggatggaaaacccaaaggagagtagcagttccctgaagactgggaggcacagctcaggccaagacaaaccacacgaaacttaccgactgctgaaacgcaggaatctgatcatagaagctgtcaccaatcttcgcttaatcgagagtttattcacgattcagaagatgatcatggatcaggagaagcaggaaggcgtgtccaccaagtgctgcaagaagtccattgtccgcttggtgcggaacctgtctgaggaaggtctcttgcgattgtatcggaccactgtcattcaagatggcatcaagaagaaggtggatctggtggtgcacccgtccatggaccagaacgaccctctagtgagaagtgccatcgagcaggtccgcttccggatctccaattcaagcacagccaacagggttaaaacttcccagcctccagtgccccaaggggaggcagaagaagacagtcaaggaaaagagggcccaagtggatcaggggactctcagctgagtgcttcctctagatcagaaagtggacggatgaaaaaaagtgataataaaatgggcataaccccgcttagaaattatcaccccattgtagttcccggactggggcgttctctaggatttctgcccaaaatgcctcgcctgcgggtggtccacatgtttctgtggtacctcatctacgggcaccctgccagcaacaccgtggagaagccaagcttcatcagtgaacggagaacgataaagcaggagtcaggcagggcaggcgtccggccgtcctcctctggaagtgcctgggaggcctgctctgaagccccatctaaaggcagccaagatggtgtcacctgggaggctgaagtggagcttgccacggagacagtgtatgtcgacgatgcctcgtggatgcgctacatccccccaatcccagtccacagggacttcggctttggctgggctctcgtcagcgacatcctcctctgccttcccctctccatcttcatccagattgtgcaagtcagctacaaggtggacaacctggaggaatttctgaacgacccgctgaagaagcacacgctgatccgctttctccccaggcccattcggcagcagcttctgtacaagaggcgttacattttttcggtggtggagaaccttcagaggctgtgctacatgggggtgctacagtttggtcccacggaaaagtttcaggataaagatcaggtctttatcttcttgaagaagaatgcagtcattgttgacactaccatctgcgacccacattacaacctgggccgcaggaggcggcccttcgagaggcgcctctatgtcctgaactcaatgcaggatgtggaaaactactggtttgacctgcagtgcgtctgcctcaacaccccactaggcgtggtgcgctgcccgcgcgtcaggaagaacagcagcacagaccagggcagcgacgaggagggcagcctgcagaaggagcaggagagcgccatggacaagcacaacctggagcgcaagtgcgccatgctggagtacaccactggaagccgtgaggtggtggatgaaggcttgatccctggagatgggctgggtgccgcagggctcgattccagcttctacggacacctcaagcgcaactggatctggaccagctacatcatcaaccaggccaaaaaggagaacactgccgcagagaatggactcacagtgaggctccagacatttctgtccaagcgcccaatgcccctcagtgccagaggcaacagcaggttgaatatttggggggaagcaagagtaggctccgagctctgtgctggctgggaagagcagtttgaggtggaccgagagccctcgctggaccgaaaccggagagtgaggggtgggaaaagccagaagcggaagcggctgaagaaggaccctgggaagaagatcaagagaaagaagaaaggagagttcccaggagaaaaaagcaaaaggctgcgctaccatgatgaagccgaccagagtgccctgcatcggatgacgcggcttcgtgtcacctggtctatgcaggaggatgggctgcttgtgctgtgccgcattgccagcaatgtcctcaacaccaaggtgaagggtccatttgtcacctggcaggtggtacgggacattttgcatgccacgtttgaagagtctttggataaaacatctcattcccttggacgaagagctcgctacatagtcaaaaacccacaggcctatctcaactataaagtgtgcctggccgaggtgtaccaggataaagcacttgttggagatttcatgaatcgaagaggtgactatgatgacccaaaggtttgtgccaacgagtttaaagaatttgtggagaagcttaaagaaaagttcagttcagccctaaggaattctaaccttgaaatcccagacacactccaggagctgttcgccaggtaccgagttttggcaattggggatgaaaaagatcaaaccaggaaagaggatgaacttaacagcgtggatgacatccactttctggtgcttcagaacctgatccagagcacgctggccctctcagacagtcagatgaagtcctaccagtcattccagactttccgcctctatcgggagtacaaggaccacgttcttgtgaaggccttcatggagtgccagaagaggagcttggtcaaccggcgccgggtcaaccacacgctgggccccaagaagaaccgggccctccccttcgtgccaatgtcctaccagctatcccagacctactacaggatttttacgtggcgatttccaagcaccatctgcacggagtcattccagtttttggacagaatgcgggctgccggcaagttggaccagcctgatcgtttctctttcaaagaccaggataataacgagcccacaaacgacatggtggccttttcactggacggccctggaggaaattgtgtggccgtcctgaccctcttctctctgggcctcatttctgtggatgtcaggatcccggagcagatcatcgtggtagacagctcaatggtggagaatgaggtcatcaaaagcttggggaaggacggcagcctggaggatgacgaggatgaagaggatgacttggacgaaggtgtagggggcaagcgccggagcatggaggtgaaacctgcgcaagcctcccacaccaactacctgctgatgaggggctactactcccccggcatcgtcagcacccgcaacctcaaccccaacgacagcattgtggtcaactcctgccagatgaagttccagctccgctgcacccctgtgcccgcccggctcaggcccgctgccgctcctctggaagagctaacaatgggaacctcctgcctccctgatacgttcaccaagctgataaacccccaggaaaacacctgcagcttggaggagtttgtcctccagctggagctgtctgggtatagtcccgaagacctgactgctgccttggagatcttggaagccattatagccacgggttgttttgggattgacaaggaggagctgcgcagacggttctcggccttggagaaggcaggtggtgggcgcaccaggacattcgcagattgcatccaggccctcctggagcagcatcaggtgctggaggtcggtggcaacactgcgcgcctggtagccatgggctctgcctggccttggctcctgcactccgtgcggctgaaagacagagaagacgccgacatccagagagaagacccccaggccagacccctggaggggtcttccagtgaggacagcccccccgaggggcaggcacctccttctcacagcccccggggcaccaagaggcgcgccagctgggccagtgagaatggggagaccgacgccgagggcacccagatgacccctgccaagaggccagcgctccaggactcaaatttggcccccagccttgggcccggagctgaagatggggcagaagcccaggccccatctccacccccagctcttgaagacaccgctgcagcgggagcagcacaggaagaccaagagggtgtcggtgagttcagttccccaggccaagagcagctgagcggccaggcgcagcctccagagggctctgaagaccccagagggttcacagagagtttcggagctgccaacatctcccaggcagcacgggaaagggactgtgagagtgtctgcttcatcggccggccgtggcgtgtcgtggatggccacctgaaccttcctgtatgcaagggtatgatggaggccatgctgtaccacatcatgaccaggcctggcatccccgagagctccctgctgcgccactaccagggggtcctgcagcccgtcgccgtgctggagttgctccagggcctggagtccctcggctgcatccggaagcgctggctgagaaagccaaggcctgtctcgctcttctctacacccgtggtggaagaggtggaagtgccctccagcctggacgagagccccatggctttctatgagcccaccttggactgtaccctccggctgggccgtgtgttcccccacgaggtcaactggaacaagtggatccacctctaggacccctgtgggcgtcccctccctcccagccaccgcctgccacaccactcctgcctggtgctcggcagaccccactgtgccctggccttgggtctgccgagcctcctgcagcaggggacgggtgctttggccagagtcacagactgacacgtttcccactgtactggaactctggaaagaggggctccccgacctgcccatcccccaggctcttctgggccttccccttgggaactggcctcatcacactgggagttggtgcttcttgtctctgggtctccagagtttgccccgcctgtgcacacctcacattccagactctagccatctcggcaggatctcctggctccttgagtgcccaggtgccaccaagaggaagggccttgtgggatacaccttgcagaatagggatcggtgtgccccgctgcgaggggccccccatgggggctgtggcccctccgcaggcaggacatcccaacccctggctgggactgaaccacccagagcggagcggctcccttttcagccttgtgagtcacctggcaggccccagctgggctggctgtccgtgtccctcagcctggctggtgattccttgcaggaggg

SEQ ID NO: 3148 - protein, 2110 aa, Homo sapiens
  misc_feature (1)..(2110): Xaa=Unknown amino acid
MDALESLLDEVALEGLDGLCLPALWSRLETRVPPFPLPLEPCTQEFLWRALATHPGISFYEEPRERPDLQLQDRYEEIDLETGILESRRDPVALEDVYPIHMILENKDGIQGSCRYFKERKNITNDIRTKSLQPRCTMVEPFDRWGKKLIIGSLPAHAVQALDSPGGGSRPEAARLLLLHPGTARPVQVQGELQRDLHTTAFKVDAGKLHYHRKILNKNGLITMQSHVIRLPTGAQQHSILLLLNRFHVDRRSKYDILMEKLSVMLSTRTNHIETLGKLREELGLCERTFKRLYQYMLNAGLAKVVSLRLQEIHPECGPCKTKKGTDVMVRCLKLLKEFKRNDHDDDEDEEVISKTVPPVDIVFERDMLTQTYDLIERRGTKGISQAEIRVAMNVGKLEARMLCRLLQRFKVVKGFMEDEGRQRTTKYISCVFAEESDLSRQYQREKARSELLTTVSLASMQEESLLPEGEDTFLSESDSEEERSSSKRRGRGSQKDTRASANLRPKTQPHHSTPTKGGWKVVNLHPLKKQPPSFPGAAEERACQSLASRDSLLDTSSVSEPNVSFVSHCADSNSGDIAVIEEVRMENPKESSSSLKTGRHSSGQDKPHETYRLLKRRNLIIEAVTNLRLIESLFTIQKMIMDQEKQEGVSTKCCKKSIVRLVRNLSEEGLLRLYRTTVIQDGIKKKVDLVVHPSMDQNDPLVRSAIEQVRFRISNSSTANRVKTSQPPVPQGEAEEDSQGKEGPSGSGDSQLSASSRSESGRMKKSDNKMGITPLRNYHPIVVPGLGRSLGFLPKMPRLRVVHMFLWYLIYGHPASNTVEKPSFISERRTIKQESGRAGVRPSSSGSAWEACSEAPSKGSQDGVTWEAEVELATETVYVDDASWMRYIPPIPVHRDFGFGWALVSDILLCLPLSIFIQIVQVSYKVDNLEEFLNDPLKKHTLIRFLPRPIRQQLLYKRRYIFSVVENLQRLCYMGVLQFGPTEKFQDKDQVFIFLKKNAVIVDTTICDPHYNLGRRRRPFERRLYVLNSMQDVENYWFDLQCVCLNTPLGVVRCPRVRKNSSTDQGSDEEGSLQKEQESAMDKHNLERKCAMLEYTTGSREVVDEGLIPGDGLGAAGLDSSFYGHLKRNWIWTSYIINQAKKENTAAENGLTVRLQTFLSKRPMPLSARGNSRLNIWGEARVGSELCAGWEEQFEVDREPSLDRNRRVRGGKSQKRKRLKKDPGKKIKRKKKGEFPGEKSKRLRYHDEADQSALHRMTRLRVTWSMQEDGLLVLCRIASNVLNTKVKGPFVTWQVVRDILHATFEESLDKTSHSLGRRARYIVKNPQAYLNYKVCLAEVYQDKALVGDFMNRRGDYDDPKVCANEFKEFVEKLKEKFSSALRNSNLEIPDTLQELFARYRVLAIGDEKDQTRKEDELNSVDDIHFLVLQNLIQSTLALSDSQMKSYQSFQTFRLYREYKDHVLVKAFMECQKRSLVNRRRVNHTLGPKKNRALPFVPMSYQLSQTYYRIFTWRFPSTICTESFQFLDRMRAAGKLDQPDRFSFKDQDNNEPTNDMVAFSLDGPGGNCVAVLTLFSLGLISVDVRIPEQIIVVDSSMVENEVIKSLGKDGSLEDDEDEEDDLDEGVGGKRRSMEVKPAQASHTNYLLMRGYYSPGIVSTRNLNPNDSIVVNSCQMKFQLRCTPVPARLRPAAAPLEELTMGTSCLPDTFTKLINPQENTCSLEEFVLQLELSGYSPEDLTAALEILEAIIATGCFGIDKEELRRRFSALEKAGGGRTRTFADCIQALLEQHQVLEVGGNTARLVAMGSAWPWLLHSVRLKDREDADIQREDPQARPLEGSSSEDSPPEGQAPPSHSPRGTKRRASWASENGETDAEGTQMTPAKRPALQDSNLAPSLGPGAEDGAEAQAPSPPPALEDTAAAGAAQEDQEGVGEFSSPGQEQLSGQAQPPEGSEDPRGFTESFGAANISQAARERDCESVCFIGRPWRVVDGHLNLPVCKGMMEAMLYHIMTRPGIPESSLLRHYQGVLQPVAVLELLQGLESLGCIRKRWLRKPRPVSLFSTPVVEEVEVPSSLDESPMAFYEPTLDCTLRLGRVFPHEVNWNKWIHLX

SEQ ID NO: 3149 - DNA, 6878 bp, Rattus norvegicus; identical to SEQ ID NO: 3145
  ref <308>: DATABASE ACCESSION NUMBER: EMBL / L28801
  ref <309>: DATABASE ENTRY DATE: 2000-03-04

SEQ ID NO: 3150 - protein, 2149 aa, Rattus norvegicus; identical to SEQ ID NO: 3146
  misc_feature (1)..(2149): Xaa=Unknown amino acid

SEQ ID NO: 3151 - DNA, 6996 bp, Homo sapiens; identical to SEQ ID NO: 3147
  ref <308>: DATABASE ACCESSION NUMBER: EMBL / U02619
  ref <309>: DATABASE ENTRY DATE: 1994-05-11

SEQ ID NO: 3152 - protein, 2110 aa, Homo sapiens; identical to SEQ ID NO: 3148
  misc_feature (1)..(2110): Xaa=Unknown amino acid

SEQ ID NO: 3153 - DNA, 6878 bp, Rattus norvegicus; identical to SEQ ID NO: 3145
  ref <308>: DATABASE ACCESSION NUMBER: EMBL / L28801
  ref <309>: DATABASE ENTRY DATE: 2000-03-04

SEQ ID NO: 3154 - protein, 2149 aa, Rattus norvegicus; identical to SEQ ID NO: 3146
  misc_feature (1)..(2149): Xaa=Unknown amino acid

SEQ ID NO: 3155 - DNA, 6996 bp, Homo sapiens; identical to SEQ ID NO: 3147
  ref <308>: DATABASE ACCESSION NUMBER: EMBL / U02619
  ref <309>: DATABASE ENTRY DATE: 1994-05-11

SEQ ID NO: 3156 - protein, 2110 aa, Homo sapiens; identical to SEQ ID NO: 3148
  misc_feature (1)..(2110): Xaa=Unknown amino acid

SEQ ID NO: 3157 - DNA, 6878 bp, Rattus norvegicus; identical to SEQ ID NO: 3145
  ref <308>: DATABASE ACCESSION NUMBER: EMBL / L28801
  ref <309>: DATABASE ENTRY DATE: 2000-03-04

SEQ ID NO: 3158 - protein, 2149 aa, Rattus norvegicus; identical to SEQ ID NO: 3146
  misc_feature (1)..(2149): Xaa=Unknown amino acid

SEQ ID NO: 3159 - DNA, 6996 bp, Homo sapiens; identical to SEQ ID NO: 3147
  ref <308>: DATABASE ACCESSION NUMBER: EMBL / U02619
  ref <309>: DATABASE ENTRY DATE: 1994-05-11

SEQ ID NO: 3160 - protein, 2110 aa, Homo sapiens; identical to SEQ ID NO: 3148
  misc_feature (1)..(2110): Xaa=Unknown amino acid

SEQ ID NO: 3161 - DNA, 3808 bp, Rattus norvegicus
  ref <308>: DATABASE ACCESSION NUMBER: EMBL / L29281
  ref <309>: DATABASE ENTRY DATE: 2000-03-04
gaactagcctgacctggacttgcccggcagaagcgacagtggtcggagggcgacgagattttaggggcagcacctgaagcacaattcgagtcctgcgccagggcacgggccattgtccggatccagaaagtcggtcaccggggaagaaaaatggccagtgatacaccaggtttctacgtggacaaacttaacaaatactcccagatacacaaagtaaagattatatataaagaaatttctgttacaggacctccacacgacagaaggtttacatttcaagttataatagaagagagggaatttccagaaggtgaaggtagatcaaagcaggaggcgaaaaataatgctgccaaattagctgtcgaaatacttgataatgaaaacaaggtggatagtcacacggatgcttctgaacaaggtttaatagaggggaactacattggccttgtcaattcttttgcccagaaggaaaatctgcctgtaaattttgaactgtgtgaccccgactcccaattgcctcacagatttatttgtaaatgcaaaatcgggcagactacgtatggtactggtttcggtgctaacaaaaaggaggcaaagcagttggctgccaaaaatgcgtatcagaagctgtcagagaaaagcccatcgaaaactggctttgtcacatctttatccagtgacttttccagcagctcgtctataacaagtaactctgcttctcagtcagcatctggaagggatttcgaggacatatttatgaatggtctcagagaaaaaaggaaatcaggagtaaaagtgccatctgatgacgtgctaagaaataaatataccttggacgacaggtttagcaaagattttgaagacatagaagaaattggctcgggtggatttggccaagttttcaaagcaaaacacagaatcgatggaaagacgtatgctattaagcgcattacatataacaccaagaaggcaaagcgtgaagtacaagcactagcagaactcaatcacgccaacattgttcaataccgagtttgttgggagggagaggactatgactatgatcccgagaacagcacaaacggtgacacaagtcgatacaagacccggtgcctctttatccaaatggaattctgtgataaaggaactctgcagcagtggttggaaaagagaaatcggagtcaagaggacaaggctttggttttggagttatttgaacaaatagtgacaggagtggattatatacactcgaaaggtttaattcatagagaccttaagccaggtaatatatttttagtggatgaaaaacacattaagatcggagactttggccttgcaacagccctggaaaatgatggaaatcctcgaacaaagtatacaggaactcctcaatacatgagtccagaacaaaagtcatcgttagtggaatatggaaaggaagtggacatctttgctttgggccttattctagctgaacttcttcacatatgcaaaactgattcagagaaaatagagtttttccaacttctaagaaatggcatcttctccgatgatattttcgacaacaaggaaaaaagccttctacagaaattactctcaagtaaacccagggaacgacccaatacgtctgaaatcctgaagactttggctgagtggaagaacatctcggagaaaaagaaaagaaacacgtgttagggcttttaactgcagtctgaagtggaatgtcagagaacaatgaacttcttctcttaacactctcccagacaggttttggtaagggtgacccaaagacattgtatttatcggctatgaacaagtatgcccgtttcctcaattgttaattgtcggacctgtggctggctagccaaatatggaaatgtttgtttctttctcgtctgcccgaagagaaagccaagccgcggtggagaaggtcacttaacccccaatgctaactgaaggcctaaggcttttgacatactaaagagctggcagccagagctgggagagaagaacctgcagacaggcaggcagagacacaaagacatggactagaatgaaacaggaaggtagagagattgagagacagagccacatggagagacgaaatggcagagtagtaggcttaagttagatgagctaactgagagactgccccagaaaacaggccaacagccttatacacagatgtctcagtgtctatcattaaactccaagcaggatcaatgaaggccctacaataggtttttttttcttgttacttcaaaaacaatcttacaaagttattttcttgagagttccatatgtgtattgtatcctgatcacactccaaaccttctgctgttcatgccttatcatgtgaactatacctctgaacgtgggagtccaaattgtccatctgctccttaacgttacttctcataggtagtttagtcgttgtgatgagaaaagtaatgaaatggtaccagaaatggggttttgtcgcaataaacctactgtgcggtttcttggactttcaggactggtttgtgggaagaatgtggaaaagtttgaagcagcaggctagagaagtcctcagatggtatacgtcaatcttaattctggtagctcagaagtctttgccaaaaaggaacccattgggaattggactagatgccaggacatttgtgtacaagtcaaaagactggtgagggaaatttcaagacattcagactgtggcatggtggttatctccttctcatagctagaattatagagcaaattaggaaggagtgaggggtaagaagtgagagaacaaagatctgggaatgagtgccttcaaagacgaggtcggtgcaaagctgttaaagcgattagtgcactgagggaagccatgtactttccattgctgccattataggaacaagactacagccacgggcggctgcacagcatggaaagtaaaagccctttaaaggtctttcgtgtcaaaagttccagcaggtgccacagccactccagtggagtctgtgtgacaggaagctcttgtgcttcgtttctatgcagaacagaggcctgtgcctggaatggcttgtcctcctggaggtcctggcagtctccctgcaaaaagatggtgaccagggtctatgctttcagtggaattgccttctgtgttctagccttggtgatcttagcgattttaagcctgtcaacaatatctgattttaggaatatagcagggtgggcagatgatcatgtatctttagatgtctcaggcactgaaataaataaatgtctcacaccatcatggtcctgatgaactcaatggctgcaatgaattcaactgctgtatccattagttcccagaaaataggagagaaattaattgcagttactaagaacatgactgttccagaaaaatctttccccccttttgggaaagttttgtttagcatgattcagaatagtaatgattcttttaaaaaagatcatagacaacttccaacaagttgaacaaacttaacagagttaactatggttacttttgcttccttactattctgaggggccataaatataatagagtttaaactttattaaaacaaaggtaaatgatgaatacatacctggtgcccaccagtctggcagtataactgcagttttctaaactattgttttcagctgagaattgttttctagactgtatgttccgctttcctccttgcaagggacatttggtgaggagatgaataagagctagatgattgccaattatgatgtatctgttctaactgtttaagtctatgccaaaaagtaaagctttttacaacaacac

SEQ ID NO: 3162 - protein, 514 aa, Rattus norvegicus
  misc_feature (1)..(514): Xaa=Unknown amino acid
MASDTPGFYVDKLNKYSQIHKVKIIYKEISVTGPPHDRRFTFQVIIEEREFPEGEGRSKQEAKNNAAKLAVEILDNENKVDSHTDASEQGLIEGNYIGLVNSFAQKENLPVNFELCDPDSQLPHRFICKCKIGQTTYGTGFGANKKEAKQLAAKNAYQKLSEKSPSKTGFVTSLSSDFSSSSSITSNSASQSASGRDFEDIFMNGLREKRKSGVKVPSDDVLRNKYTLDDRFSKDFEDIEEIGSGGFGQVFKAKHRIDGKTYAIKRITYNTKKAKREVQALAELNHANIVQYRVCWEGEDYDYDPENSTNGDTSRYKTRCLFIQMEFCDKGTLQQWLEKRNRSQEDKALVLELFEQIVTGVDYIHSKGLIHRDLKPGNIFLVDEKHIKIGDFGLATALENDGNPRTKYTGTPQYMSPEQKSSLVEYGKEVDIFALGLILAELLHICKTDSEKIEFFQLLRNGIFSDDIFDNKEKSLLQKLLSSKPRERPNTSEILKTLAEWKNISEKKKRNTCX

SEQ ID NO: 3163 - DNA, 2562 bp, Homo sapiens
  ref <308>: DATABASE ACCESSION NUMBER: EMBL / M35663
  ref <309>: DATABASE ENTRY DATE: 2000-03-04
cagtttctggagcaaattcagtttgccttcctggatttgtaaattgtaatgacctcaaaactttagcagttcttccatctgactcaggtttgcttctctggcggtcttcagaatcaacatccacacttccgtgattatctgcgtgcattttggacaaagcttccaaccaggatacgggaagaagaaatggctggtgatctttcagcaggtttcttcatggaggaacttaatacataccgtcagaagcagggagtagtacttaaatatcaagaactgcctaattcaggacctccacatgataggaggtttacatttcaagttataatagatggaagagaatttccagaaggtgaaggtagatcaaagaaggaagcaaaaaatgccgcagccaaattagctgttgagatacttaataaggaaaagaaggcagttagtcctttattattgacaacaacgaattcttcagaaggattatccatggggaattacataggccttatcaatagaattgcccagaagaaaagactaactgtaaattatgaacagtgtgcatcgggggtgcatgggccagaaggatttcattataaatgcaaaatgggacagaaagaatatagtattggtacaggttctactaaacaggaagcaaaacaattggccgctaaacttgcatatcttcagatattatcagaagaaacctcagtgaaatctgactacctgtcctctggttcttttgctactacgtgtgagtcccaaagcaactctttagtgaccagcacactcgcttctgaatcatcatctgaaggtgacttctcagcagatacatcagagataaattctaacagtgacagtttaaacagttcttcgttgcttatgaatggtctcagaaataatcaaaggaaggcaaaaagatctttggcacccagatttgaccttcctgacatgaaagaaacaaagtatactgtggacaagaggtttggcatggattttaaagaaatagaattaattggctcaggtggatttggccaagttttcaaagcaaaacacagaattgacggaaagacttacgttattaaacgtgttaaatataataacgagaaggcggagcgtgaagtaaaagcattggcaaaacttgatcatgtaaatattgttcactacaatggctgttgggatggatttgattatgatcctgagaccagtgatgattctcttgagagcagtgattatgatcctgagaacagcaaaaatagttcaaggtcaaagactaagtgccttttcatccaaatggaattctgtgataaagggaccttggaacaatggattgaaaaaagaagaggcgagaaactagacaaagttttggctttggaactctttgaacaaataacaaaaggggtggattatatacattcaaaaaaattaattcatagagatcttaagccaagtaatatattcttagtagatacaaaacaagtaaagattggagactttggacttgtaacatctctgaaaaatgatggaaagcgaacaaggagtaagggaactttgcgatacatgagcccagaacagatttcttcgcaagactatggaaaggaagtggacctctacgctttggggctaattcttgctgaacttcttcatgtatgtgacactgcttttgaaacatcaaagtttttcacagacctacgggatggcatcatctcagatatatttgataaaaaagaaaaaactcttctacagaaattactctcaaagaaacctgaggatcgacctaacacatctgaaatactaaggaccttgactgtgtggaagaaaagcccagagaaaaatgaacgacacacatgttagagcccttctgaaaaagtatcctgcttctgatatgcagttttccttaaattatctaaaatctgctagggaatatcaatagatatttaccttttattttaatgtttcctttaattttttactatttttactaatctttctgcagaaacagaaaggttttcttctttttgcttcaaaaacattcttacattttactttttcctggctcatctctttattttttttttttttttttaaagacagagtctcgctctgttgcccaggctggagtgcaatgacacagtcttggctcactgcaacttctgcctcttgggttcaagtgattctcctgcctcagcctcctgagtagctggattacaggcatgtgccacccacccaactaatttttgtgtttttaataaagacagggtttcaccatgttggccaggctggtctcaaactcctgacctcaagtaatccacctgcctcggcctcccaaagtgctgggattacagggatgagccaccgcgcccagcctcatctctttgttctaaagatggaaaaaccacccccaaattttctttttatactattaatgaatcaatcaattcatatctatttattaaatttctaccgcttttaggccaaaaaaatgtaagatcgttctctgcctcacatagcttacaagccagctggagaaatatggtactcattaaaaaaaaaaaaaaaaagtgatgtacaacc

SEQ ID NO: 3164 - protein, 551 aa, Homo sapiens
  ref <308>: DATABASE ACCESSION NUMBER: SWISS-Prot / P19525
  ref <309>: DATABASE ENTRY DATE: 2002-06-15
MAGDLSAGFFMEELNTYRQKQGVVLKYQELPNSGPPHDRRFTFQVIIDGREFPEGEGRSKKEAKNAAAKLAVEILNKEKKAVSPLLLTTTNSSEGLSMGNYIGLINRIAQKKRLTVNYEQCASGVHGPEGFHYKCKMGQKEYSIGTGSTKQEAKQLAAKLAYLQILSEETSVKSDYLSSGSFATTCESQSNSLVTSTLASESSSEGDFSADTSEINSNSDSLNSSSLLMNGLRNNQRKAKRSLAPRFDLPDMKETKYTVDKRFGMDFKEIELIGSGGFGQVFKAKHRIDGKTYVIKRVKYNNEKAEREVKALAKLDHVNIVHYNGCWDGFDYDPETSDDSLESSDYDPENSKNSSRSKTKCLFIQMEFCDKGTLEQWIEKRRGEKLDKVLALELFEQITKGVDYIHSKKLIHRDLKPSNIFLVDTKQVKIGDFGLVTSLKNDGKRTRSKGTLRYMSPEQISSQDYGKEVDLYALGLILAELLHVCDTAFETSKFFTDLRDGIISDIFDKKEKTLLQKLLSKKPEDRPNTSEILRTLTVWKKSPEKNERHTC

SEQ ID NO: 3165 - DNA, 471 bp, Rattus norvegicus
  ref <308>: DATABASE ACCESSION NUMBER: EMBL / L29573
  ref <309>: DATABASE ENTRY DATE: 2000-03-04
tacagggatgccttgctgaccagcaccatcaactgtgttaccagttttatttctggatttgccattttctccatccttggttacatggcccatgaacataaagtcaagattgaggatgtcgccactgaaggagctggccttgtatttgtcctgtatccagaagccatttctactctgtcgggatccacgttctgggctgtcctgttcttcctgatgctcctggctctggggctagatagctcaatgggaggcatggaggcagtcatcaccggactggctgatgacttccaggtcctgaagcgacaccgaaaactcttcacatgtgctgtcaccctcggtacctttcttctggccatgttttgcataacgaagggagggatttacgtcctcactctgctggacaccttcgcggcaggcacgtccattctctttgccgtgctcatggaggccattggagtttcctggttttat

SEQ ID NO: 3166 - DNA, 1983 bp, Homo sapiens
  ref <308>: DATABASE ACCESSION NUMBER: EMBL / M65105
  ref <309>: DATABASE ENTRY DATE: 2000-03-04
gccggacacagcctcggcgtgcccccaggaccggtaaagttcctctcgccagccgcatccatgcttctggcgcggatgaacccgcaggtgcagcccgagaacaacggggcggacacgggtccagagcagccccttcgggcgcgcaaaactgcggagctgctggtggtgaaggagcgcaacggcgtccagtgcctgctggcgccccgcgacggcgacgcgcagccccgggagacctggggcaagaagatcgacttcctgctgtccgtagtcggcttcgcagtggacctggccaacgtgtggcgcttcccctacctctgctacaagaacggcggcggtgccttcttgatcccgtacacactgttccttatcatcgcggggatgcccctgttctacatggagctggctctgggacagtacaaccgggagggggctgccaccgtttggaaaatctgcccattcttcaaaggcgttggctatgctgtcatcctgatcgccctgtacgttggcttctactacaacgtcatcatcgcctggtcactctactacctcttctcctccttcaccctcaacctgccctggaccgactgtggccacacctggaacagccccaactgtaccgaccccaagctcctcaatggctccgtgcttggcaaccacaccaagtactccaagtacaagttcacgccggcagccgagttttatgagcgtggtgtcctgcaccttcacgagagcagcgggattcatgacatcggcctgccccagtggcagctcttgctctgtctgatggtcgtcgtcatcgtcttgtattttagcctctggaaaggggtgaagacatcaggaaaggtggtgtggatcacagccacgctgccttacttcgtgctgttcgtgctcctggtccatggcgtcacgctgcccggagcctccaatggcatcaatgcctacctgcacatcgacttctaccgcttgaaagaggccacggtatggattgatgccgcaactcagatatttttttccttgggggctggatttggagtattgattgcatttgccagttacaacaaatttgacaacaactgttacagggatgccctgctgaccagcagcatcaactgtatcaccagcttcgtctctgggttcgccatcttctccatccttggttacatggcccatgaacacaaggtcaacattgaggatgtggccacagaaggagctggcctagtgttcatcctgtatccagaggccatttctaccctgtctggatctacattctgggctgttgtgtttttcgtcatgctcctggcgctgggccttgacagctcaatgggaggcatggaggctgtcatcacgggcctggcagatgacttccaggtcctgaagcgacaccggaaactcttcacatttggcgtcaccttcagcactttccttctcgccctgttctgcataaccaagggtggaatttacgtcttgaccctcctggacacctttgctgcgggcacctccatcctttttgctgtcctcatggaagccatcggagtttcctggttttatggagtggacaggttcagcaacgacatccagcagatgatggggttcaggccgggtctatactggagactgtgctggaagttcgtcagtcctgccttcctcctgttcgtggttgtggtcagcatcatcaacttcaagccactcacctacgacgactacatcttcccgccctgggccaactgggtggggtggggcatcgccctgtcctccatggtcctggtgcccatctacgtcatctataagttcctcagcacgcagggctctctttgggagagactggcctatggcatcacgccagagaacgagcaccacctggtggctcagagggacatcagacagttccagttgcaacactggctggccatctgagcctgcctggaggagaaggaggaacccccatgccaatgtccaggtcacaggcatccgctgctacgtcaa

SEQ ID NO: 3167 - protein, 617 aa, Homo sapiens [sequence omitted]

SEQ ID NO: 3168 - DNA, 2106 bp, Rattus norvegicus
  ref <308>: DATABASE ACCESSION NUMBER: EMBL / L31619
  ref <309>: DATABASE ENTRY DATE: 2002-02-11
gccgtgctgccgctccagcgacatgtgcggcgggcggggaggcatctggctggctctggccgcggcgctgctgcacgtgtccctgcaaggcgagttccagaggaggctgtacaaggagctggtcaagaactacaacccgctggagaggccggtggccaacgactcgcagccgctcaccgtgtacttctccctgagtctcctgcagatcatggatgtggatgagaagaaccaagttttaaccaccaacatttggctacaaatgtcttggacagatcactatttgcagtggaacatgtctgagtaccccggagtgaagaatgttcgttttccagatggccagatttggaaaccagacattctcctctataacagtgctgatgagcgctttgatgccacgttccacaccaatgttttggtgaatgcatctgggcattgccagtatctccctccaggcatattcaagagctcctgctacattgacgttcgctggttcccttttgatgtgcagcagtgcaaactgaagtttgggtcctggtcctatggagggtggtcactggacctgcaaatgcaagaggcagatatcagcagctatatccccaacggagaatgggatctcatgggaatccctggcaaaaggaatgagaagttctatgagtgctgcaaagagccatacccagatgtcacctacacagtaaccatgcgccgtaggacactctactatggcctcaatctgctcatcccttgtgtactcatttcagccctggctctgctggtattcttgctgcctgcagactctggagagaaaatctctcttggaataactgtcttactttctctgactgtcttcatgctgcttgtggctgagatcatgccagcaacatctgattctgtgcccttgatagcacaatacttcgccagcaccatgatcatcgtgggcctctctgtagtggtgacagtgattgtgctgagatatcaccaccatgaccctgatggtggcaaaatgcctaagtggaccagaatcattctcctgaactggtgtgcatggtttctgcgcatgaagaggcccggagaggacaaggtgcggccagcttgtcagcacaagcctcggcgctgcagcctggccagtgtggagctgagtgcaggtgctgggccacccaccagcaatggcaacctgctctacattggcttccgaggcctggagggcatgcactgtgccccaactccagactctggggtcgtatgtggccgtttggcctgctccccaacacatgatgagcacctcatgcacggtgcacacccctctgatggggaccccgacctggccaagatcctggaggaggtccgctacatcgccaaccgcttccgctgccaggacgagagtgaggtgatctgcagtgaatggaagtttgcagcctgcgtggtggaccgcttgtgcctcatggccttttcggtctttaccatcatctgtaccatcggcatcctcatgtcagctccaaactttgtggaggctgtgtccaaagactttgcttaatgttatcaagtaggaaatgcgcagataagaagagaatctggagggtgagaattggggtcctaactccacagtgtgataaatggaagaactctgaggtatccctgtagctgtcaatcttgagacttagttttctggttactttaactgaaaagatctcagcagccttctgtttattcttctctcccttatcactggcatagccttgtactcagcaggggcactacgtggtcgtttgtctgctctggacagccctataggatagatcttagtggctcttgcagcccagtaaaagcctgtcctgttggtggtgcatggaaacatgccccagtcctgggctcacaagaattcgctgtctgcctttgctatgcgcagacccaggctgaaaccaatgcagagcagtccccactggatccaccgcagcaactgccatgaaaaaggaaggcaaatacaaattcaaactgcaaacttctctgctagtttctctgctagttttcctgtgattcaacttacatttctgtctgtttatctgtctgtctatctatctatctatctatctatctatctatctatctatc

SEQ ID NO: 3169 - protein, 502 aa, Rattus norvegicus
  ref <308>: DATABASE ACCESSION NUMBER: SWISS-Prot / Q05941
  ref <309>: DATABASE ENTRY DATE: 2002-06-15
MCGGRGGIWLALAAALLHVSLQGEFQRRLYKELVKNYNPLERPVANDSQPLTVYFSLSLLQIMDVDEKNQVLTTNIWLQMSWTDHYLQWNMSEYPGVKNVRFPDGQIWKPDILLYNSADERFDATFHTNVLVNASGHCQYLPPGIFKSSCYIDVRWFPFDVQQCKLKFGSWSYGGWSLDLQMQEADISSYIPNGEWDLMGIPGKRNEKFYECCKEPYPDVTYTVTMRRRTLYYGLNLLIPCVLISALALLVFLLPADSGEKISLGITVLLSLTVFMLLVAEIMPATSDSVPLIAQYFASTMIIVGLSVVVTVIVLRYHHHDPDGGKMPKWTRIILLNWCAWFLRMKRPGEDKVRPACQHKPRRCSLASVELSAGAGPPTSNGNLLYIGFRGLEGMHCAPTPDSGVVCGRLACSPTHDEHLMHGAHPSDGDPDLAKILEEVRYIANRNRCQDESEVICSEWKFAACVVDPLCLMAFSVFTIICTIGILMSAPNFVEAVSKDFA

SEQ ID NO: 3170 - DNA, 2087 bp, Homo sapiens
  ref <308>: DATABASE ACCESSION NUMBER: EMBL / X70297
  ref <309>: DATABASE ENTRY DATE: 1994-06-01
ggcacgaggagccgagcggcgaggtgcctctgtggccgcacggcaggcccgggcgacacggagacgtggagcgcgccggctcgctgcagctccgggactcaacatgcgctgctcgccgggaggcgtctggctgggcctggccgcgtcgctcctgcacgtgtccctgcaaggcgagttccagaggaagctttacaaggagctggtcaagaactacaatcccttggagaggcccgtggccaatgactcgcaaccactcaccgtctacttctccctgagcctcctgcagatcatggacgtggatgagaagaaccaagttttaaccaccaacatttggctgcaaatgtcttggacagatcactatttacagtggaatgtgtcagaatatccaggggtgaagactgttcgtttcccagatggccagatttggaaaccagacattcttctctataacagtgctgatgagcgctttgacgccacattccacactaacgtgttggtgaattcttctgggcattgccagtacctgcctccaggcatattcaagagttcctgctacatcgatgtacgctggtttccctttgatgtgcagcactgcaaactgaagtttgggtcctggtcttacggaggctggtccttggatctgcagatgcaggaggcagatatcagtggctatatccccaatggagaatgggacctagtgggaatccccggcaagaggagtgaaaggttctatgagtgctgcaaagagccctaccccgatgtcaccttcacagtgaccatgcgccgcaggacactctactatggcctcaacctgctgatcccctgtgtgctcatctccgccctcgccctgctggtgttcctgcttcctgcagattccggggagaagatttccctggggataacagtcttactctctcttaccgtcttcatgctgctcgtggctgagatcatgcccgcaacatccgattcggtaccattgatagcccagtacttcgccagcaccatgatcatcgtgggcctctcggtggtggtgacagtgatcgtgctgcagtaccaccaccacgaccccgacgggggcaagatgcccaagtggaccagagtcatccttctgaactggtgcgcgtggttcctgcgaatgaagaggcccggggaggacaaggtgcgcccggcctgccagcacaagcagcggcgctgcagcctggccagtgtggagatgagcgccgtgggcccgccgcccgccagcaacgggaacctgctgtacatcggcttccgcggcctggacggcgtgcactgtgtcccgacccccgactctggggtagtgtgtggccgcatggcctgctcccccacgcacgatgagcacctcctgcacggcgggcaaccccccgagggggacccggacttggccaagatcctggaggaggtccgctacattgccaaccgcttccgctgccaggacgaaagcgaggcggtctgcagcgagtggaagttcgccgcctgtgtggtggaccgcctgtgcctcatggccttctcggtcttcaccatcatctgcaccatcggcatcctgatgtcggctcccaacttcgtggaggccgtgtccaaagactttgcgtaaccacactggttctgtacatgtggaaaactcacagatgggcaaggcctttggcttggcgagatttgggggtgctaatccaggacagcattacacgccacaactccagtgttcccttctggctgtcagtcgtgttgcttacggtttctttgttactttaggtagtagaatctcagcactttgtttcatattctcagatgggctgatagatactccttggcacatccgtaccatcggtcagcagggccactgagtagtcattttgccattagccctcagcctggaaagcccttcggagagctccccatggctcctcaccaccgagacagttggttttgcatgtctgcatgaaggtctacctgaaaattcaacatttgctttttgcttgtgtacaaacccagattgaagctaaaataaaccagactcactaaatcctttccaataattgactggtggaaggaaaacaaaaaaaaaaaaa

SEQ ID NO: 3171 - protein, 502 aa, Homo sapiens
  ref <308>: DATABASE ACCESSION NUMBER: SWISS-Prot / P36544
  ref <309>: DATABASE ENTRY DATE: 2002-06-15
MRCSPGGVWLALAASLLHVSLQGEFQRKLYKELVKNYNPLERPVANDSQPLTVYFSLSLLQIMDVDEKNQVLTTNIWLQMSWTDHYLQWNVSEYPGVKTVRFPDGQIWKPDILLYNSADERFDATFHTNVLVNSSGHCQYLPPGIFKSSCYIDVRWFPFDVQHCKLKFGSWSYGGWSLDLQMQEADISGYIPNGEWDLVGIPGKRSERFYECCKEPYPDVTFTVTMRRRTLYYGLNLLIPCVLISALALLVFLLPADSGEKISLGITVLLSLTVFMLLVAEIMPATSDSVPLIAQYFASTMIIVGLSVVVTVIVLQYHHHDPDGGKMPKWTRVILLNWCAWFLRMKRPGEDKVRPACQHKQRRCSLASVEMSAVAPPPASNGNLLYIGFRGLDGVHCVPTPDSGVVCGRMACSPTHDEHLLHGGQPPEGDPDLAKILEEVRYIANRFRCQDESEAVCSEWKFAACVVDRLCLMAFSVFTIICTIGILMSAPNFVEAVSKDFA

SEQ ID NO: 3172 - DNA, 1858 bp, Rattus norvegicus
  ref <308>: DATABASE ACCESSION NUMBER: EMBL / L31621
  ref <309>: DATABASE ENTRY DATE: 2000-06-16
ggtgccagcacttgagtagctgtgcttcggtggtcagcaccagagtgtctccctccctgtctatcgggtcttagacatgggtgttgtgctgctcccgccgccgctgtccatgctgatgctggtgctgatgctgctgccagcggccagtgcctcagaagctgagcaccgcctgttccagtacctgttcgaagattacaacgagatcatccggccagtggctaatgtgtcccatccagtcatcatccagtttgaggtgtccatgtctcagctggtgaaggtggatgaagtaaaccagatcatggaaaccaacctgtggctgaagcaaatctggaatgactacaagctgaaatggaaaccctctgactaccaaggggtggagttcatgcgtgttcctgcagagaagatctggaaaccagacatcgtactgtacaacaacgctgatggggatttccaggtggatgacaagaccaaagctctactcaagtacacaggagaagtgacttggatcccgccggccatctttaagagctcatgcaaaatcgacgtgacctacttcccattcgactaccaaaactgcaccatgaagttcggctcctggtcctacgacaaggcaaagatcgacctggtcctcatcggctcctccatgaacctcaaggactactgggagagtggcgagtgggctatcattaaagccccgggctacaaacatgaaatcaagtacaactgctgtgaggagatctaccaagacatcacgtactcgctgtacatccgtcgcctgccgctgttctacaccatcaacctcatcatcccctgcctgctcatctccttcctcactgtgcttgtcttctacctgccctccgactgtggggagaaggtgacactctgcatctctgtgctcctctccctgactgtctttctcctggtgatcaccgagaccattccttccacctcgctggtcatccccctgattggggagtacctcctcttcactatgatttttgtcaccttgtccattgtcatcacagtctttgtgctcaatgtgcactatagaactccaaccacacacaccatgcccacttgggtcaaggccgtgttcttgaacctgctccccagggtcatgtttatgactaggccgaccagtggtgagggggacactcctaagacgaggaccttctacggcgctgagctctcaaacctgaactgcttcagccgtgcagactccaaaagctgcaaggaaggctacccctgccaagatgggacctgtggctactgccaccaccgtagggtaaaaatctcaaatttcagtgccaacctcacaagaagctccagttctgagtctgtcaacgctgtgttgtccctctctgccctgtcaccagaaatcaaagaagccatccaaagtgtgaagtacattgccgaaaacatgaaagcacagaatgtagccaaagagattcaagatgattggaagtacgttgccatggtgattgatcgcatctttctctgggttttcatcctggtgtgcattttaggaacggcgggattatttctgcaacccttgatggccagagatgacacatagactgtgcactgttcatcgaggctcacctgtgctgacgcaaggggccacttcctcaatagcactatactttatctgatcactggcttggagtttgctatttcaagggttattttcaactcatcttgatttttcgtaaaaaagaaatgtgggagacaaatgtctagttatttatcatgggtaaatgaacatttcactacccctgtgattgaaactttaggtagaaaaattttctgttcataaatattaactccattagtgcaggatctccataaactcatttct

SEQ ID NO: 3173 - protein, 499 aa, Rattus norvegicus
  ref <308>: DATABASE ACCESSION NUMBER: SWISS-Prot / P04757
  ref <309>: DATABASE ENTRY DATE: 2002-06-15
MGVVLLPPPLSMLMLVLMLLPAASASEAEHRLFQYLFEDYNEIIRPVANVSHPVIIQFEVSMSQLVKVDEVNQIMETNLWLKQIWNDYKLKWKPSDYQGVEFMRVPAEKIWKPDIVLYNNADGDFQVDDKTKALLKYTGEVTWIPPAIFKSSCKIDVTYFPFDYQNCTMKFGSWSYDKAKIDLVLIGSSMNLKDYWESGEWAIIKAPGYKHEIKYNCCEEIYQDITYSLYIRRLPLFYTINLIIPCLLISFLTVLVFYLPSDCGEKVTLCISVLLSLTVFLLVITETIPSTSLVIPLIGEYLLFTMIFVTLSIVITVFVLNVHYRTPTTHTMPTWVKAVFLNLLPRVMFMTRPTSGEGDTPKTRTFYGAELSNLNCFSRADSKSCKEGYPCQDGTCGYCHHRRVKISNFSANLTRSSSSESVNAVLSLSALSPEIKEAIQSVKYIAENMKAQNVAKEIQDDWKYVAMVIDRIFLWVFILVCILGTAGLFLQPLMARDDT

SEQ ID NO: 3174 - DNA, 1425 bp, Homo sapiens
  ref <308>: DATABASE ACCESSION NUMBER: EMBL / X53559
  ref <309>: DATABASE ENTRY DATE: 1995-07-20
tcagaggctgagcaccgtctatttgagcggctgtttgaagattacaatgagatcatccggcctgtagccaacgtgtctgacccagtcatcatccatttcgaggtgtccatgtctcagctggtgaaggtggatgaagtaaaccagatcatggagaccaacctgtggctcaagcaaatctggaatgactacaagctgaaatggaacccctctgactatggtggggcagagttcatgcgtgtccctgcacagaagatctggaagccagacattgtgctgtataacaatgctgttggggatttccaggtggacgacaagaccaaagccttactcaagtacactggggaggtgacttggatacctccggccatctttaagagctcctgtaaaatcgacgtgacctacttcccgtttgattaccaaaactgtaccatgaagttcggttcctggtcctacgataaggcgaaaatcgatctggtcctgatcggctcttccatgaacctcaaggactattgggagagcggcgagtgggccatcatcaaagccccaggctacaaacacgacatcaagtacaactgctgcgaggagatctaccccgacatcacatactcgctgtacatccggcgcctgcccttgttctacaccatcaacctcatcatcccctgcctgctcatctccttcctcactgtgctcgtcttctacctgccctccgactgcggtgagaaggtgaccctgtgcatttctgtcctcctctccctgacggtgtttctcctggtgatcactgagaccatcccttccacctcgctggtcatccccctgattggagagtacctcctgttcaccatgatttttgtaaccttgtccatcgtcatcaccgtcttcgtgctcaacgtgcactacagaaccccgacgacacacacaatgccctcatgggtgaagactgtattcttgaacctgctccccagggtcatgttcatgaccaggccaacaagcaacgagggcaacgctcagaagccgaggcccctctacggtgccgagctctcaaatctgaattgcttcagccgcgcagagtccaaaggctgcaaggagggctacccctgccaggacgggatgtgtggttactgccaccaccgcaggataaaaatctccaatttcagtgctaacctcacgagaagctctagttctgaatctgttgatgctgtgctgtccctctctgctttgtcaccagaaatcaaagaagccatccaaagtgtcaagtatattgctgaaaatatgaaagcacaaaatgaagccaaagagattcaagatgattggaagtatgttgccatggtgattgatcgtatttttctgtgggttttcaccctggtgtgcattctagggacagcaggattgtttctgcaacccctgatggccagggaagatgcataa

SEQ ID NO: 3175 - protein, 503 aa, Homo sapiens
  ref <308>: DATABASE ACCESSION NUMBER: SWISS-Prot / P32297
  ref <309>: DATABASE ENTRY DATE: 2002-06-15
MALAVSLPLALSPPRLLLLLLSLLPVARASEAEHRLFERLFEDYNEIIRPVANVSDPVIIHFEVSMSQLVKVDEVNQIMETNLWLKQIWNDYKLKWNPSDYGGAEFMRVPAQKIWKPDIVLYNNAVGDFQVDDKTKALLKYTGEVTWIPPAIFKSSCKIDVTYFPFDYQNCTMKFGSWSYDKAKIDLVLIGSSMNLKDYWESGEWAIIKAPGYKHDIKYNCCEEIYPDITYSLYIRRLPLFYTINLIIPCLLISFLTVLVFYLPSDCGEKVTLCISVLLSLTVFLLVITETIPSTSLVIPLIGEYLLFTMIFVTLSIVITVFVLNVHYRTPTTHTMPSWVKTVFLNLLPRVMFMTRPTSNEGNAQKPRPLYGAELSNLNCFSRAESKGCKEGYPCQDGMCGYCHHRRIKISNFSANLTRSSSSESVDAVLSLSALSPEIKEAIQSVKYIAENMKAQNEAKEIQDDWKYVAMVIDRIFLWVFTLVCILGTAGLFLQPLMAREDA

SEQ ID NO: 3176 - DNA, 1858 bp, Rattus norvegicus; identical to SEQ ID NO: 3172
  ref <308>: DATABASE ACCESSION NUMBER: EMBL / L31621
  ref <309>: DATABASE ENTRY DATE: 2000-06-16

SEQ ID NO: 3177 - protein, 499 aa, Rattus norvegicus; identical to SEQ ID NO: 3173
  ref <308>: DATABASE ACCESSION NUMBER: SWISS-Prot / P04757
  ref <309>: DATABASE ENTRY DATE: 2002-06-15

SEQ ID NO: 3178 - DNA, 1425 bp, Homo sapiens; identical to SEQ ID NO: 3174
  ref <308>: DATABASE ACCESSION NUMBER: EMBL / X53559
  ref <309>: DATABASE ENTRY DATE: 1995-07-20

SEQ ID NO: 3179 - protein, 503 aa, Homo sapiens; identical to SEQ ID NO: 3175
  ref <308>: DATABASE ACCESSION NUMBER: SWISS-Prot / P32297
  ref <309>: DATABASE ENTRY DATE: 2002-06-15

SEQ ID NO: 3180 - DNA, 711 bp, Rattus norvegicus
  ref <308>: DATABASE ACCESSION NUMBER: EMBL / L32591
  ref <309>: DATABASE ENTRY DATE: 2000-03-04
gggactcgcacttgcaatatgactttggaggaattctcggccgcagagcagaagatcgaaaggatggacacggtgggcgatgccctggaggaagtgctcagcaaggctcggagtcagcgcaccataactgtcggcgtgtacgaggcagccaagctgctcaacgtagacccggacaacgtggtcctgtgcctgctggctgcggatgaagatgacgaccgggacgtggctctgcagatccatttcaccctcattcgtgctttctgttgcgagaacgacatcaacatcctgcgggtcagcaacccgggtcggctggcagagctgttgctactggagaacgacaagagccccgctgagagcgggggcctggcgcagaccccggacttacactgtgtgctggtgacgaacccacattcatcacaatggaaggatcctgccttaagtcaacttatttgtttttgccgggaaagtcgctacatggatcagtgggtgccagtgattaatctccccgaacggtgattccccgaacggtgatggcatctgaatggaaataactgaaccaaattgcactgaagttttgaaatacctttgtagttactcaagcagtcactccccacgctgatgcaaggattacagaaactgatgtcaaggggctgagttcaactacaggagggctaggagatgactttgcagatggacagagaggtgaaaata

SEQ ID NO: 3181 - protein, 165 aa, Rattus norvegicus
  ref <308>: DATABASE ACCESSION NUMBER: SWISS-Prot / P48317
  ref <309>: DATABASE ENTRY DATE: 2001-10-16
MTLEEFSAAEQKIERMDTVGDALEEVLSKARSQRTITVGVYEAAKLLNVDPDNVVLCLLAADEDDDRDVALQIHFTLIRAFCCENDINILRVSNPGRLAELLLLENDKSPAESGGLAQTPDLHCVLVTNPHSSQWKDPALSQLICFCRESRYMDQWVPVINLPER

SEQ ID NO: 3182 - DNA, 1343 bp, Homo sapiens
  ref <308>: DATABASE ACCESSION NUMBER: EMBL / M60974
  ref <309>: DATABASE ENTRY DATE: 1999-07-02
ggcagtggctgggaggcagcggcccaattagtgtcgtgcggcccgtggcgaggcgaggtccggggagcgagcgagcaagcaaggcgggaggggtggccggagctgcggcggctggcacaggaggaggagcccgggcgggcgaggggcggccggagagcgccagggcctgagctgccggagcggcgcctgtgagtgagtgcagaaagcaggcgcccgcgcgctagccgtggcaggagcagcccgcacgccgcgctctctccctgggcgacctgcagtttgcaatatgactttggaggaattctcggctggagagcagaagaccgaaaggatggataaggtgggggatgccctggaggaagtgctcagcaaagccctgagtcagcgcacgatcactgtcggggtgtacgaagcggccaagctgctcaacgtcgaccccgataacgtggtgttgtgcctgctggcggcggacgaggacgacgacagagatgtggctctgcagatccacttcaccctgatccaggcgttttgctgcgagaacgacatcaacatcctgcgcgtcagcaacccgggccggctggcggagctcctgctcttggagaccgacgctggccccgcggcgagcgagggcgccgagcagcccccggacctgcactgcgtgctggtgacgaatccacattcatctcaatggaaggatcctgccttaagtcaacttatttgtttttgccgggaaagtcgctacatggatcaatgggttccagtgattaatctccctgaacggtgatggcatctgaatgaaaataactgaaccaaattgcactgaagtttttgaaatacctttgtagttactcaagcagttactccctacactgatgcaaggattacagaaactgatgccaaggggctgagtgagttcaactacatgttctgggggcccggagatagatgactttgcagatggaaagaggtgaaaatgaagaaggaagctgtgttgaaacagaaaaataagtcaaaaggaacaaaaattacaaagaaccatgcaggaaggaaaactatgtattaatttagaatggttgagttacattaaaataaaccaaatatgttaaagtttaagtgtgcagccatagtttgggtatttttggtttatatgccctcaagtaaaagaaaagccgaaagggttaatcatatttgaaaaccatattttattgtattttgatgagatattaaattctcaaagttttattataaattctactaagttattttatgacatgaaaagttatttatgctataaattttttgaaacacaatacctacaataaactggtatgaataattgcatcatt

SEQ ID NO: 3183 - protein, 165 aa, Homo sapiens
  ref <308>: DATABASE ACCESSION NUMBER: SWISS-Prot / P24522
  ref <309>: DATABASE ENTRY DATE: 2002-06-15
MTLEEFSAGEQKTERMDKVGDALEEVLSKALSQRTITVGVYEAAKLLNVDPDNVVLCLLAADEDDDRDVALQIHFTLIQAFCCENDINILRVSNPGRLAELLLLETDAGPAASEGAEQPPDLHCVLVTNPHSSQWKDPALSQLICFCRESRYMDQWVPVINLPER

SEQ ID NO: 3184 - DNA, 711 bp, Rattus norvegicus; identical to SEQ ID NO: 3180
  ref <308>: DATABASE ACCESSION NUMBER: EMBL / L32591
  ref <309>: DATABASE ENTRY DATE: 2000-03-04

SEQ ID NO: 3185 - protein, 165 aa, Rattus norvegicus; identical to SEQ ID NO: 3181
  ref <308>: DATABASE ACCESSION NUMBER: SWISS-Prot / P48317
  ref <309>: DATABASE ENTRY DATE: 2001-10-16

SEQ ID NO: 3186 - DNA, 1343 bp, Homo sapiens; identical to SEQ ID NO: 3182
  ref <308>: DATABASE ACCESSION NUMBER: EMBL / M60974
  ref <309>: DATABASE ENTRY DATE: 1999-07-02

SEQ ID NO: 3187 - protein, 165 aa, Homo sapiens; identical to SEQ ID NO: 3183
  ref <308>: DATABASE ACCESSION NUMBER: SWISS-Prot / P24522
  ref <309>: DATABASE ENTRY DATE: 2002-06-15

SEQ ID NO: 3188 - DNA, 711 bp, Rattus norvegicus; identical to SEQ ID NO: 3180
  ref <308>: DATABASE ACCESSION NUMBER: EMBL / L32591
  ref <309>: DATABASE ENTRY DATE: 2000-03-04

SEQ ID NO: 3189 - protein, 165 aa, Rattus norvegicus; identical to SEQ ID NO: 3181
  ref <308>: DATABASE ACCESSION NUMBER: SWISS-Prot / P48317
  ref <309>: DATABASE ENTRY DATE: 2001-10-16

SEQ ID NO: 3190 - DNA, 1343 bp, Homo sapiens; identical to SEQ ID NO: 3182
  ref <308>: DATABASE ACCESSION NUMBER: EMBL / M60974
  ref <309>: DATABASE ENTRY DATE: 1999-07-02

SEQ ID NO: 3191 - protein, 165 aa, Homo sapiens; identical to SEQ ID NO: 3183
  ref <308>: DATABASE ACCESSION NUMBER: SWISS-Prot / P24522
  ref <309>: DATABASE ENTRY DATE: 2002-06-15

SEQ ID NO: 3192 - DNA, 711 bp, Rattus norvegicus; identical to SEQ ID NO: 3180
  ref <308>: DATABASE ACCESSION NUMBER: EMBL / L32591
  ref <309>: DATABASE ENTRY DATE: 2000-03-04

SEQ ID NO: 3193 - protein, 165 aa, Rattus norvegicus; identical to SEQ ID NO: 3181
  ref <308>: DATABASE ACCESSION NUMBER: SWISS-Prot / P48317
  ref <309>: DATABASE ENTRY DATE: 2001-10-16

SEQ ID NO: 3194 - DNA, 1343 bp, Homo sapiens; identical to SEQ ID NO: 3182
  ref <308>: DATABASE ACCESSION NUMBER: EMBL / M60974
  ref <309>: DATABASE ENTRY DATE: 1999-07-02

SEQ ID NO: 3195 - protein, 165 aa, Homo sapiens; identical to SEQ ID NO: 3183
  ref <308>: DATABASE ACCESSION NUMBER: SWISS-Prot / P24522
  ref <309>: DATABASE ENTRY DATE: 2002-06-15

SEQ ID NO: 3196 - DNA, 3700 bp, Rattus norvegicus
  ref <308>: DATABASE ACCESSION NUMBER: EMBL / L33869
  ref <309>: DATABASE ENTRY DATE: 2000-03-04
ccaagaggaagaaacatgaagtttttgctgcttagtgcacttttatttttgcatagttccttagcttggacaagagaaaagcattattacatcggaattactgaagcagtttgggactatgcttctggcagtgaagaaaaggaacttatttcagttgacacggaacagtccaatttctatcttcgaaatggtccagatcgtattggaagaaagtataagaaggccctttattctgagtacacagatggcacctttacgaagactatagacaaaccagcctggctagggtttttaggccctgtcatcaaagctgaagttggagacaaagtttctgttcacgtaaagaactttgcctctaggccctacacttttcatgctcatggggtaacttacaccaaggcgaacgagggggccatctaccctgacaacaccactgattttcaaagagccgatgacaaactgtttcctggacagcagtatttgtacgtgctgcgtgccaatgagccaagtcctggcgagggagacagcaattgtgtgaccaggatttaccactctcatgtggatgctccaaaagatattgcatcaggactcataggaccgttgatactctgtaaaaaaggttctctgcataaggaaaaagaggaaaatattgaccaagaattcgtactgatgttctctgtggtggatgaaaatctcagctggtacctagaagataacatcaaaaccttctgctctgaaccagagaaagtcgataaagacaatgaagacttccaggaaagcaacaggatgtactctataaatggatatacatttggaagcctcccagggctctcgatgtgtgcagaagacagagtgaagtggtacctttttgggatggggaatgaagttgacgtgcattcagagctctttcatggtcaagccctgaccagcaagaactatcatactgatataatcaacctgttccctgccactctaattgatgtttctatggtggcccagaatcctggagtctggatgctcagttgccagaacctgaaccatctgaaagctggtttgcaggcctttttccaggttcgtgactgcaacaagccctcaccggacgacgatatccaagacagacatgtgagacattattacatcgctgccgaggagaccatttgggactatgctccgtctgggacagacaccttcactggagagaacttcaccagtctgggaagtgattcaagggtcttttttgagcaaggtgctacaagaattggtggctcttataaaaaattggtttatcgtgagtacacagatgattccttcacaaaccggaaggaaagaggccctgatgaggaacatcttggaatccttggtcctgtcatttgggcagaagtaggagacatcattagagtcacctttcataacaaaggacaatttcctctcagcattcagccaatgggggtaagattcaccaaggaaaatgagggaacatactatggcccagatggccgttcctcaaagcaagcctcccatgtggctcccaaagaaacctttacgtatgaatggactgtccccaaagaaatgggacccacttatgcagatcctgtgtgcctatctaagatgtattattctggagttgacctcaccaaagatatatttactgggcttattgggccaatgaaaatatgcaagaaaggcagcttacttgcagatgggagacagaaagatgtagacaaggagttctacttgtttgcaacagtgtttgatgagaatgagagtttactcttggatgataatatcagaatgttcacaactgcacctgagaatgtggacaaggaagatgaagactttcaggagtccaacaagatgcactccatgaatggattcatgtatggcaatctgcctggcctcaatatgtgcctaggagaatccatcgtgtggtatttgttcagcgctggaaatgaggcagacgtgcatgggatatacttttcaggaaatacctatctgtccaaaggagaaagaagagacactgcaaatctgtttcctcataaaagtctcacccttctcatgacacctgacacagaagggtcttttgatgttgagtgtcttacaacagatcactacaccggcggcatgaagcaaaagtacactgtgaaccagtgcaaggggcagtttgaagatgtcactctctaccagggagaaaggacctactatattgcagcagtggaggtggaatgggattattcaccaagcagggactgggaaatggagctgcaccatttgcaagagcaaaatgtttcaaatgcatttttggataaggaagagtttttcataggctcaaagtacaagaaggttgtgtatcgagagtttactgacagcacattcagagaacaggtgaagagaagagctgaagaggagcacttgggcatgctcggtccactgattcatgcagatgttggagccaaagttaaagttgtctttaaaaatatggcaacaaggccatattcaatacatgcccacggagtgaaaacaaagagttctacagttgctccaacgttgccaggtgaagttcgcacttatatatggcaaattccagaaagatcaggtgctggaacggaggattcaccttgtatcccatgggcttattactcaaccgtggatcgagttaaggatctctacagtgggctaataggcccattgattgtttgtcggaaatcttatgtgaaagtattcaatcctaaaaagaaaatggagttttcccttttgtttctagtttttgatgagaatgaatcttggtacttagatgataacatcaatacataccccgatcaccctgagaaagataacaaagacaacgaggaattcatagaaagcaataaaatgcatgctatcaatgggaaaatgttcggaaacctccaaggtctcacgatgcacgtgggagatgaggtcaactggtatgtgatggctatgggcaatgaaatagacctgcacactgtacacttccacggccacagcttccaatacaagcacaggggaattcatagttctgatgtctttgactttttccctggaacataccaaaccctagaaatgtttccccaaacgcctggaacctggttactccactgccatgtgactgaccatattcatgcggggatggtaactacctacactgttttaccaaatcaagagactaagtctggctgaaagaaataaattggtgataagtggaatacgagcacaatgacgttgttttaaacatttaaaaaaatcaaagccacacaaatgttcatttgtgagggaattggtaatgccgatggacagatgaacagactgtatcatgacatgtatttgtttgctgggtaacagaatcgctttacatagtccacttacacctgcactgaaaggactctgaaaagtggaaaaaaataagcaaaaccgtatgatcagatgctgtccttgactgtcctcacaggatcactataaagtccactaaactgtctccaactcttctcatcaagtcctctaacaaaccatggggtaagagggtatagaaaagaaggaaagatgaagataccaagatgcactttgtaaaaatctgaaaaacagttgaaggatgctctcggaaaatagagaaagtcaggatccaattatgttacattttgaaaaaatgaaatggagataataaagtaataaattttaaaatgccaat

SEQ ID NO: 3197 - protein, 1059 aa, Rattus norvegicus
  ref <308>: DATABASE ACCESSION NUMBER: SWISS-Prot / P13635
  ref <309>: DATABASE ENTRY DATE: 1999-07-15
MKFLLLSALLFLHSSLAWTREKHYYIGITEAVWDYASGSEEKELISVDTEQSNFYLRNGPDRIGRKYKKALYSEYTDGTFTKTIDKPAWLGFLGPVIKAEVGDKVSVHVKNFASRPYTFHAHGVTYTKANEGAIYPDNTTDFQRADDKLFPGQQYLYVLRANEPSPGEGDSNCVTRIYHSHVDAPKDIASGLIGPLILCKKGSLHKEKEENIDQEFVLMFSVVDENLSWYLEDNIKTFCSEPEKVDKDNEDFQESNRMYSINGYTFGSLPGLSMCAEDRVKWYLFGMGNEVDVHSELFHGQALTSKNYHTDIINLFPATLIDVSMVAQNPGVWMLSCQNLNHLKAGLQAFFQVRDCNKPSPDDDIQDRHVRHYYIAAEETIWDYAPSGTDTFTGENFTSLGSDSRVFFEQGATRIGGSYKKLVYREYTDDSFTNRKERGPDEEHLGILGPVIWAEVGDIIRVTFHNKGQFPLSIQPMGVRFTKENEGTYYGPDGRSSKQASHVAPKETFTYEWTVPKEMGPTYADPVCLSKMYYSGVDLTKDIFTGLIGPMKICKKGSLLADGRQKDVDKEFYLFATVFDENESLLLDDNIRMFTTAPENVDKEDEDFQESNKMHSMNGFMYGNLPGLNMCLGESIVWYLFSAGNEADVHGIYFSGNTYLSKGERRDTANLFPHKSLTLLMTPDTEGSFDVECLTTDHYTGGMKQKYTVNQCKGQFEDVTLYQGERTYYIAAVEVEWDYSPSRDWEMELHHLQEQNVSNAFLDKEEFFIGSKYKKVVYREFTDSTFREQVKRRAEEEHLGMLGPLIHADVGAKVKVVFKNMATRPYSIHAHGVKTKSSTVAPTLPGEVRTYIWQIPERSGAGTEDSPCIPWAYYSTVDRVKDLYSGLIGPLIVCRKSYVKVFNPKKKMEFSLLFLVFDENESWYLDDNINTYPDHPEKDNKDNEEFIESNKMHAINGKMFGNLQGLTMHVGDEVNWYVMAMGNEIDLHTVHFHGHSFQYKHRGIHSSDVFDFFPGTYQTLEMFPQTPGTWLLHCHVTDHIHAGMVTTYTVLPNQETKSG

SEQ ID NO: 3198 - DNA, 3321 bp, Homo sapiens
  ref <308>: DATABASE ACCESSION NUMBER: EMBL / M13699
  ref <309>: DATABASE ENTRY DATE: 2000-03-04
atgaagattttgatacttggtatttttctgtttttatgtagtaccccagcctgggcgaaagaaaagcattattacattggaattattgaaacgacttgggattatgcctctgaccatggggaaaagaaacttatttctgttgacacggaacattccaatatctatcttcaaaatggcccagatagaattgggagactatataagaaggccctttatcttcagtacacagatgaaacctttaggacaactatagaaaaaccggtctggcttgggtttttaggccctattatcaaagctgaaactggagataaagtttatgtacacttaaaaaaccttgcctctaggccctacacctttcattcacatggaataacttactataaggaacatgagggggccatctaccctgataacaccacagattttcaaagagcagatgacaaagtatatccaggagagcagtatacatacatgttgcttgccactgaagaacaaagtcctggggaaggagatggcaattgtgtgactaggatttaccattcccacattgatgctccaaaagatattgcctcaggactcatcggacctttaataatctgtaaaaaagattctctagataaagaaaaagaaaaacatattgaccgagaatttgtggtgatgttttctgtggtggatgaaaatttcagctggtacctagaagacaacattaaaacctactgctcagaaccagagaaagttgacaaagacaacgaagacttccaggagagtaacagaatgtattctgtgaatggatacacttttggaagtctcccaggactctccatgtgtgctgaagacagagtaaaatggtacctttttggtatgggtaatgaagttgatgtgcacgcagctttctttcacgggcaagcactgactaacaagaactaccgtattgacacaatcaacctctttcctgctaccctgtttgatgcttatatggtggcccagaaccctggagaatggatgctcagctgtcagaatctaaaccatctgaaagccggtttgcaagcctttttccaggtccaggagtgtaacaagtcttcatcaaaggataatatccgtgggaagcatgttagacactactacattgccgctgaggaaatcatctggaactatgctccctctggtatagacatcttcactaaagaaaacttaacagcacctggaagtgactcagcggtgttttttgaacaaggtaccacaagaattggaggctcttataaaaagctggtttatcgtgagtacacagatgcctccttcacaaatcgaaaggagagaggccctgaagaagagcatcttggcatcctgggtcctgtcatttgggcagaggtgggagacaccatcagagtaaccttccataacaaaggagcatatcccctcagtattgagccgattggggtgagattcaataagaacaacgagggcacatactattccccaaattacaacccccagagcagaagtgtgcctccttcagcctcccatgtggcacccacagaaacattcacctatgaatggactgtccccaaagaagtaggacccactaatgcagatcctgtgtgtctagctaagatgtattattctgctgtggatcccactaaagatatattcactgggcttattgggccaatgaaaatatgcaagaaaggaagtttacatgcaaatgggagacagaaagatgtagacaaggaattctatttgtttcctacagtatttgatgagaatgagagtttactcctggaagataatattagaatgtttacaactgcacctgatcaggtggataaggaagatgaagactttcaggaatctaataaaatgcactccatgaatggattcatgtatgggaatcagccgggtctcactatgtgcaaaggagattcggtcgtgtggtacttattcagcgccggaaatgaggccgatgtacatggaatatacttttcaggaaacacatatctgtggagaggagaacggagagacacagcaaacctcttccctcaaacaagtcttacgctccacatgtggcctgacacagaggggacttttaatgttgaatgccttacaactgatcattacacaggcggcatgaagcaaaaatatactgtgaaccaatgcaggcggcagtctgaggattccaccttctacctgggagagaggacatactatatcgcagcagtggaggtggaatgggattattccccacaaagggagtgggaaaaggagctgcatcatttacaagagcagaatgtttcaaatgcatttttagataagggagagttttacataggctcaaagtacaagaaagttgtgtatcggcagtatactgatagcacattccgtgttccagtggagagaaaagctgaagaagaacatctgggaattctaggtccacaacttcatgcagatgttggagacaaagtcaaaattatctttaaaaacatggccacaaggccctactcaatacatgcccatggggtacaaacagagagttctacagttactccaacattaccaggtgaaactctcacttacgtatggaaaatcccagaaagatctggagctggaacagaggattctgcttgtattccatgggcttattattcaactgtggatcaagttaaggacctctacagtggattaattggccccctgattgtttgtcgaagaccttacttgaaagtattcaatcccagaaggaagctggaatttgcccttctgtttctagtttttgatgagaatgaatcttggtacttagatgacaacatcaaaacatactctgatcaccccgagaaagtaaacaaagatgatgaggaattcatagaaagcaataaaatgcatgctattaatggaagaatgtttggaaacctacaaggcctcacaatgcacgtgggagatgaagtcaactggtatctgatgggaatgggcaatgaaatagacttacacactgtacattttcacggccatagcttccaatacaagcacaggggagtttatagttctgatgtctttgacattttccctggaacataccaaaccctagaaatgtttccaagaacacctggaatttggttactccactgccatgtgaccgaccacattcatgctggaatggaaaccacttacaccgttctacaaaatgaagacaccaaatctggctgaatgaaataaattggtgataagtggaaaaaagagaaaaaccaatgattcataacaatgtatgtgaaagtgtaaaatagaatgttactttggaatgactataaacattaaaagagactggagcat

SEQ ID NO: 3199 - protein, 1065 aa, Homo sapiens
  ref <308>: DATABASE ACCESSION NUMBER: SWISS-Prot / P00450
  ref <309>: DATABASE ENTRY DATE: 2002-06-15
MKILILGIFLFLCSTPAWAKEKHYYIGIIETTWDYASDHGEKKLISVDTEHSNIYLQNGPDRIGRLYKKALYLQYTDETFRTTIEKPVWLGFLGPIIKAETGDKVYVHLKNLASRPYTFHSHGITYYKEHEGAIYPDNTTDFQRADDKVYPGEQYTYMLLATEEQSPGEGDGNCVTRIYHSHIDAPKDIASGLIGPLIICKKDSLDKEKEKHIDREFVVMFSVVDENFSWYLEDNIKTYCSEPEKVDKDNEDFQESNRMYSVNGYTFGSLPGLSMCAEDRVKWYLFGMGNEVDVHAAFFHGQALTNKNYRIDTINLFPATLFDAYMVAQNPGEWMLSCQNLNHLKAGLQAFFQVQECNKSSSKDNIRGKHVRHYYIAAEEIIWNYAPSGIDIFTKENLTAPGSDSAVFFEQGTTRIGGSYKKLVYREYTDASFTNRKERGPEEEHLGILGPVIWAEVGDTIRVTFHNKGAYPLSIEPIGVRFNKNNEGTYYSPNYNPQSRSVPPSASHVAPTETFTYEWTVPKEVGPTNADPVCLAKMYYSAVDPTKDIFTGLIGPMKICKKGSLHANGRQKDVDKEFYLFPTVFDENESLLLEDNIRMFTTAPDQVDKEDEDFQESNKMHSMNGFMYGNQPGLTMCKGDSVVWYLFSAGNEADVHGIYFSGNTYLWRGERRDTANLFPQTSLTLHMWPDTEGTFNVECLTTDHYTGGMKQKYTVNQCRRQSEDSTFYLGERTYYIAAVEVEWDYSPQREWEKELHHLQEQNVSNAFLDKGEFYIGSKYKKVVYRQYTDSTFRVPVERKAEEEHLGILGPQLHADVGDKVKIIFKNMATRPYSIHAHGVQTESSTVTPTLPGETLTYVWKIPERSGAGTEDSACIPWAYYSTVDQVKDLYSGLIGPLIVCRRPYLKVFNPRRKLEFALLFLVFDENESWYLDDNIKTYSDHPEKVNKDDEEFIESNKMHAINGRMFGNLQGLTMHVGDEVNWYLMGMGNEIDLHTVHFHGHSFQYKHRGVYSSDVFDIFPGTYQTLEMFPRTPGIWLLHCHVTDHIHAGMETTYTVLQNEDTKSG

SEQ ID NO: 3200 - DNA, 2248 bp, Rattus norvegicus
  ref <308>: DATABASE ACCESSION NUMBER: EMBL / L34262
  ref <309>: DATABASE ENTRY DATE: 2000-03-04
atggcgtcgcccggttaccggaggctgctagctgcggctctgcttccttggtgttgcgccgcctgggccctgggacatctggacccaccttctccaccaccgctggtgatctggcatgggatgggggacagctgctgtaaccccatgagcatgggtagcattaaaaagatggttgaaaaggaaataccagggatttacgtcctgtctctggagattgggaagaacatggtggaggatgtggagaacagcttcttcttgaatgtcaacctccaagtcggaatggcatgtcagattctggaaaaggatcctaagttgcaacacggatacaatgctattggcttctcccagggaggccagttcctgagggcagtggctcagagatgcccaacacctcccatgatgaccctgatctcagttgggggacaacatcaaggtgtctttggactccctcgatgcccaggagagagttctcatatctgtgacttcatcaggaagtcacttaacgctggtgcttactccaaagttgtgcaagaacgcctggtgcaagcacagtactggcatgaccccatcaaggaggaagtgtaccgaaactgcagcatcttcttggcagacataaatcaagagaggcatatcaatgagtcctataaggagaacctgatggccctcaagaagtttgtgatggtgaaattctttaacgattccatcgtggaccctgtagactctgagtggtttggattttacagaagtggccaagctaaggaaaccattcccctccaggagaccactctatacacagaggaccgcctggggctaaagaaaatggacaaagcaggaaagctagtgtttctggctaaggaaggagaccaccttcaaatatctaaagagtggtttacagcccacatcataccttttcttaagtgaagcccttgcactttgcagcagagtttatgacaccacagctcttccaaactccagtttgcaaccagtccttctctcgtgttatcatctaacatgccctgcttggaaagatctaagatctgaatcttatcctttgccgcctgctatcaccatatggtgttgaattcaagtttaattagctagtaaccgtgcagactgctttacaaccatgtgatatggtcaagctctcttttacggaaggggagtctgctattgcagatcagcaattgtgcctaagtgaagtgaagtgaagcagagagacaagctctgagggtaaaacccatacaaatttggagcaaataaaagcctcatggtatccagtcctgagatgttcacacaagcaatttctcaacattgctgtgggggccatgcatgtttctacatcatttcttaaagctgttttcctattttagtgttgccctctagtggcacctagcagtcactccacaagcctaccaacatgccccctcagagctcaccttctatccttaatcctcagtcaccaaaagggggatccaccagcagggttgcttaggagaggaaatgtcctttttcttttcttcccttttttgagacagggtttcactcactttttaaccctagctggcctgcaattcactatgtagagcagactggccttgaactcagtcacagaaatcacctgcccctctgccttctgagtgctgggattaaaggcatgcacccccaccccctacagcaatgtgtgtcttagacaccatggatagtgcgggagtggagaagtgaaaactaggtggctggtcttgccactgcactcttggctaactgtccttaatattacaagtagcgtaaatgtcacttacactactgcaaacaatgggaggaacagtctgaaaagatggaccttgacgatcctaccctacgtcctatttgccagcatgcgtccaactgctactgactgggttcaagaaaatgactaaagagtaaaaatcaacacatattaaactgatgatgattctgacagttaaagaaaaacaacactgatccaccatttcctacatttgaacatggactccttagcccccatcctgaaaagatcccagcatgttctagatgattcctatagagactggtttggagaaatgactgttttcgtcaaagtaccattagccctgcagaatccacccactgctggtttttccttttcctttctcaaacctagtgaaataaaaggatgagggttatggggaggaagtgggaggatctgaaaatagctttgaggttgtcttaaaaaaataaagaatagtttctt

SEQ ID NO: 3201 - protein, 306 aa, Rattus norvegicus
  ref <308>: DATABASE ACCESSION NUMBER: SWISS-Prot / P45479
  ref <309>: DATABASE ENTRY DATE: 2002-06-15
MASPGYRRLLAAALLPWCCAAWALGHLDPPSPPPLVIWHGMGDSCCNPMSMGSIKKMVEKEIPGIYVLSLEIGKNMVEDVENSFFLNVNLQVGMACQILEKDPKLQHGYNAIGFSQGGQFLRAVAQRCPTPPMMTLISVGGQHQGVFGLPRCPGESSHICDFIRKSLNAGAYSKVVQERLVQAQYWHDPIKEEVYRNCSIFLADINQERHINESYKENLMALKKFVMVKFFNDSIVDPVDSEWFGFYRSGQAKETIPLQETTLYTEDRLGLKKMDKAGKLVFLAKEGDHLQISKEWFTAHIIPFLK

SEQ ID NO: 3202 - DNA, 2292 bp, Homo sapiens
  ref <308>: DATABASE ACCESSION NUMBER: Refseq / XM_029842
  ref <309>: DATABASE ENTRY DATE: 2002-08-01
ccggagtctcgcgcccgcggtcatgtgacacagcgaagatggcgtcgcccggctgcctgtggctcttggctgtggctctcctgccatggacctgcgcttctcgggcgctgcagcatctggacccgccggcgccgctgccgttggtgatctggcatgggatgggagacagctgttgcaatcccttaagcatgggtgctattaaaaaaatggtggagaagaaaatacctggaatttacgtcttatctttagagattgggaagaccctgatggaggacgtggagaacagcttcttcttgaatgtcaattcccaagtaacaacagtgtgtcaggcacttgctaaggatcctaaattgcagcaaggctacaatgctatgggattctcccagggaggccaatttctgagggcagtggctcagagatgcccttcacctcccatgatcaatctgatctcggttgggggacaacatcaaggtgtttttggactccctcgatgcccaggagagagctctcacatctgtgacttcatccgaaaaacactgaatgctggggcgtactccaaagttgttcaggaacgcctcgtgcaagccgaatactggcatgaccccataaaggaggatgtgtatcgcaaccacagcatcttcttggcagatataaatcaggagcggggtatcaatgagtcctacaagaaaaacctgatggccctgaagaagtttgtgatggtgaaattcctcaatgattccattgtggaccctgtagattcggagtggtttggattttacagaagtggccaagccaaggaaaccattcccttacaggagacctccctgtacacacaggaccgcctggggctaaaggaaatggacaatgcaggacagctagtgtttctggctacagaaggggaccatcttcagttgtctgaagaatggttttatgcccacatcataccattccttggatgaaacccgtatagttcacaatagagctcagggagcccctaactcttccaaaccacatgggagacagtttccttcatgcccaagcctgagctcagatccagcttgcaactaatccttctatcatctaacatgccctacttggaaagatctaagatctgaatcttatcctttgccatcttctgttaccatatggtgttgaatgcaagtttaattaccatggagattgttttacaaacttttgatgtggtcaagttcagttttagaaaagggagtctgttccagatcagtgccagaactgtgcccaggcccaaaggagacaactaactaaagtagtgagatagattctaagggcaaacatttttccaagtcttgccatatttcaagcaaagaggtgcccaggcctgaggtactcacataaatgctttgttttgctggtgatttaaccagtgcttggaaaaatcttgcttggctatttctgcatcatttcttaaggctgccttcctctctcagtacgttgccctctgtgctatcatcttatcatcaattattagacaaatcccactggcctacagtcttgcttctgcagcacccactttgtctcctcaggtagtgatgaattagttgctgtcacaaaaggagggaagtagcacccaaattaagttgcttaagagaggaaatgtacatcttgtataacttagggagcgaagaaaatgtaggcgcgaaagtgaaaagtgaggcagctagttcttcctattccattctcgaccaacctgccctttcttaatatgactagtggtcttgatgctagagtcaacttactctgttgctggctttagcagagaataggaggaaccatatgaaaaagatcaggctttctgacttccatccccaaaacacatttaccagcatactccaaactgtttctgatgtgttccatgagaaaaggattgtttgctcaaaaagcttggaaaatactacacactccctttctccttctggagatcaacccacattagagtgtctaaggactcctgagaattcctgttacagtaaacaaaactaacgtaatctaccatttcctacactatttgagcatggaaatcatagtccccactctgtgaaaacttaacgctttttggaagacatttctgtagcatgtcagtttggagaaatgatgagctacgccttgatgaaagaaccgtgttggtgctgctaagtttagccattatggtttttcctttctctctcttaagccttattcttcaactaaaagatgaggattaagagcaagaagttgggggggatgtgaaaataattttatgaggttgtctaaaat

SEQ ID NO: 3203 - protein, 306 aa, Homo sapiens
  ref <308>: DATABASE ACCESSION NUMBER: Refseq / XP_029842
  ref <309>: DATABASE ENTRY DATE: 2002-08-01
MASPGCLWLLAVALLPWTCASRALQHLDPPAPLPLVIWHGMGDSCCNPLSMGAIKKMVEKKIPGIYVLSLEIGKTLMEDVENSFFLNVNSQVTTVCQALAKDPKLQQGYNAMGFSQGGQFLRAVAQRCPSPPMINLISVGGQHQGVFGLPRCPGESSHICDFIRKTLNAGAYSKVVQERLVQAEYWHDPIKEDVYRNHSIFLADINQERGINESYKKNLMALKKFVMVKFLNDSIVDPVDSEWFGFYRSGQAKETIPLQETSLYTQDRLGLKEMDNAGQLVFLATEGDHLQLSEEWFYAHIIPFLG

SEQ ID NO: 3204 - DNA, 1731 bp, Rattus norvegicus
  ref <308>: DATABASE ACCESSION NUMBER: EMBL / L34821
  ref <309>: DATABASE ENTRY DATE: 2000-03-04
gttggtggtcctgccgacctccacgccgacctgctccgcggggacagctttgtgggcggccgctggcttccaacccctgccaccttccctgtgtatgacccggccagcggcgccaagctgggcaccgtggccgactgcggggtaccggaggcccgcgctgctgtgcgcgccgcctacgatgccttcagcagctggaaagagatctcggtcaaggagaggagctcattgctccgtaaatggtacgacttaatgatacaaaacaaggacgagcttgccaagatcataacagctgagagtggaaagccactgaaagaggcccagggagagatcctgtattcagcgtttttcctggagtggttctcagaggaagctcgccgtgtttatggagacatcatctatacctctgccaaagataagcgaggactggtcctcaagcagcccgttggtgtggcgtccatcatcacaccgtggaattttcccagtgccatgatcacccggaaagtgggggctgccctggcagctggctgcactgtggtggtaaaacctgctgaagatacaccctattctgccctggccctggctcagcttgcaaaccaggcaggaatccctccaggtgtctataatgtcattccctgctctagaaccaaggccaaggaagtgggagaggtgctgtgtactgatcccctcgtgtccaaaatctcctttactggctcaacggcaacgggaaagatcctgctgcatcatgcagcaaattctgtgaagcgtgtctccatggagctgggtggcctcgccccattcattgtctttgacagtgccaacgtggaccaggctgtcgcaggagcaatggcatctaaatttaggaatgctgggcagacttgcgtttgctcaaacagattcttggtacaacggggtatccacgattcctttgtaacgaagtttgcagaagcgatgaagaaaagcctgcgtgtaggtaacggatttgaggaaggaacaactcaagggccattaattaatgagaaagctgtagaaaaggtagagaagcatgtgaatgacgcagttgccaaaggggccacggttgtgacaggcgggaagcgacaccagagcggagggaatttcttcgaacccaccctgctcagcaacgtcaccagggacatgctctgcatcaccgaggagacctttgggcccgtggcgccagtcatcaagttcgataaagaggaagaggctgtcgccatcgcaaatgcagctgatgttggattggcaggttacttttactctcaagacccagcccagatctggagagtggcggagcagctggaggtgggcatggttggcgtgaacgaaggactgatctcttcagtggagtgcccttttggtggggtgaaacagtcgggccttgggcgagaagggtccaagtatggcattgacgaatatctagaggtcaaatatgtgtgttatggaggcttgtagggttctcacttctttaataaattacctagatccatagggacattccatccatttttttacaatgaacaagtaggttatcagagttatgaatttttaaaaattcagccggtcctgtcttagatgtacaccctaacccttcccttatctaactaggaaccaatggacaccatatacctgtggctgtgggtcccagccagtgctgagaccccagcacaaccccactgcctccatacaaagtacagtgtgagtgttcacatgccctct

SEQ ID NO: 3205 - protein, 488 aa, Rattus norvegicus
  ref <308>: DATABASE ACCESSION NUMBER: SWISS-Prot / P51650
  ref <309>: DATABASE ENTRY DATE: 2002-06-15
VGGPADLHADLLRGDSFVGGRWLPTPATFPVYDPASGAKLGTVADCGVPEARAAVRAAYDAFSSWKEISVKERSSLLRKWYDLMIQNKDELAKIITAESGKPLKEAQGEILYSAFFLEWFSEEARRVYGDIIYTSAKDKRGLVLKQPVGVASIITPWNFPSAMITRKVGAALAAGCTVVVKPAEDTPYSALALAQLANQAGIPPGVYNVIPCSRTKAKEVGEVLCTDPLVSKISFTGSTATGKILLHHAANSVKRVSMELGGLAPFIVFDSANVDQAVAGAMASKFRNAGQTCVCSNRFLVQRGIHDSFVTKFAEAMKKSLRVGNGFEEGTTQGPLINEKAVEKVEKHVNDAVAKGATVVTGGKRHQSGGNFFEPTLLSNVTRDMLCITEETFGPVAPVIKFDKEEEAVAIANAADVGLAGYFYSQDPAQIWRVAEQLEVGMVGVNEGLISSVECPFGGVKQSGLGREGSKYGIDEYLEVKYVCYGGL

SEQ ID NO: 3206 - DNA, 1071 bp, Homo sapiens
  ref <308>: DATABASE ACCESSION NUMBER: EMBL / L34820
  ref <309>: DATABASE ENTRY DATE: 2000-03-04
cggaaggtgggggccgccctggcagccggctgtactgtcgtggtgaagcctgccgaagacacgcccttctccgccctggccctggctgagcttgcaagccaggctgggattccttcaggtgtatacaatgttattccctgttctcgaaagaatgccaaggaagtaggggaggcaatttgtactgatcctctggtgtccaaaatttcctttactggttcaacaactacaggaaagatcctgttgcaccacgcagcaaactctgtgaaaagggtctctatggagctgggcggccttgctccatttatagtatttgacagtgccaacgtggaccaggctgtagcaggggccatggcatctaaatttaggaacactggacagacttgtgtttgctcaaaccaattcttggtgcaaaggggcatccatgatgcctttgtaaaagcattcgccgaggccatgaagaagaacctgcgcgtaggtaatggatttgaggaaggaactactcagggcccattaattaatgaaaaagcggtagaaaaggtggagaaacaggtgaatgatgccgtttctaaaggtgccaccgttgtgacaggtggaaaacgacaccaacttggaaaaaatttctttgagcctaccctgctgtgcaatgtcacccaggacatgctgtgcactcatgaagagactttcgggcctctggcaccagttatcaagttcgatacagaggaggaggctatagcaatcgctaacgcagctgatgttgggttagcaggttatttttactctcaagacccagcccagatctggagagtggcagagcagctggaagtgggcatggttggcgtcaacgaaggattaatttcctctgtggagtgcccttttggtggagtgaagcagtccggccttgggcgagaggggtccaagtatggcattgatgagtatctggaactcaagtatgtgtgttacgggggcttgtaggattctttggttctttaaaaaaatttaaaaggagacttatctacatatataggtacatgccatccattattttaaataaactaataggttttcagaatt

SEQ ID NO: 3207 - protein, 535 aa, Homo sapiens
  ref <308>: DATABASE ACCESSION NUMBER: SWISS-Prot / P51649
  ref <309>: DATABASE ENTRY DATE: 2002-06-15
MATCIWLRSCGARRLGSTFPGCRLRPRAGGLVPASGPAPGPAQLRCYAGRLAGLSAALLRTDSFVGGRWLPAAATFPVQDPASGAALGMVADCGVREARAAVRAAYEAFCRWREVSAKERSSLLRKWYNLMIQNKDDLARIITAESGKPLKEAHGEILYSAFFLEWFSEEARRVYGDIIHTPAKDRRALVLKQPIGVAAVITPWNFPSAMITRKVGAALAAGCTVVVKPAEDTPFSALALAELASQAGIPSGVYNVIPCSRKNAKEVGEAICTDPLVSKISFTGSTTTGKILLHHAANSVKRVSMELGGLAPFIVFDSANVDQAVAGAMASKFRNTGQTCVCSNQFLVQRGIHDAFVKAFAEAMKKNLRVGNGFEEGTTQGPLINEKAVEKVEKQVNDAVSKGATVVTGGKRHQLGKNFFEPTLLCNVTQDMLCTHEETFGPLAPVIKFDTEEEAIAIANAADVGLAGYFYSQDPAQIWRVAEQLEVGMVGVNEGLISSVECPFGGVKQSGLGREGSKYGIDEYLELKYVCYGGL

SEQ ID NO: 3208 - DNA, 2006 bp, Rattus norvegicus
  ref <308>: DATABASE ACCESSION NUMBER: EMBL / L35271
  ref <309>: DATABASE ENTRY DATE: 2000-03-04
gaattctccaaatctagtttgtttttttttctggtcattttttttaattctgcgcataaatattttaggacgcatacgggaattttgcctccgggaccgtttgtaatagccaaagactgaactccaaactctgaaagcgaggctccttggggcatttgactttgaattctgggttgcccacttttcaatgcactaagcggccagttgctaaccctgcctgggtgtaaggccgatccgcgtaactagatctcagtcctgctacccccacaaccctccggtagtaataaaggctcctgaacttgtatgttggtctcccgggagcagcttgcagaagatccgagtccctgtcgccgtctagtaggagctgttttcagggtccttactcaatcggcttgttgtgatgcgtatccccgtagatgccagcacgagccgccgcttcacgccgccttccactgcgctgagccccggcaagatgagcgaggcgctgccgctgggcgccccggatggcggcgccgccctggccagcaagctgaggagcggcgaccgcagcatggtggaggtactagctgaccaccccggcgagctagtccgcaccgacagccccaacttcctctgctccgtgctgcccactcactggcgctgcaacaagaccctgcccatcgctttcaaggtggtagcgctgggcgacgttccggatggcactctggtcaccgtcatggcgggcaatgacgaaaactactcggcggagctgagaaacgccaccgcggccatgaagaaccaagtggcgagattcaacgacctcaggtttgtcggtcggagcggcagaggcaagagcttcactctgaccatcaccgtctttacaaaccccccacaagttgccacctaccatagagccatcaaaatcacagtggacggcccccgagaaccccgaagacatcggcagaaactagatgatcagaccaagcccgggagtttgtccttttccgagcggctcagtgaactggagcagctgcggcgcacggccatgagggtcagcccgcatcacccagcccccacgcccaaccctcgggcctccttgaaccactccactgcctttaaccctcagcctcaaagtcagatgcaggatgccaggcagatccagccgtccccaccgtggtcctatgaccagtcttaccagtacctggggtccatcacctcttctgtgcacccggcgacacccatttctcccggccgagccagtggcatgaccagcctctcagcggaactttccagtcgactctcaacagccccggacctgacagccttcggcgacccgcgccagttccccacgctgccgtccatctccgacccgcgcatgcactacccaggcgccttcacctactcgcctcctgtcacatcgggcatcggcattggcatgtcagccatgagctcgacctctcgctaccacacctacctgccgccgccctacccaggctcctcgcaggcgcaggccgggcccttccagaccggctcgccctcctaccacctgtactacggcacctcggcaggctcctaccaattctccatggtgggcggcgagcgatcacccccgcgcatcctgccgccctgcaccaacgcgtccaccggagccgcgctgctcaaccccagcctccccagccagagcgacgtggtggaaaccgagggcagccatagcaactcgcccaccaacatgccacccgcgcgcctggaggaggctgtctggcggccctactgagcgccttcgggggactgagcccgccgtccatgcacagaccccgccaggagagcccttggaggccaacaggagggaaactgtgaatgcttctgatttagtaatgctgtgaataaaagaaagattttatacccttgacttcactttttaaccacgttgtttattccaaagagtgtggaatgttttcggttccgggtggggaagacgcagcccatcctgtttggcatctatttcttttccgcaccttattgattgc

SEQ ID NO: 3209 - protein, 450 aa, Rattus norvegicus
  ref <308>: DATABASE ACCESSION NUMBER: SWISS-Prot / Q63046
  ref <309>: DATABASE ENTRY DATE: 2002-06-15
MRIPVDASTSRRFTPPSTALSPGKMSEALPLGAPDGGAALASKLRSGDRSMVEVLADHPGELVRTDSPNFLCSVLPTHWRCNKTLPIAFKVVALGDVPDGTLVTVMAGNDENYSAELRNATAAMKNQVARFNDLRFVGRSGRGKSFTLTITVFTNPPQVATYHRAIKITVDGPREPRRHRQKLDDQTKPGSLSFSERLSELEQLRRTAMRVSPHHPAPTPNPRASLNHSTAFNPQPQSQMQDARQIQPSPPWSYDQSYQYLGSITSSVHPATPISPGRASGMTSLSAELSSRLSTAPDLTAFGDPRQFPTLPSISDPRMHYPGAFTYSPPVTSGIGIGMSAMSSTSRYHTYLPPPYPGSSQAQAGPFQTGSPSYHLYYGTSAGSYQFSMVGGERSPPRILPPCTNASTGAALLNPSLPSQSDVVETEGSHSNSPTNMPPARLEEAVWRPY

SEQ ID NO: 3210 - DNA, 7265 bp, Homo sapiens
  ref <308>: DATABASE ACCESSION NUMBER: EMBL / D43968
  ref <309>: DATABASE ENTRY DATE: 2002-08-06
catagagccagcgggcgcgggcgggacgggcgccccgcggccggacccagccagggcaccacgctgcccggccctgcgccgccaggcacttctttccggggctcctagggacgccagaaggaagtcaacctctgctgcttctccttggcctgcgttggaccttcctttttttgttgtttttttttgtttttcccctttcttccttttgaattaactggcttcttggctggatgttttcaacttctttcctggctgcgaacttttccccaattgttttccttttacaacagggggagaaagtgctctgtggtccgaggcgagccgtgaagttgcgtgtgcgtggcagtgtgcgtggcaggatgtgcgtgcgtgtgtaacccgagccgcccgatctgtttcgatctgcgccgcggagccctccctcaaggcccgctccacctgctgcggttacgcggcgctcgtgggtgttcgtgcctcggagcagctaaccggcgggtgctgggcgacggtggaggagtatcgtctcgctgctgcccgagtcagggctgagtcacccagctgatgtagacagtggctgccttccgaagagtgcgtgtttgcatgtgtgtgactctgcggctgctcaactcccaacaaaccagaggaccagccacaaacttaaccaacatccccaaacccgagttcacagatgtgggagagctgtagaaccctgagtgtcatcgactgggccttcttatgattgttgttttaagattagctgaagatctctgaaacgctgaattttctgcactgagcgttttgacagaattcattgagagaacagagaacatgacaagtacttctagctcagcactgctccaactactgaagctgattttcaaggctacttaaaaaaatctgcagcgtacattaatggatttctgttgtgtttaaattctccacagattgtattgtaaatattttatgaagtagagcatatgtatatatttatatatacgtgcacatacattagtagcactacctttggaagtctcagctcttgcttttcgggactgaagccagttttgcatgataaaagtggccttgttacgggagataattgtgttctgttgggactttagacaaaactcacctgcaaaaaactgacaggcattaactactggaacttccaaataatgtgtttgctgatcgttttactcttcgcataaatattttaggaagtgtatgagaattttgccttcaggaacttttctaacagccaaagacagaacttaacctctgcaagcaagattcgtggaagatagtctccactttttaatgcactaagcaatcggttgctaggagcccatcctgggtcagaggccgatccgcagaaccagaacgttttcccctcctggactgttagtaacttagtctccctcctcccctaaccacccccgcccccccccaccccccgcagtaataaaggcccctgaacgtgtatgttggtctcccgggagctgcttgctgaagatccgcgcccctgtcgccgtctggtaggagctgtttgcagggtcctaactcaatcggcttgttgtgatgcgtatccccgtagatgccagcacgagccgccgcttcacgccgccttccaccgcgctgagcccaggcaagatgagcgaggcgttgccgctgggcgccccggacgccggcgctgccctggccggcaagctgaggagcggcgaccgcagcatggtggaggtgctggccgaccacccgggcgagctggtgcgcaccgacagccccaacttcctctgctccgtgctgcctacgcactggcgctgcaacaagaccctgcccatcgctttcaaggtggtggccctaggggatgttccagatggcactctggtcactgtgatggctggcaatgatgaaaactactcggctgagctgagaaatgctaccgcagccatgaagaaccaggttgcaagatttaatgacctcaggtttgtcggtcgaagtggaagagggaaaagcttcactctgaccatcactgtcttcacaaacccaccgcaagtcgccacctaccacagagccatcaaaatcacagtggatgggccccgagaacctcgaagacatcggcagaaactagatgatcagaccaagcccgggagcttgtccttttccgagcggctcagtgaactggagcagctgcggcgcacagccatgagggtcagcccacaccacccagcccccacgcccaaccctcgtgcctccctgaaccactccactgcctttaaccctcagcctcagagtcagatgcaggatacaaggcagatccaaccatccccaccgtggtcctacgatcagtcctaccaatacctgggatccattgcctctccttctgtgcacccagcaacgcccatttcacctggacgtgccagcggcatgacaaccctctctgcagaactttccagtcgactctcaacggcacccgacctgacagcgttcagcgacccgcgccagttccccgcgctgccctccatctccgacccccgcatgcactatccaggcgccttcacctactccccgacgccggtcacctcgggcatcggcatcggcatgtcggccatgggctcggccacgcgctaccacacctacctgccgccgccctaccccggctcgtcgcaagcgcagggaggcccgttccaagccagctcgccctcctaccacctgtactacggcgcctcggccggctcctaccagttctccatggtgggcggcgagcgctcgccgccgcgcatcctgccgccctgcaccaacgcctccaccggctccgcgctgctcaaccccagcctcccgaaccagagcgacgtggtggaggccgagggcagccacagcaactcccccaccaacatggcgccctccgcgcgcctggaggaggccgtgtggaggccctactgaggcgccaggcctggcccggctgggccacgcgggccgccgccttcgcctccgggcgcgcgggcctcctgttcgcgacaagcccgccgggatcccgggccctgggcccggccaccgtcctggggccgagggcgcccgacggccaggatctcgctgtaggtcaggcccgcgcagcctcctgcgcccagaagcccacgccgccgccgtctgctggcgccccggccctcgcggaggtgtccgaggcgacgcacctcgagggtgtccgccggccccagcacccaggggacgcgctggaaagcaaacaggaagattcccggagggaaactgtgaatgcttctgatttagcaatgctgtgaataaaaagaaagattttatacccttgacttaactttttaaccaagttgtttattccaaagagtgtggaattttggttggggtggggggagaggagggatgcaactcgccctgtttggcatctaattcttatttttaatttttccgcaccttatcaattgcaaaatgcgtatttgcatttgggtggtttttatttttatatacgtttatataaatatatataaattgagcttgcttctttcttgctttgaccatggaaagaaatatgattcccttttctttaagttttatttaacttttcttttggacttttgggtagttgtttttttttgttttgttttgtttttttgagaaacagctacagctttgggtcatttttaactactgtattcccacaaggaatccccagatatttatgtatcttgatgttcagacatttatgtgttgataattttttaattatttaaatgtacttatattaagaaaaatatcaagtactacattttcttttgttcttgatagtagccaaagttaaatgtatcacattgaagaaggctagaaaaaaagaatgagtaatgtgatcgcttggttatccagaagtattgtttacattaaactccctttcatgttaatcaaacaagtgagtagctcacgcagcaacgtttttaataggatttttagacactgagggtcactccaaggatcagaagtatggaattttctgccaggctcaacaagggtctcatatctaacttcctccttaaaacagagaaggtcaatctagttccagagggttgaggcgggtgccaataattacatctttggagaggatttgatttctgcccagggatttgctcaccccaaggtcatctgataatttcacagatgctgtgtaacagaacacagccaaagtaaactgtgtaggggagccacatttacataggaaccaaatcaatgaatttaggggttacgattatagcaatttaagggccaccagaagcaggcctcgaggagtcaatttgcctctgtgtgcctcagtggagacaagtgggaaaacatggtcccacctgtgcgagaccccctgtcctgtgctgctcactcaacaacatctttgtgttgctttcaccaggctgagaccctaccctatggggtatatgggcttttacctgtgcaccagtgtgacaggaaagattcatgtcactactgtccgtggctacaattcaaaggtatccaatgtcgctgtaaattttatggcactatttttattggaggatttggtcagaatgcagttgttgtacaactcataaatactaactgctgattttgacacatgtgtgctccaaatgatctggtggttatttaacgtacctcttaaaattcgttgaaacgatttcaggtcaactctgaagagtatttgaaagcaggacttcagaacagtgtttgatttttattttataaatttaagcattcaaattaggcaaatctttggctgcaggcagcaaaaacagctggacttatttaaaacaacttgtttttgagttttcttatatatatattgattatttgttttacacacatgcagtagcactttggtaagagttaaagagtaaagcagcttatgttgtcaggtcgttcttatctagagaagagctatagcagatctcggacaaactcagaatatattcactttcatttttgacaggattccctccacaactcagtttcatatattattccgtattacatttttgcagctaaattaccataaaatgtcagcaaatgtaaaaatttaatttctgaaaagcaccattagcccatttcccccaaattaaacgtaaatgttttttttcagcacatgttaccatgtctgacctgcaaaaatgctggagaaaaatgaaggaaaaaattatgtttttcagtttaattctgttaactgaagatattccaactcaaaaccagcctcatgctctgattagataatcttttacattgaacctttactctcaaagccatgtgtggagggggcttgtcactattgtaggctcactggattggtcatttagagtttcacagactcttaccagcatatatagtatttaattgtttcaaaaaaaatcaaactgtagttgttttggcgataggtctcacgcaacacatttttgtatgtgtgtgtgtgtgcgtgtgtgtgtgtgtgtgtgaaaaattgcattcattgacttcaggtagattaaggtatctttttattcattgccctcaggaaagttaaggtatcaatgagacccttaagccaatcatgtaataactgcatgtgtctggtccaggagaagtattgaataagccatttctactgcttactcatgtccctatttatgatttcaacatggatacatatttcagttctttctttttctcactatctgaaaatacatttccctccctctcttccccccaatatctccctttttttctctcttcctctatcttccaaaccccactttctccctcctccttttcctgtgttctcttaagcagatagcacatacccccacccagtaccaaatttcagaacacaagaaggtccagttcttcccccttcacataaaggaacatggtttgtcagcctttctcctgtttatgggtttcttccagcagaacagagacattgccaaccatattggatctgcttgctgtccaaaccagcaaacttcctgggcaaatcacaatcagtgagtaaatagacagcctttctgctgccttgggtttctgtgcagataaacagaaatgctctgattagaaaggaaatgaatggttccactcaaatgtcctgcaatttaggattgcagatttctgccttgaaatacctgtttctttgggacattccgtcctgatgatttttatttttgttggtttttatttttggggggaatgacatgtttgggtcttttatacatgaaaatttgtttgacaataatctcacaaaacatattttacatctgaacaaaatgcctttttgtttaccgtagcgtatacatttgttttgggatttttgtgtgtttgttgggaattttgtttttagccaggtcagtattgatgaggctgatcatttggctctttttttccttccagaagagttgcatcaacaaagttaattgtatttatgtatgtaaatagattttaagcttcattataaaatattgttaatgcctataactttttttcaatttttttgtgtgtgtttctaaggactttttcttaggtttgctaaatactgtagggaaaaaatgcttctttctaactttgtttattttagactttaaaatgagctacttcttattcacttttgtaaacagctaatagcatggttccaattttttttaagttcactttttttgttctaggggaaatgaatgtgcaaaaaaagaaaaagaactgttggttatttgtgttattctggatgtataaaaatcaatggaaaaaaataaactttcaaattgaaatgacggtataacacatctactgaaaaagcaacgggaaatgtggtcctatttaagccagcccccacctagggtctatttgtgtggcagttattgggtttggtcacaaaacatcctgaaaattcgtgcgtgggcttctttctccctggtacaaacgtatggaatgcttcttaaaggggaactgtcaagctggtgtcttcagccagatgacatgagagaatatcccagaaccctctctccaaggtgtttctagatagcacaggagagcaggcactgcactgtccacagtccacggtacacagtcgggtgggccgcctcccctctcctgggagcattcgtcgtgcccagcctgagcagggcagctggactgctgctgttcaggagccaccagagccttcctctctttgtaccacagtttcttctgtaaatccagtgttacaatcagtgtgaatggcaaataaacagtttgacaagtacata

SEQ ID NO: 3211 - protein, 453 aa, Homo sapiens [sequence omitted]

SEQ ID NO: 3212 - DNA, 1298 bp, Rattus norvegicus
  ref <308>: DATABASE ACCESSION NUMBER: EMBL / L35571
  ref <309>: DATABASE ENTRY DATE: 2000-03-04
gaattccgcggaggctgggcgcgcgaccctggtccttctgcccccggccgtacgctttgctcacgtctctctctgcatggtggatattatttttcattatccttttctgggtgctatgggggatcattccaagaagaagcccgggacggccatgtgcgtgggctgcgggagtcagatccacgaccagtttatccttcgggtgtcgcccgacctcgagtggcacgccgcctgcctcaagtgcgctgagtgcagccagtatctggatgagacgtgcacgtgcttcgtgagagacgggaaaacgtactgcaagcgggactacgtcaggctgttcggcatcaagtgtgcccagtgtcaggtgggcttcagcagcagtgacctggtgatgcgggcgcgggacagcgtgtaccacatcgagtgcttccgctgctccgtgtgcagccgccagctgctccctggagacgagttctcgctgagggagcacgagctgctctgccgagccgaccacggcctcctgctggagcgcgctgcggccggcagcccgcgcagccctggcccgctccccggcaccccaccaggcctgcatctgccagacgccgggtccggacaacaggtctcactgcgcacgcacgtgcacaagcaggcggagaagacaacccgggtgcggactgtgctcaacgagaagcaactgcacaccctgcggacatgctacgccgccaacccgcggcccgacgcgctcatgaaggagcagctggtagagatgaccggcttgagcccgcgggtcatccgcgtgtggtttcagaacaagcgttgcaaggacaagaagaagtccattctcatgaagcagctacagcagcagcaacacagcgacaaggcgagtctccagggactaactgggacgctcctggtggcgggcagcccatccgcccatgagaacgccgtgcagggcagcgcagtcgaggtgcagacgtaccagccgccctggaaagctctcagcgagttcgcactccagagcgacctggatcaacccgcctttcaacagctggtctccttctccgagtcaggctccctaggcaactcctctggtagcgacgtgacctctctgtcttcgcagctcccggacacccccaacagtatggtacctagtccggtggagacgtgagacaggacccttccctgccagcccgcggacctcgcatgcctccctgcatgagactcacccatgctcaggccattccagctctgaaaaatctccggcccttgtaattattgttgttatttaaaggcgagcgggcagagga

SEQ ID NO: 3213 - protein, 360 aa, Rattus norvegicus
  ref <308>: DATABASE ACCESSION NUMBER: SWISS-Prot / P50480
  ref <309>: DATABASE ENTRY DATE: 2002-06-15
MVDIIFHYPFLGAMGDHSKKKPGTAMCVGCGSQIHDQFILRVSPDLEWHAACLKCAECSQYLDETCTCFVRDGKTYCKRDYVRLFGIKCAQCQVGFSSSDLVMRARDSVYHIECFRCSVCSRQLLPGDEFSLREHELLCRADHGLLLERAAAGSPRSPGPLPGTPPGLHLPDAGSGQQVSLRTHVHKQAEKTTRVRTVLNEKQLHTLRTCYAANPRPDALMKEQLVEMTGLSPRVIRVWFQNKRCKDKKKSILMKQLQQQQHSDKASLQGLTGTLLVAGSPSAHENAVQGSAVEVQTYQPPWKALSEFALQSDLDQPAFQQLVSFSESGSLGNSSGSDVTSLSSQLPDTPNSMVPSPVET

SEQ ID NO: 3214 - DNA, 448 bp, Homo sapiens
  ref <308>: DATABASE ACCESSION NUMBER: EMBL / AI972048
  ref <309>: DATABASE ENTRY DATE: 2000-03-04
caccgccgcaccttgggcccgcaggctgttcggcatcaagtgcgccaagtgccaggtgggcttcagcagcagcgacctggtgatgagggcgcgggacagcgtgtaccacatcgagtgcttccgctgctccgtgtgcagccgccagctgctgcctggggacgagttctcgctgcgggagcacgagctgctctgccgcgccgaccacggcctcctgctcgagcgcgccgcggccggcagcccgcgcagccccggcccgcttcccggcgcccgcggcctgcatctgcccggtaagcgcgccggggcctgtgccggggtgagcggggtgtatgtgcgtgcgtgtgtgtaggggtacgcttgtgtccctaacgagaagttgtcagttgtgtgtggttccgtctgccgggatagtgtttttctgtatcagtgcggaactgtggtgctgggaaca

SEQ ID NO: 3215 - protein, 359 aa, Homo sapiens
  ref <308>: DATABASE ACCESSION NUMBER: Refseq / XP_047951
  ref <309>: DATABASE ENTRY DATE: 2002-08-01
MVDIIFHYPFLGAMGDHSKKKPGTAMCVGCGSQIHDQFILRVSPDLEWHAACLKCAECSQYLDETCTCFVRDGKTYCKRDYVRLFGIKCAKCQVGFSSSDLVMRARDSVYHIECFRCSVCSRQLLPGDEFSLREHELLCRADHGLLLERAAAGSPRSPGPLPGARGLHLPDAGSGRQPALRPHVHKQTEKTTRVRTVLNEKQLHTLRTCYAANPRPDALMKEQLVEMTGLSPRVIRVWFQNKRCKDKKKSILMKQLQQQQHSDKTSLQGLTGTPLVAGSPIRHENAVQGSAVEVQTYQPPWKALSEFALQSDLDQPAFQQLVSFSESGSLGNSSGSDVTSLSSQLPDTPNSMVPSPVET

SEQ ID NO: 3216 - DNA, 1298 bp, Rattus norvegicus; identical to SEQ ID NO: 3212
  ref <308>: DATABASE ACCESSION NUMBER: EMBL / L35571
  ref <309>: DATABASE ENTRY DATE: 2000-03-04

SEQ ID NO: 3217 - protein, 360 aa, Rattus norvegicus; identical to SEQ ID NO: 3213
  ref <308>: DATABASE ACCESSION NUMBER: SWISS-Prot / P50480
  ref <309>: DATABASE ENTRY DATE: 2002-06-15

SEQ ID NO: 3218 - DNA, 448 bp, Homo sapiens; identical to SEQ ID NO: 3214
  ref <308>: DATABASE ACCESSION NUMBER: EMBL / AI972048
  ref <309>: DATABASE ENTRY DATE: 2000-03-04

SEQ ID NO: 3219 - DNA, 560 bp, Rattus norvegicus
  ref <308>: DATABASE ACCESSION NUMBER: EMBL / L35921
  ref <309>: DATABASE ENTRY DATE: 2000-03-04
ggaggtggaggaggaggagggggggggggggaagagggggaggagaaggaggattcattattgcagggattggactcagagaaacagacccagggcatggagacaggtggtgcctaggaggaggaggcggtcctgaggggctgcaccccaggggagggggcggggctgggaatgggatctgcagaaccgccagccatcccagccctgagctgcaacagccatgtccaacaacatggccaagatcgctgaggcccgcaagacggtggagcaactgaagctggaggtgaacatcgatcgcatgaaggtgtcgcaggcggcagcggagctattggctttctgcgaaacgcacgctaaggatgacccactggtgactcctgtccctgccgccgagaatcccttccgcgacaaacgactcttttgcaccctgctctgagcccccaagatagttttatcctcccgcgcagaaatatgaatccaataaacttggtgacttggtggtgcctgccatttaggggaaaatgaggcacggggcaaaaacgtgggggccacctttgtgggga

SEQ ID NO: 3220 - protein, 70 aa, Rattus norvegicus
  ref <308>: DATABASE ACCESSION NUMBER: SWISS-Prot / P43426
  ref <309>: DATABASE ENTRY DATE: 2002-06-15
MSNNMAKIAEARKTVEQLKLEVNIDRMKVSQAAAELLAFCETHAKDDPLVTPVPAAENPFRDKRLFCTLL

SEQ ID NO: 3221 - DNA, 213 bp, Homo sapiens
  ref <308>: DATABASE ACCESSION NUMBER: Refseq / NM_033258
  ref <309>: DATABASE ENTRY DATE: 2002-11-12
atgtccaacaacatggccaagattgccgaggcccgcaagacggtggaacagctgaagctggaggtgaacatcgaccgcatgaaggtgtcgcaggcagcagcggaactcctggctttctgcgagacgcatgccaaagatgacccgctggtgacgccagtacccgccgcggagaaccccttccgcgacaagcgcctcttttgtgttctgctctga

SEQ ID NO: 3222 - protein, 70 aa, Homo sapiens
  ref <308>: DATABASE ACCESSION NUMBER: Refseq / NP_150283
  ref <309>: DATABASE ENTRY DATE: 2002-11-12
MSNNMAKIAEARKTVEQLKLEVNIDRMKVSQAAAELLAFCETHAKDDPLVTPVPAAENPFRDKRLFCVLL

SEQ ID NO: 3223 - DNA, 3917 bp, Rattus norvegicus
  ref <308>: DATABASE ACCESSION NUMBER: EMBL / L36088
  ref <309>: DATABASE ENTRY DATE: 1996-12-13
gtcgcccggtccaaagacactccacatgttggttcctgagctgaggatctagcctgcacaccctgctattcggaaagtctgtgttcccgtctgaccgaggctcctcttgctacaggctcagcacttgtctgctggctctggggctgtgagaagggaagagtggtgcagcttctgaagcagtagttggtttgggtcctgagttgaggactgtcatctcccagagtcacgtctctcaccagcgtccgtcaaacttctggaagagtgaaaccccaggcaactcttcgaggtcaaacactcagtgtctaactggggttgatggtgcatagggtacccacacagacttcacgcggtcgtctcggctccaggttgcccctaccctgagctcccggctgtgcgtgactccagcgtgttctatccagacttcaatctaaacaatcttgattcctgtagccggcctggcgggaccctgaatggcaggaagaggagaccttggtcaccacagctatcacagtttgcagatctcgtcacatctcttctcctcctatctccaaggaccatgaccctggggattttccgaagggtctttttgatgctgtcggtggccttgggcctaactaagggagacttggtgaagccctccaggggtcagctggtaaactgcacttgtgagaacccacactgcaagaggccaatctgccagggggcatggtgcacagtggtgctagttcgagagcagggcaggcacccccaggtctatcggggctgcgggagcctgaaccaggagctctgcctgggacgtcccacggagtttgtgaaccatcactgctgctatagatccttctgcaaccacaatgtgtccctgatgctggaggccacccaaactccttcggaggagccagaagtagatgcccatctgcctctgatcctgggtcccgtgctggccttgctggtcctggtggccctgggcactctgggcttgtggcgtgtccggagaaggcaggagaagcagcggggtctgcacagtgacctgggcgagtccagtctcatcctgaaggcatcggaacagggagacagcatgttgggggacttcctggtcagcgactgtaccacaggcagcggctcagggctacccttcttggtgcagaggacagtagcgcgacaggttgcactggtggagtgtgtgggaaagggccgatatggcgaggtgtggcgcggttcgtggcatggcgagagtgtggcggtcaagattttctcctcacgagatgagcagtcctggttccgggagacagagatctacaacacagttctgcttagacacgacaacatcctaggcttcatcgcctccgacatgacctcgcggaactccagcacgcagctgtggcttatcacccactaccacgagcatggctccctctatgactttctgcagaggcagacgctggagccccagttggccctgaggctggctgtgtccgcggcctgcggcctggcgcacctgcatgtagagatctttggcactcaaggcaaaccagccatcgcccatcgtgacctcaagagccgcaacgtgctggtcaagagcaacttgcagtgttgcattgcagacctgggattggctgtgatgcactcgcaaagcagcgattacctggacattggtaacaacccccgagtgggtaccaagagatacatggcacccgaggtgctggatgagcagatccgcacagactgttttgagtcgtacaagtggacagacatctgggccttcggcttagtgctatgggagattgcccggcggaccatcatcaatggcattgtggaggactacaggccacccttctatgacatggtacccaatgaccccagttttgaggacatgaaaaaggtggtgtgtgttgaccagcagacccccaccatccctaaccgactggcagcagatccggtcctctccgggctggcccagatgatgcgagagtgctggtaccccaacccctccgctcgcctcaccgcactgcgcataaagaagacattacagaagctcagccagaatccagagaaacccaaagtgattcactagcccagcatcaccagactttctctgcctaaagtatgtgctgggccagaagacatagcccgtctgggtagaggtagctcgagtgtgcagggtgccctgcgtgtgcctgctcagcttggcccccagcccattcagccaaaaatacagctgggctgaaattcgatccgcctccgtctggcctgctcaaagtggccggctctctgacgcctggctggattccctgtccccaaggccagcagagcacaccccctaccactcccagggcagggtggccaagccagggaatcccgggcccggatcctgggctttcactccccacccttggtcaaccttgctgccccgtcagagctgccaggatcggacagggccctgtccagattcagcagacattccacctgctggggctcagccagagagatactcagcagcctcagtgtctctctgtgggtgtttattgctcctatgatgcctttccgttgtcctgactagaccccctggctagcgaatgctagtctcttgggagaggtggtacctgacccttccacccaccgtccccttaccacctcagctgactcattaaggcatcaaaacccaagggtcctctgaggagaaggtcaagcatggtagaagggacccagcattgctccctctgataggagaggacttcactgtcttaggatcttttgtcccaatgtcctttgaggtgtctcagaacctgattttccttgaagctcaggctgtgtgaaagctaggtcttgtctactacaccccgttcctatcacttgagtcaagctgtggtttgtaaatagccaccacagtccaggatggcccaacgtgcccctgggctaatctccaggcccctgttcttgccttgagctttgcaagtggccaccctgggacctgggcagcacaggaatttctgactccctctgtggcttggtcttctgcccagggctccgggagggggtggtggtggtgacttcctttggggtcttccaagactaaaaggaaattcggcccctgtcaagaagcctccagcaaccagggttctacacctcctggctgtgactctctggccaaagccacactctgggccaggtcccagaaagtgcaccttgggagaacttggcctacagaaacaccaagagtcccagcatttagaaatgtgaagggtacaccccatcccgaagcctgagttgatggactggagagaagcgggctgtaggcaaggcttatggagggcaaagtagggctcgggcaagagacaagatcagcatccatcttgggaagacctggcctagaaacccttggcctttgaagggtgaaacaacggagacagttcatcctgctctgcacacgtgccgacccgccggacgcgaccgaccgcttgagttcctccggtgtgtgctcccagctctccataatgtcactcaagactacctttcagcagtgtgcaaggaccaaggagaaccaggaagtgaaacgagatggaaaacagaaagtaaacgggactttttcagaccagtggggcaaagtctgaaggttctctggtcactggagccagggaatcgctttctgacctgaaggatttttatttctactggacttgggaacaaattcatcctcagattccacagccagaaacggaagacagtagctcctccaggccaggaaatcctaagtgcggagaggggtgcgggtgttgaacgactggagatgtggcaaggaaggtggcattctccaaatgcttcctaacgcaggtgtgcaagtggaaccacacagtttatggaagcacttagcccgtgacaggcacatagtaggtcctcaataaaccatgtttgaccccctg

SEQ ID NO: 3224 - protein, 504 aa, Rattus norvegicus
  ref <308>: DATABASE ACCESSION NUMBER: SWISS-Prot / AAC37705
  ref <309>: DATABASE ENTRY DATE: 2003-02-01
MTLGIFRRVFLMLSVALGLTKGDLVKPSRGQLVNCTCENPHCKRPICQGAWCTVVLVREQGRHPQVYRGCGSLNQELCLGRPTEFVNHHCCYRSFCNHNVSLMLEATQTPSEEPEVDAHLPLILGPVLALLVLVALGTLGLWRVRRRQEKQRGLHSDLGESSLILKASEQGDSMLGDFLVSDCTTGSGSGLPFLVQRTVARQVALVECVGKGRYGEVWRGSWHGESVAVKIFSSRDEQSWFRETEIYNTVLLRHDNILGFIASDMTSRNSSTQLWLITHYHEHGSLYDFLQRQTLEPQLALRLAVSAACGLAHLHVEIFGTQGKPAIAHRDLKSRNVLVKSNLQCCIADLGLAVMHSQSSDYLDIGNNPRVGTKRYMAPEVLDEQIRTDCFESYKWTDIWAFGLVLWEIARRTIINGIVEDYRPPFYDMVPNDPSFEDMKKVVCVDQQTPTIPNRLAADPVLSGLAQMMRECWYPNPSARLTALRIKKTLQKLSQNPEKPKVIH

SEQ ID NO: 3225 - DNA, 1733 bp, Homo sapiens
  ref <308>: DATABASE ACCESSION NUMBER: EMBL / L17075
  ref <309>: DATABASE ENTRY DATE: 1999-07-01
tgatttcctctgggcaggagggagccacggccagcgcgtgtcacacttcatggctcttactccacctctcttgctcctctctgcagggaccatgaccttgggctcccccaggaaaggccttctgatgctgctgatggccttggtgacccagggagaccctgtgaagccgtctcggggcccgctggtgacctgcacgtgtgagagcccacattgcaaggggcctacctgccggggggcctggtgcacagtagtgctggtgcgggaggaggggaggcacccccaggaacatcggggctgcgggaacttgcacagggagctctgcagggggcgccccaccgagttcgtcaaccactactgctgcgacagccacctctgcaaccacaacgtgtccctggtgctggaggccacccaacctccttcggagcagccgggaacagatggccagctggccctgatcctgggccccgtgctggccttgctggccctggtggccctgggtgtcctgggcctgtggcatgtccgacggaggcaggagaagcagcgtggcctgcacagcgagctgggagagtccagtctcatcctgaaagcatctgagcagggcgacagcatgttgggggacctcctggacagtgactgcaccacagggagtggctcagggctccccttcctggtgcagaggacagtggcacggcaggttgccttggtggagtgtgtgggaaaaggccgctatggcgaagtgtggcggggcttgtggcacggtgagagtgtggccgtcaagatcttctcctcgagggatgaacagtcctggttccgggagactgagatctataacacagtgttgctcagacacgacaacatcctaggcttcatcgcctcagacatgacctcccgcaactcgagcacgcagctgtggctcatcacgcactaccacgagcacggctccctctacgactttctgcagagacagacgctggagccccatctggctctgaggctagctgtgtccgcggcatgcggcctggcgcacctgcacgtggagatcttcggtacacagggcaaaccagccattgcccaccgcgacttcaagagccgcaatgtgctggtcaagagcaacctgcagtgttgcatcgccgacctgggcctggctgtgatgcactcacagggcagcgattacctggacatcggcaacaacccgagagtgggcaccaagcggtacatggcacccgaggtgctggacgagcagatccgcacggactgctttgagtcctacaagtggactgacatctgggcctttggcctggtgctgtgggagattgcccgccggaccatcgtgaatggcatcgtggaggactatagaccacccttctatgatgtggtgcccaatgaccccagctttgaggacatgaagaaggtggtgtgtgtggatcagcagacccccaccatccctaaccggctggctgcagacccggtcctctcaggcctagctcagatgatgcgggagtgctggtacccaaacccctctgcccgactcaccgcgctgcggatcaagaagacactacaaaaaattagcaacagtccagagaagcctaaagtgattcaatagcccaggagcacctgattcctttctgcctgcagggggctgggggggtggggggcagcggatggtgcctatctgggtagaggtagtgtgagtgtgtgtgtgctgggatggcagctgcgcctgctgctcgccc

SEQ ID NO: 3226 - protein, 503 aa, Homo sapiens
  ref <308>: DATABASE ACCESSION NUMBER: SWISS-Prot / P37023
  ref <309>: DATABASE ENTRY DATE: 2001-10-16
MTLGSPRKGLLMLLMALVTQGDPVKPSRGPLVTCTCESPHCKGPTCRGAWCTVVLVREEGRHPQEHRGCGNLHRELCRGRPTEFVNHYCCDSHLCNHNVSLVLEATQPPSEQPGTDGQLALILGPVLALLALVALGVLGLWHVRRRQEKQRGLHSELGESSLILKASEQGDSMLGDLLDSDCTTGSGSGLPFLVQRTVARQVALVECVGKGRYGEVWRGLWHGESVAVKIFSSRDEQSWFRETEIYNTVLLRHDNILGFIASDMTSRNSSTQLWLITHYHEHGSLYDFLQRQTLEPHLALRLAVSAACGLAHLHVEIFGTQGKPAIAHRDFKSRNVLVKSNLQCCIADLGLAVMHSQGSDYLDIGNNPRVGTKRYMAPEVLDEQIRTDCFESYKWTDIWAFGLVLWEIARRTIVNGIVEDYRPPFYDVVPNDPSFEDMKKVVCVDQQTPTIPNRLAADPVLSGLAQMMRECWYPNPSARLTALRIKKTLQKISNSPEKPKVIQ

SEQ ID NO: 3227 - DNA, 1811 bp, Rattus norvegicus
  ref <308>: DATABASE ACCESSION NUMBER: EMBL / L36532
  ref <309>: DATABASE ENTRY DATE: 2000-03-04
gcacgaggaccgctgtgaggggaatggaggcttcttcgcctctggaccccgtggggcgccttgtagccttctgccgcggaggagtgcatctggccgtcctgctgctgttcttgtcgccatctactttgggccagtgcccagccccaccactgtttccttatgccaaacctataaatccaactgatgaatccacgtttcccgttggaacatctttgaagtatgaatgtcgtccaggatatatcaagaggcagttctctatcacctgcgaagtaaactcagtgtggacaagtcctcaagacgtgtgtatacgtaaacaatgtgaaactcctttagatcctcagaatggcatagtacatgtaaacacagacatccggtttggatcctctatcacttatacctgtaatgaaggataccgcctcattggttcctcctctgctatgtgcataatctctgatcagagcgttgcctgggatgccgaggcacctatttgtgaatcaattccttgtgagatacccccaagcattcccaatggagatttcttcagtcctaacagagaagattttcattatggaatggtagttacctaccagtgcaacactgatgcgagagggaagaagctctttaacctggtgggtgagccctccatacactgtaccagcatcgatggtcaagttggagtctggagtggccctcctcctcagtgcattgaactcaacaaatgtactcctccccatgttgaaaatgcagtcatagtgtctaaaaacaaaagcttgttttccttaagggatatggtggagtttagatgtcaggatggctttatgatgaaaggagacagcagtgtgtattgtcgatccctaaacagatgggagcctcagttaccaagctgcttcaaggtgaaatcctgtggtgctttcctgggtgagcttcctaatgggcatgtattcgttccacaaaatcttcaactcggggccaaagtgacctttgtttgtaatacagggtatcaattaaaaggcaattcttctagtcattgtgttcttgatggagtggaaagcatttggaatagcagcgttcctgtgtgtgaacaagtgatatgtaaactccctcaggatatgagtggattccagaaagggttgcaaatgaaaaaagattattactatggagataatgtagccttggaatgtgaggatgggtatactctagaaggcagttctcagagccagtgccagtccgatgccagctgggatcctcctctgcccaaatgtgtctctcaagtgatatgtaaactccctcaggatatgagtggattccagaaagggttgcaaatgaaaaaagattattactatggagataatgtagccttggaatgtgaggatgggtatactctagaaggcagttctcagagccagtgccagtccgatgccagctgggatcctcctctgcccaaatgtgtctctcgctcaaacagtggtctaatagctggaattttcattgggataatcgtccttattttattcatcattttttcctactggatgattatgaagtttaaaaaacgcaattccaccaatgaaaagtgtaaagaagtgggtatctatttaaattctaaagaagacagctgtgttcagcctcagtctctgctcacaagtcaggagaacaacagtaccagtagcccagcacggaattcactcactcaagaagtctaatagccgccatgtacagtgatgtctctgaaacgcaaaacatttcctgtctgtatcacttttaaaataaactattttcttttaaaatctagatgtgttgttcctcgtgcc

SEQ ID NO: 3228 - protein, 559 aa, Rattus norvegicus; identical to SEQ ID NO: 2026
  ref <308>: DATABASE ACCESSION NUMBER: SWISS-Prot / AAA91821
  ref <309>: DATABASE ENTRY DATE: 2001-06-01

SEQ ID NO: 3229 - DNA, 3251 bp, Homo sapiens
  ref <308>: DATABASE ACCESSION NUMBER: EMBL / L17418
  ref <309>: DATABASE ENTRY DATE: 1999-07-02
gtggaataaagtttagaaaatatccaagtttatctgcctgtaaattctgggtagttcagttgtctaccatgctgttaattaaatgaaaacatcctgttatttcagggtccttccttgacaaagtactatacagctgaagaacatctcgaatacagttttggtgggaaaggagccaattgatttcaacagaatcagatctgagcttcataaagtctttgaagtgacttcacagagacgcagacatgtgcacttgaagatgctgccccttccctggtacctagcaaagctcctgcctctttgtgtgcgtcactgtgaaacccccacccttctgcctcgtgctaaacgcacacagtatctagtcaggggaaaagactgcatttaggagatagaaaatagtttggattacttaaaggaataaggtgttgcctggaatttctggtttgtaaggtggtcactgttcttttttaaaatatttgtaatatggaatgggctcagtaagaagagcttggaaaatgcagaaagttatgaaaaataagtcacttataattatgctacctactgataaccactcctaatattttgattcattttctgcctatcttctttcacatatgtgtttttttacatacgtccttttccccccagtttgtttccttttattttatagagcagaaccctagtcttttaaaccagtttagagtgaaatatatgctatatcagtttttactttctctagggagaaaaattaatttactagaaaggcatgaaatgatcatgggaagagtggttaagactactgaagagaaatatttggaaaataagatttcgatatcttctttttttttgagatggagtctggctctgtctcccaggctggagtgcagtggcgtaatctcggctcactgcaagctccgcctcctgggttgacaccattttcctgcctcagcctcctgagtagttgggactaccagtagatgggactacaggcacctgccaacacgcccggctaatttttttgtatttttagtagagacggggtttcaccatgttagccaggatggtctggatctcctgacctcgtgatccacccgcctcggcctcccaaagtgctgcgattacaggcatgagccaccgcgcctggccgctttcgatattttctaaactttaattcaaaagcactttgtgctgtgttctatataaaaaacataataaaaattgaaatgaaagaataattgttattataaaagtactagcttacttttgtatggattcagaatatactaaattaactttttaaaacacaacttttaaaaaatgtatcaaaaataataaacgtgttctgatatttttaaaataagtgaccttgtgttctttaaccagtccacatctttagagaacaaaaatgtgttatgatattatgggccatgctaatgacctctagaaaacatcagaatatttctggatatttaataatagctttatatatgactaatgctcatttctatgtaattctgtttaatagttgctttaaaggtgaattttgccacatttactttgacagcagtataaggagtgagatagacatgaacctgaatttcaatttaaaatcatggaagagagggaaaaaaaaccagcttaagaaaatcaactgataaactgcagaaaaaatgcaacttaacatcacaaagctaatgctttattatttagagagtacttaaaaattaaagaccaaacttctctccacccaacaaaaatgggcaaaggacatacagctaggtcaccaagaaagaagggcaaataggtggtgagtacatgtaaagatacttgataggacttttgcttagttgaatctttagcaaatctcttttatttcttgggattttgaaggaaggtaatttttaaaggaggactagaaactaaggtggatttggggaattggcctttttagaattaaaatttcccattacaagaaaaaaatcctgtgtctttttttccagaatggagtaggtcagtgagcaatgtgattaataaatatttcaatgtctgtgacttttgatttattttggagacagggtcttgctctgttacccaggctggagtgcagtggtgctatctaggcttactgcaacctcacctgtcactttttaattgcaagaaagctgaaaggtttttttctattatatcagttataatgagaaatactgtatatactaactatgagtaaaatactatattgcctaacttgtattattaagcaattctgctaacctgtgaccttacattttcatctgaaaagcaggggctggacaccaattgccctatgaagctattgctagtcctaacattctttgttttgtttgcttttttggcacacttaagtgtgtactatgaagtttatgatgctttaatgaaattttctgtctctaccattgtaatgagaaaggaataaaatactttattttgcaaatctacttatggaatatagttctgtacctgattgttttcataatccctgtgttgatgtgtaatgccacagacatgctcttgatggtaacaggaaagaaaatcagacacagctaaacataaaggtcagttggctggcaggtgcttagcaggtgtaaatagaggcccattcatgctgctccacttgctcctgaaaagcataatgtaaatacagtatactaattaggaggcaaagaaccatctaacatggttctttttttttttttttttttttttttgagataaagtcttgctctgtcaccaggctggagtgcagtggcgcgatcttgactcactgcaacctccgcctcccaggttcaagcaatttccctgcctcagcctcctgagtagctgggactacaggtgtgcgccaccacgcccagctaattttttgtattttagtacagacggggtttcaccatgttggccaggatggtctagatctcctgacctcgtgatctgcccacctcggcctcccaaagtgctgggattacaggcatgagccaccgcgcccagccctaacatcaaattttaaaagagttggccacagtttaatgacatccctgcacaccagcctccacccatactgcccttcataagccccttaaaggagatcccatagttctaaacccgggtccacaaacacacatatcctcattctctccttttcttctctttggcagtttgacaaaatctttagggggaattggaggaaacattaatctcctaaatcaacttcattcaaagct

SEQ ID NO: 3230 - protein, 2039 aa, Homo sapiens
  misc_feature (1)..(2039): Xaa=Unknown amino acid
  ref <308>: DATABASE ACCESSION NUMBER: SWISS-Prot / AAB60694
  ref <309>: DATABASE ENTRY DATE: 2003-02-01
MGASSPRSPEPVGPPAPGLPFCCGGSLLAVVVLLALPVAWGQCNAPEWLPFARPTNLTDEFEFPIGTYLNYECRPGYSGRPFSIICLKNSVWTGAKDRCRRKSCRNPPDPVNGMVHVIKGIQFGSQIKYSCTKGYRLIGSSSATCIISGDTVIWDNETPICDRIPCGLPPTITNGDFISTNRENFHYGSVVTYRCNPGSGGRKVFELVGEPSIYCTSNDDQVGIWSGPAPQCIIPNKCTPPNVENGILVSDNRSLFSLNEVVEFRCQPGFVMKGPRRVKCQALNKWEPELPSCSRVCQPPPDVLHAERTQRDKDNFSPGQEVFYSCEPGYDLRGAASMRCTPQGDWSPAAPTCEVKSCDDFMGQLLNGRVLFPVNLQLGAKVDFVCDEGFQLKGSSASYCVLAGMESLWNSSVPVCEQIFCPSPPVIPNGRHTGKPLEVFPFGKAVNYTCDPHPDRGTSFDLIGESTIRCTSDPQGNGVWSSPAPRCGILGHCQAPDHFLFAKLKTQTNASDFPIGTSLKYECRPEYYGRPFSITCLDNLVWSSPKDVCKRKSCKTPPDPVNGMVHVITDIQVGSRINYSCTTGHRLIGHSSAECILSGNAAHWSTKPPICQRIPCGLPPTIANGDFISTNRENFHYGSVVTYRCNPGSGGRKVFELVGEPSIYCTSNDDQVGIWSGPAPQCIXPNKCTPPNVENGILVSDNRSLFSLNEVVEFRCQPGFVMKGPRRVKCQALNKWEPELPSCSRVCQPPPDVLHAERTQRDKDNFSPGQEVFYSCEPGYDLRGAASMRCTPQGDWSPAAPTCEVKSCDDFMGQLLNGRVLFPVNLQLGAKVDFVCDEGFQLKGSSASYCVLAGMESLWNSSVPVCEQIFCPSPPVIPNGRHTGKPLEVFPFGKAVNYTCDPHPDRGTSFDLIGESTIRCTSDPQGNGVWSSPAPRCGILGHCQAPDHFLFAKLKTQTNASDFPIGTSLKYECRPEYYGRPFSITCLDNLVWSSPKDVCKRKSCKTPPDPVNGMVHVITDIXVGSRINYSCTTGHRLIGHSSAECILSGNTAHWSTKPPICQRIPCGLPPTIANGDFISTNRENFHYGSVVTYRCNLGSRGRKVFELVGEPSIYCTSNDDQVGIWSGPAPQCIIPNKCTPPNVENGILVSDNRSLFSLNEVVEFRCQPGFVMKGPRRVKCQALNKWEPELPSCSRVCQPPPEILHGEHTPSHQDNFSPGQEVFYSCEPGYDLRGAASLHCTPQGDWSPEAPRCAVKSCDDFLGQLPHGRVLFPLNLQLGAKVSFVCDEGFRLKGSSVSHCVLVGMRSLWNNSVPVCEHIFCPNPPAILNGRHTGTPSGDIPYGKEISYTCDPHPDRGMTFNLIGESTIRCTSDPHGNGVWSSPAPRCELSVRAGHCKTPEQFPFASPTIPINDFEFPVGTSLNYECRPGYFGKMFSISCLENLVWSSVEDNCRRKSCGPPPEPFNGMVHINTDTQFGSTVNYSCNEGFRLIGSPSTTCLVSGNNVTWDKKAPICEIISCEPPPTISNGDFYSNNRTSFHNGTVVTYQCHTGPDGEQLFELVGERSIYCTSKDDQVGVWSSPPPRCISTNKCTAPEVENAIRVPGNRSFFSLTEIVRFRCQPGFVMVGSHTVQCQTNGRWGPKLPHCSRVCQPPPEILHGEHTLSHQDNFSPGQEVFYSCEPSYDLRGAASLHCTPQGDWSPEAPRCTVKSCDDFLGQLPHGRVLLPLNLQLGAKVSFVCDEGFRLKGRSASHCVLAGMKALWNSSVPVCEQIFCPNPPAILNGRHTGTPFGDIPYGKEISYACDTHPDRGMTFNLIGESSIRCTSDRQGNGVWSSPAPRCELSVPAACPDPPKIQNGHYIGGHVSLYLPGMTISYICDPGYLLVGKGFIFCTDQGIWSQLDHYCKEVNCSFPLFMNGISKELEMKKVYHYGDYVTLKCEDGYTLEGSPWSQCQADDRWDPPLAKCTSRAHDALIVGTLSGTIFFILLIIFLSWIILKHRKGNNAHENPKEVAIHLHSQGGSSVHPRTLQTNEENSRVLP

SEQ ID NO: 3231 - DNA, 5575 bp, Rattus norvegicus
  ref <308>: DATABASE ACCESSION NUMBER: EMBL / L38483
  ref <309>: DATABASE ENTRY DATE: 2000-03-04
gtttttttttttttttttcctcccctccctcccccgcgtttcatgcagctgatccgaaagggaataaaaggctgcgcataatcataatataaaagaaggggagcgcgagagaaggaaagaaagccgagaggtggaagaggggggagcgcctcaaagaagcgatcagaataataaaaggaggccgggctctttgccttctggaacgcgcggctcttgaaagggcttttgaaaagtagtgttgttttccagtcgtgcatgctccaatccacggagtatattagagccgggacgcggccgtcgcgggggcagcgacgacggcagtcctcggagggagcaccagcgctagcagcggcggcggcgtccggagtgccccccgcgcggcagcgatgcggtccccacggacgcgcggccggccggggcgccccttgagccttctgctcgccctgctctgtgccctgcgagccaaggtgtgcggggcctcgggtcaatttgagctggagatcctgtccatgcagaacgtgaacggagagttacagaatgggaactgttgcggcggagcccggaaccctggcgaccgcaagtgcacccgcgacgagtgtgacacgtacttcaaagtgtgcctcaaggagtatcagtcccgcgtcacggccgggggaccctgcagcttcggctcagggtctacgcctgtcatcgggggcaataccttcaatctcaaggccagccgcggcaacgaccgtaatcgcatcgtactgcctttcagtttcgcctggccgaggtcctacactttgctggtggaggcatgggattccagtaatgacactattcaacctgatagcataattgaaaaggcttctcactcaggcatgataaaccccagccggcagtggcagacactgaaacagaacacagggattgcccactttgagtatcagatccgagtgacctgtgatgaccactactatggctttggctgcaacaagttctgtcggcccagagatgacttctttggacattatgcctgcgaccagaatggcaacaaaacctgcatggaaggctggatgggtcctgagtgtaacaaagcaatatgccgacagggctgcagtcccaagcatggctcctgcaaactcccaggtgactgcaggtgccagtatggttggcagggcctgtactgtgataagtgcatcccgcacccaggatgtgtccacggcacctgcaatgaaccctggcagtgcctctgtgaaaccaactggggtggacagctctgtgacaaagatctgaattactgtgggactcatcagccctgtctcaaccggggaacatgtagcaacactggccctgacaaataccagtgttcctgccccgagggctactcaggaccgaactgtgaaattgctgagcatgcctgcctctctgatccctgccacaacagaggcagctgcaaggagacctcctcgggctttgagtgtgagtgttctccaggctggactggacccacgtgttccacaaacatcgatgactgttctccaaataactgttcccatggaggcacctgccaggatctagtgaatggattcaagtgcgtgtgcccaccccagtggactggcaagacttgtcagttagatgcaaatgagtgcgaggccaagccttgtgtaaatgccagatcctgtaagaatctgattgccagctactactgtgattgtcttcctggctggatgggtcagaattgtgacataaatatcaatgactgccttggccagtgtcagaatgatgcctcctgtcgggatttggttaatggttatcgctgtatctgtccacctggctatgcgggcgatcactgtgaaagagacatcgatgaatgtgctagcaacccctgcttgaatgggggtcactgtcagaatgaaattaacagattccagtgtctgtgtcccactggtttctctggaaacctctgtcagctggacatcgattactgcgagcccaacccttgccagaatggcgcccaatgctacaatcgtgccagtgactatttctgcaagtgccctgaggactacgagggcaagaactgctcacacctgaaagaccactgccgcaccactccctgtgaagtgattgacagctgcaccgtggccatggcctccaacgatactcctgaaggggtgcggtatatctcttccaacgtctgtggtccccatgggaagtgcaagagcgagtcaggaggcaaattcacctgtgactgtaacaaaggcttcaccggcacctactgccatgaaaatatcaacgactgtgagggcaacccctgtacgaacggtggcacgtgcatcgacggcgttaactcctacaagtgtatctgtagtgacggctgggagggcgcgcactgtgagaacaacataaatgactgtagccagaacccttgccactatgggggtacatgtcgagacctggtcaatgacttttactgtgactgcaaaaatgggtggaaagggaaaacctgccactcgcgtgacagccagtgtgacgaagccacgtgtaataacggtggtacctgctatgatgaagtggatacgtttaagtgcatgtgtcctggtggctgggaaggaacaacctgtaatatagctagaaacagtagctgcctgccgaacccctgtcataatggaggcacctgcgtggtcaatggagactccttcacctgtgtctgcaaagaaggctgggaggggccgatttgtactcaaaataccaacgactgcagtcctcacccttgttacaacagcggaacctgtgtggatggagataactggtaccggtgcgaatgtgcccctggttttgctgggccagactgcaggataaacatcaatgagtgtcagtcttccccttgtgcctttggggccacctgtgtggatgagatcaatggctaccagtgtatctgccctccaggacatagtggtgccaagtgccatgaagtttcagggagatcttgcatcaccatggggagagtgatacttgatggggccaagtgggatgacgactgtaacacctgccagtgcctgaatggacgggtggcctgctccaaggtctggtgtggcccgagaccttgccggctccacaaagggcacggcgagtgtcccaatgggcagagctgcatcccagtcctggatgaccagtgtttcgtgcgcccctgcactggtgctggcgagtgtcggtcctccagcctccagccagtgaagaccaagtgtacatcggactcttattaccaggacaattgtgcgaacatcactttcacctttaacaaggagatgatgtctccaggtctcaccactgagcacatttgcagcgaattgaggaatctgaatattctgaagaatgtttctgctgagtattcaatctacatagcctgtgagccttccttatcagcaaacaatgaaatacacgtggccatttctgccgaagacatccgggatgatggaaaccctgtcaaggaaattactgataaaataatagatctcgttagtaaacgggatgggaacagctcacttatcgctgctgttgcagaagtcagagttcagaggcgccctctgaaaaacagaacagatttcctggttcctctgctgagctctgtcttaacagtggcttgggtctgttgcttggtgacagccttctactggtgtgtgcggaagcggcggcggaagcccagcagccacacccactctgcccctgaggacaacaccaccaacaatgtgcgcgaacagctgaaccaaatcaaaaaccccatcgagaaacacggagccaacacagtccccatcaaggattatgagaacaaaaactccaaaatgtcaaaaatcaggacacacaactcggaagtggaagaggatgatatggataagcaccagcagaaagtccggtttgccaaacagcccgtgtacacgctggtagacagagaggagaaggtcccccagcgcacgccgacaaaacacccgaactggacaaacaaacaggacaacagagacttggaaagtgcccagagcttgaaccggatggagtacatcgtatagcagacagtgcgtgccgccataggtagagtttgagggcaccccggggcttgtagtttctttaaactgttgtcgtatcccagtctgaggctgttgttgacttagagtcctgtgttaatttaagtttcgacaagctggcttccactggcactggtagtttctgtggttggctgggaaatcgagtgcagcgctcacagctatgcaaaaaccagtgaatgtgcccgggtgtacattcccctgcagccgactcgtcggctcccaggagctgcccaggcctaggcctcggagcttccacatctgccagcggtcctaatggtgatggcagccttaggatcatagttttatttatatttattgactcttgagttgtttttgtatattggttttatgatgacgtacaagtagttctgtatttgaaagtgcctttgcagctcagaaccacagcaactatcacaaatgactttattatttattttttttattgtatttttgttgttgggggaggggggatttgatgtcagcagttgctggtaaaatgaagaatttaaagaggaaaaatgtgtcaaagtagaatttttgtatagttatgtaaataattcttttttattaatcactctgtatatttgatttattaacttaataatcaagagccttaaaacatcattcctttttatttatatgtatgtgtttagaattgaaggtttttgatagtgttggaaacatatggctttttttttttttttttgtgaactttttctcattacgtgttgcctgtaagccaaaagtaaggtgtttggaaatagtttctcttggaaggatgggataggcttcttcccctgggaatactgatggattttttttttttttttttttttttgtacgacgtcaggtgttcaaacacttccttgatagcatcactttaagacacattctaaggactgactgaggcagattgagaattcgtctagaacaggtttttgtttttttctcttttctttttttattttttcctgctttagacttgaaaagagacaggcaggcgatctgtgacagagcagtttaagggaacaaactgagctatgtagtcagaatgtgactggttggatctcattaaaagtatcagattgtgtgaagttggaagcttaccaatcttactttgtaaattctgatttcttttcaccattcgtatgtaatgctgaaccacttgtagatttgatttcattgttgttgtctactgcatttagggagtattctaataagctagatgaatacttgaaccataaaatgtccagttagagcactgtttagattggccatagagtacactgcctgccttaagtgaggacatgaaagtgctattaccaagttcaagatcaaaaaaggcttataaaacagtcatcctggctcaccacggagcccaggaagatactttgtattgtcctattagtgttatatgaacataaaatacatctttgatgtgttgttcctggcaataaattttgaaaagtgatatttattaaattttttgtatg

SEQ ID NO: 3232 - protein, 1219 aa, Rattus norvegicus
  ref <308>: DATABASE ACCESSION NUMBER: SWISS-Prot / Q63722
  ref <309>: DATABASE ENTRY DATE: 2002-06-15
MRSPRTRGRPGRPLSLLLALLCALRAKVCGASGQFELEILSMQNVNGELQNGNCCGGARNPGDRKCTRDECDTYFKVCLKEYQSRVTAGGPCSFGSGSTPVIGGNTFNLKASRGNDRNRIVLPFSFAWPRSYTLLVEAWDSSNDTIQPDSIIEKASHSGMINPSRQWQTLKQNTGIAHFEYQIRVTCDDHYYGFGCNKFCRPRDDFFGHYACDQNGNKTCMEGWMGPECNKAICRQGCSPKHGSCKLPGDCRCQYGWQGLYCDKCIPHPGCVHGTCNEPWQCLCETNWGGQLCDKDLNYCGTHQPCLNRGTCSNTGPDKYQCSCPEGYSGPNCEIAEHACLSDPCHNRGSCKETSSGFECECSPGWTGPTCSTNIDDCSPNNCSHGGTCQDLVNGFKCVCPPQWTGKTCQLDANECEAKPCVNARSCKNLIASYYCDCLPGWMGQNCDININDCLGQCQNDASCRDLVNGYRCICPPGYAGDHCERDIDECASNPCLNGGHCQNEINRFQCLCPTGFSGNLCQLDIDYCEPNPCQNGAQCYNRASDYFCKCPEDYEGKNCSHLKDHCRTTPCEVIDSCTVAMASNDTPEGVRYISSNVCGPHGKCKSESGGKFTCDCNKGFTGTYCHENINDCEGNPCTNGGTCIDGVNSYKCICSDGWEGAHCENNINDCSQNPCHYGGTCRDLVNDFYCDCKNGWKGKTCHSRDSQCDEATCNNGGTCYDEVDTFKCMCPGGWEGTTCNIARNSSCLPNPCHNGGTCVVNGDSFTCVCKEGWEGPICTQNTNDCSPHPCYNSGTCVDGDNWYRCECAPGFAGPDCRININECQSSPCAFGATCVDEINGYQCICPPGHSGAKCHEVSGRSCITMGRVILDGAKWDDDCNTCQCLNGRVACSKVWCGPRPCRLHKGHGECPNGQSCIPVLDDQCFVRPCTGAGECRSSSLQPVKTKCTSDSYYQDNCANITFTFNKEMMSPGLTTEHICSELRNLNILKNVSAEYSIYIACEPSLSANNEIHVAISAEDIRDDGNPVKEITDKIIDLVSKRDGNSSLIAAVAEVRVQRRPLKNRTDFLVPLLSSVLTVAWVCCLVTAFYWCVRKRRRKPSSHTHSAPEDNTTNNVREQLNQIKNPIEKHGANTVPIKDYENKNSKMSKIRTHNSEVEEDDMDKHQQKVRFAKQPVYTLVDREEKVPQRTPTKHPNWTNKQDNRDLESAQSLNRMEYIV

SEQ ID NO: 3233 - DNA, 5077 bp, Homo sapiens
  ref <308>: DATABASE ACCESSION NUMBER: Refseq / NM_002226
  ref <309>: DATABASE ENTRY DATE: 2002-11-05
ctcatgcatatgcaggtgcgcgggtgacgaatgggcgagcgagctgtcagtctcgttccgaacttgttggctgcggtgccgggagcgcgggcgcgcagagccgaggccgggacccgctgccttcaccgccgccgccgtcgccgccgggtgggagccgggccgggcagccggagcgcggccgccagcgagccggagctgccgccgcccctgcacgcccgccgcccaggcccgcgcgccgcggcgctgcgctcgaccccgcccgcgccgccgccgccgccgcctctgccgctgccgctgcctctgcgggcgctcggagggcgggcgggcgctgggaggccggcgcggcggctgggagccgggcgcgggcggcggcggcggggccgggcgggcgggtcgcgggggcaatgcgggcgcagggccgggggcgccttccccggcggctgctgctgctgctggcgctctgggtgcaggcggcgcggcccatgggctatttcgagctgcagctgagcgcgctgcggaacgtgaacggggagctgctgagcggcgcctgctgtgacggcgacggccggacaacgcgcgcggggggctgcggccacgacgagtgcgacacgtacgtgcgcgtgtgccttaaggagtaccaggccaaggtgacgcccacggggccctgcagctacggccacggcgccacgcccgtgctgggcggcaactccttctacctgccgccggcgggcgctgcgggggaccgagcgcgggcgcgggcccgggccggcggcgaccaggacccgggcctcgtcgtcatccccttccagttcgcctggccgcgctcctttaccctcatcgtggaggcctgggactgggacaacgataccaccccgaatgaggagctgctgatcgagcgagtgtcgcatgccggcatgatcaacccggaggaccgctggaagagcctgcacttcagcggccacgtggcgcacctggagctgcagatccgcgtgcgctgcgacgagaactactacagcgccacttgcaacaagttctgccggccccgcaacgactttttcggccactacacctgcgaccagtacggcaacaaggcctgcatggacggctggatgggcaaggagtgcaaggaagctgtgtgtaaacaagggtgtaatttgctccacgggggatgcaccgtgcctggggagtgcaggtgcagctacggctggcaagggaggttctgcgatgagtgtgtcccctaccccggctgcgtgcatggcagttgtgtggagccctggcagtgcaactgtgagaccaactggggcggcctgctctgtgacaaagacctgaactactgtggcagccaccacccctgcaccaacggaggcacgtgcatcaacgccgagcctgaccagtaccgctgcacctgccctgacggctactcgggcaggaactgtgagaaggctgagcacgcctgcacctccaacccgtgtgccaacgggggctcttgccatgaggtgccgtccggcttcgaatgccactgcccatcgggctggagcgggcccacctgtgcccttgacatcgatgagtgtgcttcgaacccgtgtgcggccggtggcacctgtgtggaccaggtggacggctttgagtgcatctgccccgagcagtgggtgggggccacctgccagctggacgccaatgagtgtgaagggaagccatgccttaacgctttttcttgcaaaaacctgattggcggctattactgtgattgcatcccgggctggaagggcatcaactgccatatcaacgtcaacgactgtcgcgggcagtgtcagcatgggggcacctgcaaggacctggtgaacgggtaccagtgtgtgtgcccacggggcttcggaggccggcattgcgagctggaacgagacgagtgtgccagcagcccctgccacagcggcggcctctgcgaggacctggccgacggcttccactgccactgcccccagggcttctccgggcctctctgtgaggtggatgtcgacctttgtgagccaagcccctgccggaacggcgctcgctgctataacctggagggtgactattactgcgcctgccctgatgactttggtggcaagaactgctccgtgccccgcgagccgtgccctggcggggcctgcagagtgatcgatggctgcgggtcagacgcggggcctgggatgcctggcacagcagcctccggcgtgtgtggcccccatggacgctgcgtcagccagccagggggcaacttttcctgcatctgtgacagtggctttactggcacctactgccatgagaacattgacgactgcctgggccagccctgccgcaatgggggcacatgcatcgatgaggtggacgccttccgctgcttctgccccagcggctgggagggcgagctctgcgacaccaatcccaacgactgccttcccgatccctgccacagccgcggccgctgctacgacctggtcaatgacttctactgtgcgtgcgacgacggctggaagggcaagacctgccactcacgcgagttccagtgcgatgcctacacctgcagcaacggtggcacctgctacgacagcggcgacaccttccgctgcgcctgcccccccggctggaagggcagcacctgcgccgtcgccaagaacagcagctgcctgcccaacccctgtgtgaatggtggcacctgcgtgggcagcggggcctccttctcctgcatctgccgggacggctgggagggtcgtacttgcactcacaataccaacgactgcaaccctctgccttgctacaatggtggcatctgtgttgacggcgtcaactggttccgctgcgagtgtgcacctggcttcgcggggcctgactgccgcatcaacatcgacgagtgccagtcctcgccctgtgcctacggggccacgtgtgtggatgagatcaacgggtatcgctgtagctgcccacccggccgagccggcccccggtgccaggaagtgatcgggttcgggagatcctgctggtcccggggcactccgttcccacacggaagctcctgggtggaagactgcaacagctgccgctgcctggatggccgccgtgactgcagcaaggtgtggtgcggatggaagccttgtctgctggccggccagcccgaggccctgagcgcccagtgcccactggggcaaaggtgcctggagaaggccccaggccagtgtctgcgaccaccctgtgaggcctggggggagtgcggcgcagaagagccaccgagcaccccctgcctgccacgctccggccacctggacaataactgtgcccgcctcaccttgcatttcaaccgtgaccacgtgccccagggcaccacggtgggcgccatttgctccgggatccgctccctgccagccacaagggctgtggcacgggaccgcctgctggtgttgctttgcgaccgggcgtcctcgggggccagtgccgtggaggtggccgtgtccttcagccctgccagggacctgcctgacagcagcctgatccagggcgcggcccacgccatcgtggccgccatcacccagcgggggaacagctcactgctcctggctgtcaccgaggtcaaggtggagacggttgttacgggcggctcttccacaggtctgctggtgcctgtgctgtgtggtgccttcagcgtgctgtggctggcgtgcgtggtcctgtgcgtgtggtggacacgcaagcgcaggaaagagcgggagaggagccggctgccgcgggaggagagcgccaacaaccagtgggccccgctcaaccccatccgcaaccccatcgagcggccggggggccacaaggacgtgctctaccagtgcaagaacttcacgccgccgccgcgcagggcggacgaggcgctgcccgggccggccggccacgcggccgtcagggaggatgaggaggacgaggatctgggccgcggtgaggaggactccctggaggcggagaagttcctctcacacaaattcaccaaagatcctggccgctcgccggggaggccggcccactgggcctcaggccccaaagtggacaaccgcgcggtcaggagcatcaatgaggcccgctacgccggcaaggagtaggggcggctgccagctgggccgggacccagggccctcggtgggagccatgccgtctgccggacccggaggccgaggccatgtgcatagtttctttattttgtgtaaaaaaaccaccaaaaacaaaaaccaaatgtttattttctacgtttctttaaccttgtataaattattcagtaactgtcaggctgaaaacaatggagtattctcggatagttgctatttttgtaaagtttccgtgcgtggcactcgctgtatgaaaggagagagcaaagggtgtctgcgtcgtcaccaaatcgtagcgtttgttaccagaggttgtgcactgtttacagaatcttccttttattcctcactcgggtttctctgtggctccaggccaaagtgccggtgagacccatggctgtgttggtgtggcccatggctgttggtgggacccgtggctgatggtgtggcctgtggctgtcggtgggactcgtggctgtcaatgggacctgtggctgtcggtgggacctacggtggtcggtgggaccctggttattgatgtggccctggctgccggcacggcccgtggctgttgacgcacctgtggttgttagtggggcctgaggtcatcggcgtggcccaaggccggcaggtcaacctcgcgcttgctggccagtccaccctgcctgccgtctgtgcttcctcctgcccagaacgcccgctccagcgatctctccactgtgctttcagaagtgcccttcctgctgcgcagttctcccatcctgggacggcggcagtattgaagctcgtgacaagtgccttcacacagacccctcgcaactgtccacgcgtgccgtggcaccaggcgctgcccacctgccggccccggccgcccctcctcgtgaaagtgcatttttgtaaatgtgtacatattaaaggaagcactctgtatatttgattgaataatgccacca

SEQ ID NO: 3234 - protein, 1238 aa, Homo sapiens [sequence omitted]

SEQ ID NO: 3235 - DNA, 1882 bp, Rattus norvegicus
  ref <308>: DATABASE ACCESSION NUMBER: EMBL / L38615
  ref <309>: DATABASE ENTRY DATE: 2000-03-04
tggagtttgagcttggcgagcagctggacaacgagcgagttgggatggccaccagctggggaagcatcttgcaggatgagaagcagctggaagagttggcacagcaggccatagaccgggccctggctgagggggtgttgctgaggtccgcaaagaaccccagctcctctgacgtggtgacgtatgccccattcacgctcttcccctcaccagtgcccagcactctgctggagcaggcctatgctgtgcagatggacttcaacatcctggtagatgctgtcagccagaactccgccttcctggagcaaacactgtctagcaccatcaaaaaggatgagtatactgcccgtctctttgatatctacaagcaagtcctgaaagagggcatagcccagactgtgttcctgggcctcaatcgttcagattacatgttccagtgcagcgcagacggctccaaagccctgaaacagattgagatcaacactatctctgccagctttgggggcctggcctcccggactccggctgtgcaccgacatgttctcaatgtcctgaataagaccaacgaagcttccaagatcctgtccaacaaccccagcaagggactggccctggggatcgccaaagcctgggagctctatggctcagccaatgccgtggtgctactgattgctcaggagaaggaaaggaacatatttgaccagcgtgccatagagaacgagctgctagacaggaagatccatgtaatccgccgaagatttgaagatgtctctgaaaggggttctctagaccaaaaccgaaggctgtttatggaggaccaggaagttgctgtggtttacttccgagatggctacatgcccagtcagtataacgcacagaactgggaagctcgcctgctgctagagagatcatgtgctgccaagtgtcccgacattgccacacagctggctggcactaagaaggtgcagcaggaactgagcagggtgggcctgctggaagcgctgctcccgggccagcccgaggctgtggcccgcctccgtgccacctttgctggcctctattcactggacatgggtgaagaaggggaccaggctgtcgctgaggcccttgctgcccctagccactttgtgctgaagccccaaagagagggcggaggtaataacttctatggggaggaaatggtacacgctctggagcagctgaaagacagcgaggagagagcctcctacatcctcatggagaagattgaacctgagccttttaggaattgcttactacggcctggcagccctgcccaagtggtccagtgcatctcggagctgggtatttttggagtctatgtcagacagggaacaacacttgtgatgaacaagcatgtggggcatctgcttcgaaccaaagccattgaacatgcagatggaggtgtggcagcaggagtggcagtcctggacaacccctaccctgtgtgaagacatgttctgggcttcactcaagagaccttctatcctctgtacttggcactcctctcctgaggggctacccctgtacctgtgttaggggagggagcttgtctctttcatagacctccaggggctttagggaagggaaaatcccgggtcccttctctcagccttccatccaaggaccagaaaagctatgattccattggaagagttctggagctccccagatttggagtgggaatggaagctcctttgaggcaaaggcccacaaaccccacacatcttcattgccctctcgccagcctttccagcaggttctagtgccttgacctggggtaggaccaagtgacaggaggaagagggtagatgggcatagacttccccagctctgccctaaataaaacaatgctgattcaatg

SEQ ID NO: 3236 - protein, 474 aa, Rattus norvegicus
  ref <308>: DATABASE ACCESSION NUMBER: SWISS-Prot / P46413
  ref <309>: DATABASE ENTRY DATE: 2002-06-15
MATSWGSILQDEKQLEELAQQAIDRALAEGVLLRSAKNPSSSDVVTYAPFTLFPSPVPSTLLEQAYAVQMDFNILVDAVSQNSAFLEQTLSSTIKKDEYTARLFDIYKQVLKEGIAQTVFLGLNRSDYMFQCSADGSKALKQIEINTISASFGGLASRTPAVHRHVLNVLNKTNEASKILSNNPSKGLALGIAKAWELYGSANAVVLLIAQEKERNIFDQRAIENELLDRKIHVIRRRFEDVSERGSLDQNRRLFMEDQEVAVVYFRDGYMPSQYNAQNWEARLLLERSCAAKCPDIATQLAGTKKVQQELSRVGLLEALLPGQPEAVARLRATFAGLYSLDMGEEGDQAVAEALAAPSHFVLKPQREGGGNNFYGEEMVHALEQLKDSEERASYILMEKIEPEPFRNCLLRPGSPAQVVQCISELGIFGVYVRQGTTLVMNKHVGHLLRTKAIEHADGGVAAGVAVLDNPYPV

SEQ ID NO: 3237 - DNA, 1856 bp, Homo sapiens
  ref <308>: DATABASE ACCESSION NUMBER: Refseq / NM_000178
  ref <309>: DATABASE ENTRY DATE: 2000-10-31
gggagaaccgttcgcggaggaaaggcgaactagtgttgggatggccaccaactgggggagcctcttgcaggataaacagcagctagaggagctggcacggcaggccgtggaccgggccctggctgagggagtattgctgaggacctcacaggagcccacttcctcggaggtggtgagctatgccccattcacgctcttcccctcactggtccccagtgccctgctggagcaagcctatgctgtgcagatggacttcaacctgctagtggatgctgtcagccagaacgctgccttcctggagcaaactctttccagcaccatcaaacaggatgactttaccgctcgtctctttgacatccacaagcaagtcctaaaagagggcattgcccagactgtgttcctgggcctgaatcgctcagactacatgttccagcgcagcgcagatggctccccagccctgaaacagatcgaaatcaacaccatctctgccagctttgggggcctggcctcccggaccccagctgtgcaccgacatgttctcagtgtcctgagtaagaccaaagaagctggcaagatcctctctaataatcccagcaagggactggccctgggaattgccaaagcctgggagctctacggctcacccaatgctctggtgctactgattgctcaagagaaggaaagaaacatatttgaccagcgtgccatagagaatgagctactggccaggaacatccatgtgatccgacgaacatttgaagatatctctgaaaaggggtctctggaccaagaccgaaggctgtttgtggatggccaggaaattgctgtggtttacttccgggatggctacatgcctcgtcagtacagtctacagaattgggaagcacgtctactgctggagaggtcacatgctgccaagtgcccagacattgccacccagctggctgggactaagaaggtgcagcaggagctaagcaggccgggcatgctggagatgttgctccctggccagcctgaggctgtggcccgcctccgcgccacctttgctggcctctactcactggatgtgggtgaagaaggggaccaggccatcgccgaggcccttgctgcccctagccggtttgtgctaaagccccagagagagggtggaggtaacaacctatatggggaggaaatggtacaggccctgaaacagctgaaggacagtgaggagagggcctcctacatcctcatggagaagatcgaacctgagccttttgagaattgcctgctacggcctggcagccctgcccgagtggtccagtgcatttcagagctgggcatctttggggtctatgtcaggcaggaaaagacactcgtgatgaacaagcacgtggggcatctacttcgaaccaaagccatcgagcatgcagatggtggtgtggcagcgggagtggcagtcctggacaacccataccctgtgtgagggcacaaccaggccacgggaccttctatcctctgtatttgtcattcctctcctagccctcctgaggggtatcctcctaaagacctccaaagtttttatggaagggtaaatactggtaccttcccccagctttccatctgaggaccagaaaagttgtgtctcccttagatgagatctagacgcccccaaatccttgagatgtgggtatagctcagggtaagctgctctgaggtaaaggtccatgaaccctgccccactcctgtcagcccctcatcagccttttcagcaggttccagtgcctgacttgggataggactgagtggtaggaggagggggagtggaggggcatagcctttccctaattctgccttaaataaaactgcattgctgt

SEQ ID NO: 3238 - protein, 474 aa, Homo sapiens
  ref <308>: DATABASE ACCESSION NUMBER: SWISS-Prot / P48637
  ref <309>: DATABASE ENTRY DATE: 2002-06-15
MATNWGSLLQDKQQLEELARQAVDRALAEGVLLRTSQEPTSSEVVSYAPFTLFPSLVPSALLEQAYAVQMDFNLLVDAVSQNAAFLEQTLSSTIKQDDFTARLFDIHKQVLKEGIAQTVFLGLNRSDYMFQRSADGSPALKQIEINTISASFGGLASRTPAVHRHVLSVLSKTKEAGKILSNNPSKGLALGIAKAWELYGSPNALVLLIAQEKERNIFDQRAIENELLARNIHVIRRTFEDISEKGSLDQDRRLFVDGQEIAVVYFRDGYMPRQYSLQNWEARLLLERSHAAKCPDIATQLAGTKKVQQELSRPGMLEMLLPGQPEAVARLRATFAGLYSLDVGEEGDQAIAEALAAPSRFVLKPQREGGGNNLYGEEMVQALKQLKDSEERASYILMEKIEPEPFENCLLRPGSPARVVQCISELGIFGVYVRQEKTLVMNKHVGHLLRTKAIEHADGGVAAGVAVLDNPYPV

SEQ ID NO: 3239 - DNA, 1882 bp, Rattus norvegicus; identical to SEQ ID NO: 3235
  ref <308>: DATABASE ACCESSION NUMBER: EMBL / L38615
  ref <309>: DATABASE ENTRY DATE: 2000-03-04

SEQ ID NO: 3240 - protein, 474 aa, Rattus norvegicus; identical to SEQ ID NO: 3236
  ref <308>: DATABASE ACCESSION NUMBER: SWISS-Prot / P46413
  ref <309>: DATABASE ENTRY DATE: 2002-06-15

SEQ ID NO: 3241 - DNA, 1856 bp, Homo sapiens; identical to SEQ ID NO: 3237
  ref <308>: DATABASE ACCESSION NUMBER: Refseq / NM_000178
  ref <309>: DATABASE ENTRY DATE: 2000-10-31

SEQ ID NO: 3242 - protein, 474 aa, Homo sapiens; identical to SEQ ID NO: 3238
  ref <308>: DATABASE ACCESSION NUMBER: SWISS-Prot / P48637
  ref <309>: DATABASE ENTRY DATE: 2002-06-15

SEQ ID NO: 3243 - DNA, 2991 bp, Rattus norvegicus
  ref <308>: DATABASE ACCESSION NUMBER: EMBL / L38644
  ref <309>: DATABASE ENTRY DATE: 2000-03-04
tgcttcccacccgacccccaacccccatccccagttggagccgccgcccgagaggccgggccgtcgtcttgggaggagtccccgccgccgtcacctccgccatggagctcataaccatcctcgagaagaccgtgtctccggatcggctggagctggaagcggcgcagaagttccttgagcgtgcggctgtggagaatctgcccacgttcctggtggaactgtccagagtgctggcaaatcccggaaacagtcaggttgccagagttgcagctggtctacaaattagactcttgacatcgaaggatccagatatcaaggcacagtaccagcagaggtggcttgctattgatgctaatgctcggcgggaagtcaagaactatgttttgcagactttgggcacagagacttaccggcctagttcagcctcacagtgtgtggctggtatcgcttgtgcagagatcccagtaagccagtggccggaactaattcctcagctggtagccaatgtcaccaaccccaacagcacggagcacatgaaagagtccacactggaagccatcggttacatttgccaagatatagacccggagcagctgcaggataaatccaatgagatcctgactgccataatccagggcatgcggaaggaagagcctagtaacaatgtgaagctggccgctaccaacgcgctcctgaactcactggagttcaccaaagcaaacttcgacaaagagtctgaacggcactttatcatgcaagtggtctgtgaagccacacagtgtccagatacaagggtaagagtggctgctttacagaatctagtgaagataatgtccttgtattaccagtacatggagacatacatgggccctgccctctttgcaatcacaattgaagcaatgaaaagtgacattgatgaggtagctctccaagggatagagttctggtccaatgtctgtgatgaggaaatggatttggccattgaggcttcagaggcagcagaacaaggacggcccccggagcacaccagcaaattttacgccaagggagcgctgcagtacctggtgcccatcctcacacagacactaactaaacaggatgaaaacgatgacgacgatgactggaacccttgcaaagcagctggggtgtgcctcatgctcctgtctacctgctgtgaagatgacattgtgccacatgtccttccctttattaaagagcacatcaagaaccctgactggcggtaccgggatgcagcagtgatggcttttggcagcatcttggaaggaccagagcctaaccagcttaaaccattagtcatacaggctatgcccaccctgatagaattaatgaaagaccccagtgtagttgttcgagatacaacagcatggactgtgggcaggatctgtgagctgctgcctgaagctgccatcaatgatgtctacttggcaccccttttacagtgtctgattgagggtctcagtgctgaacccagagtggcttcaaatgtgtgctgggctttttccagtctggctgaagctgcttacgaagctgcagatgtagctgatgatcaggaagaaccagccacctattgcttgtcttcttcctttgaacttatagttcagaagctgctggagaccaccgacagacctgatggacaccagaacaacctgagaagttctgcatatgaatctctaatggaaattgtaaaaaacagtgccaaggattgttaccctgcggtgcagaagaccaccctggtcattatggaacggttgcagcaggtgcttcagatggagtcccacatccagagcacgtcggacaggatccaattcaatgacctccagtctctactctgtgcaactcttcagaatgttctctggaaagtgcagcatcaagatgctttgcagatctctgatgtggtcatggcctccctgttaaggatgttccaaagcacagctgggtctggcggagtgcaagaagacgccctgatggcagtcagcacactggtggaagtgttgggtggtgaattcctcaagtacatggaggcctttaaaccattcctgggcattggattgaaaaattatgctgaatgccaggtgtgtttggcagctgttggcttagttggagacttgtgccgagccctgcagtctaacatcttacctttctgtgatgaggtgatgcagctgctcctagagaacttagggaatgagaatgtccacaggtctgtgaaaccacagattctgtctgtgtttggtgacattactcttgccattggtggagaatttaagaaatacttggaggttgtactgaatacactgcagcaggcctcccaagcccaagtggacaagtcagactttgacatggtggattatctgaatgagctaagagaaagctgcttggaagcttatacgggaatcgtccagggattgaagggagaccaggaaaacgtacaccctgatgtaatgctggtgcaacccagagtagaatttattttgtcttttattgatcacattgctggagatgaggatcatacggatggagtggtagcttgtgctgctggactgataggggacttgtgtacagcatttggaaaggatgtactgaaattagtagaagctaggccaatgatccatgaactattaactgaagggcggagatcgaagactaacaaagcaaagacccttgctacgtgggcaacaaaggaactgaggaaactgaagaaccaagcttgatctggtaccattgggatgatgacctgagacccccactggaaatctccaatcttttgaaagaacccggaagtgaggagtgtgcacggatgctgaatgtttgggaatgagaggatgagtgagtgaggcttgaaaacaccacactgaaaatcctgccacagccaacagcagcagcgctgttagtgagctaagtaagcactgactttgtagaaaacacaacatcagccatcttggaacagagaaacaatggatttacttacttact

SEQ ID NO: 3244 - protein, 875 aa, Rattus norvegicus
  ref <308>: DATABASE ACCESSION NUMBER: SWISS-Prot / P52296
  ref <309>: DATABASE ENTRY DATE: 2002-06-15
MELITILEKTVSPDRLELEAAQKFLERAAVENLPTFLVELSRVLANPGNSQVARVAAGLQIRLLTSKDPDIKAQYQQRWLAIDANARREVKNYVLQTLGTETYRPSSASQCVAGIACAEIPVSQWPELIPQLVANVTNPNSTEHMKESTLEAIGYICQDIDPEQLQDKSNEILTAIIQGMRKEEPSNNVKLAATNALLNSLEFTKANFDKESERHFIMQVVCEATQCPDTRVRVAALQNLVKIMSLYYQYMETYMGPALFAITIEAMKSDIDEVALQGIEFWSNVCDEEMDLAIEASEAAEQGRPPEHTSKFYAKGALQYLVPILTQTLTKQDENDDDDDWNPCKAAGVCLMLLSTCCEDDIVPHVLPFIKEHIKNPDWRYRDAAVMAFGSILEGPEPNQLKPLVIQAMPTLIELMKDPSVVVRDTTAWTVGRICELLPEAAINDVYLAPLLQCLIEGLSAEPRVASNVCWAFSSLAEAAYEAADVADDQEEPATYCLSSSFELIVQKLLETTDRPDGHQNNLRSSAYESLMEIVKNSAKDCYPAVQKTTLVIMERLQQVLQMESHIQSTSDRIQFNDLQSLLCATLQNVLWKVQHQDALQISDVVMASLLRMFQSTAGSGGVQEDALMAVSTLVEVLGGEFLKYMEAFKPFLGIGLKNYAECQVCLAAVGLVGDLCRALQSNILPFCDEVMQLLLENLGNENVHRSVKPQILSVFGDITLAIGGEFKKYLEVVLNTLQQASQAQVDKSDFDMVDYLNELRESCLEAYTGIVQGLKGDQENVHPDVMLVQPRVEFILSFIDHIAGDEDHTDGVVACAAGLIGDLCTAFGKDVLKLVEARPMIHELLTEGRRSKTNKAKTLATWATKELRKLKNQA

SEQ ID NO: 3245 - DNA, 308 bp, Homo sapiens
  ref <308>: DATABASE ACCESSION NUMBER: EMBL / AA738059
  ref <309>: DATABASE ENTRY DATE: 2000-03-03
tttgggatccaatctctttattgtcagggtcccctccctgtggccccccgccaaacctataaaaaaaacccaagcctgggagtgtcctggggaggggaggtagtatggggaaacccctgtgctctaccctctggcctgggcagtgcagacagggagggctcatggggaaggagtaggccagtaactccattgttttcaagcctcactcactcatcctctcattcccaaacattcagcatccgtgcacactcctcacttccaggtttttcaaaagatgggagatttccagtgggggtcctcaggttatc

SEQ ID NO: 3246 - DNA, 6826 bp, Rattus norvegicus
  misc_feature (1)..(6826): n=a, c, g or t
  ref <308>: DATABASE ACCESSION NUMBER: EMBL / L39018
  ref <309>: DATABASE ENTRY DATE: 1995-05-30
atgagaagatcggcgcggctgctcgcaccaccaggccctgatagtttcaagcctttcacccctgagtcgctggcaaacatcgagaggcgtattgccgagagcaagctcaagaaaccaccaaaggcggatggcagccaccgggaggacgatgaagacagcaagcccaagccaaacagtgacctggaggctgggaagagtttgcctttcatctacggggacatcccgcaaggcctggttgcggttcccctggaggactttgacccttactatttgacgcagaaaacctttgtagtattaaacagagggaaaactctcttcagatttagtgccacacctgccttgtacattttaagcccttttaacctgataagaagaatagctattaaaattttgatacactcagttttcagcatgatcatcatgtgcaccatcctgaccaactgtgtgttcatgacctttagtaaccctccagaatggtccaagaatgtggagtacacattcacagggatttacacatttgaatcactagtgaaaatcatcgcaagaggtttctgcatagacggcttcaccttcttacgagacccgtggaactggttagacttcagtgtcatcatgatggcatatgtgacagagtttgtggacctgggcaatgtctcagcgctgagaacattcagggttctccgagctttgaaaactatctctgtaattccaggcctgaagacaatcgtgggcgccctaatccagtccgtgaagaagctgtcggacgtgatgatcctgacagtgttctgcctgagtgttttcgccctgattggcctgcagctctttcatgggaacctttcgaaacagtgtgtcgtgtggcccataaacttcaacgagagctacctggagaacggcaccagaggctttgactgggaggaatatatcaacaataaaacaaacttttacatggttcctggcatgctagaacccttgctctgcgggaacagttctgatgctgggcaatgcgaaggattccagtgcagtaaagcaggaaggaaccccaactacggttacaccagctttgacaccttcagctgggccttcttggcattattccgccttatgacccaggactattgggagaacttataccagctgaccttacgagccgctgggaaaacgtacatgatcttctttgtcttggtcatcttcgtgggttctttctatccggtgaacttgatcttggctgtggtggccatggcttatgaggaacagaaccaggcaacactggaggaggcagagcaaaaagaggccgagttcaaggcaatgctggagcaactcaagaagcagcaggaggaggcacaggctgctgcaatggccacctcagcgggcactgtctcggaagacgccattgaagaagaaggggaagatggggtaggctctccgaggagctcttctgaactgtctaaactcagttccaagagcgcgaaggagcggcggaaccgacggaagaagaggaagcagaaggagctctctgaaggcgaggagaaaggggacccggagaaggtgtttaagtcagagtcggaatacggtatgagaaggaaggccttccggctgccagacaacaggatagggaggaagttttccatcatgaatcagtcgctgctcagcattccaggctcgcccttcctctcccgacataacagcaaaagcagcatcttcagcttcggggacccgtcggttcgggaccccggctctgagaatgagttcgcagacgatgaacacagcaccgtggaggagagcgagggccggcgtgactcgctcttcatcccgatccgcgcccgcgagcgccgcagcagctacagtggctacagcggctacagccagtgcagccgctcgtcgcgcatctccccagcctgcgcgcagcgtgaagccaacagcacggtggactgcaacggcgtagtgtcactcatcgggcccggctcacacatcgggcggctcctgctgaggcaacgactgaggtggaaattaagaagaaaggccctggactcttttagtttctatggaccaactcgcctcctacggacggaaggacagaatcaacagcataatgagcgtggtcacaaacacgctagtgaagagctggaagagtctcagagaaagtgcccaccgtgctggtataagtttgccaacactttcctcatctgggagtgtcacccctactggataaaactgaaggagatcgtgaacttaatcgtcatggacccttttgtagacttagccatcaccatctgcatcgttctgaatacgctatttatggcaatggagcaccatcccatgacaccacagttcgaacacgtcttggccgtaggaaatctggtgttcaccgggatcttcacggcggaaatgtttctgaagctcatagccatggacccctactattatttccaagaaggctggaacatttttgacggatttattgtctccctcagtttaatggagctgagtctcgcagatgtggaggggctctcagtgctgcggtctttccgactgctccgagtcttcaagctggccaagtcctggcccaccctgaacatgctgatcaagatcatcgggaactccgtgggtgccctgggcaacctgaccctggtgctggccatcatcgtcttcatcttcgccgtggtggggatgcagctgtttggaaagagttacaaggagtgcgtctgtaagatcaaccaggagtgcaagctcccgcgctggcacatgaacgacttcttccactccttcctcatcgtcttccgagtgctgtgtggggagtggatcgagaccatgtgggactgcatggaggtggccggccaggccatgtgcctcattgtcttcatgatggttatggtcattggcaacctggtggtgctgaatctattcctggccttgcttctgagctccttcagcgcagacaacctggcggccacagacgacgacggggaaatgaacaacctgcagatctcagtgatccggatcaagaagggcgtggcctggaccaaagtgaaggtgcacgccttcatgcaggctcacttcaagcagcgggaggcggatgaagtgaaacccctcgacgagctgtatgagaagaaggccaactgcatcgccaaccacacgggcgtggatatccaccggaacggcgacttccagaagaacgggaacggaaccaccagcggcatcggcagcagcgtggagaagtacatcatcgacgaggaccacatgtccttcattaacaacccaaacctgaccgtccgggtgcccattgctgtgggcgagtctgacttcgagaacctcaacacagaggatgttagcagcgaatcagaccctgaaggcagcaaagataaactggacgataccagctcctcagaaggaagtaccatcgacatcaagcctgaggtggaagaagttcccgtggagcaacctgaggaatacttggatccggacgcctgctttacagagggttgcgtccagcggttcaagtgctgccaggtcaacatcgaggaaggactaggcaagtcgtggtggatcttgcggaaaacctgcttcctcattgtggagcacaattggtttgagaccttcatcatcttcatgattctgctcagcagtggcgccctggcctttgaggacatctacattgagcagaggaagaccatccgcaccatcctggagtatgcggacaaggtcttcacctacatcttcatcctggagatgttgctcaagtggaccacgtacggcttcgtcaagttcttcaccaatgcctggtgctggttggacttcctcattgtggctgtctctttagtcagccttatagctaatgccctgggctactcggaactaggtgccataaagtcccttaggaccctaagagctttgagacccttaagagccttatcacgatttgaagggatgagggtggtggtgaatgccttggtgggtgccatcccctccatcatgaatgtgctgctggtgtgtctcatcttctggctgattttcagcatcatgggagttaacctgtttgcggggaaataccactactgctttaatgagacttctgaaatccggttcgaaatcgatattgtcaacaataaaacggactgtgagaagctcatggagggcaacagcacggagatccgatggaagaatgtcaagatcaactttgacaatgtcggagcagggtacctggcccttcttcaagtggcaaccttcaaaggctggatggacatcatgtatgcggctgtagattcccgaaagccagacgagcagcctgactacgagggcaacatctacatgtacatctacttcgtcatcttcatcatcttcggctccttcttcaccctcaacctgttcatcggtgtcatcatcgacaacttcaaccagcagaagaaaaagtttggaggtcaggacatcttcatgacagaggaacagaagaagtactataatgccatgaaaaagctgggctccaagaagccacagaagcccatcccccgacccttgaacaaaatccaagggattgtctttgatttcgtcactcaacaagcctttgacattgtgatcatgatgctcatctgccttaacatggtgacaatgatggtggagacagacactcagagcaagcagatggagaacattctttactggattaatctggtctttgtcatcttcttcacctgcgagtgtgtgctcaaaatgtttgccttgagacactactacttcaccattggctggaacatctttgactttgtggtggtcatcctctccattgtgggaatgttcctggctgatatcattgagaagtacttcgtctccccaaccctattccgagttatccgattggcccgtattgggcgcatcttgcgtctgatcaagggcgccaaagggatccgcactctgctctttgctctgatgatgtcgctgcccgccctgttcaacatcggcctcctgctcttcctcgtcatgttcatcttctccatttttggcatgtccaacttcgcatacgtgaagcacgaggccggcattgacgacatgttcaacttcgagacatttggcaacagcatgatctgtttgttccagatcacaacgtctgctggctgggatggcctgctgctgccaatcctgaaccgcccccctgactgcagcttggacaaagagcacccagggagtggcttcaaaggggactgtgggaacccctcggtgggcatcttcttctttgtgagctacatcatcatctccttcctgattgtggtgaacatgtgcatcgccatcatcctggagaacttcagcgtggccaccgaggagagcgccgaccctctgagtgaggatgacttcgagactttctatgagatctgggagaagtttgacccagacgccacccagttcatcgagtactgtaagctggcagactttgccgacgccctggagcacccgctccgagtacccaagcccaacaccatcgagctcatcgccatggacctgcccatggtgagcggagatcgcatccactgcttggacatccttttcgccttcaccaaggcagtcctgggagacagtggggagttggacatcctgcggcagcagatggaggagcggttcgtggcatccaatccttccaaagtgtcttacgaagcctatcacaccactctgcggcgcaacgaggaggaggtgtctgcagtggtcctgcagcgtgcctacaggggacacttggctaggcggggcttcatctgcagaaagatggcctccaacaagctggagaatggaggcacacacagagacaagaaggagagcaccccgtccacagcctccctcccctcttacgacagcgtcacaaagccagacaaggagaagcagcagcgtgcggaggagggcagaagggaaagagccaagaggcaaaaagaggtcagggagtccaagtgctagaggaggggaaaggaagcttaccccggctgaacactggcaagtgaaagcttgtttacaaacttccgaatctcacggatgcagacagctgtgcagacgctcgctgtactggaagacctataccaaacatagtctgcttacatgtgacatggtggcatcctgagcggtgactgctgctggggacaaaggaccctgctccctggactcacagatctcctatcgcttgggcagacggttactgcatgttccacacttagtcaatgcaacttaggactaaactaaccaggatacaaaaccgaggcggctggcgaccagcagatcaccgctgcagccaaatggattttattttttcattttgttgattctcagaagcagaaagcatcactttaaaagtttgtttgttcatgcaaacaatatttgaattcttacattagttaagctaagcagcaaaaagaaacacacacgcacacagacacacaaagacacacacacattcagcctatgtcactaatcgtctgtttctttaacataacagcatcttctccacacgagcggcacgtggtttggagatgggtgggggaaaatcagggtttcaggctgaggaggacttgctcaggccaatcccaaatatgtgctcgttcaatgcatagaagtgacctgcatgatggcatgctgtgttcagaagtcatgcatgagacccacacaccacaagacactagtactcctgtnnccatccacaggctcagcctgcggacaggaccagccctgcaccgttcactgtatttggagaaatggtaagagttccacaccggctgcagtcctctcagtgtaggattctttcgtacacctctgggtagggagacataattaaccaattgaccactaccaacaaaacaat

SEQ ID NO: 3247 - protein, 1976 aa, Rattus norvegicus
  ref <308>: DATABASE ACCESSION NUMBER: SWISS-Prot / AAC42059
  ref <309>: DATABASE ENTRY DATE: 2003-02-01
MRRSARLLAPPGPDSFKPFTPESLANIERRIAESKLKKPPKADGSHREDDEDSKPKPNSDLEAGKSLPFIYGDIPQGLVAVPLEDFDPYYLTQKTFVVLNRGKTLFRFSATPALYILSPFNLIRRIAIKILIHSVFSMIIMCTILTNCVFMTFSNPPEWSKNVEYTFTGIYTFESLVKIIARGFCIDGFTFLRDPWNWLDFSVIMMAYVTEFVDLGNVSALRTFRVLRALKTISVIPGLKTIVGALIQSVKKLSDVMILTVFCLSVFALIGLQLFHGNLSKQCVVWPINFNESYLENGTRGFDWEEYINNKTNFYMVPGMLEPLLCGNSSDAGQCEGFQCSKAGRNPNYGYTSFDTFSWAFLALFRLMTQDYWENLYQLTLRAAGKTYMIFFVLVIFVGSFYPVNLILAVVAMAYEEQNQATLEEAEQKEAEFKAMLEQLKKQQEEAQAAAMATSAGTVSEDAIEEEGEDGVGSPRSSSELSKLSSKSAKERRNRRKKRKQKELSEGEEKGDPEKVFKSESEYGMRRKAFRLPDNRIGRKFSIMNQSLLSIPGSPFLSRHNSKSSIFSFGDPSVRDPGSENEFADDEHSTVEESEGRRDSLFIPIRARERRSSYSGYSGYSQCSRSSRISPACAQREANSTVDCNGVVSLIGPGSHIGRLLLRQRLRWKLRRKALDSFSFYGPTRLLRTEGQNQQHNERGHKHASEELEESQRKCPPCWYKFANTFLIWECHPYWIKLKEIVNLIVMDPFVDLAITICIVLNTLFMAMEHHPMTPQFEHVLAVGNLVFTGIFTAEMFLKLIAMDPYYYFQEGWNIFDGFIVSLSLMELSLADVEGLSVLRSFRLLRVFKLAKSWPTLNMLIKIIGNSVGALGNLTLVLAIIVFIFAVVGMQLFGKSYKECVCKINQECKLPRWHMNDFFHSFLIVFRVLCGEWIETMWDCMEVAGQAMCLIVFMMVMVIGNLVVLNLFLALLLSSFSADNLAATDDDGEMNNLQISVIRIKKGVAWTKVKVHAFMQAHFKQREADEVKPLDELYEKKANCIANHTGVDIHRNGDFQKNGNGTTSGIGSSVEKYIIDEDHMSFINNPNLTVRVPIAVGESDFENLNTEDVSSESDPEGSKDKLDDTSSSEGSTIDIKPEVEEVPVEQPEEYLDPDACFTEGCVQRFKCCQVNIEEGLGKSWWILRKTCFLIVEHNWFETFIIFMILLSSGALAFEDIYIEQRKTIRTILEYADKVFTYIFILEMLLKWTTYGFVKFFTNAWCWLDFLIVAVSLVSLIANALGYSELGAIKSLRTLRALRPLRALSRFEGMRVVVNALVGAIPSIMNVLLVCLIFWLIFSIMGVNLFAGKYHYCFNETSEIRFEIDIVNNKTDCEKLMEGNSTEIRWKNVKINFDNVGAGYLALLQVATFKGWMDIMYAAVDSRKPDEQPDYEGNIYMYIYFVIFIIFGSFFTLNLFIGVIIDNFNQQKKKFGGQDIFMTEEQKKYYNAMKKLGSKKPQKPIPRPLNKIQGIVFDFVTQQAFDIVIMMLICLNMVTMMVETDTQSKQMENILYWINLVFVIFFTCECVLKMFALRHYYFTIGWNIFDFVVVILSIVGMFLADIIEKYFVSPTLFRVIRLARIGRILRLIKGAKGIRTLLFALMMSLPALFNIGLLLFLVMFIFSIFGMSNFAYVKHEAGIDDMFNFETFGNSMICLFQITTSAGWDGLLLPILNRPPDCSLDKEHPGSGFKGDCGNPSVGIFFFVSYIIISFLIVVNMCIAIILENFSVATEESADPLSEDDFETFYEIWEKFDPDATQFIEYCKLADFADALEHPLRVPKPNTIELIAMDLPMVSGDRIHCLDILFAFTKAVLGDSGELDILRQQMEERFVASNPSKVSYEAYHTTLRRNEEEVSAVVLQRAYRGHLARRGFICRKMASNKLENGGTHRDKKESTPSTASLPSYDSVTKPDKEKQQRAEEGRRERAKRQKEVRESKC

SEQ ID NO: 3248 - DNA, 7008 bp, Homo sapiens
  ref <308>: DATABASE ACCESSION NUMBER: EMBL / AB027567
  ref <309>: DATABASE ENTRY DATE: 1999-06-02
gagcgctccaagatggcgcccaccgcagtcccgcccgccgcatcctcggcgcctttgcagtccggccgcgcctcccgggccccgcgttagggccgccgctgcctccctcgccgccgccgctgccagctgacctgtcctggacgcagcataactaacgaagctgctgcaggatgagaagatggcagcgcggctgcttgcaccaccaggccctgatagtttcaagcctttcacccctgagtcactggcaaacattgagaggcgcattgctgagagcaagctcaagaaaccaccaaaggccgatggcagtcatcgggaggacgatgaggacagcaagcccaagccaaacagcgacctggaagcagggaagagtttgcctttcatctacggggacatcccccaaggcctggttgcagttcccctggaggactttgacccatactatttgacgcagaaaacctttgtagtattaaacagagggaaaactctcttcagatttagtgccacgcctgccttgtacattttaagtccttttaacctgataagaagaatagctattaaaattttgatacattcagtatttagcatgatcattatgtgcactattttgaccaactgtgtattcatgacttttagtaaccctcctgactggtcgaagaatgtggagtacacgttcacagggatttatacatttgaatcactagtgaaaatcattgcaagaggtttctgcatagatggctttacctttttacgggatccatggaactggttagatttcagtgtcatcatgatggcgtatataacagagtttgtaaacctaggcaatgtttcagctctacgcactttcagggtactgagggctttgaaaactatttcggtaatcccaggcctgaagacaattgtgggtgccctgattcagtctgtgaagaaactgtcagatgtgatgatcctgacagtgttctgcctgagtgtttttgccttgatcggactgcagctgttcatggggaaccttcgaaacaagtgtgttgtgtggcccataaacttcaacgagagctatcttgaaaatggcaccaaaggctttgattgggaagagtatatcaacaataaaacaaatttctacacagttcctggcatgctggaacctttactctgtgggaacagttctgatgctgggcaatgcccagagggataccagtgtatgaaagcaggaaggaaccccaactatggttacacaagttttgacacttttagctgggccttcttggcattatttcgccttatgacccaggactattgggaaaacttgtatcaattgactttacgagcagccgggaaaacatacatgatcttcttcgtcttggtcatctttgtgggttctttctatctggtgaacttgatcttggctgtggtggccatggcttatgaagaacagaatcaggcaacactggaggaggcagaacaaaaagaggctgaatttaaagcaatgttggagcaacttaagaagcaacaggaagaggcacaggctgctgcgatggccacttcagcaggaactgtctcagaagatgccatagaggaagaaggtgaagaaggagggggctcccctcggagctcttctgaaatctctaaactcagctcaaagagtgcaaaggaaagacgtaacaggagaaagaagaggaagcaaaaggaactctctgaaggagaggagaaaggggatcccgagaaggtgtttaagtcagagtcagaagatggcatgagaaggaaggcctttcggctgccagacaacagaatagggaggaaattttccatcatgaatcagtcactgctcagcatcccaggctcgcccttcctctcccgccacaacagcaagagcagcatcttcagtttcaggggacctgggcggttccgagacccgggctccgagaatgagttcgcggatgacgagcacagcacggtggaggagagcgagggccgccgggactccctcttcatccccatccgggcccgcgagcgccggagcagctacagcggctacagcggctacagccagggcagccgctcctcgcgcatcttccccagcctgcggcgcagcgtgaagcgcaacagcacggtggactgcaacggcgtggtgtccctcatcggcggccccggctcccacatcggcgggcgtctcctgccagaggctacaactgaggtggaaattaagaagaaaggccctggatctcttttagtttccatggaccaattagcctcctacgggcggaaggacagaatcaacagtataatgagtgttgttacaaatacactagtagaagaactggaagagtctcagagaaagtgcccgccatgctggtataaatttgccaacactttcctcatctgggagtgccacccctactggataaaactgaaagagattgtgaacttgatagttatggacccttttgtggatttagccatcaccatctgcatcgtcctgaatacactgtttatggcaatggagcaccatcctatgacaccacaatttgaacatgtcttggctgtaggaaatctggttttcactggaattttcacagcggaaatgttcctgaagctcatagccatggatccctactattatttccaagaaggttggaacatttttgacggatttattgtctccctcagtttaatggaactgagtctagcagacgtggaggggctttcagtgctgcgatctttccgattgctccgagtcttcaaattggccaaatcctggcccaccctgaacatgctaatcaagattattggaaattcagtgggtgccctgggcaacctgacactggtgctggccattattgtcttcatctttgccgtggtggggatgcaactctttggaaaaagctacaaagagtgtgtctgcaagatcaaccaggactgtgaactccctcgctggcatatgcatgactttttccattccttcctcattgtctttcgagtgttgtgcggggagtggattgagaccatgtgggactgcatggaagtggcaggccaggccatgtgcctcattgtctttatgatggtcatggtgattggcaacttggtggtgctgaacctgtttctggccttgctcctgagctccttcagtgcagacaacctggctgccacagatgacgatggggaaatgaacaacctccagatctcagtgatccgtatcaagaagggtgtggcctggaccaaactaaaggtgcacgccttcatgcaggcccactttaagcagcgtgaggctgatgaggtgaagcctctggatgagttgtatgaaaagaaggccaactgtatcgccaatcacaccggtgcagacatccaccggaatggtgacttccagaagaatggcaatggcacaaccagcggcattggcagcagcgtggagaagtacatcattgatgaggaccacatgtccttcatcaacaaccccaacttgactgtacgggtacccattgctgtgggcgagtctgactttgagaacctcaacacagaggatgttagcagcgagtcggatcctgaaggcagcaaagataaactagatgacaccagctcctctgaaggaagcaccattgatatcaaaccagaagtagaagaggtccctgtggaacagcctgaggaatacttggatccagatgcctgcttcacagaaggttgtgtccagcggttcaagtgctgccaggtcaacatcgaggaagggctaggcaagtcttggtggatcctgcggaaaacctgcttcctcatcgtggagcacaactggtttgagaccttcatcatcttcatgattctgctgagcagtggcgccctggccttcgaggacatctacattgagcagagaaagaccatccgcaccatcctggaatatgctgacaaagtcttcacctatatcttcatcctggagatgttgctcaagtggacagcctatggcttcgtcaagttcttcaccaatgcctggtgttggctggacttcctcattgtggctgtctctttagtcagccttatagctaatgccctgggctactcggaactaggtgccataaagtcccttaggaccctaagagctttgagacccttaagagccttatcacgatttgaagggatgagggtggtggtgaatgccttggtgggcgccatcccctccatcatgaatgtgctgctggtgtgtctcatcttctggctgattttcagcatcatgggagttaacttgtttgcgggaaagtaccactactgctttaatgagacttctgaaatccgatttgaaattgaagatgtcaacaataaaactgaatgtgaaaagcttatggaggggaacaatacagagatcagatggaagaacgtgaagatcaactttgacaatgttggggcaggatacctggcccttcttcaagtagcaaccttcaaaggctggatggacatcatgtatgcagctgtagattcccggaagcctgatgagcagcctaagtatgaggacaatatctacatgtacatctattttgtcatcttcatcatcttcggctccttcttcaccctgaacctgttcattggtgtcatcattgataacttcaatcaacaaaagaaaaagttcggaggtcaggacatcttcatgaccgaagaacagaagaagtactacaatgccatgaaaaagctgggctcaaagaagccacagaaacccattccccgccccttgaacaaaatccaaggaatcgtctttgattttgtcactcagcaagcctttgacattgttatcatgatgctcatctgccttaacatggtgacaatgatggtggagacagacactcaaagcaagcagatggagaacatcctctactggattaacctggtgtttgttatcttcttcacctgtgagtgtgtgctcaaaatgtttgcgttgaggcactactacttcaccattggctggaacatcttcgacttcgtggtagtcatcctctccattgtgggaatgttcctggcagatataattgagaaatactttgtttccccaaccctattccgagtcatccgattggcccgtattgggcgcatcttgcgtctgatcaaaggcgccaaagggattcgtaccctgctctttgccttaatgatgtccttgcctgccctgttcaacatcggccttctgctcttcctggtcatgttcatcttctccatttttgggatgtccaattttgcatatgtgaagcacgaggctggtatcgatgacatgttcaactttgagacatttggcaacagcatgatctgcctgtttcaaatcacaacctcagctggttgggatggcctgctgctgcccatcctaaaccgcccccctgactgcagcctagataaggaacacccagggagtggctttaagggagattgtgggaacccctcagtgggcatcttcttctttgtaagctacatcatcatctctttcctaattgtcgtgaacatgtacattgccatcatcctggagaacttcagtgtagccacagaggaaagtgcagaccctctgagtgaggatgactttgagaccttctatgagatctgggagaagttcgaccccgatgccacccagttcattgagtactgtaagctggcagactttgcagatgccttggagcatcctctccgagtgcccaagccaaataccattgagctcatcgctatggatctgccaatggtgagcggggatcgcatccactgcttggacatcctttttgccttcaccaagcgggtcctgggagatagcggggagttggacatcctgcggcagcagatggaagagcggttcgtggcatccaatccttccaaagtgtcttacgagccaatcacaaccacactgcgtcgcaagcaggaggaggtatctgcagtggtcctgcagcgtgcctaccggggacatttggcaaggcggggcttcatctgcaaaaagacaacttctaataagctggagaatggaggcacacaccgggagaaaaaagagagcaccccatctacagcctccctcccgtcctatgacagtgtaactaaacctgaaaaggagaaacagcagcgggcagaggaaggaagaagggaaagagccaaaagacaaaaagaggtcagagaatccaagtgttagaggagaacaaaaattcagtattatacagatctaaaactcgcaagtgaaagattgtttacaaacttcctgaatattatcaatgcagaacagctgtggagactctaacctgaagatctataccaaacgtcgtctgcttaccacgtaacacagctgcatcttgagcagtgacctgccaagggcaaaggaccccgctccctagacttacagattttctaatgcttgggcaggtggttactgcatgttccacatcagtcaatgcaacttaggacaaaactaaccagatacagaaacagaagagaggctgccgggaccagcatatttccgttgcagccaaatggattttattttttcattttattgattctcagaagcagaaagcatcactttaaaagttcgtttgttcatgcaaactatatttgcattcttacattagttaagctaagcagcaaaaagaaaacacacacacacactcacatttagcccatgtcatttaattgtcagtttctttgacataaagcgcatcttctccacatgggcttcacgtggtttggagatgggtgggggaaaacaatcaggtttcttcaggctgaggaggacttgctcaggccgattccaaacattgtgctcgttcaatgcgtagaaatgatttgcatgatggcatgccgtgatcagaagtcatgcatgagatccatacaccacaggacactactaatctagtcccttgcactgggtcagcctttggacaggacccagccctgcaccgttcactgtatttggagaaaatggtaagagttccataccgggctacaattctttgagttcttaaaagtccttcatacaccttctgggtagggaaacaaccaactaattgactaacaccaccaacg

SEQ ID NO: 3249 - protein, 1836 aa, Homo sapiens
MARPSLCTLVPLGPECLRPFTRESLAAIEQRAVEEEARLQRNKQMEIEEPERKPRSDLEAGKNLPMIYGDPPPEVIGIPLEDLDPYYSNKKTFIVLNKGKAIFRFSATPALYLLSPFSVVRRGAIKVLIHALFSMFIMITILTNCVFMTMSDPPPWSKNVEYTFTGIYTFESLIKILARGFCVDDFTFLRDPWNWLDFSVIMMAYLTEFVDLGNISALRTFRVLRALKTITVIPGLKTIVGALIQSVKKLSDVMILTVFCLSVFALVGLQLFMGNLRQKCVRWPPPFNDTNTTWYSNDTWYGNDTWYGNEMWYGNDSWYANDTWNSHASWATNDTFDWDAYISDEGNFYFLEGSNDALLCGNSSDAGHCPEGYECIKTGRNPNYGYTSYDTFSWAFLALFRLMTQDYWENLFQLTLRAAGKTYMIFFVVIIFLGSFYLINLILAVVAMAYAEQNEATLAEDKEKEEEFQQMLEKFKKHQEELEKAKAAQALEGGEADGDPAHGKDCNGSLDTSQGEKGAPRQSGSGDSGISDAMEELEEAHQKCPPWWYKCAHKVLIWNCCAPWLKFKNIIHLIVMDPFVDLGITICIVLNTLFMAMEHYPMTEHFDNVLTVGNLVFTGIFTAEMVLKLIAMDPYEYFQQGWNIFDSIIVTLSLVELGLANVQGLSVLRSFRLLRVFKLAKSWPTLNMLIKIIGNSVGALGNLTLVLAIIVFIFAVVGMQLFGKSYKECVCKIALDCNLPRWHMHDFFHSFLIVFRILCGEWIETMWDCMEVAGQAMCLTVFLMVMVIGNLVVLNLFLALLLSSFSADSLAASDEDGEMNNLQIAIGRIKLGIGFAKAFLLGLLHGKILSPKDIMLSLGEADGAGEAGEAGETAPEDEKKEPPEEDLKKDNHILNHMGLADGPPSSLELDHLNFINNPYLTIQVPIASEESDLEMPTEEETDTFSEPEDSKKPPQPLYDGNSSVCSTADYKPPEEDPEEQAEENPEGEQPEECFTEACVQRWPCLYVDISQGRGKKWWTLRRACFKIVEHNWFETFIVFMILLSSGALAFEDIYIEQRRVIRTILEYADKVFTYIFIMEMLLKWVAYGFKVYFTNAWCWLDFLIVDVSIISLVANWLGYSELGPIKSLRTLRALRPLRALSRFEGMRVVVNALLGAIPSIMNVLLVCLIFWLIFSIMGVNLFAGKFYYCINTTTSERFDISEVNNKSECESLMHTGQVRWLNVKVNYDNVGLGYLSLLQVATFKGWMDIMYAAVDSREKEEQPQYEVNLYMYLYFVIFIIFGSFFTLNLFIGVIIDNFNQQKKKLGGKDIFMTEEQKKYYNAMKKLGSKKPQKPIPRPQNKIQGMVYDLVTKQAFDITIMILICLNMVTMMVETDNQSQLKVDILYNINMIFIIIFTGECVLKMLALRQYYFTVGWNIFDFVVVILSIVGLALSDLIQKYFVSPTLFRVIRLARIGRVLRLIRGAKGIRTLLFALMMSLPALFNIGLLLFLVMFIYSIFGMSNFAYVKKESGIDDMFNFETFGNSIICLFEITTSAGWDGLLNPILNSGPPDCDPNLENPGTSVKGDCGNPSIGICFFCSYIIISFLIVVNMYIAIILENFNVATEESSEPLGEDDFEMFYETWEKFDPDATQFIAYSRLSDFVDTLQEPLRIAKPNKIKLITLDLPMVPGDKIHCLDILFALTKEVLGDSGEMDALKQTMEEKFMAANPSKVSYEPITTTLKRKHEEVCAIKIQRAYRRHLLQRSMKQASYMYRHSHDGSGDDAPEKEGLLANTMSKMYGHENGNSSSPSPEEKGEAGDAGPTMGLMPISPSDTAWPPAPPPGQTVRPGVKESLV

SEQ ID NO: 3250 - DNA, 413 bp, Rattus norvegicus
  ref <308>: DATABASE ACCESSION NUMBER: EMBL / L48209
  ref <309>: DATABASE ENTRY DATE: 2000-03-04
gctgaggagcctgaccggcccggcccggcggcttatggtgccgcgggctcaggtccactcgaagccgccgcgggagcagctcggggtcctggatatcaccattgggctcacttcctgcttcgtgtgttgtcttctacctgcgggctgggtcctgtcacacctggaaagctacaagaagcgggagtgaagggagcgtcttccctcatcctttgactagaccactcttgccagcccaccttgatcatgtttcctgcattcctggctggcttaccctgggatcatgttattcaattccagtcacctcttctgcaatcatgacctctcgatgtctccatggtgacaactgggaccacatatattggttctgcttgatggggtccccctttgtaacaataaagtctatttaaaccttg

SEQ ID NO: 3251 - protein, 44 aa, Rattus norvegicus
  ref <308>: DATABASE ACCESSION NUMBER: SWISS-Prot / P80433
  ref <309>: DATABASE ENTRY DATE: 2002-06-15
VHSKPPREQLGVLDITIGLTSCFVCCLLPAGWVLSHLESYKKRE

SEQ ID NO: 3252 - DNA, 628 bp, Rattus norvegicus
  ref <308>: DATABASE ACCESSION NUMBER: EMBL / M10094
  ref <309>: DATABASE ENTRY DATE: 2000-03-04
gagctactgcgcccagatcccccaaaggcacatgtgacccttcaccccagacctgaaggtgatgtcaccctgaggtgctgggccctgggcttctaccctgctgacatcaccctgacctggcagttgaatggggaggacctgacccaggacatggagcttgtggagaccaggcctgcaggggatggaaccttccagaagtgggaagctgtggtggtgcctcttgggaaggaacagaattacacatgccttgtggagcatgaggggctgcctgagccgcttaccctgagatggagtaaggagggagccttctatagaccctgagctggtcagggctgagagctggggtcatgaaatgaaatgaaatggttctctggggcaaattaatctgtagctcagttcacaagaaccagcaatggctggtcagttcagaagaaacaaggaggctgagctgtttgctgtgtagtagttcctgggggcaactccaatctctaattgacagtacagcagcaatccaggtcagtagtgtcaggatagcaaacaggaatcatcagcggtggcacaaaccagcagaaactgccaggcatccaccaaatcagcatgagtcagcaggactgagcagggaagcctg

SEQ ID NO: 3253 - protein, 319 aa, Rattus norvegicus
  ref <308>: DATABASE ACCESSION NUMBER: SWISS-Prot / P15978
  ref <309>: DATABASE ENTRY DATE: 1999-07-15
MGAMAPRTLLLLLAAVLAPTQTWAGSHSLRYFHTAVSRPGLGEPRFISVGYVDDTQFVRYDSDAENPRYEPRARWMEREGPEYWEEQTLVAKGQELDYRVSLRNLLSYYNQSEGGSHTIQRMYGCDVGSDGSLLRGYEQHAYDGRDYIALNEDLKTWAVADFAAWITRSKWQRNGAAERSRAYLEGTCVEWLLRYLERGKETLLRSDPPEAHVTLHPRPEGDVTLRCWALGFYPADITLTWQLNGEDLTQDMELVETRPAGDGTFQKWASVVVPLGKEQNYTCRVEHEGLPEPLSQRWEPSPSTDSNLLLLFLELWQFL

SEQ ID NO: 3254 - DNA, 2959 bp, Homo sapiens
  ref <308>: DATABASE ACCESSION NUMBER: EMBL / I38874
  ref <309>: DATABASE ENTRY DATE: 1997-05-16
ggatccggtgtatgccgcagcaggcatgagcagcccgaatatgcgcctgctggctgcaacgaccgaggaaatgacccgcgttttcggcgctgaccaggctttttcacataggctgagccggtggccactgcacgtctccgacgatcccaccgcgtaccgctggcatgcccagcacaatcgcgtggatcgcctagctgatcccgaaaaagtttttgccttttgtaaaaaacttctcggtcgccccgcaaattttcgattccagattttttaaaaaccaagccagaaatacgacacaccgtttgcagataatctgtctttcggaaaaatcaagtgcgatacaaaatttttagcacccctgacgtgcgcaaagtcccgcttcgtgaaaattttcgtgccgcgtgattttccgccaaaaactttaacgaacgttcgttataatggtgtcatgaccttcacgacgaagtaccaaaattggcccgaatcatcagctatggatctctctgatgtcgcgctggagtccgacgcgctcgatgctgccgtcgatttaaaaacggtgatcggatttttccgagctctcgatacgacggacgcgccagcatcacgagactgggccagtgccgcgagcgacctagaaactctcgtggcggatcttgaggagctggctgacgagctgcgtgctcggcagcgccaggaggacgcacagtagtggaggatcgaatcagttgcgcctactgcggtggcctgattcctccccggcctgacccgcgaggacggcgcgcaaaatattgctcagatgcgtgtcgtgccgcagccagccgcgagcgcgccaacaaacgccacgccgaggagctggaggcggctaggtcgcaaatggcgctggaagtgcgtcccccgagcgaaattttggccatggtcgtcacagagctggaagcggcagcgagaattatccgcgatcgtggcgcggtgcccgcaggcatgacaaacatcgtaaatgccgcgtttcgtgtggccgtggccgcccaggacgtgtcagcgccgccaccacctgcaccgaatcggcagcagcgtcgcgcgtcgaaaaagcgcacaggcggcaagaagcgataagctgcacgaatacctgaaaaatgttgaacgccccgtgagcggtaactcacagggcgtcggctaacccccagtccaaacctgggagaaagcgctcaaaaatgactctagcggattcacgagacattgacacaccggcctggaaattttccgctgatctgttcgacacccatcccgagctcgcgctgcgatcacgtggctggacgagcgaagaccgccgcgaattcctcgctcacctgggcagagaaaatttccagggcagcaagacccgcgacttcgccagcgcttggatcaaagacccggacacgggagaaacacagccgaagttataccgagttggttcaaaatcgcttgcccggtgccagtatgttgctctgacgcacgcgcagcacgcagccgtgcttgtcctggacattgatgtgccgagccaccaggccggcgggaaaatcgagcacgtaaaccccgaggtctacgcgattttggagcgctgggcacgcctggaaaaagcgccagcttggatcggcgtgaatccactgagcgggaaatgccagctcatctggctcattgatccggtgtatgccgcagcaggcatgagcagcccgaatatgcgcctgctggctgcaacgaccgaggaaatgacccgcgttttcggcgctgaccaggctttttcacataggctgagccggtggccactgcacgtctccgacgatcccaccgcgtaccgctggcatgcccagcacaatcgcgtggatcgcctagctgatcttatggaggttgctcgcatgatctcaggcacagaaaaacctaaaaaacgctatgagcaggagttttctagcggacgggcacgtatcgaagcggcaagaaaagccactgcggaagcaaaagcacttgccacgcttgaagcaagcctgccgagcgccgctgaagcgtctggagagctgatcgacggcgtccgtgtcctctggactgctccagggcgtgccgcccgtgatgagacggcttttcgccacgctttgactgtgggataccagttaaaagcggctggtgagcgcctaaaagacaccaagatcatcgacgcctacgagcgtgcctacaccgtcgctcaggcggtcggagcagacggccgtgagcctgatctgccgccgatgcgtgaccgccagacgatggcgcgacgtgtgcgcggctacgtcgctaaaggccagccagtcgtccctgctcgtcagacagagacgcagagcagccgagggcgaaaagctctggccactatgggaagacgtggcggtaaaaaggccgcagaacgctggaaagacccaaacagtgagtacgcccgagcacagcgagaaaaactagctaagtccagtcaacgacaagctaggaaagctaaaggaaatcgcttgaccattgcaggttggtttatgactgttgagggagagactggctcgtggccgacaatcaatgaagctatgtctgaatttagcgtgtcacgtcagaccgtgaatagagcacttaagtctgcgggcattgaacttccacgaggacgccgtaaagcttcccagtaaatgtgccatctcgtaggcagaaaacggttccccccgtaggggtctctctcttggcctcctttctaggtcgggctgattgctcttgaagctctctaggggggctcacaccataggcagataacggttccccaccggctcacctcgtaagcgcacaaggactgctcccaaagatcgcctagctgatcttatggaggttgctcgcatgatcctttttgataatctcatgaccaaaatcccttaacgtgagttttcgttccactgagcgtcagaccccgtagaaaagatccccgggtacc

SEQ ID NO: 3255 - DNA, 628 bp, Rattus norvegicus; identical to SEQ ID NO: 3252
  ref <308>: DATABASE ACCESSION NUMBER: EMBL / M10094
  ref <309>: DATABASE ENTRY DATE: 2000-03-04

SEQ ID NO: 3256 - protein, 319 aa, Rattus norvegicus; identical to SEQ ID NO: 3253
  ref <308>: DATABASE ACCESSION NUMBER: SWISS-Prot / P15978
  ref <309>: DATABASE ENTRY DATE: 1999-07-15

SEQ ID NO: 3257 - DNA, 2959 bp, Homo sapiens; identical to SEQ ID NO: 3254
  ref <308>: DATABASE ACCESSION NUMBER: EMBL / I38874
  ref <309>: DATABASE ENTRY DATE: 1997-05-16

SEQ ID NO: 3258 - DNA, 764 bp, Rattus norvegicus
  ref <308>: DATABASE ACCESSION NUMBER: EMBL / M10934
  ref <309>: DATABASE ENTRY DATE: 2000-03-04
aaggagaacttcgacaaggctcgtttctctgggctctggtatgccatcgccaaaaaggatcccgagggtctctttttgcaagacaacatcatcgctgagttttctgtcgacgagaagggtcatatgagcgctacagccaagggacgagtccgtcttctgagcaactgggaagtgtgtgcagacatggtgggcactttcacagatacagaagatcctgccaagttcaagatgaagtactggggtgtagcctcctttctccagcgaggaaacgatgaccactggatcatcgatacggactacgacaccttcgctctgcagtattcctgccgcctgcagaatctggatggcacctgtgcagacagctactcctttgtgttttctcgtgaccccaatggcctgaccccggagacacggaggctggtgaggcagcgacaggaggagctgtgcctagagaggcagtacagatggatcgagcacaatggttactgtcaaagcagaccctcaagaaacagtttgtagcaacgtcaaggatgtataaagttggaaaacttctgattagctctcatccagtcttcatctctatttatcttagaagtttagtttccccacctcccctcccttctctaggtggacattaaaaccatcgtccaaatacatgggaatgcctgaatccattcacacaaacgtgtatcttactgagaagttccccgagagacgtttgaggcttgggattccaaacttgatttattaaacgtatagtcacc

SEQ ID NO: 3259 - protein, 201 aa, Rattus norvegicus
  ref <308>: DATABASE ACCESSION NUMBER: SWISS-Prot / AAA42020
  ref <309>: DATABASE ENTRY DATE: 2002-06-15
MEWVWALVLLAALGGGSAERDCRVSSFRVKENFDKARFSGLWYAIAKKDPEGLFLQDNIIAEFSVDEKGHMSATAKGRVRLLSNWEVCADMVGTFTDTEDPAKFKMKYWGVASFLQRGNDDHWIIDTDYDTFALQYSCRLQNLDGTCADSYSFVFSRDPNGLTPETRRLVRQRQEELCLERQYRWIEHNGYCQSRPSRNSL

SEQ ID NO: 3260 - DNA, 919 bp, Homo sapiens; identical to SEQ ID NO: 2710
  ref <308>: DATABASE ACCESSION NUMBER: Refseq / NM_006744
  ref <309>: DATABASE ENTRY DATE: 2001-12-20

SEQ ID NO: 3261 - protein, 201 aa, Homo sapiens; identical to SEQ ID NO: 2711
  ref <308>: DATABASE ACCESSION NUMBER: SWISS-Prot / P02753
  ref <309>: DATABASE ENTRY DATE: 2002-06-15

SEQ ID NO: 3262 - DNA, 824 bp, Rattus norvegicus
  ref <308>: DATABASE ACCESSION NUMBER: EMBL / M11071
  ref <309>: DATABASE ENTRY DATE: 2000-03-04
cgatggaaccttccaaaagtgggcatctgtggtggtgcctcttgggaaggagcagaattacacatgccttgtggagcatgaggggctgcctgagccgcttacccagagatgggagccttctccatcgaccgactccaacatggaaacctatgtcatttatgtcatccttggagctgtggccatcattgcagctgtgatcattgtagctgtggtggctgttgtgatgaagaggaggagaaacacaggtggaaaagtaggagtctacgcccctgctccaagcagggacagctctgagagctctgatgtgtctctctcagattgtaaagcatgaagacagctgcctggagtggactgagtgacagacgatgtgttcaggtctctcctgtgacatccagagtcctcagttctctttagacaccagtgtctgatgttccctgtgattctatggcttctgtgtgaagaactgtggagcccagcctgccctgcacacctggaccctgtccctgcactgcctgtgttcccttccacagccaacctcgctggtctagcctggggttgggggctggggacatctgcaccctatcactcagtgctgcttctagctgcaactcctcacttctacactgagaataagaatctgagtgtggggctggagagatggctcagcggttaagagcacccgactgctcttctagaggtcatgagttcaattcccagcaaccgcatggtggctcacaaccatctataaatagatccgatgccctcttctggtgtatctgaagacagctacagtgtacttatatataataaactaaataaatctc

SEQ ID NO: 3263 - protein, 319 aa, Rattus norvegicus; identical to SEQ ID NO: 3253
  ref <308>: DATABASE ACCESSION NUMBER: SWISS-Prot / P15978
  ref <309>: DATABASE ENTRY DATE: 1999-07-15

SEQ ID NO: 3264 - DNA, 760 bp, Rattus norvegicus
  ref <308>: DATABASE ACCESSION NUMBER: EMBL / M11596
  ref <309>: DATABASE ENTRY DATE: 2000-03-04
acaccatggacttctggaagttctttccttttctggctctcagcagcatgtgggtcctgtgcctggccagcagcctccaggcagcccctttcaggtcagctttggagagcagcctagacctgggcaccctcagcgaccaggaaaaacacctcttgcttgctgcattgatacaggactatgaacagaaggccaggaagctggaacaggaggagcaagagactgagggctccaggaaaggctcctcctccagtgtcatttcccagaagagatcctgcaacaccgccacctgtgtgacccatcggctggcaggcttgctgcgcaggtcgggaggtgtggtgaaggacaactttgtgcccaccaatgtgggctccaaagcctttggccggcgccgcagggaccttcgggtctgaggaactaacgctccaggaagaaggttacataaagttgaactcaccacgcctattaatttttattaacaacaaccctattgagaaggccccatggacgatgtgtatgtttgcatcctgaaagatactgagggaaaacaccattgtcacttgagagaaatgaaaccaagtataaatgagttaattctgtgttcgtttgcatcatttttatactgagtctatggccagtcaaatatgatggtgtctcctgctggcatcctttgcagcaaaccaaataggttctccaagagccgtccagacggtggtagcagctctggtgaacctcagggagacgtgatatcactgcctcttgt

SEQ ID NO: 3265 - protein, 134 aa, Rattus norvegicus
  ref <308>: DATABASE ACCESSION NUMBER: SWISS-Prot / P10093
  ref <309>: DATABASE ENTRY DATE: 2002-06-15
MDFWKFFPFLALSSMWVLCLASSLQAAPFRSALESSLDLGTLSDQEKHLLLAALIQDYEQKARKLEQEEQETEGSRKGSSSSVISQKRSCNTATCVTHRLAGLLRRSGGVVKDNFVPTNVGSKAFGRRRRDLRV

SEQ ID NO: 3266 - DNA, 681 bp, Homo sapiens
  ref <308>: DATABASE ACCESSION NUMBER: EMBL / M64486
  ref <309>: DATABASE ENTRY DATE: 2000-03-04
gcctctctgatccaagccacctcccgccagagaggtgtcatgggcttccaaaagttctcccccttcctggctctcagcatcttggtcctgttgcaggcaggcagcctccatgcagcaccattcaggtctgccctggagagcagcccagcagacccggccacgctcagtgaggacgaagcgcgcctcctgctggctgcactggtgcaggactatgtgcagatgaaggccagtgagctggagcaggagcaagagagagagggctccagcctggacagccccagatctaagcggtgcggtaatctgagtacttgcatgctgggcacatacacgcaggacttcaacaagtttcacacgttcccccaaactgcaattggggttggagcacctggaaagaaaagggatatgtccagcgacttggagagagaccatcgccctcataatcattgcccagaagagagcctgtgacactgccacctgtgtgactcatcggctggcaggcttgctgagcagatcagggggtgtggtgaagaacaactttgtgcccaccaatgtgggttccaaagcctttggcaggcgccgcagggaccttcaagcctgagcagctgaatgactcaagaaggtcacaataaagctgaactccttttaatgtgtaatgaaagcaatttgtaggaaaggctccat

SEQ ID NO: 3267 - protein, 141 aa, Homo sapiens
  ref <308>: DATABASE ACCESSION NUMBER: SWISS-Prot / P01258
  ref <309>: DATABASE ENTRY DATE: 2002-06-15
MGFQKFSPFLALSILVLLQAGSLHAAPFRSALESSPADPATLSEDEARLLLAALVQDYVQMKASELEQEQEREGSSLDSPRSKRCGNLSTCMLGTYTQDFNKFHTFPQTAIGVGAPGKKRDMSSDLERDHRPHVSMPQNAN

SEQ ID NO: 3268 - DNA, 1696 bp, Rattus norvegicus
  ref <308>: DATABASE ACCESSION NUMBER: EMBL / M12156
  ref <309>: DATABASE ENTRY DATE: 2000-03-04
cgctgaacgctctcatcatcctaccgtcatgtctaagtcagagtcccccaaggaaccggaacagctgcggaagctcttcattggagggctgagcttcgaaacaaccgacgagagtctgaggagccattttgagcaatggggaacactcaccgactgtgtggtaatgagagatccaaacaccaaaagatccagaggctttgggtttgtcacatatgccactgtggaggaagtggatgctgccatgaatgcaagaccacacaaagtggatggaagagttgtggaacctaagagagctgtgtcaagagaagattctcagagaccaggtgcccacttaactgtgaagaagatctttgttggcggtattaaagaagacactgaagaacatcacctacgagattattttgagcagtatgggaaaattgaagtgattgaaattatgactgacagaggcagtggaaaaaagaggggatttgcgtttgtcacctttgatgaccatgactctgtggataagattgttattcagaaataccatactgtgaatggccacaactgtgaagtaagaaaggctctgtgcaaacaagagatggctagtgcttcatccagccagagaggtcgaagtggttccggaaactttggtggtggtcgtggaggtggtttcggtggcaatgacaattttggtcgaggagggaacttcagtggtcgtggtggctttggtggcagccgtggtggtggtggatatggtggcagtggggatggctataatggatttggcaatgatggaagcaattttggaggtggtggaagctacaatgattttggcaattacaacaaccagtcatcaaattttggaccgatgaaaggaggaaactttggaggcaggagctctggcccttatggtggtggaggccagtactttgctaaaccacgaaaccaaggtggctatggaggttccagcagcagcagtagctatggcagtggcaggaggttctaattacagccaggaaacaaagcttagcaggagagccagagaagtgacagggaagctacaggttacaacagatttgtgaactcagccaagcacagtggtggcagggcctagctgctacaaagaagacatgttttagacaatactcatgtgtgtgggcaaaaactccaggactgtatctgtgactaattgtataacaggttattttagtttctgttctgtggaaagtgtaaagcattccaacgaagggttttactgtagacctttttcacccatgctgttgattgctaaatgtaaaagtctgatcatgacgctgaataaatgtgtcttttttttttttttttaatgtgctgtgtaaagttagtctactctgaagccatcttggtaaacttccccaacagtgtgaagttagaattccttcagggtggtgccaaattccatttggaatttatttatggttgcttgggtggagaagccattgtcttcaaaaaccttggtgttgctaaactgccagttactgttgtaacttaatgagtttcaccatttaaagggtcatccaagcaagatcacaatttggttataaaatggttgttggacacctatgaagagaaaattgaataacggtctcagataaaataagagatgggaatgaagcttgtgtatcatccattatcatgtgtactcaataaacgatttaattctcttgaatgg

SEQ ID NO: 3269 - protein, 319 aa, Rattus norvegicus
  ref <308>: DATABASE ACCESSION NUMBER: SWISS-Prot / P04256
  ref <309>: DATABASE ENTRY DATE: 2001-10-16
SKSESPKEPEQLRKLFIGGLSFETTDESLRSHFEQWGTLTDCVVMRDPNTKRSRGFGFVTYATVEEVDAAMNARPHKVDGRVVEPKRAVSREDSQRPGAHLTVKKIFVGGIKEDTEEHHLRDYFEQYGKIEVIEIMTDRGSGKKRGFAFVTFDDHDSVDKIVIQKYHTVNGHNCEVRKALCKQEMASASSSQRGRSGSGNFGGGRGGGFGGNDNFGRGGNFSGRGGFGGSRGGGGYGGSGDGYNGFGNDGSNFGGGGSYNDFGNYNNQSSNFGPMKGGNFGGRSSGPYGGGGQYFAKPRNQGGYGGSSSSSSYGSGRRF

SEQ ID NO: 3270 - DNA, 620 bp, Homo sapiens
  ref <308>: DATABASE ACCESSION NUMBER: EMBL / AI339411
  ref <309>: DATABASE ENTRY DATE: 2000-03-03
tcagggtttggctttttattgacacaaacacacaaaggcagctgtggtaatggggtggtggggtacacaaaagcagaaatcgcacttcacacatttaggcctcatttagacaatgaggaggctgagcctgtccctccacctcccattgcaatggttggggcaataaccctccctaatcctagctcagtgagtagagggagtgacctccctacccaggaagtccccatttttggttgcaatggcccaggtcctgaccatcccactctgtacttccctgctccatcattaccaaatccattatagccatccccactgccaccatatccaccaccaccacggttgccaccaaagccaccacgaccactgaagtttcctccacgaccgaagttgtcattcccaccgaaaccacctccacgaccaccaccaaagtttccagaaccacttcgacctctttggctggatgaagcactagccatctcttgctgtgacagggcttttctaacttcacagttgtggccattcacagtatggtattcctgagtgacaatcttatccacggagtcatggtcgtcaaggttacaatgcagagcccctttcttgccactgctcgtagtatgatt

SEQ ID NO: 3271 - protein, 320 aa, Homo sapiens
  ref <308>: DATABASE ACCESSION NUMBER: Refseq / XP_015755
  ref <309>: DATABASE ENTRY DATE: 2002-08-01
MSKSESPKEPEQLRKLFIGGLSFETTDESLRSHFEQWGTLTDCVVMRDPNTKRSRGFGFVTYATVEEVDAAMNARPHKVDGRVVEPKRAVSREDSQRPGAHLTVKKIFVGGIKEDTEEHHLRDYFEQYGKIEVIEIMTDRGSGKKRGFAFVTFDDHDSVDKIVIQKYHTVNGHNCEVRKALSKQEMASASSSQRGRSGSGNFGGGRGGGFGGNDNFGHGGNFSGRGGFGGSRAGGRYGGSGDGSNGFGNDGSNFGGGGSYNDFGNYNNQSSNFGPMKGGNFGGRNSGPYGGGGQYFAKPRNQGGYGGSSSSSSCVSGRRF

SEQ ID NO: 3272 - DNA, 3108 bp, Rattus norvegicus
  ref <308>: DATABASE ACCESSION NUMBER: EMBL / M12492
  ref <309>: DATABASE ENTRY DATE: 2002-10-25
tgagcatcgagatccccgcggggctcacggagctgctgcagggcttcacggtggaggtgctgaggcaccagcccgccgacctgctggagttcgcgctgcagcacttcacgcggctgcagcaggagaacgagcgcaagggcgccgcgcgcttcggccatgagggcaggacctggggggacgcgggcgcagccgccgggggcggaacccccagtaagggtgtcaacttcgcggaggagcccatgcgctccgattccgagaacggcgaagaggaggaggccgcggaagcaggggcgttcaacgctccagttataaaccggttcacaaggcgtgcctcggtatgtgcagaagcttataatcctgatgaagaagaagatgatgcagagtccaggataatacatcccaaaactgacgatcaaagaaacagattgcaagaagcctgcaaagacatcctgctgtttaagaacctggatccagaacagatgtctcaagtattagatgccatgtttgaaaaattggtcaaagaaggggaacacgtaatcgatcaaggtgatgatggtgacaacttttacgtcatcgacagaggaacatttgatatttatgtaaaatgtgatggcgttggaagatgcgttggtaactatgacaatcgtgggagttttggagaactggccttaatgtacaatacacccagagcagctacaatcactgctacctctcctggtgctctgtggggtttggacagggtgaccttcaggagaataatagtaaaaaacaatgccaaaaagaggaagatgtacgagagctttattgagtcactgccattcctcaagtctctggaggtttctgaacgcctgaaggtggtagatgtgattggcaccaaagtttacaacgatggagaacagatcattgctcagggagactcggcggattcgttcttcattgtagaatctggagaagtgagaattactatgaagagaaagggtaaatcagacatcgaagagaacggtgctgtggaaatcgctcggtgtctccggggacagtattttggagagcttgccctggtcactaacaagccaagagcagcatctgcacacgccattgggactgtcaaatgcttagccatggatgtgcaagcatttgagaggcttctgggaccttgcatggaaattatgaagaggaatatcgccacctatgaggagcaattagttgcactgtttgggacaaacatggatattgttgagcccactgcatgaagcaaaagtgtggggaagaaagcgcgttagtgaagcagttacatagcagtggttagtccaccgaggatgtgttcgtgtagatcaagcattttctgtgacttcaggttttccttttttaaacagaaaccatttacaatatatcagtgaacagtagtgatttaatagtaggctttaacatcactttctaatgggtagttcataaattaacataatcataaaaacgactttctatttcataaaactgactgaaaggtttattcaaatggttataatatattgagagcatacatgtttaagaagataattaaaagatgtactcataggccgacctgtgtgtttggattattcaagtatcgtgttagtgactctgcccctttacgagggaagctggcacgtggcttgtgcactcacattctttttataactcgtcagacagtaagattgccaatcatttcattttctaccttttctggcttagtaagttatgtgttagccttggcctatcggtaacatggtgtggaaatcatatgcaattttaaaattttttatatttttgcaataaactacatttcaacttctttgacaactgtcagccagcagcctgggtagttgagtggcttttggggcctggtaatttagctgttgtgatgattgggcagagagccttttaggatgaaagctcataactgcgtctttcattatcctttctccatcatcaccgcttcccgctttgtatttagcaacctcctgggttccttacagatcgcattttgacgtttaatgtcacaagggttgtattggttctcaaggcaatttcatcttaatctgacaatttgttttgtcctctaaaagtcccgaatcttctattcagaaaaatgaaagcttccctatcaaaagacatttgggattcttagcccacgcccacagaacatggctttgctctgtaggtcccagtgctgcgaccctgtgtgtgtgtctgtggtcccctgcccttccctgtcctgagcaccagccagcgagcacattggtcagcagccaatcaagtgcgtttgccctttccaaccttcaaaaacttcaacaacggtggtggaaagaagtctgtgtataagcaaagccatacatgagtattaatgggatttttctctatcctacaccttattaggccttgttcttagctttaaagtcagcccacagttaaaagtacacaaagtacaaaattttttttggtcaacaagatacttacttttatgccaaatacgatgaattgttaaaaccaaagcaatatacttttatgtgattttcaggccccttgaccaaatgtctaaaggcattaattctcaccagtttaattcatgttgaaatgggtaattttactttggggaacatgtttctaaggaacagaggtatcatgtatgttaaattcatctgtgactgtctcgatcttacaagagaatgtttacagtcctacgtgtacgctatactgttacctacacctttagccgtgcttttgaaatgtcagtcttgcaaaatctttacgtaggaaaaaaagctctctacatgaaggtaacatgttttctatttcagagttcagaagccatgtgttcaaacaagaaacaaatcccaaaaacagaaaaacaagaacaaaagccacccaaattcctggctcatccttctgtgttcttttctctcttttccaagttctctttggttgcattgcataggctgagtgttgacgttcacggaaaccaatgcctgtggaataaagagccccaaccaaggctacagaggccagctgtgttattttcagtattgttggttatatttaaattttccttataataaagcacacttttataat

SEQ ID NO: 3273 - protein, 415 aa, Rattus norvegicus
  ref <308>: DATABASE ACCESSION NUMBER: SWISS-Prot / P12369
  ref <309>: DATABASE ENTRY DATE: 2000-05-30
SIEIPAGLTELLQGFTVEVLRHQPADLLEFALQHFTRLQQENERKGAARFGHEGRTWGDAGAAAGGGTPSKGVNFAEEPMRSDSENGEEEEAAEAGAFNAPVINRFTRRASVCAEAYNPDEEEDDAESRIIHPKTDDQRNRLQEACKDILLFKNLDPEQMSQVLDAMFEKLVKEGEHVIDQGDDGDNFYVIDRGTFDIYVKCDGVGRCVGNYDNRGSFGELALMYNTPRAATITATSPGALWGLDRVTFRRIIVKNNAKKRKMYESFIESLPFLKSLEVSERLKVVDVIGTKVYNDGEQIIAQGDSADSFFIVESGEVRITMKRKGKSDIEENGAVEIARCLRGQYFGELALVTNKPRAASAHAIGTVKCLAMDVQAFERLLGPCMEIMKRNIATYEEQLVALFGTNMDIVEPTA

SEQ ID NO: 3274 - DNA, 3259 bp, Homo sapiens
  ref <308>: DATABASE ACCESSION NUMBER: EMBL / M31158
  ref <309>: DATABASE ENTRY DATE: 1999-07-02
gacgcgcgccgggagccggcggccgggccagccggcgccggggcccagtgcgccgcgctcgcagccggtagcgcgccagccgtaggcgtcgctcggcagccgcggggccctaggcgtgccggggagggggcgagggcggccaggcgcctgccgccccggaggcaggatgagcatcgagatcccggcgggactgacggagctgctgcagggcttcacggtggaggtgctgaggcaccagcccgcggacctgctggagttcgcgctgcagcacttcacccgcctgcagcaggagaacgagcgcaaaggcaccgcgcgcttcggccatgagggcaggacctggggggacctgggcgccgctgccgggggcggcacccccagcaagggggtcaacttcgccgaggagcccatgcagtccgactccgaggacggggaggaggaggaggcggcgcccgcggacgcaggggcgttcaatgctccagtaataaaccgattcacaaggcgtgcctcagtatgtgcagaagcttataatcctgatgaagaagaagatgatgcagagtccaggattatacatccaaaaactgatgatcaaagaaataggttgcaagaggcttgcaaagacatcctgctgtttaagaatctggatccggagcagatgtctcaagtattagatgccatgtttgaaaaattggtcaaagatggggagcatgtaattgatcaaggtgacgatggtgacaacttttatgtaattgatagaggcacatttgatatttatgtgaaatgtgatggtgttggaagatgtgttggtaactatgataatcgtgggagtttcggcgaactggccttaatgtacaatacacccagagcagctacaatcactgctacctctcctggtgctctgtggggtttggacagggtaaccttcaggagaataattgtgaaaaacaatgccaaaaagagaaaaatgtatgaaagctttattgagtcactgccattccttaaatctttggagttttctgaacgcctgaaagtagtagatgtgataggcaccaaagtatacaacgatggagaacaaatcattgctcagggagattcggctgattcttttttcattgtagaatctggagaagtgaaaattactatgaaaagaaagggtaaatcagaagtggaagagaatggtgcagtagaaatgcctcgatgctcgcggggacagtactttggagagcttgccctggtaactaacaaacctcgagcagcttctgcccacgccattgggactgtcaaatgtttagcaatggatgtgcaagcatttgaaaggcttctgggaccttgcatggaaattatgaaaaggaacatcgctacctatgaagaacagttagttgccctgtttggaacgaacatggatattgttgaacccactgcatgaagcaaaagtatggagcaagacctgtagtgacaaaattacacagtagtggttagtccactgagaatgtgtttgtgtagatgccaagcattttctgtgatttcaggttttttcctttttttacatttacaacgtatcaataaacagtagtgatttaatagtcaataggctttaacatcactttctaaagagtagttcataaaaaaatcaacatactgataaaatgactttgtactccacaaaattatgactgaaaggtttattaaaatgattgtaatatatagaaagtatctgtgtttaagaagataattaaaggatgttatcataggctatatgtgttttacttattcagactgataatcatattagtgactatccccatgtaagagggcacttggcaattaaacatgctacacagcatggcatcacttttttttataactcattaaacacagtaaaattttaatcatttttgttttaaagttttctagcttgataagttatgtgctgccttggcctattggtgaaatggtataaaatatcatatgcagttttaaaactttttatatttttgcaataaagtacattttgactttgttggcataatgtcagtaacatacatattccagtggttttatggacaggcaatttagtcattatgataataaggaaaacagtgttttagatgagagatcattaatgcatttttccctcatcaagcatatatctgcttttttttattttgcaattctctgtattctatgtctttaaaaatttgatcttgacatttaatgtcacaaagttttgtttttttaaaaagtgatttaaacttaagatccgacattttttgtattctttaagattttacacctaaaaaatctctcctatcccaaaaataatgtgggatccttatcagcatgcccacagtttatttctttgttcttcactaggcctgcataatacagtcctatgtagacatctgttcccttgggtttccgttctttcttaggatggttgccaacccacaatctcattgatcagcagccaatatgggtttgtttggtttttttaattcttaaaaacatcctctagaggaatagaaacaaatttttatgagcataaccctatataaagacaaaatgaatttctgaccttaccatatataccattaggccttgccattgctttaatgtagactcatagttgaaattagtgcagaaagaactcagatgtactagattttcattgttcattgatatgctcagtatgctgccacataagatgaatttaattatattcaaccaaagcaatatactcttacatgatttctaggccccatgacccagtgtctagagacattaattctaaccagttgtttgcttttaaatgagtgatttcattttgggaaacaggtttcaaatgaatatatatacatgggtaaaattactctgtgctagtgtagtcttactagagaatgtttatggtcccacttgtatatgaaaatgtggttagaatgttaattggataatgtatatataagaagttaaagtatgtaaagtataacttcagccacatttttagaacactgtttaacatttttgcaaaaccttcttgtaggaaaagagagctctctacatgaagatgacttgttttatatttcagattttattttaaaagccatgtctgttaaacaagaaaaaacacaaaagaactccagattcctggttcatcattctgtattcttactcactttttcaagttatctattttgttgcataaactaattgttaactattcatggaacagcaaacgcctgtttaataaagaactttgaccaag

SEQ ID NO: 3275 - protein, 417 aa, Homo sapiens
  ref <308>: DATABASE ACCESSION NUMBER: SWISS-Prot / P31323
  ref <309>: DATABASE ENTRY DATE: 2001-10-16
SIEIPAGLTELLQGFTVEVLRHQPADLLEFALQHFTRLQQENERKGTARFGHEGRTWGDLGAAAGGGTPSKGVNFAEEPMQSDSEDGEEEEAAPADAGAFNAPVINRFTRRASVCAEAYNPDEEEDDAESRIIHPKTDDQRNRLQEACKDILLFKNLDPEQMSQVLDAMFEKLVKDGEHVIDQGDDGDNFYVIDRGTFDIYVKCDGVGRCVGNYDNRGSFGELALMYNTPRAATITATSPGALWGLDRVTFRRIIVKNNAKKRKMYESFIESLPFLKSLEFSERLKVVDVIGTKVYNDGEQIIAQGDSADSFFIVESGEVKITMKRKGKSEVEENGAVEMPRCSRGQYFGELALVTNKPRAASAHAIGTVKCLAMDVQAFERLLGPCMEIMKRNIATYEEQLVALFGTNMDIVEPTA

SEQ ID NO: 3276 - DNA, 3108 bp, Rattus norvegicus; identical to SEQ ID NO: 3272
  ref <308>: DATABASE ACCESSION NUMBER: EMBL / M12492
  ref <309>: DATABASE ENTRY DATE: 2002-10-25

SEQ ID NO: 3277 - protein, 415 aa, Rattus norvegicus; identical to SEQ ID NO: 3273
  ref <308>: DATABASE ACCESSION NUMBER: SWISS-Prot / P12369
  ref <309>: DATABASE ENTRY DATE: 2000-05-30

SEQ ID NO: 3278 - DNA, 3259 bp, Homo sapiens; identical to SEQ ID NO: 3274
  ref <308>: DATABASE ACCESSION NUMBER: EMBL / M31158
  ref <309>: DATABASE ENTRY DATE: 1999-07-02

SEQ ID NO: 3279 - protein, 417 aa, Homo sapiens; identical to SEQ ID NO: 3275
  ref <308>: DATABASE ACCESSION NUMBER: SWISS-Prot / P31323
  ref <309>: DATABASE ENTRY DATE: 2001-10-16

SEQ ID NO: 3280 - DNA, 3108 bp, Rattus norvegicus; identical to SEQ ID NO: 3272
  ref <308>: DATABASE ACCESSION NUMBER: EMBL / M12492
  ref <309>: DATABASE ENTRY DATE: 2002-10-25

SEQ ID NO: 3281 - protein, 415 aa, Rattus norvegicus; identical to SEQ ID NO: 3273
  ref <308>: DATABASE ACCESSION NUMBER: SWISS-Prot / P12369
  ref <309>: DATABASE ENTRY DATE: 2000-05-30

SEQ ID NO: 3282 - DNA, 3259 bp, Homo sapiens; identical to SEQ ID NO: 3274
  ref <308>: DATABASE ACCESSION NUMBER: EMBL / M31158
  ref <309>: DATABASE ENTRY DATE: 1999-07-02

SEQ ID NO: 3283 - protein, 417 aa, Homo sapiens; identical to SEQ ID NO: 3275
  ref <308>: DATABASE ACCESSION NUMBER: SWISS-Prot / P31323
  ref <309>: DATABASE ENTRY DATE: 2001-10-16

SEQ ID NO: 3284 - DNA, 3108 bp, Rattus norvegicus; identical to SEQ ID NO: 3272
  ref <308>: DATABASE ACCESSION NUMBER: EMBL / M12492
  ref <309>: DATABASE ENTRY DATE: 2002-10-25

SEQ ID NO: 3285 - protein, 415 aa, Rattus norvegicus; identical to SEQ ID NO: 3273
  ref <308>: DATABASE ACCESSION NUMBER: SWISS-Prot / P12369
  ref <309>: DATABASE ENTRY DATE: 2000-05-30

SEQ ID NO: 3286 - DNA, 3259 bp, Homo sapiens; identical to SEQ ID NO: 3274
  ref <308>: DATABASE ACCESSION NUMBER: EMBL / M31158
  ref <309>: DATABASE ENTRY DATE: 1999-07-02

SEQ ID NO: 3287 - protein, 417 aa, Homo sapiens; identical to SEQ ID NO: 3275
  ref <308>: DATABASE ACCESSION NUMBER: SWISS-Prot / P31323
  ref <309>: DATABASE ENTRY DATE: 2001-10-16

SEQ ID NO: 3288 - DNA, 8048 bp, Rattus norvegicus
  misc_feature (1)..(8048): n=a, c, g or t
  ref <308>: DATABASE ACCESSION NUMBER: EMBL / M13100
  ref <309>: DATABASE ENTRY DATE: 2000-03-04
gaattcggcccaggataaacagatatataggtaaatgactggatagatacatggatttgatctctaactcaacttaggcaccatagaaaacaatccttgaattattttaataattttaaatcctagtttactgagaaacacgttgacgaggcagggcttcagcctctctgaagcagcactgcccctctgtggccacacaggaagtcttcactcagcagtttcctgacttaaggcctaggcctgaggaaatgcattgaatatttctctgggggacaatagttctgagaaggaaagagagtttgtctatgttgaggtcagttaaggatggttttctttccttccctcccagccttttctccatgcaacatcatgagtccccatctttctatcctgcctaaaaccacttccttctgggaaatgagaaaatccactcatacaaaatggaaacatcccgaggatcccggcccgcagcagctctctgcccccagaccctgtgagagagagacccaaccgcctggtcaggtgggcactcctgaggctgcagagggaagagaccaccaacactgctcacccctgcccacatccctggcccaagaggaaactgtataaggcctctgggtcctgtgggggagggcccaggagcggcaggacccctgtgcctgagagaccaccaccagaaccagaaggaaacagaccggataaacagttctctgcaccaaatcccgtggagggagagctgaaccttcagagagaaagacaagcctgggaaaccagaagagactgctctctgcacacacatctcggacgccagaggaaaaagccaaagaccatctggaaccctggtgcactgaagctcccggaaatggtgcacaggtcttcctggttgctgccgctgcagagagcccgtggtagcaccccacgagcgaacttgagcctcaggaccacaggtaagaccaacttttctgctgcaagaaagctgcctggtgaactcaagacacaggcccacaggaacagctgaagacctgtagagaggaaaaaccacacgccggaaagcagaacactctgtccccataactgactgaaagagaggaaaacaggtctacagcactcctgacacacaggcttataggacagtctagccactgtcagaaatagcagaacaaagtaacactagagataatctgatggcgaaaggcaagcgcaggaacccaagcaacagaaaccaagactacatggcaccatcggagcccaattctcccatcaaaacaaacatggaatatccaaacacaccagaaaagcaagatctagttccaaaatcatttttgatcatgatgctggaggacttcaagaaagacgtgaagaactccttagagaacaagtagaagcctacagagaggaatcgcaaaaatgcctgaaagaatcgcaaaaatccctgaaagaattccaagaaaacataaataaacaagtagaagcccatagagaggagacacaaaaatccctgaaagaattccaggaaaacataaataaacaagtagaagcccatagagaggagacacaaaaatccctgaaagaattccaggaaaacataaataaacaagtagaagcccatagagaggagacacaaaaatccctgaaaggaattccaggaaaacacaatcaaacagttgaaggaattaaaaatggaaatagaagcaatcaaaaaagaacacatggaaacaaccctggatatagaaaaccaaaagaagagacaaggagctgtagataaaagcttcaccaacagaatacaagagatggaagagagaatctcaggagcagaagattccatagaaatcattgactcaactgtcaaagataatgtaaagcggaaaaagctactggtccaaaacatacaggaaatccaggactcaatgagaagatcaaacctaaggataataggtatagaagagagtgaagactcccagctcaaaggaccagtaaatatcttcaacaaaaccatagaagaaancttccctaacctaaaaaaagagatacccatagacacacaagaagcctacagaactccaaatagattggaccagaaaagaaacacctcccgtcacataattgtcaaaacaccaaacgcacaaaataaagaaagaatattaaaaacagtaagggaaaaaggtcaagtaacatataaagggagacctatcagaatcacaccagacttctcgccagaaactatgaaggccagaagatcctggactgatgttatacagaccctaagagaacacaaatgccagcccaggttactgtatccagcaaaactctcaattaacattgatggagaaaccaagacattccatgacaaaaccaaatttacacaatatctttccacaaatccagcactacaaaggataataaatggtaaagcccaacataaggaggcaagctataccctagaagaagcaagaaactaatcgtcttggcaacaaaacaaagagaatgaaagcacacaaacataacctcacatccaaatatgaatataacgggaagcaataatcactattccttaatatctctcaacatcaatggcctcaactccccaataaaaagtcatagattaacaaactggatacacaacgaggaccctgcattctgctgcctacaggaaacacacctcagagacaaagacagacactacctcagagtgaaaggctggaaaacaaatttccaagcaaatggtcagaagaagcaagctggagtagccattctaatatcaaataaaatcaatttccaactaaaagtcatcaaaaaagataaggaaggacacttcatattcatcaaaggaaaaatccaccaagatgaactctcaatcctaaatatctatgccccaaatacaagggcacctacatacgtaaaagaaaccttactaaagctcaaagcacacattgcacctcacacaataatagtgggagatttcaacacaccactctcatcaatggacagatcatggaaacagaaattaaacagtgatgtcgacagcataagagaagtcatgagccaaatggacttaacggatatttttagaacattctatcctaaagcaaaaggatataccttcttctcagctcctcatggcactttctccaaaattgaccatataattggtcaaaaaacgggcctcaacaggtacagaaagatagaaataatcccatgcgtgctatcggaccaccacggcctaaaactggtcttcaataacaataagggaagaatgcccacatatacctggaaattgaacaatgctctactcaatgataacctggtcaaggaagaaataaagaaagaaattaaaaactttttagaatttaatgaaaatgaaggtacaacatacccaaacttatgggacacaatgaaagctgtgctaagaggaaaactcatagcgctgagtgcctgcaaaaagaaacaggaaagagcatatgtcagcagcttgacagcacacctaaaagctctagaacaaaaangaagcaaatacactgaggaggagtagaaggcaggaaataatcaaactcagagctgaaatcaaccaagtagaaacaaaaaggaccatagaaagaatcaacagaaccaaaagctggttctttgagaaaatcaacaagatagataaacccttagccagactaacgagaggacacagagagtgtgtccaaattaacaaaatcagaaatgaaaagggagacataactacagattcagaggaaattcaaaaaatcatcagatcttactataaaaacctatattcaataaaacttgaaaatcttcaggaaatggacaatttcctagacagataccacgtatcgaagttaaatcaggaacagataaaccagttaaacaaccccataactcctaaggaaatagaagcagtcattaaaggtctcccaaccaaaaagagtccaggtccagacgggtttagtgcagaattctatcaaaccttcatagaagacctcataccaatattatccaaactattccacaaaattgaaacagatggagcactaccgaattccttctacgaagccacaattactcttatacctaaaccacacaaagacacaacaaagaaagagaacttcagaccaatttcccttatgaatatcgatgcaaaaatactcaataaaattctggcaaacgaattcaagagcacatcaaaacaatcatccaccatgatcaagtaggcttcatcccaggcatgcagggatggtttaatatacggaaaaccatcaacgtgatccattatataaacaaactgaaagaacagaaccacatgatcatttcattagatgctgagaaagcatttgacaaaattcaacacccttcatgataagagtcccggaaagaataggaattcaaggcccatacctaaacatagtaaaagccatatacagcaaaccagttgctaacattaaactaaatggagagaaacttgaagcaatcccactaaaatcagggactagacaaggctgcccactctctccctacttattcaatatagttcttgaagttctagccagaccaatcagacaacaaaaggagatcaaggggatacagatcggaaaagaagaagtcaaaatatcactatttgcagatgacatgatagtatatttaagtgatcccaaaagttccaccagagaacgactaaagctgataaacaacttcagcaaagtggctgggtataaaattaactcaaataaatcagttgccttcctctatacaaaagagaaacaagccgagaaagaaattagggaaacgacacccttcataatagacccaaataatataaagtacctcggtgtgactttaaccaagcaagtaaaagatctgtacaataagaacttcaagacactgaggaaagaaattgaagaagacctcagaagatggaaagatctcccatgctcatggattggcaggattaatatagtaaaaatggccattttacccaaagcaatctacagattcaatgcaatccccatcaaaataccaatccaattcttcaaagagttagacagaacaatttgcaaattcatctggaataacaaaaaacccaggatagctaaagctatcctcaacaataaaaggacttcagggggaatcactatccctgaactcaagcagtattacagagcaatagtgataaaaactgcatggtgattggtacagagacagacagatagaccaatggaatagaactgaagacccagaaatgaacccacacacctatggtcacttgatttttgacaaaggagccaaaaccatccaatggaaaaaagatagcattttcagcaaatggtgctggttcaactggagggcaacatgtagaagaatgcagatcgatccatccttatcaccctgtacaaagcttaagtccaagtggatcaaggacctccacatcaaaccagacacactcaaactaatagaagaaaaactagggaagcatctggaacacatgagcactggaaaaaatttcctgaacaaaacaccaatggcttatgctctaagatcaagaatcgacaaatgggatctcataaaactgcaaagcttctgtaaggcaaaggacactgtggttaggacaaaacggcaaccaacagattgggaaaagatctttaccaatcctacaacagatagaggccttatatccaaaatatacaaagaactcaagaagttagaccgcaggaaacaaataaccctattaaaaatggggttcagagctaaacaaaaattcacagctgaggaatgccgaatggctgagaaacacctaaagaaatgttcaacatctttagtcataagggaaatgcaaatcaaaacaaccctgagatttcacctcacagtagtgagaatggctaagatcaaaaactcaggtgacagcagatgctggcgaggatgtggagaaagaggaacactcctccattgttggtgggattgcagactggtaaaaccattctggaaatcagtctggaggttcctcagaaaattggacattgaactgcctgaggatccagctatacctctcttgggcatatacccaaaagatgcctcaacatataaaagagacacgtgctccactatgttcattgccgccatatttataatagccagaaactggaaagaacccagatgcccttcaacagaggaatggatacagaaaatgtggtacatctacacaatggaatattactcagctatcaaaaacaacgagtttatgaaattcgtaggcaaatggttggaactggaaaatatcatcctgagtgagctaacccactcacagaaagacatacatggtatgcactcattgataagtggctattagcccaaatgcttgaattaccctagatccctagaacaaacgaaactcaagacggatgatcaaaatgtgaatgcttcactccttctttaaatgaggaaaaagaatacccttggctgggaagggagaggcaaagattaaaacagagactgaaggaacacccattcagagcctgccccacaggtggcccatacatatacagccacccaattggacaagatggatgaagcaaagaagtgcagactgacaggagccggatgtagatcgctcctgagagacacagccagaatacagcaaatacagaggcgaatgccagcagcaaaccactgaactgagaataggtcccccgttgaaggaatcagagaaagaactggaagagcttgaaggggctcaagaccccaaaagtacaacaatgtcaagcaaccagagcttccagggactaagccactacctaaatactatacatggactgaccctggactctgaccccataggtagcaatgaatatcctagtaagagcaccagtggaaggggaagccctgggtcctgctaagactggacccccagtgaactagactatggggggagggcggcaatggggggagggttgggagggggacacccataaggaaggggaggggggagggggatgtttacccggaaaccgaaagggaataacacttaaattatataagaaatactcaagttaattaaaaataataataataataataaaaagaattactcataaaataaagacaagatgatggataaaattaaaaaaacaaaaaaaacaaaaaaaaaccaaaatggaaacatgaaaatgctcactacttacaatagtgctttatgtaataagcaaatgactgcatttgacacgagttataatttattaaccccttagttagactacttgtacacatggtgattattaatccacaattattctttttcactaaaatccttatattttattctttgagattataatataatcacacaaattccctcttccctgtcatctcttcaaaaccttccatatagtcctccatgctgtcttttgaacgttatggcttcttttttatattcttgttttatattatatatatataatatatattataatatatatcatactatatatattcctcaggactgaccaatccatattggataaccaattggtgtgctcgtctcagggaaagaccatttccccaccatcagcattctcggtttccagtagttcattgtctagaatggagactgtgtgtgctttccccgtccactttagctgctgtgtttcagctcctcttgaggcagttatgttggtgagacctcatctgtgcggcttccaacattcctcagagacacagtgagttacacagtgtcacctgatcctctaactcccaccatctttcctgctgtcttctccagggtttcctgaacctcagcaggagcaggggttgtactgtagacacgcccaccttcactaggatccacagctcctcactttgatttgctgtggttttctgcaatggcttccatgtcctagtaaagtcatggagaccccataaccacgctgtactaaaccagacaatccctagctgcattctaagttcttgtccttatcccatacatgtgcatttagagagtctgcttattttgctcattatagaacgagtcaatcattctctttgagttgtaaaagctt

SEQ ID NO: 3289 - DNA, 8048 bp, Rattus norvegicus; identical to SEQ ID NO: 3288
  misc_feature (1)..(8048): n=a, c, g or t
  ref <308>: DATABASE ACCESSION NUMBER: EMBL / M13100
  ref <309>: DATABASE ENTRY DATE: 2000-03-04

SEQ ID NO: 3290 - DNA, 8048 bp, Rattus norvegicus; identical to SEQ ID NO: 3288
  misc_feature (1)..(8048): n=a, c, g or t
  ref <308>: DATABASE ACCESSION NUMBER: EMBL / M13100
  ref <309>: DATABASE ENTRY DATE: 2000-03-04

SEQ ID NO: 3291 - DNA, 8048 bp, Rattus norvegicus; identical to SEQ ID NO: 3288
  misc_feature (1)..(8048): n=a, c, g or t
  ref <308>: DATABASE ACCESSION NUMBER: EMBL / M13100
  ref <309>: DATABASE ENTRY DATE: 2000-03-04

SEQ ID NO: 3292 - DNA, 8048 bp, Rattus norvegicus; identical to SEQ ID NO: 3288
  misc_feature (1)..(8048): n=a, c, g or t
  ref <308>: DATABASE ACCESSION NUMBER: EMBL / M13100
  ref <309>: DATABASE ENTRY DATE: 2000-03-04

SEQ ID NO: 3293 - DNA, 8048 bp, Rattus norvegicus; identical to SEQ ID NO: 3288
  misc_feature (1)..(8048): n=a, c, g or t
  ref <308>: DATABASE ACCESSION NUMBER: EMBL / M13100
  ref <309>: DATABASE ENTRY DATE: 2000-03-04

SEQ ID NO: 3294 - DNA, 8048 bp, Rattus norvegicus; identical to SEQ ID NO: 3288
  misc_feature (1)..(8048): n=a, c, g or t
  ref <308>: DATABASE ACCESSION NUMBER: EMBL / M13100
  ref <309>: DATABASE ENTRY DATE: 2000-03-04

SEQ ID NO: 3295 - DNA, 8048 bp, Rattus norvegicus; identical to SEQ ID NO: 3288
  misc_feature (1)..(8048): n=a, c, g or t
  ref <308>: DATABASE ACCESSION NUMBER: EMBL / M13100
  ref <309>: DATABASE ENTRY DATE: 2000-03-04

SEQ ID NO: 3296 - DNA, 8048 bp, Rattus norvegicus; identical to SEQ ID NO: 3288
  misc_feature (1)..(8048): n=a, c, g or t
  ref <308>: DATABASE ACCESSION NUMBER: EMBL / M13100
  ref <309>: DATABASE ENTRY DATE: 2000-03-04

SEQ ID NO: 3297 - DNA, 8048 bp, Rattus norvegicus; identical to SEQ ID NO: 3288
  misc_feature (1)..(8048): n=a, c, g or t
  ref <308>: DATABASE ACCESSION NUMBER: EMBL / M13100
  ref <309>: DATABASE ENTRY DATE: 2000-03-04

SEQ ID NO: 3298 - DNA, 8048 bp, Rattus norvegicus; identical to SEQ ID NO: 3288
  misc_feature (1)..(8048): n=a, c, g or t
  ref <308>: DATABASE ACCESSION NUMBER: EMBL / M13100
  ref <309>: DATABASE ENTRY DATE: 2000-03-04

SEQ ID NO: 3299 - DNA, 8048 bp, Rattus norvegicus; identical to SEQ ID NO: 3288
  misc_feature (1)..(8048): n=a, c, g or t
  ref <308>: DATABASE ACCESSION NUMBER: EMBL / M13100
  ref <309>: DATABASE ENTRY DATE: 2000-03-04

SEQ ID NO: 3300 - DNA, 8048 bp, Rattus norvegicus; identical to SEQ ID NO: 3288
  misc_feature (1)..(8048): n=a, c, g or t
  ref <308>: DATABASE ACCESSION NUMBER: EMBL / M13100
  ref <309>: DATABASE ENTRY DATE: 2000-03-04

SEQ ID NO: 3301 - DNA, 8048 bp, Rattus norvegicus; identical to SEQ ID NO: 3288
  misc_feature (1)..(8048): n=a, c, g or t
  ref <308>: DATABASE ACCESSION NUMBER: EMBL / M13100
  ref <309>: DATABASE ENTRY DATE: 2000-03-04

SEQ ID NO: 3302 - DNA, 8048 bp, Rattus norvegicus; identical to SEQ ID NO: 3288
  misc_feature (1)..(8048): n=a, c, g or t
  ref <308>: DATABASE ACCESSION NUMBER: EMBL / M13100
  ref <309>: DATABASE ENTRY DATE: 2000-03-04

SEQ ID NO: 3303 - DNA, 8048 bp, Rattus norvegicus; identical to SEQ ID NO: 3288
  misc_feature (1)..(8048): n=a, c, g or t
  ref <308>: DATABASE ACCESSION NUMBER: EMBL / M13100
  ref <309>: DATABASE ENTRY DATE: 2000-03-04

SEQ ID NO: 3304 - DNA, 8048 bp, Rattus norvegicus; identical to SEQ ID NO: 3288
  misc_feature (1)..(8048): n=a, c, g or t
  ref <308>: DATABASE ACCESSION NUMBER: EMBL / M13100
  ref <309>: DATABASE ENTRY DATE: 2000-03-04

SEQ ID NO: 3305 - DNA, 8048 bp, Rattus norvegicus; identical to SEQ ID NO: 3288
  misc_feature (1)..(8048): n=a, c, g or t
  ref <308>: DATABASE ACCESSION NUMBER: EMBL / M13100
  ref <309>: DATABASE ENTRY DATE: 2000-03-04

SEQ ID NO: 3306 - DNA, 2472 bp, Rattus norvegicus
  ref <308>: DATABASE ACCESSION NUMBER: EMBL / M13962
  ref <309>: DATABASE ENTRY DATE: 2000-03-04
ccccgcatgtccccaagacggagtgtgtgttggttcgtactgggccagctgctgtgcagctgcgccgtggcgctgcagggcgggatgctgttcccgaaggagaccccttcgcgggaactcaaggtgctggacggcctgtggagcttccgtgccgattactcgaacaatcggttgcagggcttcgagaagcagtggtaccggcagccgctacgggagtcgggcccaaccttggacatgccggtcccttccagcttcaatgacatcacccaagaagcagagcttcggaacttcattggctgggtgtggtatgaacgggaagcagtgcttccacagcgatggacccaggacaccgacaggagagtggtgttgagaatcaacagcgcccattactatgcagttgtgtgggtgaatgggattcatgtggtggaacatgagggaggtcacctcccctttgaggctgacatcaccaagctggtccagagtgggcccctgaccaccttccgggtcaccatcgccatcaacaacacactgaccccttatacccttccaccggggaccattgtctacaagactgatccttccatgtatcccaagggttacttcgtccaggacataagcttcgacttcttcaactatgcggggctgcaccggtctgtggtcctgtacaccacccctaccacctatatcgatgatatcactgtgaccactgacgtggaccgggacgttgggctggtgaactactggatttctgtccagggcagtgaccatttccagctagaagtgcgtcttctggatgaggatggcaaaattgtggcccgtggaacagggaatgagggtcaacttaaggtgccgcgtgcccacctctggtggccttacctgatgcatgagcatccagcctacctgtactccttggaggtgacgatgacaacacctgagtctgtgtctgacttctataccctccctgtcgggattcgaacagtggctgtcacaaagagcaagttcctcataaatgggaagcctttctacttccaaggcgtcaacaagcatgaggattcagatatccgagggagaggcttcgactggcctctgctgataaaggatttcaacctcctccgttggctcggggcaaattcctttcgtaccagccactatccctactcggaggaggtacttcagctctgtgaccgatatggaattgtggtcatcgatgagtgtcccggtgtgggcatcgtgctgccccagagttttggcaacgtgtctcttcggcaccacctagaggtgatggacgagctggtgcgcagggacaaaaatcaccctgcggtcgtgatgtggtctgtggccaatgagcctgtctcttctctgaaacctgccggatattacttcaagacgctgatcgcccacaccaaagccctggaccccacccgtcctgtgacctttgtgagcaataccagatatgacgcagacatgggggccccgtacgtggacgtgatttgtgtgaacagttacttatcctggtatcatgactacgggcatctggaggtgattcagctgcagctgactagccagtttgagaactggtataagatgtaccagaagccaattatccagagcgagtatggagcagacgccgtctcggggcttcatgaggatccacctcgcatgttcagtgaggagtaccagacagctctcctggagaattatcatttgatcctggatgagaaacgaaaagaatatgtcatcggagagctcatctggaattttgctgacttcatgacgaaccagtcaccactgagagtaacaggaaacaagaaggggatcttcactcgacagagaaaccccaagatggcagccttcattttgcgagagagatactggaggattgccaacgaaaccagaggttacggttcagtgccgaggacccagtgtatgggaagcagaccgttcacattctaaagctacgactacctcaccgcagacagggcctgatgaagtgaaaggtattctctcagcagaagagtttttcctctggagtttgtgaaccaacacaaggaggactttagaagtgacatggaagttttccttgtgtggggataatgacttgcagtgccttaggctcagtaatgtgtcctgctgagaagtgtcccaggtcatttctgtcaggttttttttggccttggctttgtgtactcttgaaaacctactgtgtgaatactcacactaagagctcctggttaccggctaagggacggctcacaatttaagaatactgactgttctaccaggggttccagattcgattcctagcacccacgtggtcgttaactatgagctgttgccccatttctcaggtgatgtacgaacatacatgtggggggaggggaatagtcatacgtgtaaaatgaaaataaatctaaataaaactgttttctttcattataaaaaaaaaaaaaaaaaaccaactaatagaaacgt

SEQ ID NO: 3307 - protein, 648 aa, Rattus norvegicus
  ref <308>: DATABASE ACCESSION NUMBER: SWISS-Prot / P06760
  ref <309>: DATABASE ENTRY DATE: 2001-10-16
MSPRRSVCWFVLGQLLCSCAVALQGGMLFPKETPSRELKVLDGLWSFRADYSNNRLQGFEKQWYRQPLRESGPTLDMPVPSSFNDITQEAELRNFIGWVWYEREAVLPQRWTQDTDRRVVLRINSAHYYAVVWVNGIHVVEHEGGHLPFEADITKLVQSGPLTTFRVTIAINNTLTPYTLPPGTIVYKTDPSMYPKGYFVQDISFDFFNYAGLHRSVVLYTTPTTYIDDITVTTDVDRDVGLVNYWISVQGSDHFQLEVRLLDEDGKIVARGTGNEGQLKVPRAHLWWPYLMHEHPAYLYSLEVTMTTPESVSDFYTLPVGIRTVAVTKSKFLINGKPFYFQGVNKHEDSDIRGRGFDWPLLIKDFNLLRWLGANSFRTSHYPYSEEVLQLCDRYGIVVIDECPGVGIVLPQSFGNVSLRHHLEVMDELVRRDKNHPAVVMWSVANEPVSSLKPAGYYFKTLIAHTKALDPTRPVTFVSNTRYDADMGAPYVDVICVNSYLSWYHDYGHLEVIQLQLTSQFENWYKMYQKPIIQSEYGADAVSGLHEDPPRMFSEEYQTALLENYHLILDEKRKEYVIGELIWNFADFMTNQSPLRVTGNKKGIFTRQRNPKMAAFILRERYWRIANETRGYGSVPRTQCMGSRPFTF

SEQ ID NO: 3308 - DNA, 873 bp, Homo sapiens
  ref <308>: DATABASE ACCESSION NUMBER: EMBL / BM019597
  ref <309>: DATABASE ENTRY DATE: 2001-10-31
gcttttggatgcagaaaacaaagtcgtggcgaatgggactgggacccaggccaacttaaggtgccaggtgtcagcctctggtggccgtacctgatgcacgaacgccctgcctatctgtattcattggaggtgcagctgactgcacagacgtcactggggcctgtgtctgacttctacacactccctgtggggatccgcactgtggctgtcaccaagagccagttcctcatcaatgggaaacctttctatttccacggtgtcaacaagcatgaggatgcggacatccgagggaagggcttcgactggccgctgctggtgaacggacttcaacctgcttcgctggcttggtgccaacgctttccgtaccagccactacccctatgcagaggaagtgatgcagatgtgtgaccgctatgggattgtggtcatcgatgagtgtcccggcgtgggcctggcgctgccgcagttcttcaacaacgtttctctgcatcaccacatgcaggtgatggaagaagtggtgcgtagggacaagaaccacccgcggtcgtgatgtggtctgtggccacgagcctgcgtcccacctagaatctgctggctactacttgaagctccgtatgtggatgtgatctgtttgaacagctactactcttggtatcacgactacgggcacctggagttgattcagctgcagctggccacccagtttgagaactggtataagaagtatcagaagcccattatccagagcgagtatggagcagaccacgatttgcagggtttcaccaggatccacctcctgatgtcacttgaaggagtaccaggaaaagtctgctaaagcagtacatctgggtctggattcacacgcgtaaatac

SEQ ID NO: 3309 - protein, 651 aa, Homo sapiens
  ref <308>: DATABASE ACCESSION NUMBER: SWISS-Prot / P08236
  ref <309>: DATABASE ENTRY DATE: 2002-06-15
MARGSAVAWAALGPLLWGCALGLQGGMLYPQESPSRECKELDGLWSFRADFSDNRRRGFEEQWYRRPLWESGPTVDMPVPSSFNDISQDWRLRHFVGWVWYEREVILPERWTQDLRTRVVLRIGSAHSYAIVWVNGVDTLEHEGGYLPFEADISNLVQVGPLPSRLRITIAINNTLTPTTLPPGTIQYLTDTSKYPKGYFVQNTYFDFFNYAGLQRSVLLYTTPTTYIDDITVTTSVEQDSGLVNYQISVKGSNLFKLEVRLLDAENKVVANGTGTQGQLKVPGVSLWWPYLMHERPAYLYSLEVQLTAQTSLGPVSDFYTLPVGIRTVAVTKSQFLINGKPFYFHGVNKHEDADIRGKGFDWPLLVKDFNLLRWLGANAFRTSHYPYAEEVMQMCDRYGIVVIDECPGVGLALPQFFNNVSLHHHMQVMEEVVRRDKNHPAVVMWSVANEPASHLESAGYYLKMVIAHTKSLDPSRPVTFVSNSNYAADKGAPYVDVICLNSYYSWYHDYGHLELIQLQLATQFENWYKKYQKPIIQSEYGAETIAGFHQDPPLMFTEEYQKSLLEQYHLGLDQKRRKYVVGELIWNFADFMTEQSPTRVLGNKKGIFTRQRQPKSAAFLLRERYWKIANETRYPHSVAKSQCLENSPFT

SEQ ID NO: 3310 - DNA, 6322 bp, Rattus norvegicus
  misc_feature (1)..(6322): n=a, c, g or t
  ref <308>: DATABASE ACCESSION NUMBER: EMBL / M14053
  ref <309>: DATABASE ENTRY DATE: 2000-03-04
gacgctgcgggggtgggggacctncggcggcacggagtccccccccgggctcacattaatatttgccaatggactccaaagaatccttagctccccctggtagagacgaagtccctggcagtttgcttggccaagggagggggagcgtaatggacttttataaaagcctgaggggaggagctacagtcaaggtttctgcatcttcgccctcagtggctgctgcttctcaggcagattccaagcagcagaggattctccttgatttctcgaaaggctccacaagcaatgtgcagcagcgacagcagcagcagcagcagcagcagcagcagcagcagcagcagcagcagcagcagcagccaggcttatccaaagccgtttcactgtccatggggctgtatatgggagagacagaaacaaaagtgatggggaatgacttgggctacccacagcagggccaacttggcctttcctctggggaaacagactttcggcttctggaagaaagcattgcaaacctcaataggtcgaccagcgttccagagaaccccaagagttcaacgtctgcaactgggtgtgctaccccgacagagaaggagtttcccaaaactcactcggatgcatcttcagaacagcaaaatcgaaaaagccagaccggcaccaacggaggcagtgtgaaattgtatcccacagaccaaagcacctttgacctcttgaaggatttggagttttccgctgggtccccaagtaaagacacaaacgagagtccctggagatcagatctgttgatagatgaaaacttgctttctcctttggcgggagaagatgatccattccttctcgaagggaacacgaatgaggattgtaagcctcttattttaccggacactaaacctaaaattaaggatactggagatacaatcttatcaagtcccagcagtgtggcactaccccaagtgaaaacagaaaaagatgatttcattgaactttgcacccccggggtaattaagcaagagaaactgggcccagtttattgtcaggcaagcttttctgggacaaatataattggtaataaaatgtctgccatttctgttcatggtgtgagtacctctggaggacagatgtaccactatgacatgaatacagcatccctttctcagcagcaggatcagaagcctgtttttaatgtcattccaccaattcctgttggttctgaaaactggaataggtgccaaggctccggagaggacagcctgacttccttgggggctctgaacttcccaggccggtcagtgttttctaatgggtactcaagccctggaatgagaccagatgtaagctctcctccatccagctcgtcagcagccacgggaccacctcccaagctctgcctggtgtgctccgatgaagcttcaggatgtcattacggggtgctgacatgtggaagctgcaaagtattctttaaaagagcagtggaaggacagcacaattacctttgtgctggaagaaacgattgcatcattgataaaattcgaaggaaaaactgcccagcatgccgctatcggaaatgtcttcaggctggaatgaaccttgaagctcgaaaaacaaagaaaaaaatcaaagggattcagcaagccactgcaggagtctcacaagacacttcggaaaatcctaacaaaacaatagttcctgcagcattaccacagctcacccctaccttggtgtcactgctggaggtgattgaacccgaggtgttgtatgcaggatatgatagctctgttccagattcagcatggagaattatgaccacactcaacatgttaggtgggcgtcaagtgattgcagcagtgaaatgggcaaaggcgatactaggcttgagaaacttacacctcgatgaccaaatgaccctgctacagtactcatggatgtttctcatggcatttgccttgggttggagatcatacagacaatcaagcggaaacctgctctgctttgctcctgatctgattattaatgagcagagaatgtctctaccctgcatgtatgaccaatgtaaacacatgctgtttgtctcctctgaattacaaagattgcaggtatcctatgaagagtatctctgtatgaaaaccttactgcttctctcctcagttcctaaggaaggtctgaagagccaagagttatttgatgagattcgaatgacttatatcaaagagctaggaaaagccatcgtcaaaagggaagggaactccagtcagaactggcaacggttttaccaactgacaaagcttctggactccatgcatgaggtggttgagaatctccttacctactgcttccagacatttttggataagaccatgagtattgaattcccagagatgttagctgaaatcatcactaatcagataccaaaatattcaaatggaaatatcaaaaagcttctgtttcatcaaaaatgactgccttactaagaaaggttgccttaaagaaagttgaatttatagcttttactgtacaaacttatcaatttgtcttgtagatgttttgttgttctttttgtttctgtcttgttttgttttaaacacgcagtacatgtggtttatagagggccaagacttggcgacagaagcagttgagtcaacactctgaagtgatgacacagcacacagtgaagtgtattgttggtgtatcacagaaactaacagttacgtggaggcatggccactgtcagagagggaccgcacctaaaccaccgtgcccaagtccatgtggttcaactttctgactcagaactttacagttggctgggtaaaactttctagactttctgttggtgtatttttcccatgtatagttaggatggtattttgatttatgcatgcaaacctgaaaaaagtttacaagtgtatatcagaaaagggaagttgtgccttttatagctattactgtctggttttaacaatttcctttatattcagtgaactatgcttgctcgtttctcttcaataatttttgtattccagttattgtacagctgtttaagatgggcagctgcttcacagctttcctagacgctaacattaatttccgtgtgaaaatgggtcggtgcttctaccctgttggcaccagctatcagaagaccacagaaattgactcagatctccagtattcttgttaaaaagctcttactctgtatatatctgcttccatggagaattacataggctgagcagattacataggctgagcagattaaccgtcctaactggtgtagagcacctagtccagtgaccttctgggtaaaccgtggatgatggttacagaagactggtgggaaaacagtaactaccaaaaggcccctttccatctaatgcaccatctcttcaatggggagatagcaaccaagcccgtaaatcagctctttcaggaccttctggagtggtttgcataacattttaaaatgtattattccagatagccagctctgataaagccgagagattgtttaatcagaccaagtaacttctctcattaaacttacccccaactaaatcgctaatacagcaagaatggctagacacccattttcacatctcacccgcaccgattggtctagctctcatggtggtcaggagaatcagctactgatttttgttacttagaatnttcaggactcgcatttntccnnctacacatccctacatgtgccatagaatttaacacaagtcctgtgaacttcttcacattgagaattatcattttaaacaaaacagaagcagtagtagccctttctntgtgcaccttaccnnctttctntgactcaaagcttaatatgcttactaagccacaagaaatcngatttcnacttaaaggcgccaaattatttgtgtaatagaaaaactgaaaatctaatattaaaaatatgaaacttctaatatatttttatatttagttatagtttcgatatatatcatatcggtattcactgatcttgggaaagggaaagggctactgcagctttacatgcaatttattaactgactgtaaaatagctgtatagtaataagaatgacttttagtgagattgctttatcatgacatgttatatatttttcgtaggggtcaaagaaatattgatggatatgatagcctatatgatttaatngtatataaaagcatncaaacaggccttaacgcgtcttggaaannaaaatacctttgttctaagctagggaagggagcnggagannggccccgtgtgtatnggaggttccgaggctcggatnnaagagatcnanaggggatctaattccntacctccatctaattacctcaccacccatgatcctgtcagtgnaggnnnggttattaaatcccccgttatactaatataaatagganagaagggtggcgctcacgtctgttccaggcgccgcagtagcagggttattttccatgcagcctcccgacaaggttagcagagggaggctttggcaagtttggcgtggcgtgcatagaggcaccagcaacatgtaaacctaaagagcccataggaagccaagaatacactaatcctccccacccttcaatagtccatttccaagtaagatgaggacatgcttatgttttctttgaatgcttttagaatgttgttattttcagtattttgcagaaattatttaataaaaaagtataatttgaattctctctaaaagggattgttcagtttgtaatggtttaaattggtctcaaagtactttaagataattgtaacccagctggatgtgaaatttatggtgcctaagaaataccacttgaatattatcaagacagtgttaagttttaaaatgagcttctcaaaaatagattattgtacatttatggaatgttatatggttaaacccaaaaaagcacatcacacataaatctgctttcagcttggctttcaaaaatagagctccaaaaacgaaaaaggagaagaaaaagtatatatatgcgttgttattaacagaaggcaacagacattcataaaactactaccgaagctttccttgaagcgtataaagagccatgctcctttagtatgtggggaagaagagagccgtcatagtttcgagtacagagagaagatgcggtactgtctccgtgtgtggcttcataccgttcctaactatttaggtttataataacttcagtgagactcggtgacatgcctgtatgactcatgaccgatcttgaaagatatctttaattactggtaggacaaaagggacactctggttattttaggccttggcttgggatactgtatatccagaagaaaggagacaggaaacttggggaagggaagggaacctaggaagcactgccttctgtaggaaagaacacaccaataagtgagagtacccaaagggacaaggccacacagtgtggggtctaaggatgagtcagggtgagctctggtgggcatggagaagccagcaactccagtgctacagagcagggcagggcagggatgggacaagatggatgcggatcccagtcccagtagtttgctccctcttatttaccatgggatgaaccatggagtattgatctgtcagcactcaaggatcatggagcttgagattccggttggtcaccccaacggtaagctgagattgaatgtgtttcttatgtgccggtttcagtgttagaaggcgaaacagagtgtacagaagacactgcaaaccggtcagatgaaagtcttctcattcccaaactattttcagtcagcctgctctatcaggactggtgaccagctgctaggacagggtcggcgcttctgtctagaatatgcctgaaaggattttattttctgataaatggctgtatgaaaataccctcctcaataacctgcttaactacatagagatttcagtgtgtcaatattctattttgtatattaaacaaaggctatataatggggacaaatctatattatactgtgtatggcattattaagaagcttttnnannattttttatcacagtaatttttaaatgtgtaaaaaattaaaaattagtgantccngtttaaaaataaaagttgtagttttttattcatgctgaataacctgtagtttaaaaatccgtctttctacctacanagtgaaatgtcagacngtaaaattttgtgtggaaatgtttaacttttatttttctttaaatttgctgtcttggtattaccaaaccacacattgtactgaattggcagtaaatgttagtcagccatttacagcaatgccaaatatggataaacatcataataaaatatctgctttttc

SEQ ID NO: 3311 - protein, 795 aa, Rattus norvegicus
  ref <308>: DATABASE ACCESSION NUMBER: SWISS-Prot / P06536
  ref <309>: DATABASE ENTRY DATE: 2002-06-15
MDSKESLAPPGRDEVPGSLLGQGRGSVMDFYKSLRGGATVKVSASSPSVAAASQADSKQQRILLDFSKGSTSNVQQRQQQQQQQQQQQQQQQQQQQPDLSKAVSLSMGLYMGETETKVMGNDLGYPQQGQLGLSSGETDFRLLEESIANLNRSTSVPENPKSSTSATGCATPTEKEFPKTHSDASSEQQNRKSQTGTNGGSVKLYPTDQSTFDLLKDLEFSAGSPSKDTNESPWRSDLLIDENLLSPLAGEDDPFLLEGNTNEDCKPLILPDTKPKIKDTGDTILSSPSSVALPQVKTEKDDFIELCTPGVIKQEKLGPVYCQASFSGTNIIGNKMSAISVHGVSTSGGQMYHYDMNTASLSQQQDQKPVFNVIPPIPVGSENWNRCQGSGEDSLTSLGALNFPGRSVFSNGYSSPGMRPDVSSPPSSSSAATGPPPKLCLVCSDEASGCHYGVLTCGSCKVFFKRAVEGQHNYLCAGRNDCIIDKIRRKNCPACRYRKCLQAGMNLEARKTKKKIKGIQQATAGVSQDTSENPNKTIVPAALPQLTPTLVSLLEVIEPEVLYAGYDSSVPDSAWRIMTTLNMLGGRQVIAAVKWAKAILGLRNLHLDDQMTLLQYSWMFLMAFALGWRSYRQSSGNLLCFAPDLIINEQRMSLPCMYDQCKHMLFVSSELQRLQVSYEEYLCMKTLLLLSSVPKEGLKSQELFDEIRMTYIKELGKAIVKREGNSSQNWQRFYQLTKLLDSMHEVVENLLTYCFQTFLDKTMSIEFPEMLAEIITNQIPKYSNGNIKKLLFHQK

SEQ ID NO: 3312 - DNA, 555 bp, Homo sapiens
  misc_feature (1)..(555): n=a, c, g or t
  ref <308>: DATABASE ACCESSION NUMBER: EMBL / AI472273
  ref <309>: DATABASE ENTRY DATE: 2000-03-03
ttttttttttttttttttttttttttttttttttaaacgggagtcactggttttaatttttacccattttaaaattcctgggataaaaaataatgaaaaagctttttaataatgccatacccagtataatataaattggcccccattatatagcatttaatatccaaaataaaattttgccccccttgaatctatttgtagttaagcaagttatttggggggggttttttcataccccctttcatcaaaaaataaaatcctttcaaacattttttagagagaagcaaatcctttcctgaaaacctggtcactaatcctggggggaccaggttgcttgaaaatagtctgggaaattacaaaactccccccaaggggtttaaagggtcctccttacccttttatttcccttttgacactaaaaccagacacacccccaaaaaaaccctttcccctacagttacagtnagggagtgaccagccaagatggaaatctcactgaaggctaccatggtttttggagtttgacagacaatgtatgtataacaatattttcat

SEQ ID NO: 3313 - protein, 777 aa, Homo sapiens
  ref <308>: DATABASE ACCESSION NUMBER: Refseq / NP_000167
  ref <309>: DATABASE ENTRY DATE: 2002-11-05
MDSKESLTPGREENPSSVLAQERGDVMDFYKTLRGGATVKVSASSPSLAVASQSDSKQRRLLVDFPKGSVSNAQQPDLSKAVSLSMGLYMGETETKVMGNDLGFPQQGQISLSSGETDLKLLEESIANLNRSTSVPENPKSSASTAVSAAPTEKEFPKTHSDVSSEQQHLKGQTGTNGGNVKLYTTDQSTFDILQDLEFSSGSPGKETNESPWRSDLLIDENCLLSPLAGEDDSFLLEGNSNEDCKPLILPDTKPKIKDNGDLVLSSPSNVTLPQVKTEKEDFIELCTPGVIKQEKLGTVYCQASFPGANIIGNKMSAISVHGVSTSGGQMYHYDMNTASLSQQQDQKPIFNVIPPIPVGSENWNRCQGSGDDNLTSLGTLNFPGRTVFSNGYSSPSMRPDVSSPPSSSSTATTGPPPKLCLVCSDEASGCHYGVLTCGSCKVFFKRAVEGQHNYLCAGRNDCIIDKIRRKNCPACRYRKCLQAGMNLEARKTKKKIKGIQQATTGVSQETSENPGNKTIVPATLPQLTPTLVSLLEVIEPEVLYAGYDSSVPDSTWRIMTTLNMLGGRQVIAAVKWAKAIPGFRNLHLDDQMTLLQYSWMFLMAFALGWRSYRQSSANLLCFAPDLIINEQRMTLPCMYDQCKHMLYVSSELHRLQVSYEEYLCMKTLLLLSSVPKDGLKSQELFDEIRMTYIKELGKAIVKREGNSSQNWQRFYQLTKLLDSMHEVVENLLNYCFQTFLDKTMSIEFPEMLAEIITNQIPKYSNGNIKKLLFHQK

SEQ ID NO: 3314 - DNA, 1457 bp, Rattus norvegicus
  ref <308>: DATABASE ACCESSION NUMBER: EMBL / M14656
  ref <309>: DATABASE ENTRY DATE: 2000-03-04
gcaagcctcagcatccttggctttgcagtctcctgcggcaagcattctcgaggaagccagccaaggaccaactacaaccatgagactggcagtggtttgcctttgcctgttcggccttgcctcctgtctcccggtgaaagtggctgagtttggcagctcagaggagaaggcgcattacagcaaacactcagatgctgtagccacttggctgaagcctgacccatctcagaagcagaatcttctagccccacagaattctgtgtcctctgaagaaacggatgactttaagcaagaaactcttccaagcaactccaatgaaagccatgaccacatggacgatgatgacgacgacgatgacgacggagaccatgcagagagcgaggattctgtgaactcggatgaatctgacgaatctcaccattccgatgaatctgatgagtccttcactgccagcacacaagcagacgttttgactccaatcgcccccacagtcgatgtccctgacggccgaggtgatagcttggcttacggactgaggtcaaagtccaggagtttccctgtttctgatgaacagtatcccgatgccacagatgaggacctcacctcccgcatgaagagccaggagtccgatgaggctatcaaggtcatcccagttgcccagcgtctgagcgtgccctctgatcaggacagcaacgggaagaccagccatgagtcaagtcagctggatgaaccaagcgtggaaacacacagcctggagcagtccaaggagtataagcagagggccagccacgagagcactgagcagtcggatgcgatcgatagtgccgagaagccggatgcaatcgatagtgcagagcggtcggatgctatcgacagtcaggcgagttccaaagccagcctggaacatcagagccacgagtttcacagccatgaggacaagctagtcctagaccctaagagtaaggaagatgataggtatctgaaattccgcatttctcatgaattagagagttcatcttctgaggtcaattaaagaagaggcaaaaccacagttccttactttgctttaaataaaacaaaaagtaaattccaacaagcaggaatactaactgcttgtttctcagttcagtggatacatgtatgtggagaaagaaatagatagtgttttgggccctgagcttagttcgttgtttcatgcagacaccactgtaacctagaagtttcagcatttcgcttctgttctttctgtgcaagaaatgcaaatggccactgcattttaatgattgctattcttttatgaataaaatgtatgtagaggcaggcaaacttacaggaacagcaaaattaaaagagaaactataatagtctgtgtcactataatcttttggttttataattagtgtatattttgttgtgattatttttgttggtgtgaataaatcttgtatcttgaatgt

SEQ ID NO: 3315 - protein, 317 aa, Rattus norvegicus
  ref <308>: DATABASE ACCESSION NUMBER: SWISS-Prot / P08721
  ref <309>: DATABASE ENTRY DATE: 2002-06-15
MRLAVVCFCLFGLASCLPVKVAEFGSSEEKAHYSKHSDAVATWLKPDPSQKQNLLAPQNSVSSEETDDFKQETLPSNSNESHDHMDDDDDDDDDGDHAESEDSVNSDESDESHHSDESDESFTASTQADVLTPIAPTVDVPDGRGDSLAYGLRSKSRSFPVSDEQYPDATDEDLTSRMKSQESDEAIKVIPVAQRLSVPSDQDSNGKTSHESSQLDEPSVETHSLEQSKEYKQRASHESTEQSDAIDSAEKPDAIDSAERSDAIDSQASSKASLEHQSHEFHSHEDKLVLDPKSKEDDRYLKFRISHELESSSSEVN

SEQ ID NO: 3316 - DNA, 1424 bp, Homo sapiens
  ref <308>: DATABASE ACCESSION NUMBER: EMBL / X13694
  ref <309>: DATABASE ENTRY DATE: 1995-03-22
gaccagactcgtctcaggccagttgcagccttctcagccaaacgccgaccaaggaaaactcactaccatgagaattgcagtgatttgcttttgcctcctaggcatcacctgtgccataccagttaaacaggctgattctggaagttctgaggaaaagcagctttacaacaaatacccagatgctgtggccacatggctaaaccctgacccatctcagaagcagaatctcctagccccacagaatgctgtgtcctctgaagaaaccaatgactttaaacaagagacccttccaagtaagtccaacgaaagccatgaccacatggatgatatggatgatgaagatgatgatgaccatgtggacagccaggactccattgactcgaacgactctgatgatgtagatgacactgatgattctcaccagtctgatgagtctcaccattctgatgaatctgatgaactggtcactgattttcccacggacctgccagcaaccgaagttttcactccagttgtccccacagtagacacatatgatggccgaggtgatagtgtggtttatggactgaggtcaaaatctaagaagtttcgcagacctgacatccagtaccctgatgctacagacgaggacatcacctcacacatggaaagcgaggagttgaatggtgcatacaaggccatccccgttgcccaggacctgaacgcgccttctgattgggacagccgtgggaaggacagttatgaaacgagtcagctggatgaccagagtgctgaaacccacagccacaagcagtccagattatataagcggaaagccaatgatgagagcaatgagcattccgatgtgattgatagtcaggaactttccaaagtcagccgtgaattccacagccatgaatttcacagccatgaagatatgctggttgtagaccccaaaagtaaggaagaagataaacacctgaaatttcgtatttctcatgaattagatagtgcatcttctgaggtcaattaaaaggagaaaaaatacaatttctcactttgcatttagtcaaaagaaaaaatgctttatagcaaaatgaaagagaacatgaaatgcttctttctcagtttattggttgaatgtgtatctatttgagtctggaaataactaatgtgtttgataattagtttagtttgtggcttcatggaaactccctgtaaactaaaagcttcagggttatgtctatgttcattctatagaagaaatgcaaactatcactgtattttaatatttgttattctctcatgaatagaaatttatgtagaagcaaacaaaatacttttacccacttaaaaagagaatataacattttatgtcactataatcttttgttttttaagttagtgtatattttgttgtgattatctttttgtggtgtgaataa

SEQ ID NO: 3317 - protein, 314 aa, Homo sapiens
  ref <308>: DATABASE ACCESSION NUMBER: SWISS-Prot / P10451
  ref <309>: DATABASE ENTRY DATE: 2002-06-15
MRIAVICFCLLGITCAIPVKQADSGSSEEKQLYNKYPDAVATWLNPDPSQKQNLLAPQNAVSSEETNDFKQETLPSKSNESHDHMDDMDDEDDDDHVDSQDSIDSNDSDDVDDTDDSHQSDESHHSDESDELVTDFPTDLPATEVFTPVVPTVDTYDGRGDSVVYGLRSKSKKFRRPDIQYPDATDEDITSHMESEELNGAYKAIPVAQDLNAPSDWDSRGKDSYETSQLDDQSAETHSHKQSRLYKRKANDESNEHSDVIDSQELSKVSREFHSHEFHSHEDMLVVDPKSKEEDKHLKFRISHELDSASSEVN

SEQ ID NO: 3318 - DNA, 657 bp, Rattus norvegicus
  ref <308>: DATABASE ACCESSION NUMBER: EMBL / M15474
  ref <309>: DATABASE ENTRY DATE: 1994-10-09
gaaggctggcccatgtcagccttgagtctaggcagtagttgctgaggaaggcctcccctaggtgcagctggcagtgggtttcacatggcttcctaccggcttgcatgtcaaacacactgctatcatctgtttggttttcttcctttttcccttttccattgctccacttcttctctcccaccttttatttcaccacagataagtttctttgcttctctcctcccaagactccttcatcaagccggatgtcccacctctctgagctctgcatctgtctgctctccagctgacccagtttctttctagtgcccacccaccctagggccagcacagaccgtgctttcttattgtcacagaggtgatcctcccagtgtaaaataaacactgtacgccagtcctgtttgctattcctttgcccctcattcattgacatttccgtctcagcgcccaataaaactacagttctgctttgtgcatctaagggtactttttttttttttttttacattatatacccccacgagtttttaatcgcagtagttccgtgtacaactttttaaaatgctacccacatgtgcccctctgagttgtggttcctgtgctggagtgaggcccaagtagctatggctttaggaattgtgacagttctgacatgca

SEQ ID NO: 3319 - protein, 284 aa, Rattus norvegicus
  ref <308>: DATABASE ACCESSION NUMBER: SWISS-Prot / AAA21801
  ref <309>: DATABASE ENTRY DATE: 2000-07-04
MDAIKKKMQMLKLDKENALDRAEQAEADKKAAEDRSKQLEDELVSLQKKLKGTEDELDKYSEALKDAQEKLELAEKKATDAEADVASLNRRIQLVEEELDRAQERLATALQKLEEAEKAADESERGMKVIESRAQKDEEKMEIQEIQLKEAKHIAEDADRKYEEVARKLVIIESDLERAEERAELSEGKCAELEEELKTVTNNLKSLEAQAEKYSQKEDKYEEEIKVLSDKLKEAETRAEFAERSVTKLEKSIDDLEDELYAQKLKYKAISEELDHALKDMTSI

SEQ ID NO: 3320 - DNA, 1633 bp, Homo sapiens
  ref <308>: DATABASE ACCESSION NUMBER: Refseq / NM_000366
  ref <309>: DATABASE ENTRY DATE: 2002-04-08
cagaatctccggcagtttttgtacctcaagaagtaagtggaacacctttccctgtcatagttattttcatccagacatctggtggaagcatcagattccttacagatataagagaggcatcatttaaaaggtagaacaggatcgacaaacaaggatttatgtcaggatctctcagcctctgtgttaccgagggcatttctaacagtcttcttactacggcctccgccgaccgcgcgctcgccccgccgctcctgctgcagccccagggcccctcgccgccgccaccatggacgccatcaagaagaagatgcagatgctgaagctcgacaaggagaacgccttggatcgagctgagcaggcggaggccgacaagaaggcggcggaagacaggagcaagcagctggaagatgagctggtgtcactgcaaaagaaactcaagggcaccgaagatgaactggacaaatactctgaggctctcaaagatgcccaggagaagctggagctggcagagaaaaaggccaccgatgctgaagccgacgtagcttctctgaacagacgcatccagctggttgaggaagagttggatcgtgcccaggagcgtctggcaacagctttgcagaagctggaggaagctgagaaggcagcagatgagagtgagagaggcatgaaagtcattgagagtcgagcccaaaaagatgaagaaaaaatggaaattcaggagatccaactgaaagaggcaaagcacattgctgaagatgccgaccgcaaatatgaagaggtggcccgtaagctggtcatcattgagagcgacctggaacgtgcagaggagcgggctgagctctcagaaggccaagtccgacagctggaagaacaattaagaataatggatcagaccttgaaagcattaatggctgcagaggataagtactcgcagaaggaagacagatatgaggaagagatcaaggtcctttccgacaagctgaaggaggctgagactcgggctgagtttgcggagaggtcagtaactaaattggagaaaagcattgatgacttagaagagaaagtggctcatgccaaagaagaaaaccttagtatgcatcagatgctggatcagactttactggagttaaacaacatgtgaaaacctccttagctgcgaccacattctttcattttgttttgttttgttttgtttttaaacacctgcttaccccttaaatgcaatttatttacttttaccactgtcacagaaacatccacaagataccagctaggtcagggggtggggaaaacacatacaaaaagcaagcccatgtcagggcgatcctggttcaaatgtgccatttcccgggttgatgctgccacactttgtagagagtttagcaacacagtgtgcttagtcagcgtaggaatcctcactaaagcaggagaagttccattcaaagtgccaatgatagagtcaacaaggaaggttaatgttggaaacacaatcaggtgtggattggtgctactttgaacaaaaggtccccctgtggtcttttgttcaacattgtacaatgtagaactctgtccaacactaatttattttgtcttgagttttactacaagatgagactatggatcccgcatgcct

SEQ ID NO: 3321 - protein, 284 aa, Homo sapiens
  ref <308>: DATABASE ACCESSION NUMBER: SWISS-Prot / P09493
  ref <309>: DATABASE ENTRY DATE: 2002-06-15
MDAIKKKMQMLKLDKENALDRAEQAEADKKAAEDRSKQLEDELVSLQKKLKGTEDELDKYSEALKDAQEKLELAEKKATDAEADVASLNRRIQLVEEELDRAQERLATALQKLEEAEKAADESERGMKVIESRAQKDEEKMEIQEIQLKEAKHIAEDADRKYEEVARKLVIIESDLERAEERAELSEGKCAELEEELKTVTNNLKSLEAQAEKYSQKEDRYEEEIKVLSDKLKEAETRAEFAERSVTKLEKSIDDLEDELYAQKLKYKAISEELDHALNDMTSI

SEQ ID NO: 3322 - DNA, 657 bp, Rattus norvegicus; identical to SEQ ID NO: 3318
  ref <308>: DATABASE ACCESSION NUMBER: EMBL / M15474
  ref <309>: DATABASE ENTRY DATE: 1994-10-09

SEQ ID NO: 3323 - protein, 284 aa, Rattus norvegicus; identical to SEQ ID NO: 3319
  ref <308>: DATABASE ACCESSION NUMBER: SWISS-Prot / AAA21801
  ref <309>: DATABASE ENTRY DATE: 2000-07-04

SEQ ID NO: 3324 - DNA, 1633 bp, Homo sapiens; identical to SEQ ID NO: 3320
  ref <308>: DATABASE ACCESSION NUMBER: Refseq / NM_000366
  ref <309>: DATABASE ENTRY DATE: 2002-04-08

SEQ ID NO: 3325 - protein, 284 aa, Homo sapiens; identical to SEQ ID NO: 3321
  ref <308>: DATABASE ACCESSION NUMBER: SWISS-Prot / P09493
  ref <309>: DATABASE ENTRY DATE: 2002-06-15

SEQ ID NO: 3326 - DNA, 1346 bp, Rattus norvegicus
  ref <308>: DATABASE ACCESSION NUMBER: EMBL / M15481
  ref <309>: DATABASE ENTRY DATE: 2000-03-04
gaattccgggagacaaccttgtcaagcacctaattgtgccatccgtgcgatgccagccagctccatccaccttacaggagtgaagtcagcgttcatatacgctgtgtggtctggcagctgagatagtgtttcccaaagggactgtggaatgttacctcagcaggcattcatttcgcgtttggaaaatcgtctccaaatgaactttctttccgtgctgggtctgcagaacatttcagaagcggagctagcaatctgcttcaactttttttcccccggtgcttgcagcaggagatgcctgaagggagctgctgcgtggtggtctgaaacatagttcaaggaatagaggtcaactgcctagagcggtgcaggcagggcacaggctggctttgtactctgagtctcaaggtatttcccagtgcctgagccagggggaaggtggggggaggaagggaaggagctgccacttggatcgctattctgggtagccaagacagatagccatacaatggaaattagtggcttcaacttgggggaaaggatggactctaacttcgagctgtgcagttcgcccattgtttgaatggacaaaaggcagtttacccaggctcctagcatacctgcctgggtgtccaaatgtaactagatgctttcacaaaccccacccacaaaacaacacatgttcttaagtcctgggctttgttttcacttcggcctcataatacccactctgacctgctgtgtaaacgacccgggacgtaccaaaatgagcgcacctccaataaagatacacatcatgtcgtcttcacatctcttctacctggcactctgcttgctcacctttaccagctcggccacagccggaccagagaccctttgcggggctgagctggtggacgctcttcagttcgtgtgtggaccaaggggcttttacttcaacaagcccacaggctatggctccagcattcggagggcaccacagacgggcattgtggatgagtgttgcttccggagctgtgatctgaggaggctggagatgtactgtgtccgctgcaagcctacaaagtcagctcgttccatccgggcccagcgccacactgacatgcccaagactcagaaggaagtacacttgaagaacacaagtagaggaagtgcaggaaacaagacctacagaatgtaggaggagcctcccgaggaacagaaaatgccacgtcaccgcaagatcctttgctgcttgagcaacctgcaaaacatcggaacacctgccaaatatcaataatgagttcaataccatttcagagatgggcatttccctcaatgaaatacacaagtaaacattcccggaattc

SEQ ID NO: 3327 - protein, 181 aa, Rattus norvegicus
  ref <308>: DATABASE ACCESSION NUMBER: SWISS-Prot / P08024
  ref <309>: DATABASE ENTRY DATE: 2000-05-30
MGKISSLPTQLFKICLCDFLKIKIHIMSSSHLFYLALCLLTFTSSATAGPETLCGAELVDALQFVCGPRGFYFNKPTGYGSSIRRAPQTGIVDECCFRSCDLRRLEMYCAPLKPTKSARSIRAQRHTDMPKTQKSQPLSTHKKRKLQRRRKGESKAHPGGEQEEGAEATQKIRGDRERRPS

SEQ ID NO: 3328 - DNA, 720 bp, Rattus norvegicus
  ref <308>: DATABASE ACCESSION NUMBER: EMBL / M15523
  ref <309>: DATABASE ENTRY DATE: 2000-03-04
caaggccaggccaagcgcttgggcctggatgagttcaacttcatcaaggtgttaggcaaaggcagctttggcaaggtcatgctggccgagctcaagggtaaggatgaagtctatgctgtgaaggtcttaaagaaggacgtcatcctgcaggatggacaacgtggactgcacgatgacagagaagaggattttggctctggcgcggaaacacccttatctaacccaactctattgctgcttccagaccaaggaccgcctcttcttcgtcaggaatatgtaaacggtggagacctcatgttccagattcagcggtcccgaaaattcgatgagcctcgttccgggttctatgctgccgaggtcacatctgctctcatgtttctccaccaacatggagtgatctacagggatttgaaactggacaacatccttctagatgcagaaggtcactgcaagctggctgactttgggatgtgcaaggaagggattctgaatggcgtgacaactaccaccttctgtgggactcctgactacatagctccagagatcctgcaggagttggagtacggcccctcagtggactggtgggccctgggcgtgctgatgtacgagatgatggccgggcagcccccctttgaagctgacaacgaggacgacttgtttgaatccatccttcacgatgacgttctctaccctgtctggcttagcaaggaggctgtcagc

SEQ ID NO: 3329 - protein, 240 aa, Rattus norvegicus
  ref <308>: DATABASE ACCESSION NUMBER: SWISS-Prot / AAA41877
  ref <309>: DATABASE ENTRY DATE: 2003-02-01
QGQAKRLGLDEFNFIKVLGKGSFGKVMLAELKGKDEVYAVKVLKKDVILQDGQRGLHDDREEDFGSGAETPLSNPTLLLLPDQGPPLLRQEYVNGGDLMFQIQRSRKFDEPRSGFYAAEVTSALMFLHQHGVIYRDLKLDNILLDAEGHCKLADFGMCKEGILNGVTTTTFCGTPDYIAPEILQELEYGPSVDWWALGVLMYEMMAGQPPFEADNEDDLFESILHDDVLYPVWLSKEAVS

SEQ ID NO: 3330 - DNA, 2244 bp, Homo sapiens
  ref <308>: DATABASE ACCESSION NUMBER: Refseq / NM_005400
  ref <309>: DATABASE ENTRY DATE: 2001-12-10
ctccccgccccgaccatggtagtgttcaatggccttcttaagatcaaaatctgcgaggccgtgagcttgaagcccacagcctggtcgctgcgccatgcggtgggaccccggccgcagactttccttctcgacccctacattgccctcaatgtggacgactcgcgcatcggccaaacggccaccaagcagaagaccaacagcccggcctggcacgacgagttcgtcaccgatgtgtgcaacggacgcaagatcgagctggctgtctttcacgatgcccccataggctacgacgacttcgtggccaactgcaccatccagtttgaggagctgctgcagaacgggagccgccacttcgaggactggattgatctggagccagaaggaagagtgtatgtgatcatcgatctctcagggtcgtcgggtgaagcccctaaagacaatgaagagcgtgtgttcagggaacgcatgcggccgaggaagcggcagggggccgtcaggcgcagggtccatcaggtcaacggccacaagttcatggccacctatcttcggcagcccacctactgctcccattgcagagacttcatctggggtgtcataggaaagcagggataccagtgtcaagtctgcacctgcgtggtccacaagcggtgccacgagctcataatcacaaagtgtgctgggttaaagaagcaggagacccccgaccaggtgggctcccagcggttcagcgtcaacatgccccacaagttcggtatccacaactacaaggtccctaccttctgcgatcactgtgggtccctgctctggggactcttgcggcagggtttgcagtgtaaagtctgcaaaatgaatgttcaccgtcgatgtgagaccaacgtggctcccaactgtggagtggatgccagaggaatcgccaaagtactggccgacctgggcgttaccccagacaaaatcaccaacagcggccagagaaggaaaaagctcattgctggtgccgagtccccgcagcctgcttctggaagctcaccatctgaggaagatcgatccaagtcagcacccacctccccttgtgaccaggaaataaaagaacttgagaacaacattcggaaagccttgtcatttgacaaccgaggagaggagcaccgggcagcatcgtctcctgatggccagctgatgagccccggtgagaatggcgaagtccggcaaggccaggccaagcgcctgggcctggatgagttcaacttcatcaaggtgttgggcaaaggcagctttggcaaggtcatgttggcagaactcaagggcaaagatgaagtatatgctgtgaaggtcttaaagaaggacgtcatccttcaggatgatgacgtggactgcacaatgacagagaagaggattttggctctggcacggaaacacccgtaccttacccaactctactgctgcttccagaccaaggaccgcctctttttcgtcatggaatatgtaaatggtggagacctcatgtttcagattcagcgctcccgaaaattcgacgagcctcgttcacggttctatgctgcagaggtcacatcggccctcatgttcctccatcagcatggagtcatctacagggatttgaaactggacaacatccttctggatgcagaaggtcactgcaagctggctgacttcgggatgtgcaaggaagggattctgaatggtgtgacgaccaccacgttctgtgggactcctgactacatagctcctgagatcctgcaggagttggagtatggcccctccgtggactggtgggccctgggggtgctgatgtacgagatgatggctggacagcctccctttgaggccgacaatgaggacgacctatttgagtccatcctccatgacgacgtgctgtacccagtctggctcagcaaggaggctgtcagcatcttgaaagctttcatgacgaagaatccccacaagcgcctgggctgtgtggcatcgcagaatggcgaggacgccatcaagcagcacccattcttcaaagagattgactgggtgctcctggagcagaagaagatcaagccacccttcaaaccacgcattaaaaccaaaagagacgtcaataattttgaccaagactttacccgggaagagccggtactcacccttgtggacgaagcaattgtaaagcagatcaaccaggaggaattcaaaggtttctcctactttggtgaagacctgatgccctgagagcccactgcagtt

SEQ ID NO: 3331 - protein, 737 aa, Homo sapiens
  ref <308>: DATABASE ACCESSION NUMBER: SWISS-Prot / Q02156
  ref <309>: DATABASE ENTRY DATE: 2002-06-15
MVVFNGLLKIKICEAVSLKPTAWSLRHAVGPRPQTFLLDPYIALNVDDSRIGQTATKQKTNSPAWHDEFVTDVCNGRKIELAVFHDAPIGYDDFVANCTIQFEELLQNGSRHFEDWIDLEPEGRVYVIIDLSGSSGEAPKDNEERVFRERMRPRKRQGAVRRRVHQVNGHKFMATYLRQPTYCSHCRDFIWGVIGKQGYQCQVCTCVVHKRCHELIITKCAGLKKQETPDQVGSQRFSVNMPHKFGIHNYKVPTFCDHCGSLLWGLLRQGLQCKVCKMNVHRRCETNVAPNCGVDARGIAKVLADLGVTPDKITNSGQRRKKLIAGAESPQPASGSSPSEEDRSKSAPTSPCDQEIKELENNIRKALSFDNRGEEHRAASSPDGQLMSPGENGEVRQGQAKRLGLDEFNFIKVLGKGSFGKVMLAELKGKDEVYAVKVLKKDVILQDDDVDCTMTEKRILALARKHPYLTQLYCCFQTKDRLFFVMEYVNGGDLMFQIQRSRKFDEPRSRFYAAEVTSALMFLHQHGVIYRDLKLDNILLDAEGHCKLADFGMCKEGILNGVTTTTFCGTPDYIAPEILQELEYGPSVDWWALGVLMYEMMAGQPPFEADNEDDLFESILHDDVLYPVWLSKEAVSILKAFMTKNPHKRLGCVASQNGEDAIKQHPFFKEIDWVLLEQKKIKPPFKPRIKTKRDVNNFDQDFTREEPVLTLVDEAIVKQINQEEFKGFSYFGEDLMP

SEQ ID NO: 3332 - DNA, 805 bp, Rattus norvegicus
  ref <308>: DATABASE ACCESSION NUMBER: EMBL / M15562
  ref <309>: DATABASE ENTRY DATE: 2000-03-04
gtgattccagaggtgactgtactccccaaaagcccggtgaacctgggagagcccaacatcctcatctgtttcattgacaagttctcccctccagcggtcaatgtcacctggcttcggaacggacagcctgtcaccaaaggcgtgtcagagacagtgtttctcccaagggaggaccacctcttccgcaaattccactatctcaccttcctgccctccgtggaagattactatgactgtgaggtggatcactggggtctggaggagcctctgcggaagcactgggagtttgaagagaaaaccctcctcccagaaactaaagagaatgtcctgtgtgttctcgggttgtttgtgggtctggtaggcatcgtcgtcgggattgtgctcatcatcaagggccttcggaaacgcaacgcagtggaacgccaaggagccctgtgagataccgggaggtgatggcttccgtgagagctcatagaagaaatgtgctgtgacagcatctgaggctaccccttctctcagctcttcacctcagcagagacatcttctgcagtttccaacctcaagcctcgcgccagattctctggtctaatgtctggctggggttctccgtctgcttcctgtatctatattctattttccatcatttatagtaattcctctgtggcacatatcacagagctcttcctccgctgcggaactttctaagaatggaggcatcttctgttcacttacggcttgacatttctccaaactgtgttttctctttctctttttcaataaataataaacaccttgggtcctgaat

SEQ ID NO: 3333 - protein, 145 aa, Rattus norvegicus
  ref <308>: DATABASE ACCESSION NUMBER: SWISS-Prot / AAA41609
  ref <309>: DATABASE ENTRY DATE: 2003-02-01
VIPEVTVLPKSPVNLGEPNILICFIDKFSPPAVNVTWLRNGQPVTKGVSETVFLPREDHLFRKFHYLTFLPSVEDYYDCEVDHWGLEEPLRKHWEFEEKTLLPETKENVLCVLGLFVGLVGIVVGIVLIIKGLRKRNAVERQGAL

SEQ ID NO: 3334 - DNA, 819 bp, Homo sapiens
  ref <308>: DATABASE ACCESSION NUMBER: EMBL / M60334
  ref <309>: DATABASE ENTRY DATE: 1999-07-02
actcccaaaagagcgcccaagaagaaaatggccataagtggagtccctgtgctaggatttttcatcatagctgtgctgatgagcgctcaggaatcatgggctatcaaagaagaacatgtgatcatccaggccgagttctatctgaatcctgaccaatcaggcgagtttatgtttgactttgatggtgatgagattttccatgtggatatggcaaagaaggagacggtctggcggcttgaagaatttggacgatttgccagctttgaggctcaaggtgcattggccaacatagctgtggacaaagccaacttggaaatcatgacaaagcgctccaactatactccgatcaccaatgtacctccagaggtaactgtgctcacgaacagccctgtggaactgagagagcccaacgtcctcatctgtttcatagacaagttcaccccaccagtggtcaatgtcacgtggcttcgaaatggaaaacctgtcaccacaggagtgtcagagacagtcttcctgcccagggaagaccaccttttccgcaagttccactatctccccttcctgccctcaactgaggacgtttacgactgcagggtggagcactggggcttggatgagcctcttctcaagcactgggagtttgatgctccaagccctctcccagagactacagagaacgtggtgtgtgccctgggcctgactgtgggtctggtgggcatcattattgggaccatcttcatcatcaagggattgcgcaaaagcaatgcagcagaacgcagggggcctctgtaaggcacatggaggtgatggtgtttctta

SEQ ID NO: 3335 - protein, 254 aa, Homo sapiens
  ref <308>: DATABASE ACCESSION NUMBER: SWISS-Prot / P01903
  ref <309>: DATABASE ENTRY DATE: 2002-06-15
MAISGVPVLGFFIIAVLMSAQESWAIKEEHVIIQAEFYLNPDQSGEFMFDFDGDEIFHVDMAKKETVWRLEEFGRFASFEAQGALANIAVDKANLEIMTKRSNYTPITNVPPEVTVLTNSPVELREPNVLICFIDKFTPPVVNVTWLRNGKPVTTGVSETVFLPREDHLFRKFHYLPFLPSTEDVYDCRVEHWGLDEPLLKHWEFDAPSPLPETTENVVCALGLTVGLVGIIIGTIFIIKGVRKSNAAERRGPL

SEQ ID NO: 3336 - DNA, 805 bp, Rattus norvegicus; identical to SEQ ID NO: 3332
  ref <308>: DATABASE ACCESSION NUMBER: EMBL / M15562
  ref <309>: DATABASE ENTRY DATE: 2000-03-04

SEQ ID NO: 3337 - protein, 255 aa, Rattus norvegicus
  ref <308>: DATABASE ACCESSION NUMBER: SWISS-Prot / CAA68540
  ref <309>: DATABASE ENTRY DATE: 2003-02-01
MATIGDLVIRFFFMAVLMSPQKSWAIKEEHTIIQAEFYLSPDQNGEFMFDFDGDEIFHVDIKKSETIWRLEEFAKFASFEAQGALANIAVDKANLDIMIKRSNNTPDANVIPEVTVLPKSPVNLGEPNILICFIDKFSPPAVNVTWLRNGQPVTKGVSETVFLPREDHLFRKFHYLTFLPSVEDYYDCEVDHWGLEEPLRKHWEFEEKTLLPETKENVLCVLGLFVGLVGIVVGIVLIIKGLRKRNAVEGRQGAL

SEQ ID NO: 3338 - DNA, 1237 bp, Homo sapiens
  ref <308>: DATABASE ACCESSION NUMBER: Refseq / NM_019111
  ref <309>: DATABASE ENTRY DATE: 2002-02-08
attcttgtctgttctgcctcactcccgagctctactgactcccaaaagagcgcccaagaagaaaatggccataagtggagtccctgtgctaggatttttcatcatagctgtgctgatgagcgctcaggaatcatgggctatcaaagaagaacatgtgatcatccaggccgagttctatctgaatcctgaccaatcaggcgagtttatgtttgactttgatggtgatgagattttccatgtggatatggcaaagaaggagacggtctggcggcttgaagaatttggacgatttgccagctttgaggctcaaggtgcattggccaacatagctgtggacaaagccaacctggaaatcatgacaaagcgctccaactatactccgatcaccaatgtacctccagaggtaactgtgctcacgaacagccctgtggaactgagagagcccaacgtcctcatctgtttcatcgacaagttcaccccaccagtggtcaatgtcacgtggcttcgaaatggaaaacctgtcaccacaggagtgtcagagacagtcttcctgcccagggaagaccaccttttccgcaagttccactatctccccttcctgccctcaactgaggacgtttacgactgcagggtggagcactggggcttggatgagcctcttctcaagcactgggagtttgatgctccaagccctctcccagagactacagagaacgtggtgtgtgccctgggcctgactgtgggtctggtgggcatcattattgggaccatcttcatcatcaagggagtgcgcaaaagcaatgcagcagaacgcagggggcctctgtaaggcacatggaggtgatgatgtttcttagagagaagatcactgaagaaacttctgctttaatgactttacaaagctggcaatattacaatccttgacctcagtgaaagcagtcatcttcagcgttttccagccctatagccaccccaagtgtggttatgcctcctcgattgctccgtactctaacatctagctggctttccctgtctattgccttttcctgtatctattttcctctatttcctatcattttattatcaccatgcaatgcctctggaataaaacatacaggagtctgtctctgctatggaatgccccatggggctctcttgtgtacttattgtttaaggtttcctcaaactgtgatttttctgaacacaataaactattttgatgatcttgggtggaaaa

SEQ ID NO: 3339 - protein, 254 aa, Homo sapiens; identical to SEQ ID NO: 3335
  ref <308>: DATABASE ACCESSION NUMBER: SWISS-Prot / P01903
  ref <309>: DATABASE ENTRY DATE: 2002-06-15

SEQ ID NO: 3340 - DNA, 805 bp, Rattus norvegicus; identical to SEQ ID NO: 3332
  ref <308>: DATABASE ACCESSION NUMBER: EMBL / M15562
  ref <309>: DATABASE ENTRY DATE: 2000-03-04

SEQ ID NO: 3341 - protein, 145 aa, Rattus norvegicus; identical to SEQ ID NO: 3333
  ref <308>: DATABASE ACCESSION NUMBER: SWISS-Prot / AAA41609
  ref <309>: DATABASE ENTRY DATE: 2003-02-01

SEQ ID NO: 3342 - DNA, 819 bp, Homo sapiens; identical to SEQ ID NO: 3334
  ref <308>: DATABASE ACCESSION NUMBER: EMBL / M60334
  ref <309>: DATABASE ENTRY DATE: 1999-07-02

SEQ ID NO: 3343 - protein, 254 aa, Homo sapiens; identical to SEQ ID NO: 3335
  ref <308>: DATABASE ACCESSION NUMBER: SWISS-Prot / P01903
  ref <309>: DATABASE ENTRY DATE: 2002-06-15

SEQ ID NO: 3344 - DNA, 805 bp, Rattus norvegicus; identical to SEQ ID NO: 3332
  ref <308>: DATABASE ACCESSION NUMBER: EMBL / M15562
  ref <309>: DATABASE ENTRY DATE: 2000-03-04

SEQ ID NO: 3345 - protein, 255 aa, Rattus norvegicus; identical to SEQ ID NO: 3337
  ref <308>: DATABASE ACCESSION NUMBER: SWISS-Prot / CAA68540
  ref <309>: DATABASE ENTRY DATE: 2003-02-01

SEQ ID NO: 3346 - DNA, 1237 bp, Homo sapiens; identical to SEQ ID NO: 3338
  ref <308>: DATABASE ACCESSION NUMBER: Refseq / NM_019111
  ref <309>: DATABASE ENTRY DATE: 2002-02-08

SEQ ID NO: 3347 - protein, 254 aa, Homo sapiens; identical to SEQ ID NO: 3335
  ref <308>: DATABASE ACCESSION NUMBER: SWISS-Prot / P01903
  ref <309>: DATABASE ENTRY DATE: 2002-06-15

SEQ ID NO: 3348 - DNA, 1749 bp, Rattus norvegicus
  ref <308>: DATABASE ACCESSION NUMBER: EMBL / M15768
  ref <309>: DATABASE ENTRY DATE: 2000-03-04
agaagaaaggactggccagagactcagatccccatccgctcaagcaggccaccatgtgccgaggcttctctttcaggcacttgctgccgctgctgctcctgcagctgtcaaaactcctagttgtcacccaaggaaagaccgtggtgctggggaaggaagggggttcagcagaactgccctgtgaaagtacctcgaggaggagtgcatccttcgcgtggaagtcctctgaccaaaagacaattctgggatataagaacaagttattgattaaaggttcacttgagctgtatagtcgttttgattccagaaaaaatgcatgggagagaggatcatttcccctcatcatcaataaacttaggatggaggactctcagacttatgtctgcgagctggagaacaagaaagaggaggtggagttgtgggtcttcagagtgaccttcaatccgggtaccagactgttgcaggggcagagcctgaccctgatcttggatagcaaccctaaggtctctgaccccccgatagagtgcaaacacaaaagcagtaacattgtcaaggactccaaagctttctccacgcacagcctaaggattcaggacagtggcatctggaactgcaccgtgaccctgaaccagaagaagcactcatttgacatgaaactctcagtgctgggctttgcgagcacatccatcacggcctataagagtgagggggagtcagcggagttctccttcccactcaaccttggagaggaaagcctgcagggagagttgagatggaaggcagagaaggctccttcttcccagtcctggatcaccttctccctaaagaaccaaaaggtgtctgtgcagaagtctactagcaaccccaagttccagctgtccgaaacgctcccactcacccttcagataccccaggtctcccttcagtttgctggttctggcaacctgaccctgactctggacagagggatactgtatcaggaagtgaacctggtggtgatgaaagtgactcagcccgacagcaacactttgacctgtgaggtgatgggacccacctcacccaagatgagactgatcttgaagcaggagaatcaggaggccagggtctccaggcaggagaaagtgattcaagtgcaggcccctgaagcaggggtgtggcaatgtctactgagtgaaggtgaagaggtcaagatggactccaagatccaggttttatccaaagggttgaaccagacaatgttcctggctgtcgtgctggggagcgccttcagctttctggttttcacggggctctgcatcctattctgtgtcaggtgccggcaccaacagcgccaggcagcacggatgtctcagatcaagaggcttctcagtgagaagaagacttgccagtgctcccaccggatgcagaaaagccacaatctcatatgaggcctgggccccacctgcagccctgcctgtgtcctgtcgctgacccaggcctgtggaccagatgaatgtagcccacacagtgcctctggcctcctgcttttctcttccacaactggccacggtttctctgcctctgttcccaagcccgttggctgagcttgcgctcggctgtgtttcagacactcaagcacacccagccagcttattgatcctccgtagctgcctttacgccagagcccagcccttctctgactaacatcctggatcttctttccagctgtctgcttggatctaagggcacctgacctggatggtgggactg

SEQ ID NO: 3349 - protein, 457 aa, Rattus norvegicus
  ref <308>: DATABASE ACCESSION NUMBER: SWISS-Prot / P05540
  ref <309>: DATABASE ENTRY DATE: 2002-06-15
MCRGFSFRHLLPLLLLQLSKLLVVTQGKTVVLGKEGGSAELPCESTSRRSASFAWKSSDQKTILGYKNKLLIKGSLELYSRFDSRKNAWERGSFPLIINKLRMEDSQTYVCELENKKEEVELWVFRVTFNPGTRLLQGQSLTLILDSNPKVSDPPIECKHKSSNIVKDSKAFSTHSLRIQDSGIWNCTVTLNQKKHSFDMKLSVLGFASTSITAYKSEGESAEFSFPLNLGEESLQGELRWKAEKAPSSQSWITFSLKNQKVSVQKSTSNPKFQLSETLPLTLQIPQVSLQFAGSGNLTLTLDRGILYQEVNLVVMKVTQPDSNTLTCEVMGPTSPKMRLILKQENQEARVSRQEKVIQVQAPEAGVWQCLLSEGEEVKMDSKIQVLSKGLNQTMFLAVVLGSAFSFLVFTGLCILFCVRCRHQQRQAARMSQIKRLLSEKKTCQCSHRMQKSHNLI

SEQ ID NO: 3350 - DNA, 3084 bp, Homo sapiens
  ref <308>: DATABASE ACCESSION NUMBER: Refseq / NM_000616
  ref <309>: DATABASE ENTRY DATE: 2002-11-05
ctgggctcctggttgcagagctccaagtcctcacacagatacgcctgtttgagaagcagcgggcaagaaagacgcaagcccagaggccctgccatttctgtgggctcaggtccctactggctcaggcccctgcctccctcggcaaggccacaatgaaccggggagtcccttttaggcacttgcttctggtgctgcaactggcgctcctcccagcagccactcagggaaagaaagtggtgctgggcaaaaaaggggatacagtggaactgacctgtacagcttcccagaagaagagcatacaattccactggaaaaactccaaccagataaagattctgggaaatcagggctccttcttaactaaaggtccatccaagctgaatgatcgcgctgactcaagaagaagcctttgggaccaaggaaactttcccctgatcatcaagaatcttaagatagaagactcagatacttacatctgtgaagtggaggaccagaaggaggaggtgcaattgctagtgttcggattgactgccaactctgacacccacctgcttcaggggcagagcctgaccctgaccttggagagcccccctggtagtagcccctcagtgcaatgtaggagtccaaggggtaaaaacatacagggggggaagaccctctccgtgtctcagctggagctccaggatagtggcacctggacatgcactgtcttgcagaaccagaagaaggtggagttcaaaatagacatcgtggtgctagctttccagaaggcctccagcatagtctataagaaagagggggaacaggtggagttctccttcccactcgcctttacagttgaaaagctgacgggcagtggcgagctgtggtggcaggcggagagggcttcctcctccaagtcttggatcacctttgacctgaagaacaaggaagtgtctgtaaaacgggttacccaggaccctaagctccagatgggcaagaagctcccgctccacctcaccctgccccaggccttgcctcagtatgctggctctggaaacctcaccctggcccttgaagcgaaaacaggaaagttgcatcaggaagtgaacctggtggtgatgagagccactcagctccagaaaaatttgacctgtgaggtgtggggacccacctcccctaagctgatgctgagcttgaaactggagaacaaggaggcaaaggtctcgaagcgggagaaggcggtgtgggtgctgaaccctgaggcggggatgtggcagtgtctgctgagtgactcgggacaggtcctgctggaatccaacatcaaggttctgcccacatggtccaccccggtgcagccaatggccctgattgtgctggggggcgtcgccggcctcctgcttttcattgggctaggcatcttcttctgtgtcaggtgccggcaccgaaggcgccaagcagagcggatgtctcagatcaagagactcctcagtgagaagaagacctgccagtgccctcaccggtttcagaagacatgtagccccatttgaggcacgaggccaggcagatcccacttgcagcctccccaggtgtctgccccgcgtttcctgcctgcggaccagatgaatgtagcagatcccaggcctctggcctcctgttcgcctcctctacaatttgccattgtttctcctgggttaggccccggcttcactggttgagtgttgctctctagtttccagaggcttaatcacaccgtcctccacgccatttccttttccttcaagcctagcccttctctcattatttctctctgaccctctccccactgctcatttggatcccaggggagtgttcagggccagccctggctggcatggagggtgaggctgggtgtctggaagcatggagcatgggactgttcttttacaagacaggaccctgggaccacagagggcaggagcttgcacgaaatcacacagccaagccagtcaaggatggatgcagatccagaggtttctggcagccagtacctcctgccccatgctgcccgcttctcaccctatgtgggtggggccacagactcacatcctgaccttgcacaaacagcccctctggacacagccccatgtacacggcctcaagggatgtctcacatcctctgtctatttgagacttagaaaaatcctacaaggctggcagtgacagaactaagatgatcatctccagtttatagaccagaaccagagctcagagaggctagatgattgattaccaagtgccggactagcaagtgctggagtcgggactaacccaggtcccttgtcccaagttccactgctgcctcttgaatgcagggacaaatgccacacggctctcaccagtggctagtggtgggtactcaatgtgtacttttgggttcacagaagcacagcacccatgggaagggtccatctcagagaatttacgagcagggatgaaggcctccctgtctaaaatccctccttcatcccccgctggtggcagaatctgttaccagaggacaaagcctttggctcttctaatcagagtgcaagctgggagcacaggcactgcaggagagaatgcccagtgaccagtcactgaccctgtgcagaacctcctggaagcgagctttgctgggagagggggtagctagcctgagagggaaccctccaagggacctcaaaggtgattgtgccaggctctgcgcctgccccacaccctcccttaccctcctccagaccattcaggacacagggaaatcagggttacaaatcttcttgatccacttctctcaggatcccctctcttcctacccttcctcaccacttccctcagtcccaactccttttccctatttccttctcctcctgtctttaaagcctgcctcttccaggaagacccccctattgctgctggggctccccatttgcttactttgcatttgtgcccactctccacccctgctcccctgagctgaaataaaaatacaataaacttactataaagataaaaaaaaaaaaaaaaaaaaaaaaaaaaaaaaaaaaaaaaaaaaaaaaaaaaaaaaaaaaaaaaaaaaaaaaaaaa

SEQ ID NO: 3351 - protein, 458 aa, Homo sapiens
  ref <308>: DATABASE ACCESSION NUMBER: SWISS-Prot / P01730
  ref <309>: DATABASE ENTRY DATE: 2002-06-15
MNRGVPFRHLLLVLQLALLPAATQGKKVVLGKKGDTVELTCTASQKKSIQFHWKNSNQIKILGNQGSFLTKGPSKLNDRADSRRSLWDQGNFPLIIKNLKIEDSDTYICEVEDQKEEVQLLVFGLTANSDTHLLQGQSLTLTLESPPGSSPSVQCRSPRGKNIQGGKTLSVSQLELQDSGTWTCTVLQNQKKVEFKIDIVVLAFQKASSIVYKKEGEQVEFSFPLAFTVEKLTGSGELWWQAERASSSKSWITFDLKNKEVSVKRVTQDPKLQMGKKLPLHLTLPQALPQYAGSGNLTLALEAKTGKLHQEVNLVVMRATQLQKNLTCEVWGPTSPKLMLSLKLENKEAKVSKREKAVWVLNPEAGMWQCLLSDSGQVLLESNIKVLPTWSTPVQPMALIVLGGVAGLLLFIGLGIFFCVRCRHRRRQAERMSQIKRLLSEKKTCQCPHRFQKTCSPI

SEQ ID NO: 3352 - DNA, 1124 bp, Rattus norvegicus
  ref <308>: DATABASE ACCESSION NUMBER: EMBL / M15882
  ref <309>: DATABASE ENTRY DATE: 2000-03-04
tctccgctcgtcctccggtagcagccgccagcacagtgtccgctgctgggcggggtgtcggcggatcggtcggttggtttcggcttcggtgtcgctgcgtttgagttgggccgtcatggctgagttggatccatttggcgctcccgccggtgcgcccggtggccccgcgctcgggaacggggtggcgggcgccggcgaggaagacccggccgcggccttcttggcgcagcaggagagtgagattgcgggcatagagaacgacgaggccttcgccatcctagacggcggcgcccccgggccgcaggcacacggcgagccgccggggggtcctgatgcggttgatggagtgatgaatggcgaatactaccaggagagcaatggtccaacagacagttacgcagccatttcagaagtggatcggttgcagtcagagcctgaaagtatccgtaagtggagagaagagcagacagagcgcctggaagccctcgatgccaattctcggaagcaggaagcagagtggaaagaaaaggcagtgaaggagctggaagagtggtacgcaaggcaggatgagcagctacagaagacaaaagccagcaacagggtggcagatgaagctttctacaaacaacccttcgctgacgtgattggttatgtcacaaacataaaccatccttgctacagcctagaacaggcagcagaagaagcctttgtaaacgacattgacgagtcatccccaggcactgagtgggagcgggtggcccgcctgtgtgactttaaccccaagtccagcaaacaggccaaagatgtctctcgcatgcgctcagtcctcatctccctgaagcaggcgcccctggtgcattgaagagccaccctgtggaaacactacgtctccgatcttaatcctactcagtgaagctgttcacgcaattggattaattatgccgagttcttttggaccaaaccttttgtctttagagttgatcattgtttgtgattgcatgtttccttcaactgtgttctccctggcattcagagaagagagaggaagaggaagggaggggagctcccaacagtagcctcaacctgtgcttttgtgcattattctgagaataaatttctgtttc

SEQ ID NO: 3353 - protein, 248 aa, Rattus norvegicus
  ref <308>: DATABASE ACCESSION NUMBER: SWISS-Prot / P08081
  ref <309>: DATABASE ENTRY DATE: 2001-10-16
MAELDPFGAPAGAPGGPALGNGVAGAGEEDPAAAFLAQQESEIAGIENDEAFAILDGGAPGPQAHGEPPGGPDAVDGVMNGEYYQESNGPTDSYAAISEVDRLQSEPESIRKWREEQTERLEALDANSRKQEAEWKEKAVKELEEWYARQDEQLQKTKASNRVADEAFYKQPFADVIGYVTNINHPCYSLEQAAEEAFVNDIDESSPGTEWERVARLCDFNPKSSKQAKDVSRMRSVLISLKQAPLVH

SEQ ID NO: 3354 - DNA, 1105 bp, Homo sapiens
  ref <308>: DATABASE ACCESSION NUMBER: EMBL / M20471
  ref <309>: DATABASE ENTRY DATE: 2000-03-04
gccaccgctgtggtgtcggtgggtcggttggtttttgtctcaccgttggtgtccgtgccgttcagttgcccgccatggctgagctggatccgttcggcgcccctgccggcgcccctggcggtcccgcgctggggaacggagtggccggcgccggcgaagaagacccggctgcggccttcttggcgcagcaagagagcgagattgcgggcatcgagaacgacgaggccttcgccatcctggacggcggcgcccccgggccccagccgcacggcgagccgccggggggtccggatgctgttgatggagtaatgaatggtgaatactaccaggaaagtaatggtccaacagacagttatgcagctatttcacaagtggatcgattgcagtcagagcctgaaagtatccgtaaatggagagaagaacaaatggaacgcttggaagcccttgatgccaattctcggaagcaagaagcagagtggaaagaaaaggcaataaaggagctagaagaatggtatgcaagacaggacgagcagctacagaaaacaaaagcaaacaacagggtggcagatgaagctttctacaaacaacccttcgctgacgtgattggttatgtcacaaacataaaccatccttgctacagcctagaacaggcagcagaagaagcctttgtaaatgacattgacgagtcgtccccaggcactgagtgggaacgggtggcccggctgtgtgactttaaccccaagtctagcaagcaggccaaagatgtctcccgcatgcgctcagtcctcatctccctcaagcaggccccgctggtgcactgaagagccaccctgtggaaacactacatctgcaatatcttaatcctactcagtgaagctcttcacagtcattggattaattatgttgagttcttttggaccaaacctttttgtctttagagttgttcattgtttgtgattgcatgtttccttccttcaactgtgttctccctggcattcagagaggagggagaggaggaagaggaaggggagggaagcttcccaagagtagcctcaacctgtgcttctgtgcattattctgagaataaatttctgtttcaaactgt

SEQ ID NO: 3355 - protein, 248 aa, Homo sapiens
  ref <308>: DATABASE ACCESSION NUMBER: SWISS-Prot / P09496
  ref <309>: DATABASE ENTRY DATE: 2002-06-15
MAELDPFGAPAGAPGGPALGNGVAGAGEEDPAAAFLAQQESEIAGIENDEAFAILDGGAPGPQPHGEPPGGPDAVDGVMNGEYYQESNGPTDSYAAISQVDRLQSEPESIRKWREEQMERLEALDANSRKQEAEWKEKAIKELEEWYARQDEQLQKTKANNRVADEAFYKQPFADVIGYVTNINHPCYSLEQAAEEAFVNDIDESSPGTEWERVARLCDFNPKSSKQAKDVSRMRSVLISLKQAPLVH

SEQ ID NO: 3356 - DNA, 1124 bp, Rattus norvegicus; identical to SEQ ID NO: 3352
  ref <308>: DATABASE ACCESSION NUMBER: EMBL / M15882
  ref <309>: DATABASE ENTRY DATE: 2000-03-04

SEQ ID NO: 3357 - protein, 248 aa, Rattus norvegicus; identical to SEQ ID NO: 3353
  ref <308>: DATABASE ACCESSION NUMBER: SWISS-Prot / P08081
  ref <309>: DATABASE ENTRY DATE: 2001-10-16

SEQ ID NO: 3358 - DNA, 1105 bp, Homo sapiens; identical to SEQ ID NO: 3354
  ref <308>: DATABASE ACCESSION NUMBER: EMBL / M20471
  ref <309>: DATABASE ENTRY DATE: 2000-03-04

SEQ ID NO: 3359 - protein, 248 aa, Homo sapiens; identical to SEQ ID NO: 3355
  ref <308>: DATABASE ACCESSION NUMBER: SWISS-Prot / P09496
  ref <309>: DATABASE ENTRY DATE: 2002-06-15

SEQ ID NO: 3360 - DNA, 3243 bp, Rattus norvegicus
  ref <308>: DATABASE ACCESSION NUMBER: EMBL / M15944
  ref <309>: DATABASE ENTRY DATE: 2000-03-04
gcggagatgtgcaagtggcgaagctggaccgagtgcaggcgcaagctgctgagcggctgaggcgagggattttaggtgatgggaagatcagaaagtcagatggatattactgatatcaatgctccaaagccgaagaagaaacagcgatggactccactggagatcagcctttctgtgctcgtcttgctcctgactatcatagctgtgacaatgattgctctctatgcaacctatgatgatggtatttgcaaatcatcagactgcataaaatcagctgctcgactgatccagaacatggatgcctctgctgagccatgtacggacttcttcaaatatgcttgtggaggctggttgaaacgcaatgtcatccctgagaccagttcccgatacagtaattttgacattctaagagatgaactagaagtcattttgaaagatgtccttcaagaacccaaaactgaggacatagtagcagtgcagaaagcaaaaactttgtacagatcatgtataaatgaatctgctattgatagcagaggtgggcaacctctgctcacactgttaccagatatatatgggtggccagtagcatcacaaaactgggaacaaacatatggtacttcttggacagctgagaaatctattgcacaactgaattctaaatatgggaaaaaggtcctcattaatttttttgttggcactgatgataagaattctacccagcatataattcattttgaccagcctcgacttggcctcccttccagagactactatgagtgtacaggaatatataaagaggcttgcacagcatatgtggattttatgatttctgtggccagactgattcgtcaggaacaaagattgcctattgatgaaaaccagctctctttggaaatgaataaagttatggaattggaaaaagaaattgccaatgccacaactaaaccagaagaccgaaatgacccaatgctgctttataacaaaatgacattggccaagctccaaaataacttctctctggagatcaatgggaagccattcagctggtcaaatttcacaaatgaaatcatgtcaactgtgaatattaatattcaaaatgaggaagaagtggttgtttatgctccagaatatttaaccaaacttaagcctattcttaccaaatattctcccagagatcttcaaaatttaatgtcctggaggttcataatggatcttgtaagcagcctcagccgaaactacaaggagtccagaaatgctttccgcaaggccctttacgggactacatccgaaactgcaacctggagacggtgtgccaactacgtcaatgggaacatggagaatgctgtggggaggctttatgtggaagcagcttttgctggagagagcaagcacgtggttgaagatttgattgcacaaatccgtgaagtttttattcagactttagatgacctcacttggatggatgctgagacaaaaaagaaagctgaagagaaggccctggcaattaaagaaaggattggctatcctgatgacatcatctccaatgagaataaactgaataatgagtatcttgagttgaactacaaggaagaggaatactttgagaacataattcaaaatttgaaattcagccaaagcaagcagctaaagaagctccgagaaaaggtggacaaagatgagtggataagtggcgcggcggtagtcaatgcattttattcctcaggcagaaatcagatcgtcttccccgccggcattttgcagcccccattctttagtgctcggcagtccaactcattgaactatgggggcatcggcatggtcatcggacatgaaatcacacatggctttgatgacaatggcagaaattttaacaaagatggagacctcgttgactggtggactcagcagtctgcaaataatttcaaagaccaatcccagtgtatggtgtaccagtatggaaactttacatgggacctagcaggtggacagcatctcaatggaattaacacactaggagaaaatattgctgataatggagggattggccaagcatacagagcctatcagaattatgttaaaaagaatggtgaagaaaaattactccctggacttgacctcaatcacaaacaactattcttcttgaactttgcccaggtgtggtgtggaacctaccggccagagtatgcagtcaattccattaaaacagatgtacacagtcctggcaatttcaggatcattgggactttgcagaactctgctgagtttgcggatgcctttcattgccgcaagaactcatacatgaatccagaaaggaaatgtcgggtttggtgatcttcacaggaagtggagcatccatggcaggactcgccaaagccacagaaacaggaagtcttccctcagagaacgtgggccccggaagtttcttcagcttcttgggggaaattcacagagatgagcacgagctaacaaaaatgaaattagattattaaaaccgctgtgaatgaaaggggagaaaacctacgatctagcaaatcaatcacttcactgtgtaaataattaccttccaacggtaatattaccgttcacttctggttctcacacagactgcagctttcatgctgtctgtagagaacagtgttaacacttaaagcaggttatgacttctgatcaagaggaggaagacgctgaatacagttgggcaccaaagtacagatttgcctctcagcactcacttttgtttgcaacattcagctccttcaaaattctcccaaagaacccccatgcatactgtggccttcaggctcctgcagtgtggaactcattttaccatgcataaattattcattcattccacatcattttagtttgagcactcttagagcttaaactagagagtctgaaatggttccgccatttacccacttgagtggtgttgagactcttcagccccctacagatttttgagcaatttcttgctctcgctgcccctcagacttagtcttttaaaggatttgtagtaatgtataaaaaacattctatatttaattattaactacacatgaccaaataaaccattgctataggtaatcattgaatattgacattatatggccaagatagatagttaagaagatctgtaacatgatgtgcagatgaaaatttgaaactttttaagcctgtaaatcatattgctgaaaatcttcaaacacaaactctggggtgagcattaccattgaacagttg

SEQ ID NO: 3361 - protein, 749 aa, Rattus norvegicus
  ref <308>: DATABASE ACCESSION NUMBER: SWISS-Prot / P07861
  ref <309>: DATABASE ENTRY DATE: 2002-06-15
GRSESQMDITDINAPKPKKKQRWTPLEISLSVLVLLLTIIAVTMIALYATYDDGICKSSDCIKSAARLIQNMDASAEPCTDFFKYACGGWLKRNVIPETSSRYSNFDILRDELEVILKDVLQEPKTEDIVAVQKAKTLYRSCINESAIDSRGGQPLLTLLPDIYGWPVASQNWEQTYGTSWTAEKSIAQLNSKYGKKVLINFFVGTDDKNSTQHIIHFDQPRLGLPSRDYYECTGIYKEACTAYVDFMISVARLIRQEQRLPIDENQLSLEMNKVMELEKEIANATTKPEDRNDPMLLYNKMTLAKLQNNFSLEINGKPFSWSNFTNEIMSTVNINIQNEEEVVVYAPEYLTKLKPILTKYSPRDLQNLMSWRFIMDLVSSLSRNYKESRNAFRKALYGTTSETATWRRCANYVNGNMENAVGRLYVEAAFAGESKHVVEDLIAQIREVFIQTLDDLTWMDAETKKKAEEKALAIKERIGYPDDIISNENKLNNEYLELNYKEEEYFENIIQNLKFSQSKQLKKLREKVDKDEWISGAAVVNAFYSSGRNQIVFPAGILQPPFFSARQSNSLNYGGIGMVIGHEITHGFDDNGRNFNKDGDLVDWWTQQSANNFKDQSQCMVYQYGNFTWDLAGGQHLNGINTLGENIADNGGIGQAYRAYQNYVKKNGEEKLLPGLDLNHKQLFFLNFAQVWCGTYRPEYAVNSIKTDVHSPGNFRIIGTLQNSAEFADAFHCRKNSYMNPERKCRVW

SEQ ID NO: 3362 - DNA, 3181 bp, Homo sapiens
  ref <308>: DATABASE ACCESSION NUMBER: EMBL / X07166
  ref <309>: DATABASE ENTRY DATE: 1993-09-12
gcaagtcagaaagtcagatggatataactgatatcaacactccaaagccaaagaagaaacagcgatggactccactggagatcagcctctcggtccttgtcctgctcctcaccatcatagctgtgacaatgatcgcactctatgcaacctacgatgatggtatttgcaagtcatcagactgcataaaatcagctgctcgactgatccaaaacatggatgccaccactgagccttgtacagactttttcaaatatgcttgcggaggctggttgaaacgtaatgtcattcccgagaccagctcccgttacggcaactttgacattttaagagatgaactagaagtcgttttgaaagatgtccttcaagaacccaaaactgaagatatagtagcagtgcagaaagcaaaagcattgtacaggtcttgtataaatgaatctgctattgatagcagaggtggagaacctctactcaaactgttaccagacatatatgggtggccagtagcaacagaaaactgggagcaaaaatatggtgcttcttggacagctgaaaaagctattgcacaactgaattctaaatatgggaaaaaagtccttattaatttgtttgttggcactgatgataagaattctgtgaatcatgtaattcatattgaccaacctcgacttggcctcccttctagagattactatgaatgcactggaatctataaagaggcttgtacagcatatgtggattttatgatttctgtggccagattgattcgtcaggaagaaagattgcccatcgatgaaaaccagcttgctttggaaatgaataaagttatggaattggaaaaagaaattgccaatgctacggctaaacctgaagatcgaaatgatccaatgcttctgtataacaagatgacattggcccagatccaaaataacttttcactagagatcaatgggaagccattcagctggttgaatttcacaaatgaaatcatgtcaactgtgaatattagtattacaaatgaggaagatgtggttgtttatgctccagaatatttaaccaaacttaagcccattcttaccaaatattctgccagagatcttcaaaatttaatgtcctggagattcataatggatcttgtaagcagcctcagccgaacctacaaggagtccagaaatgctttccgcaaggccctttatggtacaacctcagaaacagcaacttggagacgttgtgcaaactatgtcaatgggaatatggaaaatgctgtggggaggctttatgtggaagcagcatttgctggagagagtaaacatgtggtcgaggatttgattgcacagatccgagaagtttttattcagactttagatgacctcacttggatggatgccgagacaaaaaagagagctgaagaaaaggccttagcaattaaagaaaggatcggctatcctgatgacattgtttcaaatgataacaaactgaataatgagtacctcgagttgaactacaaagaagatgaatacttcgagaacataattcaaaatttgaaattcagccaaagtaaacaactgaagaagctccgagaaaaggtggacaaagatgagtggataagtggagcagctgtagtcaatgcattttactcttcaggaagaaatcagatagtcttcccagccggcattctgcagccccccttctttagtgcccagcagtccaactcattgaactatgggggcatcggcatggtcataggacacgaaatcacccatggcttcgatgacaatggcagaaactttaacaaagatggagacctcgttgactggtggactcaacagtctgcaagtaactttaaggagcaatcccagtgcatggtgtatcagtatggaaacttttcctgggacctggcaggtggacagcaccttaatggaattaatacactgggagaaaacattgctgataatggaggtcttggtcaagcatacagagcctatcagaattatattaaaaagaatggcgaagaaaaattacttcctggacttgacctaaatcacaaacaactatttttcttgaactttgcacaggtgtggtgtggaacctataggccagagtatgcggttaactccattaaaacagatgtgcacagtccaggcaatttcaggattattgggactttgcagaactctgcagagttttcagaagcctttcactgccgcaagaattcatacatgaatccagaaaagaagtgccgggtttggtgatcttcaaaagaagcattgcagcccttggctagacttgccaacaccacagaaatggggaattctctaatcgaaagaaaatgggccctaggggtcactgtactgacttgagggtgattaacagagagggcaccatcacaatacagataacattaggttgtcctagaaagggtgtggagggaggaagggggtctaaggtctatcaagtcaatcatttctcactgtgtacataatgcttaatttctaaagataatattactgtttatttctgtttctcatatggtctaccagtttgctgatgtccctagaaaacaatgcaaaacctttgaggtagaccaggatttctaatcaaaagggaaaagaagatgttgaagaatacagttaggcaccagaagaacagtaggtgacactatagtttaaaacacattgcctaactactagtttttacttttatttgcaacatttacagtccttcaaaatccttccaaagaattcttatacacattggggccttggagcttacatagttttaaactcatttttgccatacatcagttattcattctgtgatcatttattttaagcactcttaaagcaaaaaatgaatgtctaaaattgttttttgttgtacctgctttgactgatgctgagattcttcaggcttcctgcaattttctaagcaatttcttgctctatctctcaaaacttggtatttttcagagatttatataaatgtaaaaataataatttttatatttaattattaactacatttatgagtaactattattataggtaatcaatgaatattgaagtttcagcttaaaataaacagttgtgaaccaagatctataaagcgatatacagatgaaaatttgagactatttaaacttataaatcatattgatgaaaagatttaagcacaaactttaggg

SEQ ID NO: 3363 - protein, 749 aa, Homo sapiens
  ref <308>: DATABASE ACCESSION NUMBER: SWISS-Prot / P08473
  ref <309>: DATABASE ENTRY DATE: 2002-06-15
GKSESQMDITDINTPKPKKKQRWTPLEISLSVLVLLLTIIAVTMIALYATYDDGICKSSDCIKSAARLIQNMDATTEPCTDFFKYACGGWLKRNVIPETSSRYGNFDILRDELEVVLKDVLQEPKTEDIVAVQKAKALYRSCINESAIDSRGGEPLLKLLPDIYGWPVATENWEQKYGASWTAEKAIAQLNSKYGKKVLINLFVGTDDKNSVNHVIHIDQPRLGLPSRDYYECTGIYKEACTAYVDFMISVARLIRQEERLPIDENQLALEMNKVMELEKEIANATAKPEDRNDPMLLYNKMTLAQIQNNFSLEINGKPFSWLNFTNEIMSTVNISITNEEDVVVYAPEYLTKLKPILTKYSARDLQNLMSWRFIMDLVSSLSRTYKESRNAFRKALYGTTSETATWRRCANYVNGNMENAVGRLYVEAAFAGESKHVVEDLIAQIREVFIQTLDDLTWMDAETKKRAEEKALAIKERIGYPDDIVSNDNKLNNEYLELNYKEDEYFENIIQNLKFSQSKQLKKLREKVDKDEWISGAAVVNAFYSSGRNQIVFPAGILQPPFFSAQQSNSLNYGGIGMVIGHEITHGFDDNGRNFNKDGDLVDWWTQQSASNFKEQSQCMVYQYGNFSWDLAGGQHLNGINTLGENIADNGGLGQAYRAYQNYIKKNGEEKLLPGLDLNHKQLFFLNFAQVWCGTYRPEYAVNSIKTDVHSPGNFRIIGTLQNSAEFSEAFHCRKNSYMNPEKKCRVW

SEQ ID NO: 3364 - DNA, 1840 bp, Rattus norvegicus
  ref <308>: DATABASE ACCESSION NUMBER: EMBL / M16112
  ref <309>: DATABASE ENTRY DATE: 2000-03-04
ggagccggagtcgccgccgcccgagcgcagccgagcgcacgccgagcccaatcgccaccgccatggccaccacggtgacctgcacccgtttcacggacgagtaccagctatacgaggatattggcaagggggctttctctgtggtccgacgctgtgtcaagctctgcaccggccatgagtatgcagctaagatcattaacaccaagaagctgtcagctagagatcaccagaagctggagagggaggctcggatctgccgcctgctgaagcattccaacattgtacgcctccatgacagcatctctgaagagggcttccactacctggtcttcgacctggtcactggtggggagctctttgaagacattgtggcgagagagtactacagtgaggctgacgccagtcactgtatccagcagatcctggaggctgttctccattgtcaccaaatgggggtcgtccacagagacctcaagcctgaaaacctgctcctggccagcaaatgcaaaggggccgcagtgaaactggcagacttcggcctggccatcgaggttcagggagaccagcaggcatggtttggatttgcgggaacaccaggctacctgtctcccgaagttcttcggaaggaggcctatggcaaaccagtggatatctgggcatgtggggtgatcctgtatatcctgctggtgggatacccacctttctgggatgaggaccagcacaagctgtaccagcagatcaaggctggggcctatgacttcccatcccccgagtgggacaccgttacccctgaagccaaaaacctcatcaaccagatgttgaccatcaaccccgccaagcgcatcacggcccacgaggccctgaagcacccatgggtctgccaacgatccacggtggcctccatgatgcacagacaggagactgtggaatgtctgaagaagttcaatgcaaggaggaagctcaagggagccatcctcaccactatgctggccacacggaatttctcagtgggcagacagaccaccgctccggccacaatgtccaccgcggcctccggcaccaccatggggctggtggaacaagccaagagtttactcaacaagaaagcagacggagtcaagccccagacaaacagcaccaaaaacagctcggccatcaccagccccaaaggatccctccctcctgccgccctggagcctcaaaccaccgttatccataacccagtggacggcattaaggaatcttccgacagcaccaacacaaccatagaggacgaagatgccaaagcccggaagcaggaaatcatcaagaccacagagcagctcatcgaggccgtcaacaacggcgactttgaggcctatgcgaaaatctgtgacccaggcctgacctcatttgagcctgaagctctgggcaacctggtcgaagggatggatttccacagattctactttgagaacctgctggccaagaacagcaagccgatccacaccactatcctgaacccgcacgtgcacgtcatcggcgaggatgcagcctgcatcgcttacatccgcctcacacagtacatcgacggccagggcagaccccgcaccagccagtccgaagagacccgtgtgtggcaccgccccgacggcaagtggcagaatgtccatttccactgctcgggcgctccagtggccccactgcagtgagagctgcgcctggtttcaccggacagagttggtgtttggagcccagccgccctcgggcgcacggcctgcctgtcgcatgtttgtgtctgcctcgtcccctcccctggtgcctgtgtctgcagaaaaacaagaccagatgtgatttgttt

SEQ ID NO: 3365 - protein, 542 aa, Rattus norvegicus
  ref <308>: DATABASE ACCESSION NUMBER: SWISS-Prot / P08413
  ref <309>: DATABASE ENTRY DATE: 2002-06-15
MATTVTCTRFTDEYQLYEDIGKGAFSVVRRCVKLCTGHEYAAKIINTKKLSARDHQKLEREARICRLLKHSNIVRLHDSISEEGFHYLVFDLVTGGELFEDIVAREYYSEADASHCIQQILEAVLHCHQMGVVHRDLKPENLLLASKCKGAAVKLADFGLAIEVQGDQQAWFGFAGTPGYLSPEVLRKEAYGKPVDIWACGVILYILLVGYPPFWDEDQHKLYQQIKAGAYDFPSPEWDTVTPEAKNLINQMLTINPAKRITAHEALKHPWVCQRSTVASMMHRQETVECLKKFNARRKLKGAILTTMLATRNFSVGRQTTAPATMSTAASGTTMGLVEQAKSLLNKKADGVKPQTNSTKNSSAITSPKGSLPPAALEPQTTVIHNPVDGIKESSDSTNTTIEDEDAKARKQEIIKTTEQLIEAVNNGDFEAYAKICDPGLTSFEPEALGNLVEGMDFHRFYFENLLAKNSKPIHTTILNPHVHVIGEDAACIAYIRLTQYIDGQGRPRTSQSEETRVWHRPDGKWQNVHFHCSGAPVAPLQ

SEQ ID NO: 3366 - DNA, 1577 bp, Homo sapiens
  ref <308>: DATABASE ACCESSION NUMBER: EMBL / AF081924
  ref <309>: DATABASE ENTRY DATE: 1999-07-02
gccatggccaccacggtgacctgcacccgcttcaccgacgagtaccagctctacgaggatattggcaagggggctttctctgtggtccgacgctgtgtcaagctctgcaccggccatgagtatgcagccaagatcatcaacaccaagaagctgtcagccagagatcaccagaagctggagagagaggctcggatctgccgccttctgaagcattccaacatcgtgcgtctccacgacagcatctccgaggagggcttccactacctggtcttcgatctggtcactggtggggagctctttgaagacattgtggcgagagagtactacagcgaggctgatgccagtcactgtatccagcagatcctggaggccgttctccattgtcaccaaatgggggtcgtccacagagacctcaagccggagaacctgcttctggccagcaagtgcaaaggggctgcagtgaagctggcagacttcggcctagctatcgaggtgcagggggaccagcaggcatggtttggtttcgctggcacaccaggctacctgtcccctgaggtccttcgcaaagaggcgtatggcaagcctgtggacatctgggcatgtggggtgatcctgtacatcctgctcgtgggctacccacccttctgggacgaggaccagcacaagctgtaccagcagatcaaggctggtgcctatgacttcccgtcccctgagtgggacaccgtcactcctgaagccaaaaacctcatcaaccagatgctgaccatcaaccctgccaagcgcatcacagcccatgaggccctgaagcacccgtgggtctgccaacgctccacggtagcatccatgatgcacagacaggagactgtggagtgtctgaaaaagttcaatgccaggagaaagctcaagggagccatcctcaccaccatgctggccacacggaatttctcagtgggcagacagaccaccgctccggccacaatgtccaccgcggcctccggcaccaccatggggctggtggaacaagccaagagtttactcaacaagaaagcagatggagtcaaggagcctcaaaccaccgtcatccataacccagtggacgggattaaggagtcttctgacagtgccaataccaccatagaggatgaagacgctaaagcccggaagcaggagatcattaagaccacggagcagctcatcgaggccgtcaacaacggtgactttgaggcctacgcattctacttcgagaacctgctggccaagaacagcaagccgatccacacgaccatcctgaacccacacgtgcacgtcattggagaggatgccgcctgcatcgcttacatccggctcacgcagtacattgacgggcagggccggccccgcaccagccagtctgaggagacccgcgtgtggcaccgccgcgacggcaagtggcagaacgtgcacttccactgctcgggcgcgcctgtggccccgctgcagtgaagagctgcgccctggtttcgccggacagagttggtgtttggagcccgactgccctcgggcacacggcctgcctgtcgcatgtttgtgtctgcctc

SEQ ID NO: 3367 - protein, 664 aa, Homo sapiens [sequence omitted]

SEQ ID NO: 3368 - DNA, 1840 bp, Rattus norvegicus; identical to SEQ ID NO: 3364
  ref <308>: DATABASE ACCESSION NUMBER: EMBL / M16112
  ref <309>: DATABASE ENTRY DATE: 2000-03-04

SEQ ID NO: 3369 - protein, 542 aa, Rattus norvegicus; identical to SEQ ID NO: 3365
  ref <308>: DATABASE ACCESSION NUMBER: SWISS-Prot / P08413
  ref <309>: DATABASE ENTRY DATE: 2002-06-15

SEQ ID NO: 3370 - DNA, 1577 bp, Homo sapiens; identical to SEQ ID NO: 3366
  ref <308>: DATABASE ACCESSION NUMBER: EMBL / AF081924
  ref <309>: DATABASE ENTRY DATE: 1999-07-02

SEQ ID NO: 3371 - protein, 664 aa, Homo sapiens [sequence omitted]

SEQ ID NO: 3372 - DNA, 587 bp, Rattus norvegicus
  ref <308>: DATABASE ACCESSION NUMBER: EMBL / M17412
  ref <309>: DATABASE ENTRY DATE: 2000-03-04
gcggctggacattgtcttaggttatatagaagaaatgcttcctcgcagctaaggttaaccaggaacactgacttgaagaggatcaatggattctgcaccaagccacaagaaagtcccaaagctccaacccagtcttacagacacagggtgccgcttcacaagcccacagacttcgagaagaagattctgctgtggtcaggccgcttcaagaaggaggaagagatcccagagacaatctcgtttgagatgcttgacgctgcaaagaacaagatccgggtgaaggtcagctatttaatgattgccctaacagtggcaggatgcgtctatatggttattgagggcaagaaggctgcaaaaagacatgatctttttcgaactggaaaggaaagcccgtctgtgagaggaggcagctatgaaggccaaagcggactagacgtatttgtgctggatttggaaaagccaggagtacggttgcaacaagaagcctgctttagaaggataagggctggggatttagctcagtggtagagcgcttacctaggaagcgcaaggccctgggttcggtccccagctccgaaaaaataaaa

SEQ ID NO: 3373 - protein, 175 aa, Rattus norvegicus
  ref <308>: DATABASE ACCESSION NUMBER: SWISS-Prot / AAA42232
  ref <309>: DATABASE ENTRY DATE: 2001-12-01
AAGHCLRLYRRNASSQLRLTRNTDLKRINGFCTKPQESPKAPTQSYRHRVPLHKPTDFEKKILLWSGRFKKEEEIPETISFEMLDAAKNKIRVKVSYLMIALTVAGCVYMVIEGKKAAKRHDLFRTGKESPSVRGGSYEGQSGLDVFVLDLEKPGVRLQQEACFRRIRAGDLAQW

SEQ ID NO: 3374 - DNA, 1215 bp, Homo sapiens
  ref <308>: DATABASE ACCESSION NUMBER: Refseq / NM_014367
  ref <309>: DATABASE ENTRY DATE: 2002-11-05
gtgacattgagctcaccagcgccaccgtccccggcgaagttctgcgctggtcggcggagagcaagtggccatggggagcctcagcggtctgcgcctggcagcaggaagctgttttaggttatgtgaaagagatgtttcctcatctctaaggcttaccagaagctctgatttgaagagaataaatggattttgcacaaaaccacaggaaagtcccggagctccattcccgcacttacaacagagtgcctttacacaaacctacggattggcagaaaaagatcctcatatggtcaggtcgcttcaaaaggaagatgaaatcccagagactgtctcgttggagatgcttgatgctgcaaagaacaagatgcgagtgaagatcagctatctaatgattgccctgacggtggtaggatgcatctttcattggttattgagggcaagaagcttgcccaaagaccgagactttaaccagcttggacctttagaaaagaaagctcgtctgaaagaaggaagcagctatgaaggccaaaacagattaccaaaggtatccgtgttggttgggattttgaaaatccaggaattatgttttaacgtgcctgtattaaaaaggatgtggtatgaggatccatttcataaagtatgatttgcccaaacctgtaccatttccgtatttctgctgtagaagtagaaataaattttcttaaataatgactgtgttttattgttttgatccaagtcaagtgtagcctctcagccttttggagaaaaatgaaacaatttatttcaacttgaataccaactcttcagagaagcaggtaccatatcttacttctcttcccattatcaaagtaacctctccacaggcgaactcattttgaggagataaggaaggccagttgagtatatggcccaggtgcagcttggagggccagccttctcaaatgtcctggtgtactggtggggaggctgccccctaatagagcgagcgctgagaagcagccagaccacattctataatctttgaacatgctggcagatggaggcttttaggagaatagttttttaaacattctgacaaggtccagccaggaatttctaaggacttagaaatcccagtgtcatggagttgcttgggggtcaacacaagtcacctcttagcttcatgccttagaattctcaactgggctgtttttcttaccacctgagaaactaaat

SEQ ID NO: 3375 - protein, 190 aa, Homo sapiens
  ref <308>: DATABASE ACCESSION NUMBER: Refseq / NP_055182
  ref <309>: DATABASE ENTRY DATE: 2002-11-05
MGSLSGLRLAAGSCFRLCERDVSSSLRLTRSSDLKRINGFCTKPQESPGAPFPHLQQSAFTQTYGLAEKDPHMVRSLQKEDEIPETVSLEMLDAAKNKMRVKISYLMIALTVVGCIFHWLLRARSLPKDRDFNQLGPLEKKARLKEGSSYEGQNRLPKVSVLVGILKIQELCFNVPVLKRMWYEDPFHKV

SEQ ID NO: 3376 - DNA, 1945 bp, Rattus norvegicus
  ref <308>: DATABASE ACCESSION NUMBER: EMBL / M17527
  ref <309>: DATABASE ENTRY DATE: 2000-03-04
gcggcggcggtaccgagcctagcggtcgccgggactcgcgggcgcggatcgtagagcgtcgcgggcggggacggccgcccgaggcggcggcgtatcggttagcagacctcgcctccagcttgccggagctgaggacctagcggggccgcctccgggccagcctctccccgctctgccagccggccccggcgccgagggcgcggcgacgctcggccaccatgggctgcacactgagcgctgaggacaaggcggccgtggagcgcagcaagatgatcgaccgcaacctccgggaggacggagagaaggcagcgcgcgaggtcaagctgctgctgctgggtgctggtgaatccgggaagagcacaattgtgaagcagatgaaaattatccacgaggctggctactcagaggaagagtgtaagcagtacaaagcagtggtctacagcaacaccatccagtccatcattgccatcattagagccatggggagattgaaaatcgactttggagacgctgctcgtgcggatgatgctcgccaactcttcgtgcttgctggggctgcagaggaaggctttatgaccgcggagctcgccggcgtcataaagagactgtggaaggacagcggtgtgcaagcctgcttcaacagatcccgggagtaccagctgaacgattcggcggcgtactacctgaatgacttggacagaatagcacaaccaaattacatcccaacccagcaggatgttctcagaactagagtgaaaacgacgggaattgtggaaacccactttactttcaaagatcttcattttaaaatgtttgacgtgggaggccagagatcagagcggaagaagtggattcactgctttgaaggcgtgactgccatcatcttctgtgtggccctgagtgactatgacctggttcttgctgaggatgaagaaatgaaccggatgcatgaaagcatgaagctgttcgatagcatatgtaacaacaagtggtttacggacacatccatcatccttttcctgaacaagaaggacctcttcgaagagaagatcaaaaagagtcccctcacgatatgctatccagaatatgcaggctcaaacacatatgaagaggcggctgcgtatatccagtgtcagtttgaagacctcaataaaaggaaggacacaaaggaaatttacacccacttcacttgcgccacggatacgaagaatgtgcagtttgtgttcgatgctgtaacggacgtcatcataaagaataacctaaaagactgtggtctcttctaagctctgcagtggggtagtaaaaatgcattttcaaaccagacgagtacttatatatggatctctctagattagagtctcccagcaacagagaatgtagtgtacagcaaatgcatcctggacctgaccagagttctgaccaaagttgttctgtatcgtgtctttaatagaaggacctttcgagaaggcgaaagatggtcctggagtgtgagagggagggttgatgttgaagctggggctctagtgtactgatgatttctgtgtaagtgtaaatatgcaaatgtaagatgtatttataacttctgatttcccacgttatgtttatgttgtaagagtggcaacttatggtcctagtgcgatggctttgggaaaacataactgttaagtaccttgtacggaatgacagattggttctgtgtttggcagttttgatcagctttatttatgttcgtacccctaaattttaggcaccataattaacattaggaaatgtcaacccccttaccctgattctatgtttacttatactcataaaatgttatttgtataaacgttgcacagactattttagtaccatgatttgtatacaggcttttgattcatagggaactagtttgaggttcattactttatgtcaaaaatgacttcttttgcattaggtattc

SEQ ID NO: 3377 - protein, 353 aa, Rattus norvegicus
  ref <308>: DATABASE ACCESSION NUMBER: SWISS-Prot / P10824
  ref <309>: DATABASE ENTRY DATE: 2002-06-15
GCTLSAEDKAAVERSKMIDRNLREDGEKAAREVKLLLLGAGESGKSTIVKQMKIIHEAGYSEEECKQYKAVVYSNTIQSIIAIIRAMGRLKIDFGDAARADDARQLFVLAGAAEEGFMTAELAGVIKRLWKDSGVQACFNRSREYQLNDSAAYYLNDLDRIAQPNYIPTQQDVLRTRVKTTGIVETHFTFKDLHFKMFDVGGQRSERKKWIHCFEGVTAIIFCVALSDYDLVLAEDEEMNRMHESMKLFDSICNNKWFTDTSIILFLNKKDLFEEKIKKSPLTICYPEYAGSNTYEEAAAYIQCQFEDLNKRKDTKEIYTHFTCATDTKNVQFVFDAVTDVIIKNNLKDCGLF

SEQ ID NO: 3378 - DNA, 1802 bp, Homo sapiens
  ref <308>: DATABASE ACCESSION NUMBER: EMBL / AF055013
  ref <309>: DATABASE ENTRY DATE: 2000-03-03
gctttcggcaccatgggctgcacgctgagcgccgaggacaaggcggcggtggagcggagtaagatgatcgaccgcaacctccgtgaggacggcgagaaggcggcgcgcgaggtcaagctgctgctgctcggtgctggtgaatctggtaaaagtacaattgtgaagcagatgaaaattatccatgaagctggttattcagaagaggagtgtaaacaatacaaagcagtggtctacagtaacaccatccagtcaattattgctatcattagggctatggggaggttgaagatagactttggtgactcagcccgggcggatgatgcacgccaactctttgtgctagctggagctgctgaagaaggctttatgactgcagaacttgctggagttataaagagattgtggaaagatagtggtgtacaagcctgtttcaacagatcccgagagtaccagcttaatgattctgcagcatactatttgaatgacttggacagaatagctcaaccaaattacatcccgactcaacaagatgttctcagaactagagtgaaaactacaggaattgttgaaacccattttactttcaaagatcttcattttaaaatgtttgatgtgggaggtcagagatctgagcggaagaagtggattcattgcttcgaaggagtgacggcgatcatcttctgtgtagcactgagtgactacgacctggttctagctgaagatgaagaaatgaaccgaatgcatgaaagcatgaaattgtttgacagcatatgtaacaacaagtggtttacagatacatccattatactttttctaaacaagaaggatctctttgaagaaaaaatcaaaaagagccctctcactatatgctatccagaatatgcaggatcaaacacatatgaagaggcagctgcatatattcaatgtcagtttgaagacctcaataaaagaaaggacacaaaggaaatatacacccacttcacatgtgccacagatactaagaatgtgcagtttgtttttgatgctgtaacagatgtcatcataaaaaataatctaaaagattgtggtctcttttaagttttgcagttcatggtaaaatgcattttcaaaccaaatgagtacttatatatggatctctgtagactagagtcttgcagcaacacagaatgtaatataaggcaaatgcatctgggacttgaccaaagttgttctgttttgtttttttaactgaaagtaacagaaggacctttcttaaatgtgacagatggtcctgcagtgtgaaactgaaggacagtgttaaagctgggctctagtatattgatgatttctgcataagtgtaaatatgcaaatgtatgtatacatgtatttatgactttagttttcgacattatttttaggttttaagagtggcaacttaggattttagggtgatggctttggaaataacataaatataccttgtactgaatgacagactattactacgtttgccagttttaaacagctttatttatgttcatgtcctgtaaatttttaagtacagtaattaatattaggaaacattacagcccttatctagatcatatgtatacttgtattaataaaaatgttatttgtacaaacattgcacagactattttaataacatgatttgttctttaaattttatgtgttttattgaaatgttcttaagatgaatacacctgcctttggatcaactatttaaacattgtatgcattttgatttttcctactttaagaaaataaaataatttaattttaaaaaaaaaaaaaaaaaaaa

SEQ ID NO: 3379 - protein, 353 aa, Homo sapiens
  ref <308>: DATABASE ACCESSION NUMBER: SWISS-Prot / P04898
  ref <309>: DATABASE ENTRY DATE: 2002-06-15
GCTLSAEDKAAVERSKMIDRNLREDGEKAAREVKLLLLGAGESGKSTIVKQMKIIHEAGYSEEECKQYKAVVYSNTIQSIIAIIRAMGRLKIDFGDSARADDARQLFVLAGAAEEGFMTAELAGVIKRLWKDSGVQACFNRSREYQLNDSAAYYLNDLDRIAQPNYIPTQQDVLRTRVKTTGIVETHFTFKDLHFKMFDVGGQRSERKKWIHCFEGVTAIIFCVALSDYDLVLAEDEEMNRMHESMKLFDSICNNKWFTDTSIILFLNKKDLFEEKIKKSPLTICYPEYAGSNTYEEAAAYIQCQFEDLNKRKDTKEIYTHFTCATDTKNVQFVFDAVTDVIIKNNLKDCGLF

SEQ ID NO: 3380 - DNA, 1945 bp, Rattus norvegicus; identical to SEQ ID NO: 3376
  ref <308>: DATABASE ACCESSION NUMBER: EMBL / M17527
  ref <309>: DATABASE ENTRY DATE: 2000-03-04

SEQ ID NO: 3381 - protein, 353 aa, Rattus norvegicus; identical to SEQ ID NO: 3377
  ref <308>: DATABASE ACCESSION NUMBER: SWISS-Prot / P10824
  ref <309>: DATABASE ENTRY DATE: 2002-06-15

SEQ ID NO: 3382 - DNA, 1802 bp, Homo sapiens; identical to SEQ ID NO: 3378
  ref <308>: DATABASE ACCESSION NUMBER: EMBL / AF055013
  ref <309>: DATABASE ENTRY DATE: 2000-03-03

SEQ ID NO: 3383 - protein, 353 aa, Homo sapiens; identical to SEQ ID NO: 3379
  ref <308>: DATABASE ACCESSION NUMBER: SWISS-Prot / P04898
  ref <309>: DATABASE ENTRY DATE: 2002-06-15

SEQ ID NO: 3384 - DNA, 2909 bp, Rattus norvegicus
  ref <308>: DATABASE ACCESSION NUMBER: EMBL / M18330
  ref <309>: DATABASE ENTRY DATE: 2000-03-04
gaattccggggcggcggccgcggggatcccgcgagcggcccctgaacatctacccttcttgccgggacccgggaggtccccactggcctccgggcccgtcctgatcagactcgtgtcgacctccccgtccacgcgcatccgggagagccgcgccacgagacggacccgggcccgccgggacccctggtgtctggccctgcgtcgagaggctggtgactgccacccataagctccagcttcagcctcggcttactcccctcaggggcttgcaggctgaggcctgccctcggacgcggctgaccagcctctccctctcttccacactttggacttctctttggacctcctaaaaaggctccatcatggcaccgttcctgcgcatctccttcaattcctatgagctgggctccctgcaggcggaggacgacgcaagccagcctttctgtgccgtgaagatgaaggaggcactcaccacagaccgagggaagactctggtacagaagaagcccaccatgtaccctgagtggaagtcaacattcgacgcccacatctatgaaggccgtgtcatccagatcgtgctgatgcgggcagctgaagaccccatgtcggaggtgaccgtgggcgtgtcagtgctggctgagcgctgcaagaagaacaacggcaaggctgagttctggctggacctgcagcctcaggccaaggtgctgatgtgtgtgcagtatttcctggaggatggggattgcaaacagtccatgcgtagtgaggaggaggccatgttcccaactatgaaccgccgtggagccattaaacaggccaagattcactacatcaagaaccacgagttcatcgccaccttctttgggcagcccaccttctgttctgtgtgcaaagagtttgtctggggcctcaacaagcaaggctacaaatgcaggcaatgcaacgctgccatccataagaaatgcatcgacaagattatcggccgctgcactggcactgctaccaatagccgggacaccatcttccagaaagaacgcttcaacatcgacatgcctcaccgattcaaggtctataactacatgagccccaccttctgtgaccactgtggcactttgctctggggattggtgaaacagggattaaagtgtgaagactgcggcatgaatgtgcaccacaaatgccgggagaaggtggccaacctgtgtggtatcaaccaaaagctcttggctgaggccttgaaccaagtgacccagaaagcttcccggaagccagagacaccagagactgtcggaatataccagggattcgagaagaagacagctgtctctgggaatgacatcccagacaacaacgggacctatggcaagatctgggaggggagcaaccggtgccgccttgagaacttcaccttccagaaagtacttggcaaaggcagctttggcaaggtactgcttgcagaactgaagggcaaggaaaggtactttgcaatcaagtacctgaagaaggacgtggtgttgatcgacgatgacgtggagtgcaccatggtggagaagcgggtgctggcgctcgcctgggagaatcccttcctcacccatctcatctgtaccttccagaccaaggaccacctcttctttgtgatggagttcctcaatgggggcgatctgatgttccacattcaggacaaaggccgcttcgaactctaccgggctacgttttatgcagctgagatcatctgcggactgcagtttctacatggcaaaggcatcatttacagggacctcaagctagacaatgtaatgctggacaaggatggccacatcaagattgctgacttcgggatgtgcaaagagaatatatttggggagaaccgggccagcacattctgcggcactcctgactacatcgcccctgagatcctgcagggcctgaagtactcattttccgtggactggtggtcttttggggtcctcctctatgagatgctcattggccagtcccccttccatggtgatgatgaggacgagctctttgagtccatccgggtggacacaccacactacccgcgctggatcaccaaggagtccaaggacatcatggagaagctcttcgagagggaccctgccaagaggctgggagtaacaggaaacatcaggcttcacccctttttcaagactatcaactggaacctgctggagaagcggaaggtggagccgccctttaagcccaaagtgaaatccccttcagactacagcaactttgacccagagttcctgaatgagaaaccccaactttccttcagtgacaagaacctcatcgactctatggaccagacagccttcaagggcttctcctttgtgaaccccaaatatgagcaattcctggaatagtgagctcccagacctgcttttaatgccccggcagagtaggcccatctgccctggtttgcatcctcactgcccatgaagaagagtgggtgactggtgattcctgctgctgccccctcttcctcggagagtctggctcctgttggctgggctcacagtacttcctctgtgaactgtttgtgaatttgccttccttttgccatcggagggaaactgtaaatcctgtgtgtcattacttgaatgtagttattgaaatatatattatatatatgcacatatatataataggctgtatatattgctcagtatagaaagcatgtaggagactggtgatgtgttgacctttttttaaaaaaaaccatatgtatacgtgtgtatgtatacatctacacacgtatacatatatgtatgtatgtatgtatgtatgtatgtatatatgaccaaaagaaaagagagcacaagctacctgaaccacaggattgtttatgtgtgtataaataaacactgaatggtaaaaaaccggaattc

SEQ ID NO: 3385 - protein, 673 aa, Rattus norvegicus
  ref <308>: DATABASE ACCESSION NUMBER: SWISS-Prot / AAA41871
  ref <309>: DATABASE ENTRY DATE: 2002-06-15
MAPFLRISFNSYELGSLQAEDDASQPFCAVKMKEALTTDRGKTLVQKKPTMYPEWKSTFDAHIYEGRVIQIVLMRAAEDPMSEVTVGVSVLAERCKKNNGKAEFWLDLQPQAKVLMCVQYFLEDGDCKQSMRSEEEAMFPTMNRRGAIKQAKIHYIKNHEFIATFFGQPTFCSVCKEFVWGLNKQGYKCRQCNAAIHKKCIDKIIGRCTGTATNSRDTIFQKERFNIDMPHRFKVYNYMSPTFCDHCGTLLWGLVKQGLKCEDCGMNVHHKCREKVANLCGINQKLLAEALNQVTQKASRKPETPETVGIYQGFEKKTAVSGNDIPDNNGTYGKIWEGSNRCRLENFTFQKVLGKGSFGKVLLAELKGKERYFAIKYLKKDVVLIDDDVECTMVEKRVLALAWENPFLTHLICTFQTKDHLFFVMEFLNGGDLMFHIQDKGRFELYRATFYAAEIICGLQFLHGKGIIYRDLKLDNVMLDKDGHIKIADFGMCKENIFGENRASTFCGTPDYIAPEILQGLKYSFSVDWWSFGVLLYEMLIGQSPFHGDDEDELFESIRVDTPHYPRWITKESKDIMEKLFERDPAKRLGVTGNIRLHPFFKTINWNLLEKRKVEPPFKPKVKSPSDYSNFDPEFLNEKPQLSFSDKNLIDSMDQTAFKGFSFVNPKYEQFLE

SEQ ID NO: 3386 - DNA, 2909 bp, Rattus norvegicus; identical to SEQ ID NO: 3384
  ref <308>: DATABASE ACCESSION NUMBER: EMBL / M18330
  ref <309>: DATABASE ENTRY DATE: 2000-03-04

SEQ ID NO: 3387 - protein, 673 aa, Rattus norvegicus; identical to SEQ ID NO: 3385
  ref <308>: DATABASE ACCESSION NUMBER: SWISS-Prot / AAA41871
  ref <309>: DATABASE ENTRY DATE: 2002-06-15

SEQ ID NO: 3388 - DNA, 2704 bp, Rattus norvegicus
  ref <308>: DATABASE ACCESSION NUMBER: EMBL / M18331
  ref <309>: DATABASE ENTRY DATE: 2000-03-04
gaattccggaatccggcgaggaaatacatgcactcgctgagaatcgccggcgccaggacgcagcgccacaaggtgtagcgagtgagtggggtggggcaagaggggacccaggagtccccccaggctcccagcgcgcctgctcctgctcttcaatcctgccctcggggcggacggagtgacccccgccccgaccatggtagtgttcaatggccttcttaagatcaaaatctgcgaggccgtgagcttgaagcccacagcctggtcgctgcgccatgcggtgggaccccggccccagacgttccttctggacccctacattgcccttaacgtggacgactcgcgcatcggccaaacagccaccaagcagaagaccaacagtccggcctggcacgatgagttcgtcactgatgtgtgcaatgggcgcaagatcgagctggctgtctttcacgatgctcctatcggctacgacgacttcgtggccaactgcaccatccagttcgaggagctgctgcagaatgggagccgtcacttcgaggactggattgatctggagccagaaggaaaagtctacgtgatcatcgatctctcgggatcatcgggcgaagcccctaaagacaatgaagaacgagtgtttagggagcggatgcggccaaggaagcgccaaggggctgtcaggcgcagggtccaccaggtcaatggccacaagttcatggccacctacttgcggcagcccacctactgctcccactgtagggatttcatctggggtgtcataggaaaacagggatatcaatgtcaagtttgtacctgcgtcgtccacaaacgatgccatgagctcattattacgaagtgcgctgggctaaagaaacaggaaacccctgacgaggtgggctcccaacgcttcagcgtcaacatgccccacaagttcgggatccacaactacaaggtccccacgttctgtgaccactgtggctccctgctctggggcctcttgcggcagggcctgcagtgtaaagtctgcaaaatgaatgttcaccgtcgatgcgagaccaacgtggctcccaattgtggggtggacgccagaggaattgccaaggtgctggccgatcttggcgttactccagacaaaatcaccaacagtggccagagaaggaaaaagctcgctgctggtgctgagtccccacagccggcttctggaaactccccatcagaagacgaccgatccaagtcagcgcccacctccccttgtgaccaggaactaaaagaacttgaaaacaacatccggaaggccttgtcatttgacaaccgaggagaggagcaccgagcctcgtcgtctactgatggccagctggcaagccctggcgagaacggtgaagtccggcaaggccaggccaagcgcttgggcctggatgagttcaacttcatcaaggtgttaggcaaaggcagctttggcaaggtcatgctggccgagctcaagggtaaggatgaagtctatgctgtgaaggtcttaaagaaggacgtcatcctgcaggatgacgacgtggactgcacgatgacagagaagaggattttggctctggcgcggaaacacccttatctaacccaactctattgctgcttccagaccaaggaccggctcttcttcgtcatggaatatgtaaacggtggagacctcatgttccagattcagcggtcccgaaaattcgatgagcctcgttccgggttctatgctgccgaggtcacatctgctctcatgtttctccaccaacatggagtgatctacagggatttgaaactggacaacatccttctagatgcagaaggtcactccaagctggctgactttgggatgtgcaaggaagggattctgaatggcgtgacaactaccaccttctgtgggactcctgactacatagctccagagatcctgcaggagttggagtacggcccctcagtggactggtgggccctgggcgtgctgatgtacgagatgatggccgggcagcccccctttgaagctgacaacgaggacgacttgtttgaatccatccttcacgatgacgttctctaccctgtctggcttagcaaggaggctgtcagcatcctgaaagctttcatgaccaagaacccgcacaagcgcctgggctgcgtggcagcacagaacggggaagatgccatcaagcaacatccattcttcaaggagattgactgggtactgctggagcagaagaaaatgaagccccccttcaagccgagaattaaaaccaagagagatgtcaataactttgaccaagactttacccgggaagagccaatacttacacttgtggatgaagcaatcgtgaagcagatcaaccaggaagaattcaaaggcttctcctactttggtgaagacctgatgccctgagaaactgcttcacatggagttagctcactgcaaggagggtgttgagacaatcccgtgttgcagaggctcagaatgtctcgaactattcgtcctccccagagccccagtcccacatctgctctcttatttattgcatcccctcatcccaggccctgtccttccccaccctcccagtgaccagaaggccctctttggtccagactcaccaagatcacagatttgaactgcgtctgctctgtgtgcagtgctaggtctggagtagccgtccacccacaaccctgaagcagcccggaattc

SEQ ID NO: 3389 - protein, 737 aa, Rattus norvegicus
  ref <308>: DATABASE ACCESSION NUMBER: SWISS-Prot / AAA41872
  ref <309>: DATABASE ENTRY DATE: 1999-07-15
MVVFNGLLKIKICEAVSLKPTAWSLRHAVGPRPQTFLLDPYIALNVDDSRIGQTATKQKTNSPAWHDEFVTDVCNGRKIELAVFHDAPIGYDDFVANCTIQFEELLQNGSRHFEDWIDLEPEGKVYVIIDLSGSSGEAPKDNEERVFRERMRPRKRQGAVRRRVHQVNGHKFMATYLRQPTYCSHCRDFIWGVIGKQGYQCQVCTCVVHKRCHELIITKCAGLKKQETPDEVGSQRFSVNMPHKFGIHNYKVPTFCDHCGSLLWGLLRQGLQCKVCKMNVHRRCETNVAPNCGVDARGIAKVLADLGVTPDKITNSGQRRKKLAAGAESPQPASGNSPSEDDRSKSAPTSPCDQELKELENNIRKALSFDNRGEEHRASSSTDGQLASPGENGEVRQGQAKRLGLDEFNFIKVLGKGSFGKVMLAELKGKDEVYAVKVLKKDVILQDDDVDCTMTEKRILALARKHPYLTQLYCCFQTKDRLFFVMEYVNGGDLMFQIQRSRKFDEPRSGFYAAEVTSALMFLHQHGVIYRDLKLDNILLDAEGHSKLADFGMCKEGILNGVTTTTFCGTPDYIAPEILQELEYGPSVDWWALGVLMYEMMAGQPPFEADNEDDLFESILHDDVLYPVWLSKEAVSILKAFMTKNPHKRLGCVAAQNGEDAIKQHPFFKEIDWVLLEQKKMKPPFKPRIKTKRDVNNFDQDFTREEPILTLVDEAIVKQINQEEFKGFSYFGEDLMP

SEQ ID NO: 3390 - DNA, 2244 bp, Homo sapiens; identical to SEQ ID NO: 3330
  ref <308>: DATABASE ACCESSION NUMBER: Refseq / NM_005400
  ref <309>: DATABASE ENTRY DATE: 2001-12-10

SEQ ID NO: 3391 - protein, 737 aa, Homo sapiens; identical to SEQ ID NO: 3331
  ref <308>: DATABASE ACCESSION NUMBER: SWISS-Prot / Q02156
  ref <309>: DATABASE ENTRY DATE: 2002-06-15

SEQ ID NO: 3392 - DNA, 2704 bp, Rattus norvegicus; identical to SEQ ID NO: 3388
  ref <308>: DATABASE ACCESSION NUMBER: EMBL / M18331
  ref <309>: DATABASE ENTRY DATE: 2000-03-04

SEQ ID NO: 3393 - protein, 737 aa, Rattus norvegicus; identical to SEQ ID NO: 3389
  ref <308>: DATABASE ACCESSION NUMBER: SWISS-Prot / AAA41872
  ref <309>: DATABASE ENTRY DATE: 1999-07-15

SEQ ID NO: 3394 - DNA, 2244 bp, Homo sapiens; identical to SEQ ID NO: 3330
  ref <308>: DATABASE ACCESSION NUMBER: Refseq / NM_005400
  ref <309>: DATABASE ENTRY DATE: 2001-12-10

SEQ ID NO: 3395 - protein, 737 aa, Homo sapiens; identical to SEQ ID NO: 3331
  ref <308>: DATABASE ACCESSION NUMBER: SWISS-Prot / Q02156
  ref <309>: DATABASE ENTRY DATE: 2002-06-15

SEQ ID NO: 3396 - DNA, 2704 bp, Rattus norvegicus; identical to SEQ ID NO: 3388
  ref <308>: DATABASE ACCESSION NUMBER: EMBL / M18331
  ref <309>: DATABASE ENTRY DATE: 2000-03-04

SEQ ID NO: 3397 - protein, 737 aa, Rattus norvegicus; identical to SEQ ID NO: 3389
  ref <308>: DATABASE ACCESSION NUMBER: SWISS-Prot / AAA41872
  ref <309>: DATABASE ENTRY DATE: 1999-07-15

SEQ ID NO: 3398 - DNA, 2244 bp, Homo sapiens; identical to SEQ ID NO: 3330
  ref <308>: DATABASE ACCESSION NUMBER: Refseq / NM_005400
  ref <309>: DATABASE ENTRY DATE: 2001-12-10

SEQ ID NO: 3399 - protein, 737 aa, Homo sapiens; identical to SEQ ID NO: 3331
  ref <308>: DATABASE ACCESSION NUMBER: SWISS-Prot / Q02156
  ref <309>: DATABASE ENTRY DATE: 2002-06-15

SEQ ID NO: 3400 - DNA, 2704 bp, Rattus norvegicus; identical to SEQ ID NO: 3388
  ref <308>: DATABASE ACCESSION NUMBER: EMBL / M18331
  ref <309>: DATABASE ENTRY DATE: 2000-03-04

SEQ ID NO: 3401 - protein, 737 aa, Rattus norvegicus; identical to SEQ ID NO: 3389
  ref <308>: DATABASE ACCESSION NUMBER: SWISS-Prot / AAA41872
  ref <309>: DATABASE ENTRY DATE: 1999-07-15

SEQ ID NO: 3402 - DNA, 2244 bp, Homo sapiens; identical to SEQ ID NO: 3330
  ref <308>: DATABASE ACCESSION NUMBER: Refseq / NM_005400
  ref <309>: DATABASE ENTRY DATE: 2001-12-10

SEQ ID NO: 3403 - protein, 737 aa, Homo sapiens; identical to SEQ ID NO: 3331
  ref <308>: DATABASE ACCESSION NUMBER: SWISS-Prot / Q02156
  ref <309>: DATABASE ENTRY DATE: 2002-06-15

SEQ ID NO: 3404 - DNA, 1832 bp, Rattus norvegicus
  ref <308>: DATABASE ACCESSION NUMBER: EMBL / M18332
  ref <309>: DATABASE ENTRY DATE: 2000-03-04
gaattccgtgctgaagaggcagcagagaaagccgagtccatctaccgccgtggagccagaagatggaggaagctataccgagccaacggccacctcttccaagccaagcgctttaacaggagagcgtactgtggccagtgcagcgaaaggatatggggcctcgcgaggcaggggtacaggtgcatcaactgcaagctgcttgtccataaacgctgccacgtcctcgtcccgctgacctgcaggaggcatatggattctgtcatgccttcccaagagcctccagtagatgacaagaacgatggtgtagaccttccttcagaagaaactgatggaattgcttatatttcttcatctcggaaacatgacaatatcaaagatgattctgaggaccttaagcctgtcatcgatggggtggatgggatcaaaatctctcaggggctggggctgcaagactttgacctcatcagagtcatcgggcgtggaagctatgccaaggtcctcctggtgcggttgaagaaaaacgaccagatttacgccatgaaggtggtgaagaaggagctcgtccacgacgatgaggatatcgactgggtgcagacagagaagcacgtgttcgagcaggcatccagcaaccccttcctggttggcttacactcctgcttccagacaacgagccggttgttcctggtcatcgagtatgtcaacgggggggacctcatgttccacatgcagaggcagaggaagcttccagaggaacacgccaggttctatgctgctgagatctgtatcgctctcaacttcctacatgagagagggatcatctaccgggacctaaaactggacaacgtcctcctcgatgccgatggacacattaagctgacggactacggcatgtgcaaggaaggcctaggccccggcgacacaacaagcactttttgtggaaccccgaactatatcgcccccgaaatcctgcgaggagaagagtacgggttcagcgtggactggtgggcgctgggtgtccttatgtttgagatgatggctgggcgctccccctttgacatcatcacagacaaccctgacatgaatactgaagactaccttttccaagttatcctggaaaagccaattcggattccccgtttcctgtctgtcaaggcctcacacgtcttgaaaggatttttaaataaggatcccaaagagaggcttggctgccggccgcagactgggttttccgacatcaagtcccatgccttcttccgaagcatagactgggacctgcttgaaaagaagcagaccctgcctcccttccagccccagatcacagatgactatggcctggacaacttcgacacgcagttcaccagcgagcccgtacagctgaccccagatgatgaggacgtcataaagaggatcgaccagtccgagttcgaaggcttcgagtacatcaacccgcttctgctgtctgctgaggagtccgtgtgaggccatgagcatctctgttgtggacacgtctgtgaatgaccctgtcactttacccttaactacagcatatgcatgccaggccagacaccgaggctccaagcagccagagagggatgctggccaccaagaccgcagagggggcacccaacaggcacttctagacagagcaatctcttgtgtccaggccccagaggctggctttgtgctggaaggaaccacttcctgtgcccatggcggccctaccagagggtgagacagccacgccgtcttgaaaggcgcacatcttccacagagacagaactcgatgcactgatccgctccaggaaaagttagctgtaatgcccccggaattc

SEQ ID NO: 3405 - protein, 592 aa, Rattus norvegicus
  ref <308>: DATABASE ACCESSION NUMBER: SWISS-Prot / AAA41878
  ref <309>: DATABASE ENTRY DATE: 1999-07-15
MPSRTDPKMDRSGGRVRLKAHYGGDILITSVDPTTTFQDLCEEVRDMCGLHQQHPLTLKWVDSEGDPCTVSSQMELEEAFRLACQGRDEVLIIHVFPSIPEQPGMPCPGEDKSIYRRGARRWRKLYRANGHLFQAKRFNRRAYCGQCSERIWGLARQGYRCINCKLLVHKRCHVLVPLTCRRHMDSVMPSQEPPVDDKNDGVDLPSEETDGIAYISSSRKHDNIKDDSEDLKPVIDGVDGIKISQGLGLQDFDLIRVIGRGSYAKVLLVRLKKNDQIYAMKVVKKELVHDDEDIDWVQTEKHVFEQASSNPFLVGLHSCFQTTSRLFLVIEYVNGGDLMFHMQRQRKLPEEHARFYAAEICIALNFLHERGIIYRDLKLDNVLLDADGHIKLTDYGMCKEGLGPGDTTSTFCGTPNYIAPEILRGEEYGFSVDWWALGVLMFEMMAGRSPFDIITDNPDMNTEDYLFQVILEKPIRIPRFLSVKASHVLKGFLNKDPKERLGCRPQTGFSDIKSHAFFRSIDWDLLEKKQTLPPFQPQITDDYGLDNFDTQFTSEPVQLTPDDEDVIKRIDQSEFEGFEYINPLLLSAEESV

SEQ ID NO: 3406 - DNA, 2146 bp, Homo sapiens
  ref <308>: DATABASE ACCESSION NUMBER: EMBL / Z15108
  ref <309>: DATABASE ENTRY DATE: 1993-09-27
cccaagatggaagggagcggcggccgcgtccgcctcaaggcgcattacgggggggacatcttcatcaccagcgtggacgccgccacgaccttcgaggagctctgtgaggaagtgagagacatgtgtcgtctgcaccagcagcacccgctcaccctcaagtgggtggacagcgaaggtgacccttgcacggtgtcctcccagatggagctggaagaggctttccgcctggcccgtcagtgcagggatgaaggcctcatcattcatgttttcccgagcacccctgagcagcctggcctgccatgtccgggagaagacaaatctatctaccgccggggagccagaagatggaggaagctgtaccgtgccaacggccacctcttccaagccaagcgctttaacaggagagcgtactgcggtcagtgcagcgagaggatatggggcctcgcgaggcaaggctacaggtgcatcaactgcaaactgctggtccataagcgctgccacggcctcgtcccgctgacctgcaggaagcatatggattctgtcatgccttcccaagagcctccagtagacgacaagaacgaggacgccgaccttccttccgaggagacagatggaattgcttacatttcctcatcccggaagcatgacagcattaaagacgactcggaggaccttaagccagttatcgatgggatggatggaatcaaaatctctcaggggcttgggctgcaggactttgacctaatcagagtcatcgggcgcgggagctacgccaaggttctcctggtgcggttgaagaagaatgaccaaatttacgccatgaaagtggtgaagaaagagctggtgcatgatgacgaggatattgactgggtacagacagagaagcacgtgtttgagcaggcatccagcaaccccttcctggtcggattacactcctgcttccagacgacaagtcggttgttcctggtcattgagtacgtcaacggcggggacctgatgttccacatgcagaggcagaggaagctccctgaggagcacgccaggttctacgcggccgagatctgcatcgccctcaacttcctgcacgagagggggatcatctacagggacctgaagctggacaacgtcctcctggatgcggacgggcacatcaagctcacagactacggcatgtgcaaggaaggcctgggccctggtgacacaacgagcactttctgcggaaccccgaattacatcgcccccgaaatcctgcggggagaggagtacgggttcagcgtggactggtgggcgctgggagtcctcatgtttgagatgatggccgggcgctccccgttcgacatcatcaccgacaacccggacatgaacacagaggactaccttttccaagtgatcctggagaagcccatccggatcccccggttcctgtccgtcaaagcctcccatgttttaaaaggatttttaaataaggaccccaaagagaggctcggctgccggccacagactggattttctgacatcaagtcccacgcgttcttccgcagcatagactgggacttgctggagaagaagcaggcgctccctccattccagccacagatcacagacgactacggtctggacaactttgacacacagttcaccagcgagcccgtgcagctgaccccagacgatgaggatgccataaagaggatcgaccagtcagagttcgaaggctttgagtatatcaacccattattgctgtccaccgaggagtcggtgtgaggccgcgtgcgtctctgtcgtggacacgcgtgattgaccctttaactgtatccttaaccaccgcatatgcatgccaggctgggcacggctccgagggcggccagggacagacgcttgcgccgagaccgcagagggaagcgtcagcgggcgctgctgggagcagaacagtccctcacacctggcccggcaggcagcttcgtgctggaggaacttgctgctgtgcctgcgtcgcggcggatccgcggggaccctgccgagggggctgtcatgcggtttccaaggtgcacattttccacggaaacagaactcgatgcactgacctgctccgccaggaaagtgagcgtgtagcgtcctgaggaataaaatgttccgatgaaaaaaaaaa

SEQ ID NO: 3407 - protein, 592 aa, Homo sapiens
  ref <308>: DATABASE ACCESSION NUMBER: SWISS-Prot / Q05513
  ref <309>: DATABASE ENTRY DATE: 2002-06-15
MPSRTDPKMEGSGGRVRLKAHYGGDIFITSVDAATTFEELCEEVRDMCRLHQQHPLTLKWVDSEGDPCTVSSQMELEEAFRLARQCRDEGLIIHVFPSTPEQPGLPCPGEDKSIYRRGARRWRKLYRANGHLFQAKRFNRRAYCGQCSERIWGLARQGYRCINCKLLVHKRCHGLVPLTCRKHMDSVMPSQEPPVDDKNEDADLPSEETDGIAYISSSRKHDSIKDDSEDLKPVIDGMDGIKISQGLGLQDFDLIRVIGRGSYAKVLLVRLKKNDQIYAMKVVKKELVHDDEDIDWVQTEKHVFEQASSNPFLVGLHSCFQTTSRLFLVIEYVNGGDLMFHMQRQRKLPEEHARFYAAEICIALNFLHERGIIYRDLKLDNVLLDADGHIKLTDYGMCKEGLGPGDTTSTFCGTPNYIAPEILRGEEYGFSVDWWALGVLMFEMMAGRSPFDIITDNPDMNTEDYLFQVILEKPIRIPRFLSVKASHVLKGFLNKDPKERLGCRPQTGFSDIKSHAFFRSIDWDLLEKKQALPPFQPQITDDYGLDNFDTQFTSEPVQLTPDDEDAIKRIDQSEFEGFEYINPLLLSTEESV

SEQ ID NO: 3408 - DNA, 1159 bp, Rattus norvegicus
  ref <308>: DATABASE ACCESSION NUMBER: EMBL / M18529
  ref <309>: DATABASE ENTRY DATE: 2000-03-04
ggccacaccaaaggaagccatagagagcctgatatcagagtattcttggaagaggcaggagaaaatgaaagccaatctctgctcctaccttacatgtttgtgttaggggtgtcagataaactggtctggtatctctgtctgatgcatggaactattgtagctgaagaagaacatagtttcagggaagaaaggcaatagaagggaggctctgaatagcttcaaagggtcagacccaatttactttctaaagtagctagggactagggaataactcaaaacccacaagactgtatacatgtgtcctggcttcattgttcctaatctgtagggttaagtgtgcttttctgtgtgtctgtctataacatgcataatgcactgaaagggagattttccttgttacttcataccatctctgcactaccttcctcaggggctgatgctgcaccaactgtatccatcttcccaccatcctcggaacagttagatactggaggtgcctcagtcgtgtgcttcataaacaacttctatcccagagacatcagtgtcaagtggaagattgatggcagtgaacgacgagatggtatcctggacagtgttactgatcaggacagcaaagacagcacgtacagcatgagcagcaccctcacgttgaacaaggctgactatgaaagtcataacctctatacctgtgaggttgttcataagacatcagcctctcccgtcgtcaagagcttcaacaggaatgagtgttagacccaaaggtcctgaggtgccacctgctccccagatccttccaatcttccctcctaaggtcttggagacttccccacaagcgacctaccactgttgcggtgctccaaacctcctccccacctcatcctccttcctttccttggctttgatcatgctaatatttggggaatattaaataaagtgaatctttgcacttgagatctttgtctttcttactaaatagtggttaacagttatttatcctgttacctggtttctcttctaaagaagttaaatgtttagttgccctgaaatccaccacacttaaacaacaaataaaactctcccccttgccctacttggttgtccactacatggcagtcctctctaaggttcacaagtactattcatggcttatttctctggg

SEQ ID NO: 3409 - protein, 107 aa, Rattus norvegicus
  misc_feature (1)..(107): Xaa=Unknown amino acid
ADAAPTVSIFPPSSEQLDTGGASVVCFINNFYPRDISVKWKIDGSERRDGILDSVTDQDSKDSTYSMSSTLTLNKADYESHNLYTCEVVHKTSASPVVKSFNRNECX

SEQ ID NO: 3410 - DNA, 998 bp, Homo sapiens
  ref <308>: DATABASE ACCESSION NUMBER: EMBL / S65921
  ref <309>: DATABASE ENTRY DATE: 2000-03-04
gcggaagtgtcggccgctccttggtgtgtgttaactcaggaagataaaagacgacataaaacaacagccaggactcagcatggacatgaggacccctgctcagtttcttggaatcttgttgctctggtttccaggtatgaaatgtgacatcaagatgacccagtctccatcttccatgtatgcatctctaggagagagagtcactatcacttgcaaggcgagtcaggacattaatagctatttaagctggttccagcagaaaccagggaaatctcctaagaccctgatctaccgtgcaaacagattggtagatggggtcccatcaaggttcagtggcagtggatctgggcaagattattctctcaccatcagcagcctggagtatgaagatatgggaatttattattgtctacagtatgatgagtttcctcggacgttcggtggaggcaccaagctggaaatcaaacgggctgatgctgcaccaactgtatccatcttcccaccatccagtgagcagttaacatctggaggtgcctcagtcgtgtgcttcttgaacaacttctaccccaaagacatcaatgtcaagtggaagattgatggcagtgaacgacaaaatggcgtcctgaacagttggactgatcaggacagcaaagacagcacctacagcatgagcagcaccctcacgttgaccaaggacgagtatgaacgacataacagctatacctgtgaggccactcacaagacatcaacttcacccattgtcaagagcttcaacaggaatgagtgttagagacaaaggtcctgagacgccaccaccagctccccagctccaccctatcttcccttctaaggtcttggaggcttccccacaagcgacctaccactgttgcggtgctccaaacctcctccccacctccttctcctcctcctccctttccttggcttttatcatgctaatatttgcagaaaatattcaataaagtcagtctttgcacttg

SEQ ID NO: 3411 - protein, 237 aa, Homo sapiens
  misc_feature (1)..(237): Xaa=Unknown amino acid
MDMRTPAQFLGILLLWFPGMKCDIKMTQSPSSMYASLGERVTITCKASQDINSYLSWFQQKPGKSPKTLIYRANRLVDGVPSRFSGSGSGQDYSLTISSLEYEDMGIYYCLQYDEFPRTFGGGTKLEIKRADAAPTVSIFPPSSEQLTSGGASVVCFLNNFYPKDINVKWKIDGSERQNGVLNSWTDQDSKDSTYSMSSTLTLTKDEYERHNSYTCEATHKTSTSPIVKSFNRNECX

SEQ ID NO: 3412 - DNA, 31737 bp, Rattus norvegicus
  misc_feature (1)..(31737): n=a, c, g or t
  ref <308>: DATABASE ACCESSION NUMBER: EMBL / M19359
  ref <309>: DATABASE ENTRY DATE: 2000-03-04
gaattctttctttcacaccttttccatgatttataacatatttattattaactatatttattaacagctattaaccttccttatgacttgtcaatagttgttatacacatatttatgtatgaaccactggtttgatatcattgaataaggtaaatattttattaaatatataaaatatgctttttttgttgttttctttttaagacaggattttctgtgtagccctggctgtcctgaaactcactctgtagaccaggctggcctcaaacgtagacatccacatcaaaagcatgcgacatcaccacctggctgagagtatgcttttatggtttttcattttaggaaattgtttatcttatatatttggaattcttcattttccctgtaagttttaaacccctatgtaacaaatctttcttcccaatgttctttttatttccagacaccgagttttgtcacaaactaagagaaaggcaataacttttcaatactcccagcttttctggggaacatttaagtgggtgtgttttgtttgtttgtttggttggttggtttggttaattttattttgtactagtagcttgttttaatcagcatggatatgagcaatatttcctggcatagctaatctccctacactttactttcttttctataaaagaaaacgtactgggtaccttacagggttagttcaagaatgaaatgattagcatatgtacaaaggctcagagaatcacccaaaccatagcatgtagaaagatacctgtccactttcttcctggagaacccacagtatcacggaaggaagccagataggaggaggaggaatctaagtttaaattcaaagtaatagatggaaaatctaaaatagtatgctaccaccacagagctgaagaatgaattatttttggcagcactagaccaaagaagtgtgactttcgtgattatttttaaaatttgatttggagacaattgcaagcttcgagatatgttgcttagaacaaaagacacagattaacatctgtgttgctgtctgtcccaccagcttagtgactttctctttgtctattctccctgctgtctttcgcttgtgtttacagacattgacaatcttttctgagctattacaacttgtgcataccctatcaacgcaccctgtatattttactgtgtcctcctaagaaaagcnaagtcatttccttaagtaaccaattattaacttcagaacctaaaacattgctacttttatccaatctatcactcacatagcattttttttccacttgctcagataatttcccctttaaggatccaacatgagatcacatactgccttcagttgagaaatacaattccttttcagatatttcagaattgttccatggaaattcttttacatctccatctatctaacccatctgttggtatctgatagttgaccttaactccaatagagagctagtgtgtgtgtgtgtgtctgtgttatacagatgtgcttggtaccaaaaccatcctgtccttctgcaggtcacttagaaacatggactagcaccatggatgtgtaagagcttctaggagcagccaggatgcaccgccttaaagccacagctgtcaccggcagcacacgctttgtctgcagttagctcttgatgtgacctgcattgactctcaagtttcgccactgagctgtcttcttttagaagcatatcttccagtttgacaaacggaagaagtgtgtctgtctatcctatgctatttcattctatgcctggagactgctggagcatccagagggggttcactatttctaggtgtgaccagacaatctggctttgatacacattttagcaaatgtatatcattaaatattgcatataattctagagaaggaggccgttttccaaagttttaatcccaaatcaaatcaatgtctcattagcatacttccaaaatagagaaaatgtaaactcattccatttcaataaagtttgaaaagagaaatggatgctggctctctctgggtagaacatgatgaccagtagggaaagagaatgggctgctcttttccagtgccaacaaggcacatggcttaaccagtgagcaaaacaacttggtcaggtgaatgtcagaacacatcataccatctccccattcctaaagactgggacagccatctccttgcatgagggtcttaagggagtttgttgacctcttttgaaaatagtgaggtactcccatgtggggtcatggctggggaggtcactgtgggcctttccacaaggggcttaatcacagttgtacttgaagttcaccaggacacttgggaagctaggatagaggcagaggggaacatctgtggcctgtagccctcaccatgctccagccactgaggactttgccgactctgcttctgtgcagcctcacttcctgctgtctacccttccaccatctgtacatgcccgggaagggatgaagtgatgcctgaggattttcatgtgcctgcattgctaactctagccgggtgtcctcatgggcatgactccactacctaaaatatgcacaggatgggatgacagcagataatccaaggctggaccatcctccatgcctgcaataggcaagcacatggaggaaaacaaagaggaaagttcttatagctgtcaccctggctcagggaaaccaacagtttggtgagggaaaacacagacaagtctgagcactggttttaagaacaaaaggtaatcctggaagaagagtggtaacaggaagaatggctgtcttctcctaaccagtgtgagatctattcattttagaccaagaagaaatgtttcaccttatcatcatcacatatatatatgcatatcgcattatatattatatgtatatgctatatagatcatatatacttatatttatatattatagatatatgcttttaaccattaacttaaacatcacacatttaaaattcactttactgctttcatctgctgaattcataatataaatatatataatagaaaatttaaaaattttaaaatcaaaaggaagaaataaaacgaaggcctctatataaacttacctaccattcactgatgaccagggttgacattttagtctatacacaggtctaatctttttatcttaaacatgtgcaagtttcaaaacatcaaacccccatactacaggtaaagacatgcaactgtctttcatttagagaaatttgtttatttttctgctgctgcctcttggtgcctgagtgcggctctggaactcgtgtaattctcatgagctcccacaaacggaggcgccaccctccactcagcagtttctataggcaaacactgcaaaacgctgcgtacataatgcatttctagagcgctgcatagggtgagaagcgcgccctttgtctccaaggtcataatggctctgctgacttgaattcctttcactgagctagtaaggacaactcgaaaatgccagagagaatgagagccccctaccccatgatcccaaatgaaaaagcgagagaacacagaaatccccttacacattaccccccaggccccttttgtgttgttcttgccaacacagcagccatcctgctgtatatatatcagctgccactcctgtccccatcacactcaacactgaccatttgctgtcaacaacgatgggaaaggtgagccaagggcgaaccctccaggtctgttgagtgccccctctgtgtgggggatgcggcttccggttaaccatgtgttgttaccccttctcctttacagatcaccttctacgaggaccgaggcttccagggccgctgctatgagtgcagcagcgactgccccaacctgcagacctacttcagccgctgcaactccatccgcgtggacagtggctgctggatgctctatgagcgacccaactaccagggctaccagtacttcctgcgacgcggggactaccctgactaccagcagtggatgggtttcagcgactccattcgctcctgccgttccattccctatgtgagtattgctgcagccgtgctgatgtgagaacactggtcttccttttggccagtttgttcccatttctgttctaatgttctcagcaaagataggaatgcttgacaaatgctcacactaaaaccaaggcccgactcttacagctaaatagaacgaacatgtatacacacccgaacagcagtataagcaatatatagtttcttacttaagggcatgagtgttttgagacataagaaacaacaacaggacctttaaaactaaactcggctgaataagcacatacccttcagccataaaagaaggaaatcctgtcatttgtggtgacatggatgaacctggaggtcactgtgctaaaaggaaggagcaaggtacgtaatgataaaggccacaagttctcgttcgtatgtgggatctacagcagcaggttcatggaggggtgaagatcgggttggggatttacctcagcggtagtgtgcctgtgtagcaagcacgcagccctgaattctgttctgagggtaaaaatgagagagagaggggggggggagggagagggagagggagagggagagggagagggagagggagagggagagagagagagagagagagagagagagaaagagagagagagagatactagaggctagagtggcaaagtcaggaaccagaggtttggaatgacagtcagaaaaagaaaaattacagctagagagaactgtgttctagaaatccgttgtgaagcatggcaatgacagttcatgttatctactagttattaaaatcatgaaaggtaaggctggaagatggctcagtggttaggagcactggctacccttcttgaggacctgggttcagttccctgcgcccacaagtggctcacaactgaggactccagtcctaggaaatcccatgaactccaaaagggcaactcatgtagtacacttacaaacacacaggtaaatacttacagacataaaataaaaagaaatacatcttaaacgcacaataaaaaaatgccgaaagagtggaatctatgtattttcagcacaaaaataatgtgagataagaatatatatatattgcaaaatcaattaaatttggttagagctagtgtattcagattttattggtgagatttttttattttactatacactctcacactcacctagagcctagaacaatgtgtgtcaactcgtgtggttttggttttttttaataagtcattactgactagtctgttatgaaacacgtgattagaatttcatgagataatgtctacatcacctgtctgaaaggaaggagaaagaaagaaagaaagaaagaaagaaagaaaggaagaaagagagaaaggcaaaaagaaaaggaaaagaaaaagaaatttatgtggactcgaagtaaatccgaatcattgcacatcatgcatacaaaaggcagcttcgaagtaagcttagtaggatttggttccacgggcagtaaatgctttcactccctgcctttcggtattcgtttccttcacaagagttcactggtcaggtcagctttatgtgagtgcatttcctaatctgttacaacagcagcacaaggagtaggcttaagggagacgcacacttgacagattcgcccgaaagccgtgttttgtgactgtgcacagaggctgtaactctgagtgcatacatcgctgtttctcctcttctgtcttcctcacaacagaccagctctcacaggataaggctgtacgagagagatgactaccggggccttgtgtctgagctcacggaagactgttcctgcatccacgaccgcttccgcctcaacgagatctactccatgcatgtgctagaaggcagctgggtcctctatgagatgcccaactaccgaggccgccagtacctgctcaggcctggagactacaggcgctaccacgactggggcgccatggatgccaaagtcggctctctgagacgggtcatggatttgtactaagccccattttgcttgttacaacacacacatgcaataaatatacaacttgtgttcctggcactaagtggctctcgcttatcttcaatatctaaatcctatttagtggtgtcctagtaaacttaatgctgaaagaggtttcaaatgtccaccctctgtcctcacatcttcacttgcaaatgttcattgcaatgagtcattgtctggttcatggcctctggcttctgtgacaccatcgttatcagatcctcaccagaactcctcctggttatcttgttgttgtcctatgtcatggagatcctgcagctttggatcagcaggactgtttctttcacacatcccagccatttgcagatgatatacattttggggtgggccaactctgagccctggacctgggcctggtcggcagctgagttggtcagcctgccggctttcccttatttgtaccacaggacaggacaagctctctagcactgcttcggctaggctacccaatcgctgccattggcagaggcaggaacctcctctctctgctctcctgctctctcaccctctggactgactcaatcctgcctttgccatcaaggtcagctccactgtgttgcccactcaaggtacatggcccgctctcctgagtgttacagacagtgaagggacaaggatagctctcttattctcatgatcccagagccggctctccccattgccacagatggtgaggggtgaggaggaactggggcatcaccccgcacctatgccacctcttgcacggccagccctcctgatctcacatcctcagggctggttctacaccccactaccagggtcaacgctgctatgctgtccaggcaaggtacagggctcatttcctgagtgctaaagctggtgaggggcagcgatagctctcccactcttatgaccccagggccatctcttccagctgccccaggtggtgggagcatgagagggtaggtgtttttgttttcgattgaggcacggtttctctgtatagccttggttgtccaggaagtcactatgtagaccaggttaggcctcaaattcagagacgcctccgcctccgcctccgcctccgcctccgcctccgcctccgcctccgcctccgcctccgcctccgcctccgcctccgcctccgcctccgcctccgcctccgcctccgcctccgcctccgcctctgggtgctgggattaaaggtgtgagccaccaccacctgttgataatattcttaaattaaattaacatttaattttaattaaatcccaccaaagagaaaacaaacaaaagtgttggtgaggatgtagaaaagttggaacccttttaaattttcgacgggaatgtaaaatgatgctccttcgtagaactttgttatccctctaaacagttgccttagggctagcaattccactatgggtgacacaagactgaaaacaagggctcaaatggaaatctatacatgaattgcatagtaatactttcatggcagctaaaaggcggacgcagcccagtgtcctgatgtcgatagagttgccagacaaacacagtgagaggtgatatctggccatcagaggaatgaggttctgatcacgccatgatagtgtacaaagaagactcacacagaccacagacgacacagacgacacagatcacatacgagtgcatccagttatatgaagtgcccaaaactagaaagagcattagtggctgcttagggctgaggggatggctaactaaggttgtgatctctggagtacagctttttgttgaggcgataaacatatctgtacacacactaaaaacactgaactatgaacatagaacggtatggccaaagctgtctcaaaacactccccatctgattcagaaagcttcttaattgaaggtattctttctgactgaaagaacatgtggggtaaaatgaaattataaagctcaaaacactgggactccaaccagtatcaactatggcagaaaaacctttggcttgctgggagcttggctaattcgctatcccacctgttagtgactaatgacttacagctggtgcattcgaatttcctttttaacaaaaaaaggtaaaggcctgggtcaggtctcatggaaaacatctgtgctaacttgaaatctcatctccttttagtctagaagaactgaacagtacagaaaactnccttttcagttcataaggcttaatgcattccctgttttcattttccaaaataagggtgtggagaaggttcgcgtccttcaagcgcagacgtgataaggccctgtaggtttctaggtgagatgcatctgtggttcagtgcctcggtctggatcccataaacttggtttcggactgtccaccttgtggctgtgtgagcttgagcgaggtctgtgttctccctagtttcgattctgcactttcatgctctcaggaagattaaatggcactccgcctgtccacgccagcagatcgtagaggctcaatagataagcaccctcacgcctttggtttgcccccattacactcagaccttatggtcatgtgtgcgctgtctccagggaagtcacgggagaacaggagcagagggatgagctatttcccagagagtttctctaagtcaagtgaatgtgaatagtctattttattttgccacttcgcctcaaaaaccacaatcttcctgcctcagcttctcaggtagctggaattctgggcatgtcctaccttacctacagtgctctgctgttgagcttcacctcttactgctgtatcacatgtctgtacccaaactaatgaaccacccttctggttggtcttattaccaaacaagacgatatcaattggtctgatgccgtctgaacacactagcactccagttatggccaaagcacaccaaggctggcagagctgagtagactatgtgggtgatagggcttgtagattcatttctgaagaagagatctgcactcctgagaagatgacatctaaagaggacaagccactagcatgtggaaaggccattagttttaaagcattaagtcttggggcaaatagatgagtttaatctccattttctctcttcactacagtgcatgcctctctataacgtaagcaaacatggagagactgtgatgccctaacctcgaattatactatcagttgacatatcaaagatgttaatggatattacctctgacaagtatcaaaatgttggcagactgtccctctgatcaaaacttgagctgggtaattctggttgctcagcttggctctgaccttggacttccctctatgctggtgcacagtgagattgagccacaaacctgctctctcagttactgactcccttccagccgtgaccaccctggcccgcattcctcatttatcttgctaatcagtttagctggagcctccttatccttgccgtttcctcttagtaattctctgtccagtgtcctgcttattgaccaccaacctacttgtacatttgtatggagtcangctaatacctgctcattacaaaacccacacacatagttattcctcttacccgcttttnctatacctcttgctaaatagtcttgccaccattagcagctagtangactaatttttcttccataatgaattgtttgctgttaactgatatagttcnttttccactcctgattgcttttggcntgtactttaaaactcattatgttctttgattttcataaattactcttaccttataaatgaggaaactgaggattgagaggttaaatgagtctccagggattaaagaagcattaccaaaaattgctaaatatgtgtggatgtatgtatgcatggttcccctacacatattctccatgaattgtgactattcagaagttcctctgtgttaaaaaacaaagttttaaaggaagcaatgtgaaaataaagaattacacaggaggaaagtcattccacagtgttgtttgcaaacactggatcttctaagtcagtggtcatcaagccctgagagcatcatttgtgcccaggtctctgatgctcccagtttagaaattgtgagcagaagccactgattacaggcccagacattgtcataattcttcacttatctgaagaggctaactctcaccactgaatcagcattttatttctaggtatcttatttaatcgtcaacatgtcataatacattntttgcttcatgaatgctttgggactgccattntttggtcaagatgttggagcaaattctacagcatcacatggtgcaagctaaggagtaggcaggatgcacaaatataactacctcgatactttttcatctgtaacaaactacctgatagaaatacctcagggaagcaaagattcatttggctcacaatttcggaggattatcacctgacatggtgaggaaggataatggccggagagagcaagccatggctgccgattgcatatggtagcccaccgggagacagaaaaattgggctggaaagagaagagataatacaacacatgcccctctgactgacgtatttttttttaattaggtcccatttgctaaaggttccacagcctgatatacaaaacaccatatgaggacaaagtcctcaaaacatggggctgtggagaatataacacaatcaatatgtccatgaccccacaaagagtgataacaagaccaggatataaactcttgcttattaagatctactatcaccacccctttttattagggtggcataggttaccacgaaagctggttggaccaagaatgctaactgtgacaggggttatctcgagacactctgtcccctgggcactttggagctgcctgaatccttcatgcccacaggatattagattcccttgctcctgccaggaaaataaacctttgatcacatgtgaaatggagagccaacagccacttcttagagatcatggttaccacaggaaatcctttcattataacgggcatccatgtggctattacaagatggactctttgatttgtgtgctctaagcaccaaacagactgtaagagatcctctaatgccacagaaacggaaccgagggagcatgctgctctcttccccttctaatcttcatcacagctggacagctccagtggacgaaactgtactgtctaacttcatccactttggagctccctgaagactgcttcttcattcaggatcctgtcctctcagggcactgtcttcctcccccagaccacagaagccctggacctgctctgagatgcccttctgcaaaggagagagcatatcctcgtagctctaaaggaaacaagcatccattattgaagaggggaaacggcaaatccacaaggagttacagctgacactgagacatgtgcaaggctcgggtcctattggacctggtccctttctaaactcctgttcctttgtcttgatttatttttctttttggaatttcataccacatttactcattatttctgtgtaagcatttatactcatgggtaggtcagagaagaactttagggaattagtcctctcctcccaccacatgggacccaggaatctatcagattttcaggctggataacaagaagagccttgcccactgatctgtcttgctgagccctgatttattgttctctcctaagatcattgacctctctgtgcatcagaaccagatcactttgtcaggcatggtgatgcagatctgtagtcccagtaccaggaggctgaagcttgagaaacacaaacaatttgaggccagccttggttacatagtaagtcctgtctcaaagtgtgtgaggtgtgtatgggagaacacagaggttnggtgaggcttaataaaaaacaaaggtttataaaaaatatacagaaacctactgctttataaactaactttaaaaaacaattttaaagatgttttattttaattatatggggggagtgtggcatgcgtaagagtcagaggagggtataggacccctcaaagctggcgccaacagtagctgaaagctctggacacagacactgggtcttctataagaacagtatgtgcttttaattaccaagccatttctccaatccccctgccccccgcccaatataaaggagagctctaagtggctgaataatgctcctcccagaagcattaggttttaaatgaaaatcccggtgctggatgtgggatactttcctatgagcattaccagggagatccaaaatgttagagactcttcccactgcttttggtcgtctgccaaaactagatgatgaaacttcattgctgcagacactaaacactttggacacaggacctagagaaaccaagttggaactaagctagaggccttttctctgctagctagtgttcagtgtgtcaaaggttatgcaggggaaaagttatcaatgttcttttccagccacgggctctgaatgctacaataccaatatgccagacaagatatggctactgtgggcatacccaactgcttcctggttgtatttcaaaccatcttcatgggaggaaatatatattcttgctattttaactctggccaaaagtctatggctggagacgtcgtcacaggccctggtggggaaagtagtactactgttgttttattaaacggatgtgtagtcaaactgccttctaaatgtttatgattctagccatacgttagtgtggctttcaggtgcggttagagaatctctctctctctctctctctctctctctctctctctctctctctctctccaaagagggtgatggttaatacagagactaattactggtgagagaattgaaaataaatgaatattaaaatactctgccttaagtgggacattggtaatattccctgcaaaaccttgcataagaagaggtagaaagattgcaatgtttaagatctgagaggagtgctatgcaatgctgttttctgtatttggcatagccattggaatcatgggcacatagctaccttcacaagaagcatacacctgtacataacacacacacacacacacacacacacacacacacacgcacgcacgcacgcacgcacgcatgcatgcacacacacacaaatcctgaatgtaggagggggacccggcttggaagaaaggagtcagcaggatcttaaattgtcgtatatggaatataaaatgttctccctttctccagcctcatgaattgaatcttggccctcagctgatggccctgcttgaagagggattggaaaccatgagagataaagtctagactgggggtcgggggaggagaggggtcaagtcagggagttaggagtgtctttgaaggttatgcttggcttgacccctttctcctgcttcctgtctgccctgatgtgaagacctcctcctctccacacacccacggatgttccgacttaccacaggccaaaaacaatagagccagggctgtggaatcccaaaaccaaggactgaaaatgagtctttctcccctcctttgtgtcacattgttgtggtacagtacaccgcctgactagtatatgcttcacttaaacatcagactgtcaacgaaaacaggggtgatttaagtcacattaatgctcactcactgaggtttcgttcccatcctacaccgagtgacattgaatatattgagttatatataaaataaagttgtggggcctggagagacgactcagcagttgagaacacttcctgaggtgctcaattcccagcaaccacatggtggctcacaaccatctgtaatgggatctgatgcccccttctggtgtgtctgaaaacagtgacatgtactcacatacattaaaaaataataaataaatattaaaataaaataaagttgtgactttcctcctttcaagggttagaaatcttagcacataaaaatgacagtgtttttcagtgagtcctgccgggtgaacttgagtactggagaagcttaatcaagatattggtcctgccaaggttggagcccccagtgtaagggaatgtgggggagagggggtggatggggaggggaacagccttatggaaggggagggggatgggatagggggtttatgtccaggaaactcggaaagggaataacatttgaaatgaaatttaaaaaagaatccaataaaaataaaaagatatggttaagagtccggcttgatcattactttttctccactgaaatagtaactgtttattaaaaggctaataggatcaccttagctggtgttactgttcactttatttaagagggctcaggatggatggcatgtgtgcagcacactataacaatagggagtgggctttatatgccttgacgcctggaaaccagataccactgcattaccttagctggtgggatcaggacaagtgcttcttagcgtgagccctgtggtccactgtcacaccatcactcaggaccaaggtgctccgtcccacagacactgacagctcgaaagtcagtgcaatgagcctccagaacgtccgtcagccaaaggaagctgctgagcgtaccttatcctacattgtctctctccatggtggcaacctacatcgatttactgagcattaaaggggcacgaagtcccagccccttgttcagtccatgattgctctagattccctgaggaagtcaccaccattttattttctcacaattctaatggcatgcaggagaccctgtggaaaagagatggacaagctcagtttactaatgacttggcttgatatatgggttcaagccaaaagcagtgttattgcatgatgagacctgtggtaggtttgaatatgcttgcccaggagggtgcactattaggaggtttggccttgttggagtaagtatggccttatgggagganggtgtgtcactgtcggaggtttgagaccctcctcctgnnnnnnnnnnnnnnnnnnnnnnnnnnnnnnnnnnnnnnnnnnnngcttacaggttcagaggttcagtccactattatcaaggtggtgtatggcagtatccaggcaggcatggtgcaggaggaactgagggttctacattttcatctgaagggctnnaggagaaacctggcttcctcaggcagctaagaggaagctctcaacgcccacactcacagtgacacacttcctccaataagaccacacttccaaatagtgccatcctgggccaagcatatttcaaccaccacagccagtcttctcctgtctgcctttggatcaagatataaaacttttgctcctccagccccaggtcttcctggacattgccatcttcctgacatgatgataatggactgaacctctgaagctgtaagccagcaccaatcaactgctgtctcttcacagcagtggaaaccttaactaagataccacctcactcaggtggcccccaaaactgcagtgaaggtagtcctcccagggggaaaccttaaagaagtgagtgttgtgctggagagatggctcagtggttagaagcacttgctgttcttgcagatgacttgggttggattttcggcacccacatggcagctcatggccatctgtaactgcagtcccaaaggatccaaagccctcttttgatccctgtaggcaaaaggtatgcatatggtatgcatacgtatctgcaggcaaacactcataaaataataaaatgaacaactatttaaaatacttgtttttttttcttgaaaacaacaaaaaaccctaaacccaaaaactgacaaagtaaataactttaaaatattttatttatttatttttttcttaaaacaaaacaaaacaaagctagctggtcattcacccactttgtgtgtgagcccagggcttaaaaggagtcactgagcgtggtgagtcacttggctagttgattcggggccaagaaagggagagatctggagtaagaaggtctggggtagaggtacatgcatggagctacagacatagctacacagtatgaccctgccacacactgctgcctctcacagtgcttccacaacgagaaaatgctaaaccacccaagcaagtgacagaactattggaacaaagtactcaaaaatgtcacatccgtggcagctcaggggaaggctgtgctaactgctcccgacaacattaattcagccattaccattatgcatcgtcctgtccacctgaaaggcagaagagtcacgcaccttagtgtgctctctgcttttgaggaagtccaccagcctcttggtggtaacttgactacctaggtcctttccattcacccttgctggcatccacatacatctcacaggtatttgttgcctgaagggtagacagtaaacttatatgctaaataaatagtatatgcttgtgagtaatcaccatatttccccaaagacaacgaaaagatgcattgttttgcacttctgcaaatccttaatttgtgaaaatgtcagtactcatttgtgaaagaatcatattttcttaaaatagcaaataaactcagcactgccctgaaaactgtcactttacgtcgaccaggggcccccatggttcccacaactacatgtataaggcacactgtcaaggaaccctccacactcctcccaccccccactccacccaccctccacgctccacctcccatgcccaaatcttgccggtatgtacccattatccgaagtctgagaaagttagtggtgggtgctaggaaagtttctgtctggatcctggacaggncatcagcagaagnaagatttaaaagtggagaagcataagaatagctgttcttttcccccagtcagggccataacaaggtcttcatgtgcattgaaactctgttctaggtgcaagggtggagaagagacatcacaaactgcagctaacaattgtttcagaccgtcccccagcaaacattaataatcatagaatcttgaatttgaactaaactttatgcttttcagaatatttcctcagattaaatctccctgactctctcttactcgagattccttactgtttaagttttcgctttaaaaaaaagtttaaagcatacaaccaaaatccgaagcacgtgcagttgctaaatcagatttgctttgagaagtccgttaagccgagtaagctataaagtaaacgcatagaattagagcttcgcgttcttttgcaaaacaagagcaaagacttttctcattggtagcaacaacacaacagctttagtgaattagagcaacccgaacctaccagaaagaatgagagtaaaccattcagccaactccaatgagcagagggagggagagagctctccgagcttgcaaatccccttactcactggaatgggcccttttgtgtgatttcctgtggaggcagcagtcatgacagctatatataccagaggcgctcccctagagcctcacagctcccagggcatctcttactatcagcgagatgggaaaggtaagtcccggaaccctgacctttgccctcaagcagcatccttgctggcagaaatcaattatttgtctggtcccctctgcccttacagatcaccttcttcgaggaccgaggcttccagggccgctgctatgagtgcagcagcgactgccccaacctgcagacctacttcagccgctgcaactccgtccgcgtggacagtggctgctggatgctctatgagcgacccaactaccagggccaccagtacttcctgcgacgcggggactaccctgactaccagcagtggatgggtttcagcgactccattcgctcctgccgcctcatcccccaagtgagtttggctctgtcctcattattggtctctggaaacacaaattacctttaaaaaaatcatcttaaaccaagtcgtttcaattagagcagagagtgggtctgacagtatgtgtgttcagtggtatatcatttctcaggaacgtggtgttgagtttcttagaaaactcacatccacctttttatatttataggccatcaagaattcaaacaccagagagtaattttaaaaacaggatatcgaagacagtgcatttatcatttgcttaacatataaattccctgcatatatatagtccttagttcattccaaaccacttctagtcagaaattcaatgtttcttaatctaaaaatataatgtactactatgtcggtgttttaaaatgcgttggttgggtaggatatgctgaagagatagcagcaagagttcaaggccagcctgagctacccactttgtatagttcagaccaccctgatctcatctaaaaacgtgttgccttgcttggccttgcgtttctttctgcttgcttttcccaccttctgcttttcattcatttgtagtggacagtgcccatgggctcgcttggaggaataccccagcgcaaaggccagatctaaagctaaagtcccagactcatgctttctggagatggccataggtagcatcctaggcaggtagagtgtgggagacatgagacacagtgccacggaaactataggaatgtaacttcaccatggagagttgcccctgacaggaagggtcagcctacagcgaggaagcagggaaaagccgatttgaaccgaaactgaggcttggaaagagaaagaaggaaacacagcacctaatttatcacaggggctcagccttctgaattgtagatatgtgaaccaatacacttcgtttgcagaaaaaaatcgctgaaggttgataccttgtcaacaagggagataaatcaaaatgctaccttcctggtaacttttagatttcctcccctgcaaagggctgtctcagcactgagatggtatgggttttattttttaattatttttagattaagtgtgatgatctttattttaagcaacttttaattgccagggacttatggatgggtaggtaggcatggagagcgctgagggctgtttctcaattggccattgacaccctagagtcttcaagagacaccccaagctttaggaatagagacttccgtactctgtaacatgcttgtcctgaacgcaaacttggacttgggattttgaggctggaggtgtcgggacaggaaacatctttgtgctcatttgcttttcttcttctgtctgcccccaccctcactcccccaccccagcactcgggcacttacagaatgaggatctacgaaagagatgacttcagaggacaaatgtcagagatcacagacgactgtctctctcttcaggatcgcttccacctcagcgagattcactccctcaatgtaatggagggctgctgggtcctctatgagatgcctagctacagagggcgccagtacctgctgaggccgggagagtacaggagatatcttgactggggggctgcaaacgccaaagttggctcttttagaagagtcatggatttttactgaggcattttgagactctacttttctcctctagaaactaataaaatatgtagcttatgattctggcaccacaagagtcctgcctttcttttaatctcttaagcagagatgggaaggaacttcctatacggggaaatagcattctgggtattctaatgactacatatgtaaggttaaggaccttaagtttaagttatcaagaaaagtcacagctggcctggtgacaggatttagcaggtaaagatgcctgtcccaagtctgagtgtcccatgtttgatccccaagaccctcacagaaggagagtgtcaattctcccaagattggttttttgattgaccgcctccccccaaccctcccacaaataaataaaaatgcaatggaaaaaaaattaaggataagccaaaccatgaccagtactaaaacctggtttttcttacgggtcctagaaaagaggtaactgagtaaaatgtgacaaaaatgacctgcatttagtaaatgaagttacagggctgtttcttgtaaggctcataaaataagtctgatgagtttaggtcaaaatgcatcagattgccccatcctttgagaggttaataagttggctcaaatgtcttgcctggagtgggaactttatacaaccaccctttcctacacagacatgaccgggaaaaggattgtgtggcccatcgtcgccctagcccagagtctcctgcctcaacactggatgggcgctcacactctcccacgagtgctgattttcccatgggccaccctgacccagatggagaactcgttctccaatgacccctgacccagctctcacatgtggcttcaatgcacacaactgtttttgttatagaggttccggggtatgagtgnaagcttataataaagcagggctaattatagaaatttaacgctagatgacccctgcttttgagggtgtggctcaacagagagcatttatttaacatgagtaaggccataaatgcaaccccgaatattagaaaaagcaaaaagtactttgttcgatggcctgtggtctgtaggtattagcaggcctgcctcctttccgtccttgttcccctcatcgtggtacttatctgtgtacacaggtagctactttcttttgggactcctgtcatttcatatctttggaaacttcatgttcaatacctaagcactgtatagatacagtaagcatataatcggcacataaaatttgtttactttagagagttaaggaccttcctattaataatcttctataattctggtcaaagaactgttctgagaaaactggggcatacaattataaattttatgtgaatacatatttagtcagtaaataccttataaaatgttgccatataaatattaaccctagttctttaacctttaactcccaacatcagtttatctgttagaatccactctgggatatattcaagtctctgttcaccaccactaacacaccaagcatgagcgaggatggcagaagaggcttgcctgttattttcccactatttgcttgggaggcagaaagattgcacctgagccaacgaaattattagtaaatacctcgagnnnnnnnnnnnnnnnnnnnnnnnnnnnnnnnnnnnnnnnnnnnnnnnnnnnnnnnnnnnnnnnnnnnnnnnnnnnnnnnnnnnnnnnnnnagatctgcctgcctttgcttccaagtgctggggtcaaaggtgtggaccgttatgatcatcatccctgcatctttctcttggagtcattgttcgtgaaaattctctgctctcttctgtggaatacagaaaaagagataggtgttctcacacaacaaaaagaaaaggtcaccaatggagaatggcttagggaaggactatacccaaactaacaactactactactacttctccacttcctcccgtcctccccctcctcttcctccttctttgatttttttttttttttttgagatagggtttctctatatagtcttggctgtcccagaactcactctgtagatcagactggcttgactcataaagtcatgtctatattccagccagagggattaaaggtgtgtcattccagccagatcacacagacctagaaggnctttggacgtgatcccttgccagagcagccatgttattggataaattccttgacagtttgttttntttctgcttttcagtaggctgtgagtggctgagtncacagtgtggnnatgtgacagttaatgatagtctaatgtttagccaanctgactgttnncacccnnnnnnggctnggacagcacnngagaggtgggcttttggttcnctctggannnnnnnnnnnnnnnnnnnnnnnnnnnnnnnnnnnnnnnnnnnnnnnnnnnnnnnnnnnnnnnnnnnnnnnnnnnnnnnnnnnnnnnnnnnnnnnnnnnnnnnnnnnnnnnnnnnnnnnnnnnnnnnnnnnnnnnnnnnnnnnnnnnnnnnnnnnnnnnnnnnnnnnnnnnnnnnnnnnnnnnnnnnnnnnnnnnnnnnnnnnnnnnnnnnnnnnnnnnnnnnnnnnnnnnnnnnnnnnnnnnnnnnnnnnnnnnnnnnnnnnnnnnnnnnnnnnnnnnnnnnnnnnnnnnnnnnnnnnnnnnnnnnnnnnnnnnnnnnnnnnnnnnnnnnnnnnnnnnnnnnnnnnnnnnnnnnnnnnnnnnnnnnnnnnnnnnnnnnnnnnnnnnnnnnnnnnnnnnnnngtactgataagtatacatgctcctgcaaacnnnccctnacccatgcttctgtaaacacccaaatgcaactcatggagtcatagtgaacaacacacacagacagaagaaagcattggtgtcagagttttattgccacaaagaaacattatgaccatggcacctcttataaaggaaaacatttcattggagctggcttacactttcagaggttcggtccattattgtcctgatgggaagcatggcagcatgcaggcagacacggtgctggagacagagctgagagttctacatcttgatctgaaggcagcagaaagaaactgcgggccacactgggcataacttgagtatataagacctcaaagccccccaacagtgacacacctccttcaataaggtcatggctcctaatagtgccattccgtatagccacatgcatctgtgagggttttcctattcaaaccaccacagttggggagactaattaagaaagggagtagtaagagtgtgagggagataagagtgtaaggcggtgagtatgatcaaaatagaatacggggctggggatttagctcagtggtagagcgcttacctaggaagcgcaaggccctgggttcggtccccagctccaaaaaaaagaaccaaaaaaaaaaaatagaatatgtacacatgtgaaagagttatagtgaaatctatctgaaagaattagcaatactagttaaaataataaagagaatcttttttttttttttggttctttttttcggagctggggaccgagaatcttaataagttgtgagcaagaccttatctgtgaagtttttaaagaaaaataaaggaatgggccaggtaagttggtacagcccataattccagcacttgggaagatgagacaggaagatcacgagttcgaggccagtccataccacatatcaaatttaaatctgaccttggctatacagaaagactttgcatagcgtgtcatatacagaggtaaagctagccgcaaaccattaaactgagaatgggaccccattggagaagttagagaaaggattgaaggagctnnggtgcaaccccataagcataacaatgtcaaccaaccagagctcncagggactaaaccattatccaaagactatacatggacagacccagggctccagctgcatatgtagcagagaatagccttgatgggcaccaatggaagaagttcttggtgctatcaaggttggacccccagtgtaggggaatgtcagggggtggggaatagggagggagggttggatagggaggggaacacccttatagaagaagggagggatggaataggggnnntatgtccaggaaactgggaaagggaataacatttgaaatgtaaataaagaaataaccaataaaaaaaagaaagactttgtattaaagcaaattttagaaagttttttttggggggagggggttgagacagggtatctccgtgtatccctagctgtcctggatttcgttctgtagaccaggctagtctcaaactcacagagatttgcctgcctatgcctcccaagtctgggattaaaggtgtgcaccatcactatcttaaaacaatttttaaatcgaaactgaagacttacaagaaactgaaggatttatttgttaataattttagttagcatatcacagaatggatttcattgtgacattttcacaccagtttatcattgcaccattgtacttatatcatatttatccctgactttacctatatctgtcctacccacccctactgatccccttttgttaccacgtcagattattttagaaataaagtttccctatacgagagtagtgtatgatatttatctttgtgagtctgtaaattttatttaatacaaagatctctggttccatccatttctttgcaagcaacattcatttcattcttccttccttaagtaggcattgccacattttcttcattcattcatctcctaaggggtgttcaaactgcttccactactttggctactgtgaacagtgctgagagacacacaggtgagcaggttgtttctcactgacaggatcttcaaagtttagtccaagaattatctagtcctggttaaaacatgcagatgctaagattcttgtcttcatttaatgaggtagaatcttcttagggcccagaaatatgtatttttacaagcactgtaattattacacacagtagtttataaactaacaagattatttcttcttcttcttcttcttcttcttcttcttcttcttcttcttcttcttcttcttcttctccttctccttctccttctccttctccttctccttctccttctccttctccttctccttctcctccttctccttcttcttttcctcctcctccttcttttcttccttctcctcctcctcctctttctcctttttcttcttctttttgtcttttttttcttctttgagacaggtctctctacatagctctggctgcctggaattcaccatgtagtccaagctggcctttaatgcacagagatccatcttcctatgccaagttcaggggattaaaggcatgcactgccactcccagcccccctgacaagattcctaatgtttattctaaatcttatcttttttttttttaaccacaaaatagctctatagaagtgaaggtttcaggaaccttttgagaacacttaacctttggtcaggaagcaggctgacatcatccttaataatgtcactctaatgctactgtcaatgtcattaatattaccagtgttcatctgcaccaagtagtgtgccaaaaatggtatacatgtagtctggttaaggaacgctaatgtctattagctaaacatctctaggaactgcctacctgtaagcaaattaagtttaagacttgctgcttccagggaaaacacatatcctgaggaaatggggatgttttccaatagctgactttagaagagctgtgtctcgaatgtataccttgctagtgtggtttgagagaggtctaaaacagtggaggtctgggtggagaagcccatgtatgaataaggtcttgggttcaatccctaccactgccatacacaggaagagagagacaggagtagaggtgaaagggagaggaaaggagggagagagggaagaaagaaaacaagagaaaaaaaaagctcagaaatttgccagagttggctatgcacacctgtaatcacagaaccgaagtggctgaggcaggaggactgcagtatgttcagggcttgcttaatgagaccctagggngcgggggctgggggtgggggacaaaactgtaaataaagaagtaacagtgtaacagtttggtgctgggcttggagggtggtgtgatatgtgtgtgtgtgtgtgtgtgtgtggtgtgtatggatgtgtgtgtgatgtatgtgtgtgcttgtgtgtgtgtgtggtgtgtgtatatgtgtgtatgtgtgtgatgtgtatggatgtgtgggtgtgatgtatgtgtgtgtgttgtgtgtatgtgatatgtgtgagtgtgtgtggtgtgtacgtgatgtgtgtgagtgtgtgtgtgtaagtgtgtgtgtgtgagtgtgtgtgtatgtgtgtttattagcaaggctctgctggcatctatgagacattgtatttgataaacaaatagctaaaaagtattttaaagtgacggttagtcatttgggcccacaaggacagtacagtgctcagcagcctctgggtggctgtaggtttgtctttgttcaaacaaaatcactttgaataaccttgtctgaggggacttattaagacatgtttatatctaacagctgaatagcaggtcctaggcagaggcgctggatcaggtgactctgacacaggaggtatacgtcttccctggccttggaagcaagtaattctactttcgtacatctttgacggtcttgggcctcacaaccatagaaattttttcctttgttcttaactcaagctggttaccagggacggattttgactcacgtactgtgaaaccaccaaggtggaagctagcttaggtcctagagtatcagctcaacatagcctggaaaagccaagatccaaatctaggtttgtgtcctgtactgaacaagcaaaccctgtaaagaaaagcagggggaagaggaataagatcgcctggtctctgttgcactagtcgctgcagtattcgaagaattccagcattctcaattctggggatacttctacgaatgcgcagattcctcccagatttaccaagtataatggaatcaaaatgtagggacgtggacttcaggtcaaaagttcaggctgatgtgctgataaatttaaaaaacggtaagaatcggaataaagcaactctgaccagctagctcatccagggcagcgttggaacacactagagaaccaggcgaatctacagtcaccgccactgaatgcagcccgtaaaagccatccatgaaattccctcagcccggagggccccttttgtgcagttccgctaacacagcaacaaccctcctgctatatagaccggccccgctctgcctggacactgaactcaccacgggtcagccagccatggggaaggtgagcagaacgcaaactaaacgaaaagtcagactgaaccgccttgacccaaggagcaaaagatctcattcagaattgctcttcctttacagatcaccttctacgaggaccgaggcttccagggccgctgctatgagtgcagcagcgactgccccaacctgcagacctacttcagccgctgcaactccatccgcgtggacagtggctgctggatgctctatgagcgccccaactaccagggccaccagtacttcctgcgacgcggggactaccctgactaccagcagtggatgggtttcagcgactccattcgctcctgccgcctcatcccccatgtgagtcctgtttgatttcatttcttgctgccgaggggtcctcactgttttactgatccagagaatagggtttgtttgtctgtctgtctgtctgtctgtctgtctgtctgtctgtctgtttgtttgtttgttttttctgagtatctaagtgttaagtggtcctcaaatgcctgcctaagtctaagagaatacaggcaggaaaacagaattataaggaagaatccactttcagaaggtccagttgttttttgttttgttttttttttaattttctttgctaccattagattaatcaaaagttgtcccaacgaatgtaatcttatgcagggatataaaacaaaactagttgggaatgagagggtaattacactcatcagattgatttttatgtatttaataaagggattcctggtaagggagttaattaaactttattgtggagtagaaaacattgaaaagtacggagatcagaaactgtacgggcagaactcaaatgataattttccttagttttgaagatcggctcagttctcattataagcggttatttaaattaactttccacagaagtgtgtgatttttcagaactccactttagccaggcatagtgatagcctggattcctagggtccaggaagctgagacaaaagtattttaagtttgatggtaatctaggttataaaataaacagaatgggacagatggaaatgatatgaaattctcaaaaaacaaaaatatatataagtaaaaaatcctattttatatataaaaattatatatttttatgtataaaaatatatataactaaaaaaatactagttaaaatatgtatttgtataccctccaacatacagcttagaatgaatataagaaattgtgaattaagatattttaatttttgatatgctcaaattcacttgtaatatcttataagtcccacctcctagatcagtgggttctcaactctcctaatgccacaaccgtttaaaaaagttccttatgttgtggtgaccccatgccataaaattccttttgttgctacttcctaactgtaattttgctactgtcgcgtatcataatatagatacccgtgttttccgatggtcttaagccatcactgtaaacaggtcattggacctatagattgagaaccactgttctaaatgaaaagaaacctgggcgtctctaatgcgagcaggagacccatccatgaatagctctccaaaatccgtcaggctcagatcttactccaacagccccctgcctcacccgttgtttagcttgggtgagttctggaagagactcaactgctcttttctcatctttctttgtgtgacccaagcagacaggttcccacaggatgcgtctgtatgagaaagaagatcacaaaggcgtcatgatggagctgagtgaagactgctcctgcatccaggaccgcttccacctcagtgaggtgcgctcgctgcacgtgctagagggctgctgggtcctctatgagatgcctaactaccgaggccggcagtatctgctgaggcctcaagagtaccggcgctaccacgactggggcgctgtagatgctaaggcaggctctttgcggagggtggtagatttatactaaaataggtgaacgctaccattttctcattttggaacctaataaagtatttagtctgtattgttggcaaaccttgacttctgttattctttcattgtgtgcaaatacatccacctgtaaactctccctacagaaggtggagctgagaatggagaggttagggtgttcaagaactttttaatggtgttaactttgaacaagtcttagatggctggggatctatgtatgtgtctcagtgatagagcttttattcagtgtgcacaaggtcctgggctcgatccctaacactaccagaaagaaaagaaaaaagttcaggtggagggagactgtacctggtgtggtagggagggtacaccacgtgggggagggtgtactgtgttggggagggtacaccatgtgggggagggtgtaccatgtgggggaggttataccatgtgggggagggtacaccatgtgggggagggtatactgtgttggggaaggtataccatggtaggagggtatagctgccggacaatgaaaggccaggtcaagctgaagacacggcaacaagacaaactaccagggaggaagtagttatctgacaaccttgaagaacaacacagtcaaagttgtcttctaatcctggaagtgattggagtccaatgttgacaaacagcctatcaagactcataagagaactaatttcatttactatagaacacaatatcacctaaacaagactagaggtgacaccaacctcacaaagttaaaacccacttccttctgaaaccattcccaatgagaaagagtcttagccatccaatctaaacagtcctccattaagactcttcctgttgggcagtaatggtacaggcctttaattccagcactcgggaagcagaggcagggggacgtctgagttcgaagaggccaacctggtctacagagtgagttccaggacagccagagtttgtacagagagaaaccctgtttggggggttggggtgggcaggtgggactttctttccaagtcattttgggttgtgtcaagttgctgattgtattattacatttctatttccattgtcatcaaaaggaacttataaaagaaagcatgtgtttaagcttatagttccagaagggagtccataatggctggggagtcatgacagctaatgcatgcactaggggcaaactggaagtgggcaaaggctgtaagtctcagctcgccccagtgacaaacttccttccctgaggccgtacctcccaaaagaccttctccaagcttttccacctcctagggaccaagtgttcacatttgtgagactaaggaaacttcttatagaaaccacaacaattaaggctacccaccacagccattcataaccttaccacttcacaaattctatgaatagaaaagtaaaaagtcctcctagtaccagacaatgctcatttatatttggtgggcacctcctgggaggcttccctattcacagagctgaaacagaaatacatattaatttgcaatgtttgtttgttacaagacaggatctacgctgctcatgccagcttcaatctttctatcttagcttcatgagtgatggcattataagtgggtgtcactatgtagggctgtatgctgtgttaaaaaaatgtaatccatatgaagttatatttaagtcaatgtcttattctggttcacagcttagtggtgtgcattgttcagaggttccctaaatcaccacatcttttcctcattgtttactgggctcttagacacaaaggtacaagcaaatcactatacacaggctctctcatgtggacatgccatagtttcaggagagtagagatccagacagaaggctgactgtttatagtgaaagttgtttgcttgttggttttttttttttttttccaggagctgaggaccgaacccaggccttgcgcttgctaggcaagtgatctaccactgagctaaatccccaacccctgtttacttgtttttaaattttatttctatgggttgcccagtggttgactactaagatagagtctttacagtttactgagcatctgtcatgggattgctatccttgagtatgaaacagcacccaaaagtctccctactaccactgagccgaatctagaaatacagttacataccaactcggggagatctgggtacggtagcacaactctgggtagactcccacaactctgcaatctgtgactgcagggtcacagcaagtgtgaagtcagcctgggctgcattgtaagttcctggcaagtctgggctttatagagacaccctcacaataaacaaatgaacagataaataaatatcaactactaggtaacagaaaccgatcattttcacttcagtagttttaatttcaatgtattttcagaatgttgtggtaaaaattaaataaagtggtggaactggttcccacgagttcccactccacgctgggctcctggtactctcagacttgggcggttgctacctggtgttaattctgtcaccatagggtgatatagaaccaactttaatttatctcagcggtggctggttccagtgtggcacatgcctgttagcctagctatcttctagccccagcggtctctctgctcccattgctaatcaacctggccagccctgaccagccctgaccagccctgaccagccgggaactctctggttccagccactcaacaaattgtaacacaacaatcagatttacctgttaattctcaatctacaatacatccacagaataaattcactgcctattaataaagatagaaaccacccacctagacagtgtaatattgacctagacacctggattggaatcgtcctccacctgtctctgtctccctttctccctcctagacttttcctagcctacccttctttctcatccaatgataggctttaccttatcctggacccgccttgctacataatgacaacatcctacatcagaatcatcccatgacagactctagaggaaagagtcatgaggggtttttgtctgtctgtctctctgtctcttcatagttcttctgctatgtgtttatgttcttgaacatttggggga

SEQ ID NO: 3413 - protein, 173 aa, Rattus norvegicus
  ref <308>: DATABASE ACCESSION NUMBER: SWISS-Prot / P10065
  ref <309>: DATABASE ENTRY DATE: 1991-08-01
GKITFYEDRGFQGRCYECSSDCPNLQTYFSRCNSIRVDSGCWMLYERPNYQGYQYFLRRGDYPDYQQWMGFSDSIRSCRSIPYTSSHRIRLYERDDYRGLVSELTEDCSCIHDRFRLNEIYSMHVLEGSWVLYEMPNYRGRQYLLRPGDYRRYHDWGAMDAKVGSLRRVMDLY

SEQ ID NO: 3414 - DNA, 465 bp, Homo sapiens
  ref <308>: DATABASE ACCESSION NUMBER: EMBL / M17315
  ref <309>: DATABASE ENTRY DATE: 1999-07-02
aggtcccttttgtgttgtttttgccaacacagcagcttccctgctatatataccagttgcccctttgtccctatcatactagatgctaatcaccctctgtcaacaaccatggggaaggtgagcctgtggaggtgctgtgccatgtctattgggggtctgtggtgtgtggggatgttccttccagctgactgtctactgtcaccttatttctacctcagatcaccttctacgaggaccgagactttcagggtcgctgctacaattgcatcagtgactgccccaacctgcgggtctacttcagccgctgcaactccatccgagtagacagcggctgctggatgctctatgagcgtcccaattaccagggccaccagtacttcctgcgccgaggcaagtaccccgactatcagcactggatgggcctcagcgactcggtccaatcctgccgtataattcctcatgtga

SEQ ID NO: 3415 - protein, 173 aa, Homo sapiens
  ref <308>: DATABASE ACCESSION NUMBER: SWISS-Prot / P11844
  ref <309>: DATABASE ENTRY DATE: 1997-11-01
GKITFYEDRDFQGRCYNCISDCPNLRVYFSRCNSIRVDSGCWMLYERPNYQGHQYFLRRGKYPDYQHWMGLSDSVQSCRIIPHTSSHKLRLYERDDYRGLMSELTDDCACVPELFRLPEIYSLHVLEGCWVLYEMPNYRGRQYLLRLGDYRRYHDWGGADAKVGSLRRVTDLY

SEQ ID NO: 3416 - DNA, 31737 bp, Rattus norvegicus; identical to SEQ ID NO: 3412
  misc_feature (1)..(31737): n=a, c, g or t
  ref <308>: DATABASE ACCESSION NUMBER: EMBL / M19359
  ref <309>: DATABASE ENTRY DATE: 2000-03-04

SEQ ID NO: 3417 - protein, 173 aa, Rattus norvegicus; identical to SEQ ID NO: 3413
  ref <308>: DATABASE ACCESSION NUMBER: SWISS-Prot / AAA40981
  ref <309>: DATABASE ENTRY DATE: 1991-08-01

SEQ ID NO: 3418 - DNA, 607 bp, Rattus norvegicus
  ref <308>: DATABASE ACCESSION NUMBER: EMBL / M20156
  ref <309>: DATABASE ENTRY DATE: 2000-03-04
catgggtgttgacattcgccacaacaaggaccgaaaggttcggcgcaaggagcccaagagccaggatatctacctgcggctgctagtcaagctgtacaggtttctggccagacggaccaactccaccttcaaccaggttgtgctgaaaaggttatttatgagccgaactaaccggccacctctgtccctgtcccgaatgatccggaagatgaagcttcctggtcgggagaacaaaactgctgtggttgtggggacgatcacagatgatgtgcggattctggaagtgcccaagctgaaggtgtgtgcactgagggtgagcagccgggcccgaagtcggatcctcaaggctgggggtaagatcctgaccttcgaccagctggccctggagtctcccaagggcaggggcactgtgctcttgtctggtcctcggaagggccgagaggtgtaccgacactttggcaaggccccaggaactccacacagccacaccaaaccctatgtccgttccaagggccggaagttcgagcgtgccagaggccgaagggccagccgaggctacaaaaactaaccctggctcttactgttaataaaaaagctttggatgttg

SEQ ID NO: 3419 - protein, 187 aa, Rattus norvegicus
  ref <308>: DATABASE ACCESSION NUMBER: SWISS-Prot / P12001
  ref <309>: DATABASE ENTRY DATE: 1995-02-01
GVDIRHNKDRKVRRKEPKSQDIYLRLLVKLYRFLARRTNSTFNQVVLKRLFMSRTNRPPLSLSRMIRKMKLPGRENKTAVVVGTITDDVRILEVPKLKVCALRVSSRARSRILKAGGKILTFDQLALESPKGRGTVLLSGPRKGREVYRHFGKAPGTPHSHTKPYVRSKGRKFERARGRRASRGYKN

SEQ ID NO: 3420 - DNA, 648 bp, Homo sapiens
  ref <308>: DATABASE ACCESSION NUMBER: Refseq / NM_000979
  ref <309>: DATABASE ENTRY DATE: 2001-09-04
ctttccggacctggccgagcaggaggcgccatcatgggagtggacatccgccataacaaggaccgaaaggttcggcgcaaggagcccaagagccaggatatctacctgaggctgttggtcaagttatacaggtttctggccagaagaaccaactccacattcaaccaggttgtgttgaagaggttgtttatgagtcgcaccaaccggccgcctctgtccctttcccggatgatccggaagatgaagcttcctggccgggaaaacaagacggccgtggttgtggggaccataactgatgatgtgcgggttcaggaggtacccaaactgaaggtatgtgcactgcgcgtgaccagccgggcccgcagccgcatcctcagggcagggggcaagatcctcactttcgaccagctggccctggactcccctaagggctgtggcactgtcctgctctccggtcctcgcaagggccgagaggtgtaccggcatttcggcaaggccccaggaaccccgcacagccacaccaaaccctacgtccgctccaagggccggaagttcgagcgtgccagaggccgacgggccagccgaggctacaaaaactaaccctggatcctactctcttattaaaaagatttttgctgacaaaaaaaa

SEQ ID NO: 3421 - protein, 187 aa, Homo sapiens [sequence omitted]

SEQ ID NO: 3422 - DNA, 8399 bp, Rattus norvegicus
  ref <308>: DATABASE ACCESSION NUMBER: EMBL / M22253
  ref <309>: DATABASE ENTRY DATE: 2000-03-04
tactgcagaggtctctggtgcatgtgtatgtgtgtgcgtgtgtttgtgtacgtatgttctgcccctgtcaggctgcagcccttgtgaaacacttggtcaccttttgcaagaaggaatctctgaatcgttgcaactgaaggtgcggactcggctcgggagatgttgttccttactgcagatagataattttcctttttatcaggaatctcacatgaagagtaaagagtaattaaaatgtgcaggatgacaagatggagcaaacagtgcttgtaccaccaggacctgacagcttcaacttcttcaccagagaatctcttgcagctattgaaaggcgcattgcagaagaaaaagctaagaatcccaagccagacaaaaaagatgatgatgaaaatggcccaaagccgaacagtgacttggaagctgggaagaaccttccatttatctatggagacattcctccagagatggtgtcggagcctctggaggacctggacccctactatatcaataagaaaacttttatagtattgaataaagggaaggccatcttccggttcagtgccacttctgccctgtacattttaactcccttcaatcctcttaggaaaatagctattaagattttggtacactcattattcagcatgttaattatgtgcactattttgacgaactgtgtatttatgacaatgagtaaccctcctgactggacaaagaatgtagagtacaccttcacaggaatatatacctttgaatcactaataaaaattattgcaaggggcttctgtttagaagattttactttccttcgtgacccatggaactggctggacttcactgtcattacattcgcatatgtgacggagtttgtggacctgggcaatgtctcagcgttgagaacattcagagttcttcgagcattgaaaacaatatcagtcattccaggcctgaagaccatcgtgggggccctgatccagtctgtgaagaagctctctgacgtcatgatcctcaccgtgttctgtctcagtgtgtttgctctaatcgggttgcagcttttcatgggcaacctgaggaataagtgtgtacagtggccccccaccaacgcttcccttgaggaacatagcatagagaagaatgtaactacggattacaacggcacacttgtaaatgaaaccgtgtttgaatttgactggaaatcatacattcaagactcaagatatcattatttcctggagggtgttttagatgcactactgtgtggaaatagctctgatgcaggccaatgtccagaaggttacatgtgtgtaaaagctggcagaaaccctaactatggttacacaagctttgacaccttcagctgggcatttctgtccctgtttcgactgatgactcaggacttctgggaaaatctttaccaactgacattgcgtgctgccgggaaaacatacatgatattttttgtgctggtcattttcttgggctcattctacctgataaacttgatcctggctgtggtggccatggcctatgaggaacagaaccaggccacattggaggaggctgaacagaaggaggcagagtttcagcagatgctggagcaactgaagaagcagcaggaagccgcacagcaggcggcggcagcaacagcatcagaacattccagggagcccagtgcagcgggcaggctctcagatagctcttcagaagcctccaagttgagttcaaagagcgctaaagaaaggcggaatcggaggaaaaaaagaaaacagaaagagcagtctggaggggaagagaaagatgatgatgaattccacaaatccgagtccgaagatagcatcaggaggaagggcttccgcttctccatagaagggaacagactgacctatgaaaagaggtactcttccccacatcagtctctgttgagcattcgcggctcactgttttccccgagacgcaatagcagaacaagtcttttcagcttcagagggcgagcgaaggacgtggggtctgagaatgattttgcggacgatgagcacagcaccttcgaggacaatgagagcaggagagactctctgtttgttccccgaagacatggagagcgacgcaacagtaacctcagccaaaccagcagatcctcccgaatgctggcggggcttccagcaaacgggaagatgcacagcacagtggattgcaatggtgtggtttccttggtgggcggaccctcggttccgacatcgccagttggacagcttctgccagaggtgataatagataagccagctactgatgacaatggaacaactactgaaactgagatgagaaagaggaggtcaagttctttccatgtttccatggactttcttgaggatccttcccagaggcaaagggcaatgagcattgccagcatcttaacaaatacagtagaagaactagaagaatccagacagaaatgtccaccctgttggtataaattttccaacatatttttaatttgggactgttctccatattggctaaaagttaaacatattgtcaacctggttgtgatggacccatttgttgacctggcaattactatctgtattgtgttaaatacccttttcatggccatggagcactaccccatgactgaacatttcaatcatgtacttacagtaggaaacttggttttcactgggatcttcacagcagaaatgttcctgaaaatcattgccatggacccttactattatttccaagagggctggaatatctttgatggtttcattgtgacactcagcctggtagaacttggccttgccaatgtggaagggttatcagttctccgttcattccgactgctccgagtcttcaagttggcaaagtcctggcccacactgaacatgctcattaagatcatcggcaactcggtgggcgcactgggcaacctgaccctggtgctggccatcatcgtcttcatttttgccgtggtcggcatgcagctgttcggcaaaagttacaaagattgtgtctgcaaaattgccactgactgcaaactcccgcgctggcacatgaacgacttcttccactccttcctgatcgtgttccgagtgctgtgtggggagtggatagagaccatgtgggactgcatggaggtcgcgggtcaagccatgtgccttactgtcttcatgatggtcatggtgattaggaaccttgtggtcctgaacctctttctggccttgcttctgagctcatttagtgcagacaaccttgcagccactgacgatgacaacgaaatgaacaaccttcaaattgctgtggacaggatgcacaaaggagtagcttatgtaaaaagaaaaatatatgagtttattcaacagtcctttgttaggaaacagaagatcctagatgaaattaagccacttgatgatctaaacaacagaaaagacaattgtacatctaaccacacgacagagattgggaaagatctggactgtctgaaagatgtgaatggaaccacgagtggcatagggaccggcagcagtgtggaaaagtacatcattgatgagagtgactacatgtcattcataaacaaccccagcctcaccgtgactgtgcccattgctgtgggagagtctgactttgaaaacttaaacacagaggactttagcagtgaatcagatctagaagaaagcaaagagaaactcaacgaaagcagtagttcctcagaaggaagcacagtagacatcggggcgcctgcggaggaacagcctgtcatggaaccagaagaaacccttgagcccgaagcttgcttcactgaaggctgtgtgcagagattcaagtgctgtcaaatcagtgtggaagaaggaagaggaaaacagtggtggaaccttcggagaacgtgcttccgaatagttgagcacaactggtttgagaccttcattgtgttcatgattctcctcagtagtggtgccctggcctttgaggatatatacattgatcagcgaaagacaatcaagaccatgctggagtatgcagacaaggttttcacttacatttttatcctggagatgctcctcaaatgggtagcctacggctatcaaacgtatttcaccaatgcctggtgttggctggacttcttaattgttgatgtttcattggtcagtttaacagcaaatgccttgggttactctgaacttggggccatcaagtccctaaggacactaagagctctgagacccctaagagccttatcacgatttgaagggatgagggtggttgtgaatgccctgttaggagcaattccatccatcatgaatgtgcttctggtttgccttatattctggctaattttcagcatcatgggcgtaaatttgtttgctggcaaattctaccactgtgttaacaccacaactggtgacacatttgagatcaccgaagtcaataatcattctgattgcctaaaactaatagaaagaaatgagactgcccggtggaaaaatgtgaaagtaaactttgataatgtaggatttgggtatctttctttgcttcaagttgcgacgtttaagggttggatggatatcatgtatgcagcagttgattccagaaatgtggaactgcagcctaagtatgaggaaagcctgtacatgtacctgtacttcgtcatcttcatcatcttcggctcgttcttcactctaaatctattcatcggtgtcatcatagacaacttcaaccagcagaagaagaagtttggaggtcaagacatctttatgacagaagaacagaagaaatactataatgcaatgaagaaattaggatcaaaaaagccacaaaagcctatccctcgacctggaaacaaatttcaaggaatggtctttgactttgtaaccagacaagtgtttgacatcagcatcatgatcctcatctgtctgaacatggtgaccatgatggtggaaacggatgaccagagcgattatgtgacaagcattttgtcacgtatcaacctggtgttcattgtgctgttcaccggcgagtgcgtgctgaagctcatctccctccgccattattatttcaccattggctggaatattttcgattttgtggtggtcatcctctccattgtaggaatgtttcttgcggagctgatagagaagtatttcgtgtcccctaccctgttccgagtcatccgcctggccaggattggacgaatcctacgcctgatcaaaggcgccaaggggatccgcactctgctctttgctctgatgatgtcccttcctgcgctgttcaacatcggcctcctgcttttcctggtcatgttcatctacgccatctttgggatgtccaactttgcctatgttaagagggaagttggaattgatgacatgttcaactttgagacttttggcaacagcatgatctgcctgttccaaatcaccacctctgcgggctgggacggactgctggcccccatcctcaacagcaaaccccctgactgtgaccctaataaagttaaccccggaagctcggtgaagggggactgtgggaacccatccgtggggattttcttttttgtcagctacatcatcatatccttcctggtggtggtgaacatgtacatcgctgtcatcctggagaacttcagcgttgccaccgaagaaagtgcagagcccctgagtgaggacgactttgagatgttctacgaggtctgggagaagttcgaccctgacgccactcagttcatggaatttgaaaaattatctcagtttgcagctgctctcgaaccccctctcaacttaccacaaccgaacaaacttcagctcattgccatggacctgcccatggtgagtggagaccgcatccactgcctggacatcttgtttgcttttacaaagcgggtcttgggcgagagtggagagatggacgctcttcgaatccagatggaagaaaggttcatggcttccaacccctccaaggtctcctatcagccaatcactacaacgttaaaacgaaagcaagaggaggtgtcagccgttatcattcagcgcgcttacaggcgccaccttttgaagcgaacagtaaaacaagcttcattcacatacaataagaacaaactcaagggcggggctaatcttcttgtaaaagaagacatgatcattgacaggataaatgaaaactctattacagagaaaactgacctgacgatgtccactgcagcttgtccgccctcctacgaccgggtgacaaagccaatcgtggagaaacacgagcaggaaggaaaagatgagaaagccaaagggaaatgaacacaaacaaacaaaaaataataaattgggtgacaaattgtttacagcctgtgaagtcaaaggactcctttaggaagtcaatgccaaactgactgtttttacacaaattcactttaaggtcagtgcctcaataagacagtgacccccttgtcggcaaactctgtgactcttaggtaaaggggagatgaccttgacaggaggttactgttctcactaccagctgacactgctgaagacaagagacaaatggctatgcagactgtagggaccagcgtaaaggggtgcagagctataatttgggggtttaacgtgaaacactttagtgtagtaactgtattcaccgtttgcatttcaactgccacatttgtcaggttttgtacaaactctgttagtggattcatcttttttttaaatccatatgttgtttgttacatgtgactatttttgtaaacggggtttctgttgggaaacagactaaaggaactcttttccctgtgtgtcacctgggggtattgacatccatacagccctcccatctgcacaacgatgtggttttgcatgtgagggcatgctgtaccttacgatcatgcatgagaaaaaagtcacaaggaaagcaaagtcggttcttcaacagttctacatcatctgtgtttctgcggggggacgggggggatgtactgaggtgatcatgagaccatgggctttgccgagctggctttgtcaactctagcccttagtccaaggagattgatcgatcagacaggtcattgagtcttagtaggtgcaaacttcatccaaatgtctggagtcctgttacgtttctgttcactgtctcttcaaagtctctaaattatgactctgactccctacccccagccctagcagagcgaattgaccaaaagaaccctttataaattcccgcttaaccctgcactttgtttagccatcttcagctctcagcgaggttgacactgtaatgtgttaatgaaatgctatttattgtgtaaatagtcattttactctgtggtgcacgtttgagcaaacaaataatgacctaagcacagtatttattgcatcaaatacgtaccacgagaaacgtagagtgcaagctgtccgctggtaatatactgtattctgtaccattatagatagtgtggatgctgtcagtgcatgtcgatattaccatgctgcggtatctagtttctcccaccactcagaatctcatactcatgagacaccataggtcagtggctaagtcaaggaaaccgttcagcagatttcatttctttaagtcattaagcaatagtttgcagcattttaacaatgtctgggttgtttttcaattctaagtggatgacgttcaatgtatagccagactgtacatacatgttcggaagacaacactactgcttaacctgttaaaacatgtttagagttttataagcaagtataaataactgtacaaagtcactttcttttgtttttcagcatcatgtacatatgaagaggaaattatcttcaggttgatatcacgatcacttttcttactttccgtccacagcagtttttcatggaagatatttgctaactaagaaatgaaaccatgacggggtagtggtagatctctgcttttttaatcacgggctttaagtttggattatttcataattttaagggacaaagtacactcacaacctcacatccaaattatgatttgcaattgggaaagggtagaacatttgatttatgtttattatagtgtctgtgcgaacagatgaccggaatgctttttttttctcattttttctttattccctaatttctgtttatttttctttgctttggaatcacgcatctctagattgttctaaatataaacgtgagcttcggaatttcttttcctcaaaaacagagaggatgacacttacatagtcaattatatcaagatatttgtgtttcttacagaagcagaccataggcacctctttttcttaagaaaaaaaatatttaggcaaaccgtattcatgaactgcatgttggaaaatgctactattgcccaaaatgatgctaatcacaattaaaaatgtgcaaatctaataaaaattaattttttatttt

SEQ ID NO: 3423 - protein, 2009 aa, Rattus norvegicus
  ref <308>: DATABASE ACCESSION NUMBER: SWISS-Prot / P04774
  ref <309>: DATABASE ENTRY DATE: 2002-06-15
MEQTVLVPPGPDSFNFFTRESLAAIERRIAEEKAKNPKPDKKDDDENGPKPNSDLEAGKNLPFIYGDIPPEMVSEPLEDLDPYYINKKTFIVLNKGKAIFRFSATSALYILTPFNPLRKIAIKILVHSLFSMLIMCTILTNCVFMTMSNPPDWTKNVEYTFTGIYTFESLIKIIARGFCLEDFTFLRDPWNWLDFTVITFAYVTEFVDLGNVSALRTFRVLRALKTISVIPGLKTIVGALIQSVKKLSDVMILTVFCLSVFALIGLQLFMGNLRNKCVQWPPTNASLEEHSIEKNVTTDYNGTLVNETVFEFDWKSYIQDSRYHYFLEGVLDALLCGNSSDAGQCPEGYMCVKAGRNPNYGYTSFDTFSWAFLSLFRLMTQDFWENLYQLTLRAAGKTYMIFFVLVIFLGSFYLINLILAVVAMAYEEQNQATLEEAEQKEAEFQQMLEQLKKQQEAAQQAAAATASEHSREPSAAGRLSDSSSEASKLSSKSAKERRNRRKKRKQKEQSGGEEKDDDEFHKSESEDSIRRKGFRFSIEGNRLTYEKRYSSPHQSLLSIRGSLFSPRRNSRTSLFSFRGRAKDVGSENDFADDEHSTFEDNESRRDSLFVPRRHGERRNSNLSQTSRSSRMLAGLPANGKMHSTVDCNGVVSLVGGPSVPTSPVGQLLPEVIIDKPATDDNGTTTETEMRKRRSSSFHVSMDFLEDPSQRQRAMSIASILTNTVEELEESRQKCPPCWYKFSNIFLIWDCSPYWLKVKHIVNLVVMDPFVDLAITICIVLNTLFMAMEHYPMTEHFNHVLTVGNLVFTGIFTAEMFLKIIAMDPYYYFQEGWNIFDGFIVTLSLVELGLANVEGLSVLRSFRLLRVFKLAKSWPTLNMLIKIIGNSVGALGNLTLVLAIIVFIFAVVGMQLFGKSYKDCVCKIATDCKLPRWHMNDFFHSFLIVFRVLCGEWIETMWDCMEVAGQAMCLTVFMMVMVIRNLVVLNLFLALLLSSFSADNLAATDDDNEMNNLQIAVDRMHKGVAYVKRKIYEFIQQSFVRKQKILDEIKPLDDLNNRKDNCTSNHTTEIGKDLDCLKDVNGTTSGIGTGSSVEKYIIDESDYMSFINNPSLTVTVPIAVGESDFENLNTEDFSSESDLEESKEKLNESSSSSEGSTVDIGAPAEEQPVMEPEETLEPEACFTEGCVQRFKCCQISVEEGRGKQWWNLRRTCFRIVEHNWFETFIVFMILLSSGALAFEDIYIDQRKTIKTMLEYADKVFTYIFILEMLLKWVAYGYQTYFTNAWCWLDFLIVDVSLVSLTANALGYSELGAIKSLRTLRALRPLRALSRFEGMRVVVNALLGAIPSIMNVLLVCLIFWLIFSIMGVNLFAGKFYHCVNTTTGDTFEITEVNNHSDCLKLIERNETARWKNVKVNFDNVGFGYLSLLQVATFKGWMDIMYAAVDSRNVELQPKYEESLYMYLYFVIFIIFGSFFTLNLFIGVIIDNFNQQKKKFGGQDIFMTEEQKKYYNAMKKLGSKKPQKPIPRPGNKFQGMVFDFVTRQVFDISIMILICLNMVTMMVETDDQSDYVTSILSRINLVFIVLFTGECVLKLISLRHYYFTIGWNIFDFVVVILSIVGMFLAELIEKYFVSPTLFRVIRLARIGRILRLIKGAKGIRTLLFALMMSLPALFNIGLLLFLVMFIYAIFGMSNFAYVKREVGIDDMFNFETFGNSMICLFQITTSAGWDGLLAPILNSKPPDCDPNKVNPGSSVKGDCGNPSVGIFFFVSYIIISFLVVVNMYIAVILENFSVATEESAEPLSEDDFEMFYEVWEKFDPDATQFMEFEKLSQFAAALEPPLNLPQPNKLQLIAMDLPMVSGDRIHCLDILFAFTKRVLGESGEMDALRIQMEERFMASNPSKVSYQPITTTLKRKQEEVSAVIIQRAYRRHLLKRTVKQASFTYNKNKLKGGANLLVKEDMIIDRINENSITEKTDLTMSTAACPPSYDRVTKPIVEKHEQEGKDEKAKGK

SEQ ID NO: 3424 - DNA, 6046 bp, Homo sapiens
  misc_feature (1)..(6046): n=a, c, g or t
  ref <308>: DATABASE ACCESSION NUMBER: EMBL / AY043484
  ref <309>: DATABASE ENTRY DATE: 2002-04-26
atggagcaaacagtgcttgtaccaccaggacctgacagcttcaacttcttcaccagagaatctcttgcggctattgaaagacgcattgcagaagaaaaggcaaagaatcccaaaccagacaaaaaagatgacgacgaaaatggcccaaagccaaatagtgacttggaagctggaaagaaccttccatttatttatggagacattcctccagagatggtgtcagagcccctggaggacctggacccctactatatcaataagaaaacttttatagtattgaataaagggaaggccatcttccggttcagtgccacctctgccctgtacattttaactcccttcaatcctcttaggaaaatagctattaagattttggtacattcattattcagcatgctaattatgtgcactattttgacaaactgtgtgtttatgacaatgagtaaccctcctgattggacaaagaatgtagantacaccttcacaggaatatatacttttgaatcacttataaaaattattgcaaggggattctgtttagaagattttactttccttcgggatccatggaactggctcgatttcactgtcattacatttgcgtacgtcacagagtttgtggacctgggcaatgtctcggcattgagaacattcagagttctccgagcattgaagacgatttcagtcattccaggcctgaaaaccattgtgggagccctgatccagtctgtgaagaagctctcagatgtaatgatcctgactgtgttctgtctgagcgtatttgctctaattgggctgcagctgttcatgggcaacctgaggaataaatgtatacaatggcctcccaccaatgcttccttggaggaacatagtatagaaaagaatataactgtgaattataatggtacacttataaatgaaactgtctttgagtttgactggaagtcatatattcaagattcaagatatcattatttcctggagggttttttggatgcactactatgtggaaatagctctgatgcaggccaatgtccagagggatatatgtgtgtgaaagctggtagaaatcccaattatggctacacaagctttgataccttcagttgggcttttttgtccttgtttcgactaatgactcaggacttctgggaaaatctttatcaactgacattacgtgctgctgggaaaacgtacatgatattttttgtattggtcattttcttgggctcattctacctaataaatttgatcctggctgtggtggccatggcctacgaggaacagaatcaggccaccttggaagaagcagaacagaaagaggccgaatttcagcagatgattgaacagcttaaaaagcaacaggaggcagctcagcaggcagcaacggcaactgcctcagaacattccagagagcccagtgcagcaggcaggctctcagacagctcatctgaagcctctaagttgagttccaagagtgctaaggaaagaagaaatcggaggaagaaaagaaaacagaaagagcagtctggtggggaagagaaagatgaggatgaattccaaaaatctgaatctgaggacagcatcaggaggaaaggttttcgcttctccattgaagggaaccgattgacatatgaaaagaggtactcctccccacaccagtctttgttgagcatccgtggctccctattttcaccaaggcgaaatagcagaacaagccttttcagctttagagggcgagcaaaggatgtgggatctgagaacgacttcgcagatgatgagcacagcacctttgaggataacgagagccgtagagattccttgtttgtgccccgacgacacggagagagacgcaacagcaacctgagtcagaccagtaggtcatcccggatgctggcagtgtttccagcgaatgggaagatgcacagcactgtggattgcaatggtgtggtttccttggttggtggaccttcagttcctacatcgcctgttggacagcttctgccagagggaacaaccactgaaactgaaatgagaaagagaaggtcaagttctttccacgtttccatggactttctagaagatccttcccaaaggcaacgagcaatgagtatagccagcattctaacaaatacagtggaagaacttgaagaatccaggcagaaatgcccaccctgttggtataaattttccaacatattcttaatctgggactgttctccatattggttaaaagtgaaacatgttgtcaacctggtcgtgatggacccatttgttgacctggccatcaccatctgtattgtcttaaatactcttttcatggccatggagcactatccaatgacggaccatttcaataatgtgcttacagtaggaaacttggttttcactgggatctttacagcagaaatgtttctgaaaattattgccatggatccttactattatttccaagaaggctggaatatctttgacggttttattgtgacgcttagcctggtagaacttggactcgccaatgtggaaggattatctgttctccgttcatttcgattgctgcgagttttcaagttggcaaaatcttggccaacgttaaatatgctaataaagatcatcggcaattccgtgggggctctgggaaatttaaccctcgtcttggccatcatcgtcttcatttttgccgtggtcggcatgcagctctttggtaaaagctacaaagattgtgtctgcaagatcgccagtgattgtcaactcccacgctggcacatgaatgacttcttccactccttcctgattgtgttccgcgtgctgtgtggggagtggatagagaccatgtgggactgtatggaggttgctggtcaagccatgtgccttactgtcttcatgatggtcatggtgattggaaacctagtggtcctgaatctctttctggccttgcttctgagctcatttagtgcagacaaccttgcagccactgatgatgataatgaaatgaataatctccaaattgctgtggataggatgcacaaaggagtagcttatgtgaaaagaaaaatatatgaatttattcaacagtccttcattaggaaacaaaagattttagatgaaattaaaccacttgatgatctaaacaacaagaaagacagttgtatgtccaatcatacaacagaaattgggaaagatcttgactatcttaaagatgtaaatggaactacaagtggtataggaactggcagcagtgttgaaaaatacattattgatgaaagtgattacatgtcattcataaacaaccccagtcttactgtgactgtaccaattgctgtaggagaatctgactttgaaaatttaaacacggaagactttagtagtgaatcggatctggaagaaagcaaagagaaactgaatgaaagcagtagctcatcagaaggtagcactgtggacatcggcgcacctgtagaagaacagcccgtagtggaacctgaagaaactcttgaaccagaagcttgtttcactgaaggctgtgtacaaagattcaagtgttgtcaaatcaatgtggaagaaggcagaggaaaacaatggtggaacctgagaaggacgtgtttccgaatagttgaacataactggtttgagaccttcattgttttcatgattctccttagtagtggtgctctggcatttgaagatatatatattgatcagcgaaagacgattaagacgatgttggaatatgctgacaaggttttcacttacattttcattctggaaatgcttctaaaatgggtggcatatggctatcaaacatatttcaccaatgcctggtgttggctggacttcttaattgttgatgtttcattggtcagtttaacagcaaatgccttgggttactcagaacttggagccatcaaatctctcaggacactaagagctctgagacctctaagagccttatctcgatttgaagggatgagggtggttgtgaatgcccttttaggagcaattccatccatcatgaatgtgcttctggtttgtcttatattctggctaattttcagcatcatgggcgtaaatttgtttgctggcaaattctaccactgtattaacaccacaactggtgacaggtttgacatcgaagacgtgaataatcatacagattgcctaaaactaatagaaagaaatgagactgctcgatggaaaaatgtgaaagtaaactttgataatgtaggatttgggtatctctctttgcttcaagttgccacattcaaaggatggatggatataatgtatgcagcagttgattccagaaatgtggaactccagcctaagtatgaagaaagcctgtacatgtatctttactttgttattttcatcatctttgggtctttcttcaccttgaacctgtttattggtgtcatcatagataatttcaaccagcagaaaaagaagtttggaggtcaagacatctttatgacagaagaacagaagaaatactataatgcaatgaaaaaattaggatcgaaaaaaccgcaaaagcctatacctcgaccaggaaacaaatttcaaggaatggtctttgacttcgtaaccagacaagtttttgacataagcatcatgattctcatctgtcttaacatggtcacaatgatggtggaaacagatgaccagagtgaatatgtgactaccattttgtcacgcatcaatctggtgttcattgtgctatttactggagagtgtgtactgaaactcatctctctacgccattattattttaccattggatggaatatttttgattttgtggttgtcattctctccattgtaggtatgtttcttgccgagctgatagaaaagtatttcgtgtcccctaccctgttccgagtgatccgtcttgctaggattggccgaatcctacgtctgatcaaaggagcaaaggggatccgcacgctgctctttgctttgatgatgtcccttcctgcgttgtttaacatcggcctcctactcttcctagtcatgttcatctacgccatctttgggatgtccaactttgcctatgttaagagggaagttgggatcgatgacatgttcaactttgagacctttggcaacagcatgatctgcctattccaaattacaacctctgctggctgggatggattgctagcacccattctcaacagtaagccacccgactgtgaccctaataaagttaaccctggaagctcagttaagggagactgtgggaacccatctgttggaattttcttttttgtcagttacatcatcatatccttcctggttgtggtgaacatgtacatcgcggtcatcctggagaacttcagtgttgctactgaagaaagtgcagagcctctgagtgaggatgactttgagatgttctatgaggtttgggagaagtttgatcccgatgcaactcagttcatggaatttgaaaaattatctcagtttgcagctgcgcttgaaccgcctctcaatctgccacaaccaaacaaactccagctcattgccatggatttgcccatggtgagtggtgaccggatccactgtcttgatatcttatttgcttttacaaagcgggttctaggagagagtggagagatggatgctctacgaatacagatggaagagcgattcatggcttccaatccttccaaggtctcctatcagccaatcactactactttaaaacgaaaacaagaggaagtatctgctgtcattattcagcgtgcttacagacgccaccttttaaagcgaactgtaaaacaagcttcctttacgtacaataaaaacaaaatcaaaggtggggctaatcttcttataaaagaagacatgataattgacagaataaatgaaaactctattacagaaaaaactgatctgaccatgtccactgcagcttgtccaccttcctatgaccgggtgacaaagccaattgtggaaaaacatgagcaagaaggcaaagatgaaaaagccaaagggaaatgaatgaaaataaataaaaataattgggtgacaaaaaaaaaaaaaaaaaaaa

SEQ ID NO: 3425 - protein, 2009 aa, Homo sapiens
  ref <308>: DATABASE ACCESSION NUMBER: SWISS-Prot / P35498
  ref <309>: DATABASE ENTRY DATE: 2002-06-15
MEQTVLVPPGPDSFNFFTRESLAAIERRIAEEKAKNPKPDKKDDDENGPKPNSDLEAGKNLPFIYGDIPPEMVSEPLEDLDPYYINKKTFIVLNKGKAIFRFSATSALYILTPFNPLRKIAIKILVHSLFSMLIMCTILTNCVFMTMSNPPDWTKNVEYTFTGIYTFESLIKIIARGFCLEDFTFLRDPWNWLDFTVITFAYVTEFVDLGNVSALRTFRVLRALKTISVIPGLKTIVGALIQSVKKLSDVMILTVFCLSVFALIGLQLFMGNLRNKCIQWPPTNASLEEHSIEKNITVNYNGTLINETVFEFDWKSYIQDSRYHYFLEGFLDALLCGNSSDAGQCPEGYMCVKAGRNPNYGYTSFDTFSWAFLSLFRLMTQDFWENLYQLTLRAAGKTYMIFFVLVIFLGSFYLINLILAVVAMAYEEQNQATLEEAEQKEAEFQQMIEQLKKQQEAAQQAATATASEHSREPSAAGRLSDSSSEASKLSSKSAKERRNRRKKRKQKEQSGGEEKDEDEFQKSESEDSIRRKGFRFSIEGNRLTYEKRYSSPHQSLLSIRGSLFSPRRNSRTSLFSFRGRAKDVGSENDFADDEHSTFEDNESRRDSLFVPRRHGERRNSNLSQTSRSSRMLAVFPANGKMHSTVDCNGVVSLVGGPSVPTSPVGQLLPEVIIDKPATDDNGTTTETEMRKRRSSSFHVSMDFLEDPSQRQRAMSIASILTNTVEELEESRQKCPPCWYKFSNIFLIWDCSPYWLKVKHVVNLVVMDPFVDLAITICIVLNTLFMAMEHYPMTDHFNNVLTVGNLVFTGIFTAEMFLKIIAMDPYYYFQEGWNIFDGFIVTLSLVELGLANVEGLSVLRSFRLLRVFKLAKSWPTLNMLIKIIGNSVGALGNLTLVLAIIVFIFAVVGMQLFGKSYKDCVCKIASDCQLPRWHMNDFFHSFLIVFRVLCGEWIETMWDCMEVAGQAMCLTVFMMVMVIGNLVVLNLFLALLLSSFSADNLAATDDDNEMNNLQIAVDRMHKGVAYVKRKIYEFIQQSFIRKQKILDEIKPLDDLNNKKDSCMSNHTAEIGKDLDYLKDVNGTTSGIGTGSSVEKYIIDESDYMSFINNPSLTVTVPIAVGESDFENLNTEDFSSESDLEESKEKLNESSSSSEGSTVDIGAPVEEQPVVEPEETLEPEACFTEGCVQRFKCCQINVEEGRGKQWWNLRRTCFRIVEHNWFETFIVFMILLSSGALAFEDIYIDQRKTIKTMLEYADKVFTYIFILEMLLKWVAYGYQTYFTNAWCWLDFLIVDVSLVSLTANALGYSELGAIKSLRTLRALRPLRALSRFEGMRVVVNALLGAIPSIMNVLLVCLIFWLIFSIMGVNLFAGKFYHCINTTTGDRFDIEDVNNHTDCLKLIERNETARWKNVKVNFDNVGFGYLSLLQVATFKGWMDIMYAAVDSRNVELQPKYEESLYMYLYFVIFIIFGSFFTLNLFIGVIIDNFNQQKKKFGGQDIFMTEEQKKYYNAMKKLGSKKPQKPIPRPGNKFQGMVFDFVTRQVFDISIMILICLNMVTMMVETDDQSEYVTTILSRINLVFIVLFTGECVLKLISLRHYYFTIGWNIFDFVVVILSIVGMFLAELIEKYFVSPTLFRVIRLARIGRILRLIKGAKGIRTLLFALMMSLPALFNIGLLLFLVMFIYAIFGMSNFAYVKREVGIDDMFNFETFGNSMICLFQITTSAGWDGLLAPILNSKPPDCDPNKVNPGSSVKGDCGNPSVGIFFFVSYIIISFLVVVNMYIAVILENFSVATEESAEPLSEDDFEMFYEVWEKFDPDATQFMEFEKLSQFAAALEPPLNLPQPNKLQLIAMDLPMVSGDRIHCLDILFAFTKRVLGESGEMDALRIQMEERFMASNPSKVSYQPITTTLKRKQEEVSAVIIQRAYRRHLLKRTVKQASFTYNKNKIKGGANLLIKEDMIIDRINENSITEKTDLTMSTAACPPSYDRVTKPIVEKHEQEGKDEKAKGK

SEQ ID NO: 3426 - DNA, 2468 bp, Rattus norvegicus
  ref <308>: DATABASE ACCESSION NUMBER: EMBL / M22357
  ref <309>: DATABASE ENTRY DATE: 2000-03-04
cagaagccagaccatccaaggttgactggccacttggagcggaatcaggagacattcccaactcagggagactgaggtgagggccctagctcgcccacttgctggacaagatgatattccttaccaccctgcctctgttttggataatgatttcagcttctcgaggggggcactggggtgcctggatgccctcgtccatctcagccttcgagggcacgtgtgtctccatcccctgccgtttcgacttcccggatgagctcagaccggctgtggtacatggcgtctggtatttcaacagtccctaccccaagaactacccgccagtggtcttcaagtcccgcacacaagtggtccacgagagcttccagggccgtagccgcctgttgggagacctgggcctacgaaactgcaccctgcttctcagcacgctgagccctgagctgggagggaaatactatttccgaggtgacctgggcggctacaaccagtacaccttctcggagcacagcgtcctggacatcatcaacacccccaacatcgtggtgcccccagaagtggtggcaggaacggaagtagaggtcagctgcatggtgccggacaactgcccagagctgcgccctgagctgagctggctgggccacgaggggctaggggagcccactgttctgggtcggctgcgggaggatgaaggcacctgggtgcaggtgtcactgctacacttcgtgcctactagagaggccaacggccaccgtctgggctgtcaggctgccttccccaacaccaccttgcagttcgagggttacgccagtctggacgtcaagtaccccccggtgattgtggagatgaattcctctgtggaggccattgagggctcccatgtcagcctgctctgtggggctgacagcaacccgccaccgctgctgacttggatgcgggatgggatggtgttgagggaggcagttgctgagagcctgtacctggatctggaggaggtgaccccagcagaggacggcatctatgcttgcctggcagagaatgcctatggccaggacaaccgcacggtggagctgagcgtcatgtatgcaccttggaagcccacagtgaatgggacggtggtggcggtagagggggagacagtctccatcctgtgttccacacagagcaacccggaccctattctcaccatcttcaaggagaagcagatcctggccacggtcatctatgagagtcagctgcagctggaactccctgcagtgacgcccgaggacgatggggagtactggtgtgtagctgagaaccagtatggccagagagccaccgccttcaacctgtctgtggagtttgctcccataatccttctggaatcgcactgtgcagcggccagagacaccgtgcagtgcctgtgtgtggtaaaatccaacccggaaccctccgtggcctttgagctgccttcccgcaacgtgactgtgaacgagacagagagggagtttgtgtactcagagcgcagcggcctcctgctcaccagcatcctcacgctccggggtcaggcccaagccccaccccgcgtcatttgtacctccaggaacctctacggcacccagagcctcgagctgcctttccagggagcacaccgactgatgtgggccaaaatcggccctgtgggtgctgtggtcgcctttgccatcctgattgccattgtctgctacatcacccagacaagaagaaaaaagaacgtcacagagagccccagcttctcagcgggagacaaccctcatgtcctgtacagccccgaattccgaatctctggagcacctgataagtatgagtccagagaggtctctacccgggattgtcactgagagccccaggagagtgagaagcgcctggggtccgagaggaggctgctgggccttaggggggaacccccagaactggacctcagttattcccactcagacctggggaaacgacccaccaaggacagctacaccctgacagaggagctggctgagtacgcagaaatccgagtcaagtgaggaagctgggggctggccctgtggctcaccccccatcaggaccctcgcttggcccccactggccgtgggctccctttctcttgagagtggtaggggtgggggcgggaaggggcggggcaggaaacagtgaggtcttaggggcccggcctcccctccttcccggctgctcctctctgccaacatcctgcacctatgttacagctccctctcccctccttttaacctcagctgttgagaggggtgctctgtctgtccatgttatttattgttatcctggtctcctgtccccttacccggccccaggacctgtacaaaagggacatgaaataaatgtcctaatgacaagtgccagtctagacccatcctttggaggaaaggggcatattagtaatacttttctcgttgctgtaacaaaatactggacaaaaacac

SEQ ID NO: 3427 - protein, 626 aa, Rattus norvegicus
  ref <308>: DATABASE ACCESSION NUMBER: SWISS-Prot / P07722
  ref <309>: DATABASE ENTRY DATE: 2002-06-15
MIFLTTLPLFWIMISASRGGHWGAWMPSSISAFEGTCVSIPCRFDFPDELRPAVVHGVWYFNSPYPKNYPPVVFKSRTQVVHESFQGRSRLLGDLGLRNCTLLLSTLSPELGGKYYFRGDLGGYNQYTFSEHSVLDIINTPNIVVPPEVVAGTEVEVSCMVPDNCPELRPELSWLGHEGLGEPTVLGRLREDEGTWVQVSLLHFVPTREANGHRLGCQAAFPNTTLQFEGYASLDVKYPPVIVEMNSSVEAIEGSHVSLLCGADSNPPPLLTWMRDGMVLREAVAESLYLDLEEVTPAEDGIYACLAENAYGQDNRTVELSVMYAPWKPTVNGTVVAVEGETVSILCSTQSNPDPILTIFKEKQILATVIYESQLQLELPAVTPEDDGEYWCVAENQYGQRATAFNLSVEFAPIILLESHCAAARDTVQCLCVVKSNPEPSVAFELPSRNVTVNETEREFVYSERSGLLLTSILTLRGQAQAPPRVICTSRNLYGTQSLELPFQGAHRLMWAKIGPVGAVVAFAILIAIVCYITQTRRKKNVTESPSFSAGDNPHVLYSPEFRISGAPDKYESEKRLGSERRLLGLRGEPPELDLSYSHSDLGKRPTKDSYTLTEELAEYAEIRVK

SEQ ID NO: 3428 - DNA, 2425 bp, Homo sapiens
  ref <308>: DATABASE ACCESSION NUMBER: Refseq / NM_080600
  ref <309>: DATABASE ENTRY DATE: 2002-01-09
ctagaccctggaaggcaggggactgcgagctgggctggcggagcagaggtgcagaagcaactgagtccaagttgtctggcggcttcaggtggacccagaagacgtccccaactcagggagattcagcgatcactcactcgctgtacagaatgatattcctcacggcactgcctctgttctggattatgatttcagcctcccgagggggtcactggggtgcctggatgccctcgtccatctcggccttcgaaggcacgtgcgtctccatcccctgccgctttgacttcccggatgagctgcggcccgctgtggtgcatggtgtctggtacttcaatagcccctaccccaagaactaccccccggtggtcttcaagtcgcgcacccaagtagtccacgagagcttccagggccgcagccgcctcctgggggacctgggcctgcgaaactgcaccctcctgctcagcaacgtcagccccgagctgggcgggaagtactacttccgtggggacctgggcggctacaaccagtacaccttctcagagcacagcgtcctggatatcgtcaacacccccaacatcgtggtgcccccagaggtggtggcaggcacggaggtggaggtcagctgcatggtgccggacaactgcccagagctgcgccctgagctgagctggctgggccacgaggggctgggggagcccgctgtgctgggccggctgcgggaggacgagggcacctgggtgcaggtgtcactgctgcacttcgtgcccacgagggaggccaacggccacaggctgggctgccaggcctccttccccaacaccaccctgcagttcgagggctacgccagcatggacgtcaagtaccccccggtgattgtggagatgaactcctcggtggaggccatcgagggctcccacgtgagcctgctctgtggggctgacagcaaccccccgccgctgctgacctggatgcgggacgggacagtcctccgggaggcggtggccgagagcctgctcctggagctggaggaggtgacccccgccgaagacggcgtctatgcctgcctggccgagaatgcctatggccaggacaaccgcaccgtggggctcagtgtcatgtatgcaccctggaagccaacagtgaacgggacaatggtggccgtagagggggagacggtctctatcttgtgctccacacagagcaacccggaccctattctcaccatcttcaaggagaagcagatcctgtccacggtcatctacgagagcgagctgcagctggagctgccggccgtgtcacccgaggatgatggagagtactggtgtgtggctgagaaccagtatggccagagggccaccgccttcaacctgtctgtggagttcgcccctgtgctcctcctggagtcccactgcgcggcagcccgagacacggtgcagtgcctgtgcgtggtgaagtccaacccggagccgtccgtggcctttgagctgccatcgcgcaatgtgaccgtgaacgagagcgagcgggagttcgtgtactcggagcgcagcggcctcgtgctcaccagcatcctcacgctgcgggggcaggcccaggccccgccccgcgtcatctgcaccgcgaggaacctctatggcgccaagagcctggagctgcccttccagggagcccatcgactgatgtgggccaagatcgggcctgtgggcgccgtggtcgcctttgccatcctgattgccatcgtctgctacattacccagacacgcaggaaaaagaacgtgacagagagccccagcttctcggcaggggacaaccctcccgtcctgttcagcagcgacttccgcatctctggggcaccagagaagtacgagtccaaagaggtttctaccctggaatctcactgagtgccccaggagagcgagaggcgcctgggatctgagaggaggctgctgggccttcggggtgagcccccagagctggacctgagctattctcactcggacctggggaaacggcccaccaaggacagctacacgctgacggaggagctagctgagtatgctgaaatccgggtcaagtgaaggagctgggggcagcctgcgtggctgacccccctcaggaccctcgctggcccccactggctgtgggctcccttcctcccaaaagtatcgggggctggggcaggaggggagtgaggcaggtgacagtgaggtcctgggggcctgacctccccctccttcccagctgcccctccctgccagcacccccacgccctcattacggctcctctctaacctcctttaccctcatctgtctggaggggagctctgtctgtccgtgttatttattgctacttcctgcctggtctcctgcccccacacctggccctggggcctgtacaaaagggacatgaaataaatgccccaaagcc

SEQ ID NO: 3429 - protein, 626 aa, Homo sapiens
  ref <308>: DATABASE ACCESSION NUMBER: SWISS-Prot / P20916
  ref <309>: DATABASE ENTRY DATE: 2002-06-15
MIFLTALPLFWIMISASRGGHWGAWMPSSISAFEGTCVSIPCRFDFPDELRPAVVHGVWYFNSPYPKNYPPVVFKSRTQVVHESFQGRSRLLGDLGLRNCTLLLSNVSPELGGKYYFRGDLGGYNQYTFSEHSVLDIVNTPNIVVPPEVVAGTEVEVSCMVPDNCPELRPELSWLGHEGLGEPAVLGRLREDEGTWVQVSLLHFVPTREANGHRLGCQASFPNTTLQFEGYASMDVKYPPVIVEMNSSVEAIEGSHVSLLCGADSNPPPLLTWMRDGTVLREAVAESLLLELEEVTPAEDGVYACLAENAYGQDNRTVGLSVMYAPWKPTVNGTMVAVEGETVSILCSTQSNPDPILTIFKEKQILSTVIYESELQLELPAVSPEDDGEYWCVAENQYGQRATAFNLSVEFAPVLLLESHCAAARDTVQCLCVVKSNPEPSVAFELPSRNVTVNESEREFVYSERSGLVLTSILTLRGQAQAPPRVICTARNLYGAKSLELPFQGAHRLMWAKIGPVGAVVAFAILIAIVCYITQTRRKKNVTESPSFSAGDNPPVLFSSDFRISGAPEKYESERRLGSERRLLGLRGEPPELDLSYSHSDLGKRPTKDSYTLTEELAEYAEIRVK

SEQ ID NO: 3430 - DNA, 2468 bp, Rattus norvegicus; identical to SEQ ID NO: 3426
  ref <308>: DATABASE ACCESSION NUMBER: EMBL / M22357
  ref <309>: DATABASE ENTRY DATE: 2000-03-04

SEQ ID NO: 3431 - protein, 626 aa, Rattus norvegicus; identical to SEQ ID NO: 3427
  ref <308>: DATABASE ACCESSION NUMBER: SWISS-Prot / P07722
  ref <309>: DATABASE ENTRY DATE: 2002-06-15

SEQ ID NO: 3432 - DNA, 2425 bp, Homo sapiens; identical to SEQ ID NO: 3428
  ref <308>: DATABASE ACCESSION NUMBER: Refseq / NM_080600
  ref <309>: DATABASE ENTRY DATE: 2002-01-09

SEQ ID NO: 3433 - protein, 626 aa, Homo sapiens; identical to SEQ ID NO: 3429
  ref <308>: DATABASE ACCESSION NUMBER: SWISS-Prot / P20916
  ref <309>: DATABASE ENTRY DATE: 2002-06-15

SEQ ID NO: 3434 - DNA, 2468 bp, Rattus norvegicus; identical to SEQ ID NO: 3426
  ref <308>: DATABASE ACCESSION NUMBER: EMBL / M22357
  ref <309>: DATABASE ENTRY DATE: 2000-03-04

SEQ ID NO: 3435 - protein, 626 aa, Rattus norvegicus; identical to SEQ ID NO: 3427
  ref <308>: DATABASE ACCESSION NUMBER: SWISS-Prot / P07722
  ref <309>: DATABASE ENTRY DATE: 2002-06-15

SEQ ID NO: 3436 - DNA, 2425 bp, Homo sapiens; identical to SEQ ID NO: 3428
  ref <308>: DATABASE ACCESSION NUMBER: Refseq / NM_080600
  ref <309>: DATABASE ENTRY DATE: 2002-01-09

SEQ ID NO: 3437 - protein, 626 aa, Homo sapiens; identical to SEQ ID NO: 3429
  ref <308>: DATABASE ACCESSION NUMBER: SWISS-Prot / P20916
  ref <309>: DATABASE ENTRY DATE: 2002-06-15

SEQ ID NO: 3438 - DNA, 2468 bp, Rattus norvegicus; identical to SEQ ID NO: 3426
  ref <308>: DATABASE ACCESSION NUMBER: EMBL / M22357
  ref <309>: DATABASE ENTRY DATE: 2000-03-04

SEQ ID NO: 3439 - protein, 626 aa, Rattus norvegicus; identical to SEQ ID NO: 3427
  ref <308>: DATABASE ACCESSION NUMBER: SWISS-Prot / P07722
  ref <309>: DATABASE ENTRY DATE: 2002-06-15

SEQ ID NO: 3440 - DNA, 2425 bp, Homo sapiens; identical to SEQ ID NO: 3428
  ref <308>: DATABASE ACCESSION NUMBER: Refseq / NM_080600
  ref <309>: DATABASE ENTRY DATE: 2002-01-09

SEQ ID NO: 3441 - protein, 626 aa, Homo sapiens; identical to SEQ ID NO: 3429
  ref <308>: DATABASE ACCESSION NUMBER: SWISS-Prot / P20916
  ref <309>: DATABASE ENTRY DATE: 2002-06-15

SEQ ID NO: 3442 - DNA, 2213 bp, Rattus norvegicus
  ref <308>: DATABASE ACCESSION NUMBER: EMBL / M22400
  ref <309>: DATABASE ENTRY DATE: 2000-03-04
ggtagcggctcgtctcttgctctgcaaggctactgccagacttgctgagtctcgggaccgctccggctcttattgccactctctcgtgctctcctcgctaccccaagaagcaggatggccgggaccgtgcgcaccgcgtgcttgctggtggcgatgctgctcggcttgggctgcctgggacaggcgcagcccccgccgcctccagacgccacctgtcaccaggtccgttctttcttccagagactgcagcccggactcaaatgggttccagaaacccctgtgccaggatcagatttgcaagtatgtctccccaagggcccaacatgctgctcaagaaagatggaagaaaaataccaactaacagcgcgcctgaacatggaacaactgctccagtctgcgagtatggaactcaagttcttaattattcagaatgctgcggttttccaagaggcctttgaaattgttgttcgccatgccaagaactacaccaatgccatgttcaagaataactaccccagcctgactccacaagcttttgagtttgtcggtgaatttttcacagatgtgtctctctacatcttgggttctgatatcaatgtggatgatatggtcaatgaattgttcgacagcctctttccagtcatctatacccagatgatgaacccaggcctccccgagtcagtattagacatcaacgagtgcctccgaggagcaagacgcgacctgaaagtatttggcagtttccccaagcttattatgacccaggtttccaagtcactgcaagttactagaatcttccttcaggccctgaacctcggaattgaagtaatcaacaccaccgaccacctcaagtttagtaaggactgtggccgtatgctcacccgaatgtggtactgctcttactgccagggactgatgatggtcaaaccttgtggtggttattgcaatgtggtcatgcaaggctgtatggcaggtgtggtagagatcgacaagtactggagagaatacattctgtctcttgaagagctcgtgaacggcatgtacagaatctacgacatggagaatgtgctgctcggactcttttcaaccatccatgattccatccagtatgtgcagaagaacggaggcaagctgaccaccactattggcaagttgtgcgcccactcccagcaacgccaatatagatctgcttattatcctgaagatctgtttattgacaagaaggtattaaaagtcgcccgtgtcgaacatgaagaaaccttatccagccgaagaagggaactgattcagaagttgaagtctttcatcagcttctatagtgctttgccaggctacatctgcagccatagccccgtggccgaaaacgacaccctgtgctggaacggacaagagcttgtggagagatacagccagaaggcggcaaggaatgggatgaagaatcagtttaacctccatgagctgaaaatgaagggccctgagccagtggttagccagatcattgacaaactgaagcacattaaccagctcctgagaaccatgtctgtgcccaagggtaaagttgtggataaaagcctggatgaggaaggacttgagagtggagactgtggtgatgatgaggatgagtgcatcgggagctctggtgacggcatgatgaaagtgaagaaccaactgcgcttccttgcagaactggcatatgatctggatgtggacgatgctccagggaacaagcaacatggaaatcagaaggacaacgagatcaccacctctcacagcgtggggaacatgccatccccactgaaaatcctcatcagtgtggccatctacgtggcgtgctttttttcctggtgcactgacttgccatgcccatgcctgtgctgccctgcagcaccttgtggccctcctacataaagggagccaccttcctttttcttttcttttttttttttaccttgtatgcctcctctcaccgccattaagtaggagactaaccacgtgttatgttttcgaaaatcaaatggtatctttatgaggaaggtaaattttagtggtaggatagattgtcttttttgcaaaaaaaaaaaaacaaaaaaaattcaagttgtgccaaattattttcttacatttgactgctggaacatggttgtcatggtttccctcttttctctttctctgcatggatttctttgacaaaaaaaataaataaacattcaaat

SEQ ID NO: 3443 - protein, 597 aa, Rattus norvegicus
  ref <308>: DATABASE ACCESSION NUMBER: SWISS-Prot / P13265
  ref <309>: DATABASE ENTRY DATE: 1996-10-01
MAGTVRTACLLVAMLLGLGCLGQAQPPPPPDATCHQVRSFFQRLQPGLKWVPETPVPGSDLQVCLPKGPTCCSRKMEEKYQLTARLNMEQLLQSASMELKFLIIQNAAVFQEAFEIVVRHAKNYTNAMFKNNYPSLTPQAFEFVGEFFTDVSLYILGSDINVDDMVNELFDSLFPVIYTQMMNPGLPESVLDINECLRGARRDLKVFGSFPKLIMTQVSKSLQVTRIFLQALNLGIEVINTTDHLKFSKDCGRMLTRMWYCSYCQGLMMVKPCGGYCNVVMQGCMAGVVEIDKYWREYILSLEELVNGMYRIYDMENVLLGLFSTIHDSIQYVQKNGGKLTTTIGKLCAHSQQRQYRSAYYPEDLFIDKKVLKVARVEHEETLSSRRRELIQKLKSFISFYSALPGYICSHSPVAENDTLCWNGQELVERYSQKAARNGMKNQFNLHELKMKGPEPVVSQIIDKLKHINQLLRTMSVPKGKVVDKSLDEEGLESGDCGDDEDECIGSSGDGMMKVKNQLRFLAELAYDLDVDDAPGNKQHGNQKDNEITTSHSVGNMPSPLKILISVAIYVACFFSWCTDLPCPCLCCPAAPCGPPT

SEQ ID NO: 3444 - DNA, 2130 bp, Homo sapiens
  ref <308>: DATABASE ACCESSION NUMBER: EMBL / L47125
  ref <309>: DATABASE ENTRY DATE: 1999-07-02
gcgcccaggtagctgcgaggaaacttttgcagcggctgggtagcagcacgtctcttgctcctcagggccactgccaggcttgccgagtcctgggactgctctcgctccggctgccactctcccgcgctctcctagctccctgcgaagcaggatggccgggaccgtgcgcaccgcgtgcttggtggtggcgatgctgctcagcttggacttcccgggacaggcgcagcccccgccgccgccgccggacgccacctgtcaccaagtccgctccttcttccagagactgcagcccggactcaagtgggtgccagaaactcccgtgccaggatcagatttgcaagtatgtctccctaagggcccaacatgctgctcaagaaagatggaagaaaaataccaactaacagcacgattgaacatggaacagctgcttcagtctgcaagtatggagctcaagttcttaattattcagaatgctgcggttttccaagaggcctttgaaattgttgttcgccatgccaagaactacaccaatgccatgttcaagaacaactacccaagcctgactccacaagcttttgagtttgtgggtgaatttttcacagatgtgtctctctacatcttgggttctgacatcaatgtagatgacatggtcaatgaattgtttgacagcctgtttccagtcatctatacccagctaatgaacccaggcctgcctgattcagccttggacatcaatgagtgcctccgaggagcaagacgtgacctgaaagtatttgggaatttccccaagcttattatgacccaggtttccaagtcactgcaagtcactaggatcttccttcaggctctgaatcttggaattgaagtgatcaacacaactgatcacctgaagttcagtaaggactgtggccgaatgctcaccagaatgtggtactgctcttactgccagggactgatgatggttaaaccctgtggcggttactgcaatgtggtcatgcaaggctgtatggcaggtgtggtggagattgacaagtactggagagaatacattctgtcccttgaagaacttgtgaatggcatgtacagaatctatgacatggagaacgtactgcttggtctcttttcaacaatccatgattctatccagtatgtccagaagaatgcaggaaagctgaccaccactattggcaagttatgtgcccattctcaacaacgccaatatagatctgcttattatcctgaagatctctttattgacaagaaagtattaaaagttgctcatgtagaacatgaagaaaccttatccagccgaagaagggaactaattcagaagttgaagtctttcatcagcttctatagtgctttgcctggctacatctgcagccatagccctgtggcggaaaacgacaccctttgctggaatggacaagaactcgtggagagatacagccaaaaggcagcaaggaatggaatgaaaaaccagttcaatctccatgagctgaaaatgaagggccctgagccagtggtcagtcaaattattgacaaactgaagcacattaaccagctcctgagaaccatgtctatgcccaaaggtagagttctggataaaaacctggatgaggaagggtttgaaagtggagactgcggtgatgatgaagatgagtgcattggaggctctggtgatggaatgataaaagtgaagaatcagctccgcttccttgcagaactggcctatgatctggatgtggatgatgcgcctggaaacagtcagcaggcaactccgaaggacaacgagataagcacctttcacaacctcgggaacgttcattccccgctgaagcttctcaccagcatggccatctcggtggtgtgcttcttcttcctggtgcactgactgcctggtgcccagcacatgtgctgccctacagcaccctgtggtcttcctcgataaagggaaccactttcttatttttttctatttttttttttttgttatcctgtatacctcctccagccatgaagtagaggactaaccatgtgttatgttttcgaaaatcaaatggtatcttttggaggaagatacattttagtggtagcatatagattgtccttttgcaaaaaaaaaaaccg

SEQ ID NO: 3445 - protein, 580 aa, Homo sapiens
  ref <308>: DATABASE ACCESSION NUMBER: SWISS-Prot / P51654
  ref <309>: DATABASE ENTRY DATE: 2002-06-15
MAGTVRTACLVVAMLLSLDFPGQAQPPPPPPDATCHQVRSFFQRLQPGLKWVPETPVPGSDLQVCLPKGPTCCSRKMEEKYQLTARLNMEQLLQSASMELKFLIIQNAAVFQEAFEIVVRHAKNYTNAMFKNNYPSLTPQAFEFVGEFFTDVSLYILGSDINVDDMVNELFDSLFPVIYTQLMNPGLPDSALDINECLRGARRDLKVFGNFPKLIMTQVSKSLQVTRIFLQALNLGIEVINTTDHLKFSKDCGRMLTRMWYCSYCQGLMMVKPCGGYCNVVMQGCMAGVVEIDKYWREYILSLEELVNGMYRIYDMENVLLGLFSTIHDSIQYVQKNAGKLTTTIGKLCAHSQQRQYRSAYYPEDLFIDKKVLKVAHVEHEETLSSRRRELIQKLKSFISFYSALPGYICSHSPVAENDTLCWNGQELVERYSQKAARNGMKNQFNLHELKMKGPEPVVSQIIDKLKHINQLLRTMSMPKGRVLDKNLDEEGFESGDCGDDEDECIGGSGDGMIKVKNQLRFLAELAYDLDVDDAPGNSQQATPKDNEISTFHNLGNVHSPLKLLTSMAISVVCFFFLVH

SEQ ID NO: 3446 - DNA, 250 bp, Rattus norvegicus
  ref <308>: DATABASE ACCESSION NUMBER: EMBL / M23566
  ref <309>: DATABASE ENTRY DATE: 2000-03-04
cttaattttctcttctttccactaccacagattatggaaatgcctcaggacgcagtgaataagaagtgtttcgccagagccctgacctcaggacttcccaagaaaaacagtgtatttgtatttccagagatttgatcaataaaccatttttttcatatctacccatcaccattccctcattaattcagtcatcatttttttacattttcatgcttccacatctagtactcaataaaaactgatgaaaatc

SEQ ID NO: 3447 - protein, 1472 aa, Rattus norvegicus
  ref <308>: DATABASE ACCESSION NUMBER: PIR / A26122
  ref <309>: DATABASE ENTRY DATE: 2000-12-31
MGKHRLRSLALLPLLLRLLLLLLPTDASAPQKPIYMVMVPSLLHAGTPEKACFLFSHLNETVAVRVSLESVHGNQSLFTDLVVDKDLFHCTSFTVPQSSSDELMFFTVQVKGATHEFRRQSTVLVKKKESLVFAQTDKPIYKPGQTVRFRVVSLDESFHPLNELIPLLYIQDPKNNRIAQWQNFNLEGGLKQLSFPLSSEPTQGSYKVVIRTESGRTVEHPFSVEEFVLPKFEVRVTVPETITILEEEMNVSVCGIYTYGKPVPGRVTVNICRKYSNPSNCFGEESVAFCEKLSQQLDGRGCFSQLVKTKSFQLKRQEYEMQLDVHAKIQEEGTGVEETGKGLTKITRTITKLSFVNVDSHFRQGIPFVGQVLLVDGRGTPIPYETIFIGADEANLYINTTTDKHGLARFSINTDDIMGTSLTVRAKYKDSNACYGFRWLTEENVEAWHTAYAVFSPSRSFLHLESLPDKLRCDQTLEVQAHYILNGEAMQELKELVFYYLMMAKGGIVRAGTHVLPLKQGQMRGHFSILISMETDLAPVARLVLYAILPNGEVVGDTAKYEIENCLANKVDLVFRPNSGLPATRALLSVMASPQSLCGLRAVDQSVLLMKPETELSASLIYDLLPVKDLTGFPQGADQREEDTNGCVKQNDTYINGILYSPVQNTNEEDMYGFLKDMGLKVFTNSNIRKPKVCERLRDNKGIPAAYHLVSQSHMDAFLESSESPTETRRSYFPETWIWDLVVVDSAGVAEVEVTVPDTITEWKAGAFCLSNDTGLGLSPVVQFQAFQPFFVELTMPYSVIRGEAFTLKATVLNYLPTCIRVAVQLEASPDFLAAPEEKEQRSHCICMNQRHTASWAVIPKSLGNVNFTVSAEALNSKELCGNEVPVVPEQGKKDTIIKSLLVEPEGLENEVTFNSLLCPMGAEVSELIALKLPSDVVEESARASVTVLGDILGSAMQNTQDLLKMPYGCGEQNMVLFAPNIYVLDYLNETQQLTQEIKTKAIAYLNTGYQRQLNYKHRDGSYSAFGDKPGRNHANTWLTAFVLKSFAQARKYIFIDEVHITQALLWLSQQQKDNGCFRSSGSLLNNAMKGGVEDEVTLSAYITIALLEMSLPVTHPVVRNALFCLDTAWKSARGGAGGSHVYTKALLAYAFALAGNQDTKKEILKSLDEEAVKEEDSVHWTRPQKPSVSVGLWYQPQATSAEVEMTAYVLLAYLTTEPAPTQEDLTAAMLIVKWLTKQQNSHGGFSSTQDTVVALHALSKYGSATFTRAKKAAQVTIRSSGTFSTKFQVNNNNQLLLQRVTLPTVPGDYTVKVTGEGCVYLQTSLKYSVLPREEEFPFAVVVQTLPGTCEDPKAHTSFQISLNISYTGSRSESNMAIADVKMVSGFIPLKPTVKMLERSVHVSRTEVSNNHVLIYLDKVSNQTVNLSFTVQQDIPIRDLKPAVVKVYDYYEKDEFAVAKYSAPCSTDYGNA

SEQ ID NO: 3448 - protein, 1474 aa, Homo sapiens
  ref <308>: DATABASE ACCESSION NUMBER: SWISS-Prot / MAHU
  ref <309>: DATABASE ENTRY DATE: 2002-06-15
MGKNKLLHPSLVLLLLVLLPTDASVSGKPQYMVLVPSLLHTETTEKGCVLLSYLNETVTVSASLESVRGNRSLFTDLEAENDVLHCVAFAVPKSSSNEEVMFLTVQVKGPTQEFKKRTTVMVKNEDSLVFVQTDKSIYKPGQTVKFRVVSMDENFHPLNELIPLVYIQDPKGNRIAQWQSFQLEGGLKQFSFPLSSEPFQGSYKVVVQKKSGGRTEHPFTVEEFVLPKFEVQVTVPKIITILEEEMNVSVCGLYTYGKPVPGHVTVSICRKYSDASDCHGEDSQAFCEKFSGQLNSHGCFYQQVKTKVFQLKRKEYEMKLHTEAQIQEEGTVVELTGRQSSEITRTITKLSFVKVDSHFRQGIPFFGQVRLVDGKGVPIPNKVIFIRGNEANYYSNATTDEHGLVQFSINTTNVMGTSLTVRVNYKDRSPCYGYQWVSEEHEEAHHTAYLVFSPSKSFVHLEPMSHELPCGHTQTVQAHYILNGGTLLGLKKLSFYYLIMAKGGIVRTGTHGLLVKQEDMKGHFSISIPVKSDIAPVARLLIYAVLPTGDVIGDSAKYDVENCLANKVDLSFSPSQSLPASHAHLRVTAAPQSVCALRAVDQSVLLMKPDAELSASSVYNLLPEKDLTGFPGPLNDQDDEDCINRHNVYINGITYTPVSSTNEKDMYSFLEDMGLKAFTNSKIRKPKMCPQLQQYEMHGPEGLRVGFYESDVMGRGHARLVHVEEPHTETVRKYFPETWIWDLVVVNSAGVAEVGVTVPDTITEWKAGAFCLSEDAGLGISSTASLRAFQPFFVELTMPYSVIRGEAFTLKATVLNYLPKCIRVSVQLEASPAFLAVPVEKEQAPHCICANGRQTVSWAVTPKSLGNVNFTVSAEALESQELCGTEVPSVPEHGRKDTVIKPLLVEPEGLEKETTFNSLLCPSGGEVSEELSLKLPPNVVEESARASVSVLGDILGSAMQNTQNLLQMPYGCGEQNMVLFAPNIYVLDYLNETQQLTPEVKSKAIGYLNTGYQRQLNYKHYDGSYSTFGERYGRNQGNTWLTAFVLKTFAQARAYIFIDEAHITQALIWLSQRQKDNGCFRSSGSLLNNAIKGGVEDEVTLSAYITIALLEIPLTVTHPVVRNALFCLESAWKTAQEGDHGSHVYTKALLAYAFALAGNQDKRKEVLKSLNEEAVKKDNSVHWERPQKPKAPVGHFYEPQAPSAEVEMTSYVLLAYLTAQPAPTSEDLTSATNIVKWITKQQNAQGGFSSTQDTVVALHALSKYGAATFTRTGKAAQVTIQSSGTFSSKFQVDNNNRLLLQQVSLPELPGEYSMKVTGEGCVYLQTSLKYNILPEKEEFPFALGVQTLPQTCDEPKAHTSFQISLSVSYTGSRSASNMAIVDVKMVSGFIPLKPTVKMLERSNHVSRTEVSSNHVLIYLDKVSNQTLSLFFTVLQDVPVRDLKPAIVKVYDYYETDEFAIAEYNAPCSKDLGNA

SEQ ID NO: 3449 - DNA, 256 bp, Rattus norvegicus
  ref <308>: DATABASE ACCESSION NUMBER: EMBL / M23643
  ref <309>: DATABASE ENTRY DATE: 2000-03-08
ctgcccttgactcctagactccaggatgccgggaccttggttgctgctggctctggctttgatcttcaccctaactggtatccctgaatcctgcgccttgccggaggcagcccaggaggaaggtgcagtgactcctgaccttcctggcctggagaatgttcaggtccggccagaacgtcgattcttgtggaaagacctccagcgggtgagaggggacctcggtgctgccttaggtaagcaccaggggaggggagcc

SEQ ID NO: 3450 - protein, 255 aa, Rattus norvegicus
  ref <308>: DATABASE ACCESSION NUMBER: SWISS-Prot / RHRTT
  ref <309>: DATABASE ENTRY DATE: 2001-10-16
MPGPWLLLALALIFTLTGIPESCALPEAAQEEGAVTPDLPGLENVQVRPERRFLWKDLQRVRGDLGAALDSWITKRQHPGKREEEEKDIEAEERGDLGEGGAWRLHKRQHPGRRANQDKYSWADEEDSDWMPRSWLPDFFLDSWFSDVPQVKRQHPGRRSFPWMESDVTKRQHPGRRFIDPELQRSWEEKEGEGVLMPEKRQHPGKRALGHPCGPQGTCGQTGLLQLLGDLSRGQETLVKQSPQVEPWDKEPLEE

SEQ ID NO: 3451 - DNA, 1359 bp, Homo sapiens
  ref <308>: DATABASE ACCESSION NUMBER: EMBL / M63582
  ref <309>: DATABASE ENTRY DATE: 1999-07-02
tttccttcctcagcgtcccagatctttcaatctgactggctctccaaacgtcagcatccaggcaaaagagaggaggaggaggaagagggagttgaagaagaggaagaggaagaagggggggctgtgggaccccacaaacggcagcaccctggccgacgagaagatgaggcttcatggtcagtcgatgtaacccagcacaagcggcagcatcctggccggcgctccccctggcttgcatatgctgtcccgaagcggcagcacccaggcagaaggctggcagatcccaaggctcaaaggagctgggaagaagaggaggaggaggaagagagagaggaagacctgatgcctgaaaaacgccagcatccgggcaagagggccctgggaggcccctgtgggccccagggagcctatggtcaagcgggcctcctgctggggctcctggatgacctgagtaggagccagggagctgaggaaaagcggcagcaccctggtcggcgggcagcctgggtcagggagcccctggaggagtgaacccagttttccctgaagtcgagtttgtggtctaaggatgtcttgagccctgtgtgccccaccattcatgacctctgtattctctagttagatccctgaccataagcctgagcccctccctcccagccccatattcacacacatcccagcccctggccttgccctcttcctttaggcatgtgagaaaatcagcctagcagtttaaaccccactttcctccacttagcaccataggcaagggggcagatcccagagcccctctcaccccccccaccacaggcctgctccttccttagccttggctaagatggtccttctgtgtcttgcaaagactccccaagtggacagggagcccctgggagggcagccagtgagggtggggtgggactgaagcgttgtgtgcaaatccagcttccatcccctccccaacctggcaggattctccatgtgtaaacttcacccccaggacccaggatcttctcctttctgggcatccctttgtgggtgggcagagccctgacccacagctgtgttactgcttggagaagcatatgtaggggcataccctgtggtgttgtgctgtgtctggctgtgggataaatgtgtgtgggaatattgaaacatcgcctaggaattgtggtttgtatataaccctctaagcccctatcccttgtcgatgacagtcatcctaatgataataaaacctgcatccagataatcacggagctctgtggttgctgttctgtcgcagctggcatgggattcttctttcgcattgagagggatatttaaaaggggatgggactagagttctcagctctgctgcag

SEQ ID NO: 3452 - protein, 242 aa, Homo sapiens
  ref <308>: DATABASE ACCESSION NUMBER: SWISS-Prot / P20396
  ref <309>: DATABASE ENTRY DATE: 2001-10-16
MPGPWLLLALALTLNLTGVPGGRAQPEAAQQEAVTAAEHPGLDDFLRQVERLLFLRENIQRLQGDQGEHSASQIFQSDWLSKRQHPGKREEEEEEGVEEEEEEEGGAVGPHKRQHPGRREDEASWSVDVTQHKRQHPGRRSPWLAYAVPKRQHPGRRLADPKAQRSWEEEEEEEEREEDLMPEKRQHPGKRALGGPCGPQGAYGQAGLLLGLLDDLSRSQGAEEKRQHPGRRAAWVREPLEE

SEQ ID NO: 3453 - DNA, 1482 bp, Rattus norvegicus
  ref <308>: DATABASE ACCESSION NUMBER: EMBL / M24104
  ref <309>: DATABASE ENTRY DATE: 2000-03-04
gaattcgggttccgtctacttcagccgcagcgtctccctgcctgtctcattgcattctccagagaggggacggacctccacttcctctttcagaaaaatgtctgctccagctcagccacctgctgaagggacagaaggggctgccccaggtgggggtcctcctggtcctcctcccaatacgaccagtaacagacgattacagcaaacccaggcacaagtggaggaggtggtggacatcattcgcgtgaatgtggacaaggtcttggagagggaccagaagttgtcagagttggatgaccgagctgacgccttgcaggcaggagcgtcagtgtttgagagcagtgctgccaagctaaaaaggaagtattggtggaaaaactgcaagatgatgatcatgctgggagctatctgtgccatcatcgtggtagtaattgtaatctacatttttacttgagaatgtgccatcccttccctgttctccattgccatccaagctcatgtttcccctctgtttgctctctcaacaaagtcctccatcttccgttctccatcctggcccaggcttctctgtgatccgaccttccctttttgtgcattcattcgcactcttcctcaaaactagaaatgctgctcgtggcacagtcctgaaagtcactgcccgaagagaacacccagcacctcctctttacccatttatcatgtgccctggagcttaaaagagttgtggccaatggcagaggtgaagtgtctgagaagttagcatggctgaggggaagagaaaggcatttgtgtccaagaaaggctggcctttggcaggagggaagcaagaatagttgggaagtagtagcttgctgccagtgtatatgtatatgtatatgtatatgtatatgtatatgtatatgtatatgtatatattagttgggaactatgacctgctgtcctcatttggaactttcctcccataccaggcctgtcttgggtcccagaggtctgtttaaagaccaacttcaaatcccttttagaaaaacatcaaacttgcattttgtagctactgttatctgtcagtacaagattttctgtgtctttgggggaactttacaacttttcgctttgtctctatagccccaggagagaagtactttctgattttaaaaacagcaggacactcttaccttcttctagaaggcgtcccacatgcttctgactagaaggagctaccacctcttcatgtcatctgaagcatttgatgttgttcatgaaggcaccaaataatttcagggaatgaggggctttgaggataacaggctctcaggaacacgctccatgccatcccactctccaatgaaagccctgtacctcccttgttgattaagagaaatgagagttatatggtgagactcccagggtcccacagaacacttccccctgcactacccacttactgtgtgtaagacaaggatgaggcaggagggccccgaattc

SEQ ID NO: 3454 - protein, 115 aa, Rattus norvegicus
  ref <308>: DATABASE ACCESSION NUMBER: SWISS-Prot / Q64357
  ref <309>: DATABASE ENTRY DATE: 2002-06-15
SATAATVPPAAPAGEGGPPAPPPNLTSNRRLQQTQAQVDEVVDIMRVNVDKVLERDQKLSELDDRADALQAGASQFETSAAKLKRKYWWKNLKMMIILGVICAIILIIIIVYFST

SEQ ID NO: 3455 - DNA, 6885 bp, Homo sapiens
  misc_feature (1)..(6885): n=a, c, g or t
  ref <308>: DATABASE ACCESSION NUMBER: EMBL / AF135372
  ref <309>: DATABASE ENTRY DATE: 2000-09-22
tcaagaccaccctggctaacacggtgaaaccctgtctctactaaaaatacaaaaaattagccgggcggggtggtgggcgcctgtagtcccagctactcgggaggctgagggaggagaatggcgtgaacctgggaggcggagtttgcagtgagcagagatcgcgccattgcactccagcctgggtgacagacagagactctgtctcaaaaaagaaaaaaaaagaaaaaaagaaaaagaaagtgtggtctctgttgcctacatcaccatcaccttgagtcctacatcctttgaatgagtcttgggggtgtgccctagaaaatcattggccaattcccgaagccagtacatgtagaagccaaatctgagttatgcaaatacattatttttctattgttcaacttacctctatttgggtctccattctacctgcctgcaagaaaacattctctcagtcacttccaggtgaactccgtcatcccactccttctcccacctccaccattgatctaaatttggggagttcctctgagccacagcctaggtggggtggggtgggaaggggctgctggatgagagtcctctttctgagatgaatcctcctgggcccttcatctccgtgggtcacacatgccctcatttctactctgctgctgccgtccccacgatccaatagcaatagcacgacccctggccttgaccgtgtatctggggctctgtcccttccacatcacccccaaaccagcatcaaatgtcttgtctggctctgcactaggctcccctcagttagtgcaggggtgtccaactgggggcggaagggcttcctgtgcctgcctcttccaatcctccatgtcttatttataccctgacagacatgaagggttttgaacttaaaaggctgggaatttggcatcttttgttctctgactaagaaagaggaaatcatttcaagaccaaaaagcagggagccagcatctcacagcatggatctgagaccccccgtggaagctgctcttttctttctcatcacataagcgtgagcccgggactgtcagtgcacaaggaccagggacgcggctgctcctctgagggggaggaagccaagagtatcttctcttagattgggctgagttcccacacccagcacacacattccctgctcactcacctcccacagacagctgggaaatgacacctctggtgacagagccactctccgggcttctgtggggagcgggtggggcactgcagtgggggaggatctcacacccggaggccctgggaagccagggtgggggagggaggaagctggttcctgtttgtcttagagatcaaggccatcagcctccctgcaccttccagggatgtagtaagcacccccaccccagggccaaagggcctcgcctaaaatgcctcctgcacccttgaggcttgctttgaccccctgcactccaccaagagcgacagctcccctgggtcccatcttctctgacaagctgggtgggagtgtatacagctgctgggtgtgcttagagggcctaatggagaccagccagggataatctcctatgttatccacatcaagccatttaacaaatatggatttagtacctacatatgcaatgtatttggggtccagagagaggagggcaacggtccaaggtcacacctgcgaggcgaatacgcatgtaaagcagcaccttgtaacctgtgcccactgtgcctactactaaagaaaaataaatgagagaaaaagaaaaaaggctttttttttttttggcccaggccctgtgcctgggaccaaagcctgagccctttcctgcagtcgggtcgctgacctaagcctggggcaaagctaggtcttggccagtcagcagccaccacgtgaagcagcccctgcccccatcacccccggcagccttgtgccctcctcctcggggtcctcagctcaccccacctcagtcgggcctgctccagcggttaagtacccctagtctgaaccttaatcgtgaggcggggcagccccctccccacaccctgtagacactcccccgtcctccgccccctggacttgtttgggcgggaagagcctgcctcatcttttcttcctaccctcctacccagtggccagggaccccaggcttcctctgagacatccaccagcggtgatgggttgggaccaatctcccccactcctctccaccctagcagtaaggtccccgctctcgatactgccccagcacctgcactggccctctctgatttcccaactccagcccattccaagtgctgaaggcgggtcgctaggtgctgggacctgggcgcggggcaagaccttgggctgtgtggggtgcaggctgggtttactgggttcacgattgagggagtggtctgggggttaggtgtagggccaggctgcgttgtgctctaaggggcaggcggcaggcggtttgggggggctgtggtcagacagggtggggtggcggtgggtttggggaagccgcagcagcccgccttggggtcccgcgagtgccgagggagctgccggggcatggtggcgcggggcccgtggtcctgcccggcacgacccccgccccgcagcgccccgcagcgccccgcccccgcggccccgctcgcgacgcgtctcccgcggcgccccgcccccgcccgcagtgcccggatgcgggtgacgcgcggccgccatctttccgtcccgggcagccagcgccagtcggagccagcgcgagcgccgccgccatcactgccgctgccaagtcctccacccgctgcccccgccatgtgagtcggccgcccgccaccctcaccgcgcttccctgcgccggccgccgcccttggcaaccggccgtcgggagtgcccggggtctcttctgcgttccccgcgccccggggccaggcccaagccggtgactgcgcgcgggcggccgaggagccccgcgtcccgggctggccggctcgggcgatggccgcgggaaggagcggacccagtgtcctcctgcccctccccgcccctgtcaccgcggccgcctgtcttttcgggtcgacccggatcgcatctgtgaggtcgccctcagttgacaggcggggaaactgaggccgggggggcctcgctcaaggtcacgcagctcatcggcggcagggctggaccgagaccagggcttacatcgggtggccttcctcccgaaaaggaggactggagggacnaggatggacaggtggatgggcggagccctggctgcggggccgggaggctgcaagccctgggtcttaatccgtccctgctcctcaggtctgctaccgctgccacggccccccctgctgccccggctggggagggtggtccccctgcaccccctccaaacctcaccagtaacaggagactgcagcagacccaggcccaggtggatgaggtgagtgtggggggagtcaaaaccagtaggagggcccctgggggttggggataggtgtaggggcccattttggtttgggagtgatgacagttcacgcctttgggtttgcggacaaagataccatgccccatccctgtctccctgtcagcacgcacttggaagggcgctgggggtgttaatcagctttgctagcctggggtgtgccagcctgggcaggtgtgctctggtgatggacagagcgcctgaggttccatagagggagggtgttgctatgacatntgagatgtcaccagcatgcccctgatgtgtgctccttgcatgtccccaggtgtgctaggcatgttctgtgtgtccttggcatgttaacctggcagtatcagggtgcatgttccatgtgtggcacggtgggcacatgtttgaggattgccctcactgaggtgggccttggcacacccccctgcctcgtgggcccttctcccaggtggtggacatcatgagggtgaacgtggacaaggtcctggagcgagaccagaagctgtcggagctggacgaccgtgcagatgcactccaggcgggggcctcccagtttgaaacaagcgcagccaagctcaagcgcaaatactggtggaaaaacctcaaggtaagggtggggacaggaaggaggacaggtgggtgaatggggtatcatagtttgtcttactgatcctcgcctctcacccccagatgatgatcatcttgggagtgatttgcgccatcatcctcatcatcatcataggtgagtagggtgagaatggccggggccctttccctggagaggtttccccagtggattctaggttttgaaggtcattaatctagtttttactcttcagccaaaaacacatatagctgctaatggcaattctgattcatctagagccaaaaactttgatgttatttagcctgcattttgcctagttcttggcagtcttgttaacatttggaaataggaaagctggtgtatccattgaggaccctttaggcctaagagcccagtctgagaaccctggaattgaggagtgggagaaaggaaaggaccaggggcttgagacatgaccaggaagccaaccaccccattatttgagagcttgcggtctcagaggctcagaggattagggtctgtggcttcaaggccataccatggagcggaagggacctcagaacctacctgtctagccccttgctttgtagatggaaaaactgagtccaagagagggtgtcagccagctggggagtggggaggattggagcagggccaggcctgacacactgctttcttgttctctctctttctctcccctctccctcttcctcatcttcttcccctctctccacagtttacttcagctcttaaatccccgaggagtctgccctgcctagagaagggcctctcccccaaccctcagccgttcctccacctctcagccatatctttcagccccccctcccctggatccgtgtgtgtgtgtgtccgtgtgtgtgtccccctgtaaatagccagctgttatttatacatatataatattatatatatttggtctgtttgtagttttattactagatgatttttccggttgtccttaacaccccttcctgaggttcccttcacccctctctcttgccttccttccctttccctttcttcctgactagccccaagtcccttcatttgcatctgctatgcaatagtccctctcctttccttcttcttccctcagatttagctgatccttcctcccaccctggccttcctttcctctttcctcctcactctccccgtcatgctccctctgccccgccctcaaaaaaaaaaaaaaaaaaaaaaaaaaaaaaaaccaccagcacctgtccaggcttccttaggtacatcttctttgtatccattgggaggctctgagactggccccacttggtcctaaaaatcccaaggtctttgggagcgtccagcatgttaattagcgtatcattacatactgctatccctttccatttctttttgttccatcactcttctctcaacctgtgtttctttttttactgaggagttagtccccattagttcttgtatcacattttcatttgcacgacattactcgcaggtggtggggagcctgggcttttggggaaccaggctgctctggtccccagcattgcctcctcctagcccctctagtccagtttgcctcccttaccctcattttccaaacctcttgtaccctcctctccctcccccagtggtatgtaagtgtcttgaagttcagtatgttatgatggaccaataattctgcccttcgggtttctccctacattcctgctccccagttttcatgtggggtactcaactgacattcccatggggtttccctcccatctgcctgatccacctcctcctcccaccacaagatcaattgttggccacaattgatctcttgtagaggggtggctaccagtgtgtgtgtgggggtcatcactgccttggggaggagtggggcagggcagagaatccccccaattcctgcctgaaatctctggcctcacccctgctgggggttggactgaaaaccctcctccccaatttggggggtgttgccccatcactgcccagctcctctgactgccccccctgaatttagggtgggggtactagtcactgccaatgtgtgtatgggacttgctggaaaacggggatgcttgcccctctccaggactattgagcccagagagagctgtcctctcattgggtgaactgattgaggaagggtctattgtctttttaaatggcacaattttaagggtttgagggtacagtcccttaacctgccacgggagggggcccccaaactttcttcccccccacacttctggttttctgtgtggagggggagcagggatatctaagctgtggtgtgaaagggtaggagagatgctggaggtgggggtgctgtgttctagaccccccatattatcccagtgtcccctgcccccctcttcccccaccccatgcccccaattctgtggcgcatccagattgtgaaaatgtacaataaatgtgtaatgagtaaccaggtgttgtctaagatcttttttatttttctattttttttttttggttgggggagaataagatcttttcttaaccaatgggaataatattggatcggaaggtataccaggaaggttgagaagatacattggtaatggactggactttgcaagaggccctgaccttgggcagggcaaagtgtgattctcaaagtggccacaggggggcactaggagttggtaatgggaagtgtcatagccagcccgtgtctctaagcccggtgcgccctatggtctagggttcccagctttcgtttccctttactggggcatgttcctgctgttggactcctttctactcctcgatttaacttctaga

SEQ ID NO: 3456 - protein, 115 aa, Homo sapiens
  ref <308>: DATABASE ACCESSION NUMBER: SWISS-Prot / P19065
  ref <309>: DATABASE ENTRY DATE: 2002-06-15
SATAATAPPAAPAGEGGPPAPPPNLTSNRRLQQTQAQVDEVVDIMRVNVDKVLERDQKLSELDDRADALQAGASQFETSAAKLKRKYWWKNLKMMIILGVICAIILIIIIVYFSS

SEQ ID NO: 3457 - DNA, 1482 bp, Rattus norvegicus; identical to SEQ ID NO: 3453
  ref <308>: DATABASE ACCESSION NUMBER: EMBL / M24104
  ref <309>: DATABASE ENTRY DATE: 2000-03-04

SEQ ID NO: 3458 - protein, 115 aa, Rattus norvegicus; identical to SEQ ID NO: 3454
  ref <308>: DATABASE ACCESSION NUMBER: SWISS-Prot / Q64357
  ref <309>: DATABASE ENTRY DATE: 2002-06-15

SEQ ID NO: 3459 - DNA, 6885 bp, Homo sapiens; identical to SEQ ID NO: 3455
  misc_feature (1)..(6885): n=a, c, g or t
  ref <308>: DATABASE ACCESSION NUMBER: EMBL / AF135372
  ref <309>: DATABASE ENTRY DATE: 2000-09-22

SEQ ID NO: 3460 - protein, 115 aa, Homo sapiens; identical to SEQ ID NO: 3456
  ref <308>: DATABASE ACCESSION NUMBER: SWISS-Prot / P19065
  ref <309>: DATABASE ENTRY DATE: 2002-06-15

SEQ ID NO: 3461 - DNA, 1482 bp, Rattus norvegicus; identical to SEQ ID NO: 3453
  ref <308>: DATABASE ACCESSION NUMBER: EMBL / M24104
  ref <309>: DATABASE ENTRY DATE: 2000-03-04

SEQ ID NO: 3462 - protein, 115 aa, Rattus norvegicus; identical to SEQ ID NO: 3454
  ref <308>: DATABASE ACCESSION NUMBER: SWISS-Prot / Q64357
  ref <309>: DATABASE ENTRY DATE: 2002-06-15

SEQ ID NO: 3463 - DNA, 6885 bp, Homo sapiens; identical to SEQ ID NO: 3455
  misc_feature (1)..(6885): n=a, c, g or t
  ref <308>: DATABASE ACCESSION NUMBER: EMBL / AF135372
  ref <309>: DATABASE ENTRY DATE: 2000-09-22

SEQ ID NO: 3464 - protein, 115 aa, Homo sapiens; identical to SEQ ID NO: 3456
  ref <308>: DATABASE ACCESSION NUMBER: SWISS-Prot / P19065
  ref <309>: DATABASE ENTRY DATE: 2002-06-15

SEQ ID NO: 3465 - DNA, 1482 bp, Rattus norvegicus; identical to SEQ ID NO: 3453
  ref <308>: DATABASE ACCESSION NUMBER: EMBL / M24104
  ref <309>: DATABASE ENTRY DATE: 2000-03-04

SEQ ID NO: 3466 - protein, 115 aa, Rattus norvegicus; identical to SEQ ID NO: 3454
  ref <308>: DATABASE ACCESSION NUMBER: SWISS-Prot / Q64357
  ref <309>: DATABASE ENTRY DATE: 2002-06-15

SEQ ID NO: 3467 - DNA, 6885 bp, Homo sapiens; identical to SEQ ID NO: 3455
  misc_feature (1)..(6885): n=a, c, g or t
  ref <308>: DATABASE ACCESSION NUMBER: EMBL / AF135372
  ref <309>: DATABASE ENTRY DATE: 2000-09-22

SEQ ID NO: 3468 - protein, 115 aa, Homo sapiens; identical to SEQ ID NO: 3456
  ref <308>: DATABASE ACCESSION NUMBER: SWISS-Prot / P19065
  ref <309>: DATABASE ENTRY DATE: 2002-06-15

SEQ ID NO: 3469 - DNA, 1482 bp, Rattus norvegicus; identical to SEQ ID NO: 3453
  ref <308>: DATABASE ACCESSION NUMBER: EMBL / M24104
  ref <309>: DATABASE ENTRY DATE: 2000-03-04

SEQ ID NO: 3470 - protein, 115 aa, Rattus norvegicus; identical to SEQ ID NO: 3454
  ref <308>: DATABASE ACCESSION NUMBER: SWISS-Prot / Q64357
  ref <309>: DATABASE ENTRY DATE: 2002-06-15

SEQ ID NO: 3471 - DNA, 6885 bp, Homo sapiens; identical to SEQ ID NO: 3455
  misc_feature (1)..(6885): n=a, c, g or t
  ref <308>: DATABASE ACCESSION NUMBER: EMBL / AF135372
  ref <309>: DATABASE ENTRY DATE: 2000-09-22

SEQ ID NO: 3472 - protein, 115 aa, Homo sapiens; identical to SEQ ID NO: 3456
  ref <308>: DATABASE ACCESSION NUMBER: SWISS-Prot / P19065
  ref <309>: DATABASE ENTRY DATE: 2002-06-15

SEQ ID NO: 3473 - DNA, 1482 bp, Rattus norvegicus; identical to SEQ ID NO: 3453
  ref <308>: DATABASE ACCESSION NUMBER: EMBL / M24104
  ref <309>: DATABASE ENTRY DATE: 2000-03-04

SEQ ID NO: 3474 - protein, 115 aa, Rattus norvegicus; identical to SEQ ID NO: 3454
  ref <308>: DATABASE ACCESSION NUMBER: SWISS-Prot / Q64357
  ref <309>: DATABASE ENTRY DATE: 2002-06-15

SEQ ID NO: 3475 - DNA, 6885 bp, Homo sapiens; identical to SEQ ID NO: 3455
  misc_feature (1)..(6885): n=a, c, g or t
  ref <308>: DATABASE ACCESSION NUMBER: EMBL / AF135372
  ref <309>: DATABASE ENTRY DATE: 2000-09-22

SEQ ID NO: 3476 - protein, 115 aa, Homo sapiens; identical to SEQ ID NO: 3456
  ref <308>: DATABASE ACCESSION NUMBER: SWISS-Prot / P19065
  ref <309>: DATABASE ENTRY DATE: 2002-06-15

SEQ ID NO: 3477 - DNA, 912 bp, Rattus norvegicus
  ref <308>: DATABASE ACCESSION NUMBER: EMBL / M24542
  ref <309>: DATABASE ENTRY DATE: 2000-03-04
tcccgcggggtggcgggagcgctgcggcccctgctgcaaagcgcggtgcccgccacctcggaaccaccggttctggacgtgaagcgacccttcctgtgccgtgagtcgctgagtggccaggccgcgacccgtcctttggtggccacagtgggcctgaatgttcctgcttctgttcgttattcccacacagacatcaaggtgcccgacttctctgactatcgccgtgctgaagttctagatagcacaaagtcttctaaagagagcagtgaggctagaaaaggcttctcttacttggtaactgcaactactactgtgggtgttgcatacgctgcgaaaaatgcagtctcccagtttgtttccagcatgagtgcttctgcggatgtactggccatgtcgaagatcgagatcaagttgtctgatattccagaggggaagaacatggcttttaaatggagaggcaaacctctgtttgtgcgccatagaaccaagaaggagattgaccaggaagctgcagttgaagtgtcccagttaagggacccacagcatgatttagagcgtgtaaagaagcctgaatgggttattctgatcggtgtctgtactcatcttggttgtgtacccattgcaaacgcaggagattttggtggctactattgcccctgccatgggtcacactatgatgcttctggcaggatcaggaagggccctgcacctctcaacctggaagtacctacctatgagttcaccagtggtgatgtagttgttgtgggttagacacttggactgagggcctaggtttctttcggtcttcatgtcccctcagaagagttgagagtaagccttgtacttctaggttggttgatttaaaatatttaagaattgttaataactattggcaaacattaatgtgaagta

SEQ ID NO: 3478 - protein, 256 aa, Rattus norvegicus
  ref <308>: DATABASE ACCESSION NUMBER: SWISS-Prot / AAA42051
  ref <309>: DATABASE ENTRY DATE: 2002-06-15
SRGVAGALRPLLQSAVPATSEPPVLDVKRPFLCRESLSGQAATRPLVATVGLNVPASVRYSHTDIKVPDFSDYRRAEVLDSTKSSKESSEARKGFSYLVTATTTVGVAYAAKNAVSQFVSSMSASADVLAMSKIEIKLSDIPEGKNMAFKWRGKPLFVRHRTKKEIDQEAAVEVSQLRDPQHDLERVKKPEWVILIGVCTHLGCVPIANAGDFGGYYCPCHGSHYDASGRIRKGPAPLNLEVPTYEFTSGDVVVVG

SEQ ID NO: 3479 - DNA, 1203 bp, Homo sapiens
  ref <308>: DATABASE ACCESSION NUMBER: Refseq / NM_006003
  ref <309>: DATABASE ENTRY DATE: 2000-11-01
gtcgtcacgcgtcccgcgcctcctcgcgcctgcaccgtggttggaaggtcgtcccctgtgaccggttgggcggttggagcggctgtcgccatgttgtcggtagcagcccgctcgggcccgttcgcgcccgtcctgtcggccacgtcccgcggggtggcgggcgcgctgcggcccttggtgcaggccacggtgcccgccaccccggagcagcctgtgttggacctgaagcggcccttcctcagccgggagtcgctgagcggccaggccgtgcgccggcctttggtcgcctccgtgggcctcaatgtccctgcttctgtttgttattcccacacagacatcaaggtgcctgacttctctgaataccgccgccttgaagttttagatagtacgaagtcttcaagagaaagcagcgaggctaggaaaggtttctcctatttggtaactggagtaactactgtgggtgtcgcatatgctgccaagaatgccgtcacccagttcgtttccagcatgagtgcttctgctgatgtgttggccctggcgaaaatcgaaatcaagttatccgatattccagaaggcaagaacatggctttcaaatggagaggcaaacccctgtttgtgcgtcatagaacccagaaggaaattgagcaggaagctgcagttgaattatcacagttgagggacccacagcatgatctagatcgagtaaagaaacctgaatgggttatcctgataggtgtttgcactcatcttggctgtgtacccattgcaaatgcaggagattttggtggttattactgcccttgccatgggtcacactatgatgcatctggcaggatcagattgggtcctgctcctctcaaccttgaagtccccacgtatgagttcaccagtgacgatatggtgattgttggttaagagacttggactcaagtcataggcttctttcagtctttatgtcacctcaggagacttatttgagaggaagccttctgtacttgaagttgatttgaaatatgtaagaattgatgatgtatttgcaaacattaatgtgaaataaattgaatttaatgttgaatactttcaggcattcacttaataaagacactgttaagcactgttatgctcagtcatacacgcgaaaggtacaatgtcttttagctaattctaattaaaaattacagactggtgtacaagatacttgtg

SEQ ID NO: 3480 - protein, 274 aa, Homo sapiens
  ref <308>: DATABASE ACCESSION NUMBER: Refseq / NP_005994
  ref <309>: DATABASE ENTRY DATE: 2000-11-01
MLSVAARSGPFAPVLSATSRGVAGALRPLVQATVPATPEQPVLDLKRPFLSRESLSGQAVRRPLVASVGLNVPASVCYSHTDIKVPDFSEYRRLEVLDSTKSSRESSEARKGFSYLVTGVTTVGVAYAAKNAVTQFVSSMSASADVLALAKIEIKLSDIPEGKNMAFKWRGKPLFVRHRTQKEIEQEAAVELSQLRDPQHDLDRVKKPEWVILIGVCTHLGCVPIANAGDFGGYYCPCHGSHYDASGRIRLGPAPLNLEVPTYEFTSDDMVIVG

SEQ ID NO: 3481 - DNA, 912 bp, Rattus norvegicus; identical to SEQ ID NO: 3477
  ref <308>: DATABASE ACCESSION NUMBER: EMBL / M24542
  ref <309>: DATABASE ENTRY DATE: 2000-03-04

SEQ ID NO: 3482 - protein, 256 aa, Rattus norvegicus; identical to SEQ ID NO: 3478
  ref <308>: DATABASE ACCESSION NUMBER: SWISS-Prot / AAA42051
  ref <309>: DATABASE ENTRY DATE: 2002-06-15

SEQ ID NO: 3483 - DNA, 1203 bp, Homo sapiens; identical to SEQ ID NO: 3479
  ref <308>: DATABASE ACCESSION NUMBER: Refseq / NM_006003
  ref <309>: DATABASE ENTRY DATE: 2000-11-01

SEQ ID NO: 3484 - protein, 274 aa, Homo sapiens; identical to SEQ ID NO: 3480
  ref <308>: DATABASE ACCESSION NUMBER: Refseq / NP_005994
  ref <309>: DATABASE ENTRY DATE: 2000-11-01

SEQ ID NO: 3485 - DNA, 912 bp, Rattus norvegicus; identical to SEQ ID NO: 3477
  ref <308>: DATABASE ACCESSION NUMBER: EMBL / M24542
  ref <309>: DATABASE ENTRY DATE: 2000-03-04

SEQ ID NO: 3486 - protein, 256 aa, Rattus norvegicus; identical to SEQ ID NO: 3478
  ref <308>: DATABASE ACCESSION NUMBER: SWISS-Prot / AAA42051
  ref <309>: DATABASE ENTRY DATE: 2002-06-15

SEQ ID NO: 3487 - DNA, 1203 bp, Homo sapiens; identical to SEQ ID NO: 3479
  ref <308>: DATABASE ACCESSION NUMBER: Refseq / NM_006003
  ref <309>: DATABASE ENTRY DATE: 2000-11-01

SEQ ID NO: 3488 - protein, 274 aa, Homo sapiens; identical to SEQ ID NO: 3480
  ref <308>: DATABASE ACCESSION NUMBER: Refseq / NP_005994
  ref <309>: DATABASE ENTRY DATE: 2000-11-01

SEQ ID NO: 3489 - DNA, 912 bp, Rattus norvegicus; identical to SEQ ID NO: 3477
  ref <308>: DATABASE ACCESSION NUMBER: EMBL / M24542
  ref <309>: DATABASE ENTRY DATE: 2000-03-04

SEQ ID NO: 3490 - protein, 256 aa, Rattus norvegicus; identical to SEQ ID NO: 3478
  ref <308>: DATABASE ACCESSION NUMBER: SWISS-Prot / AAA42051
  ref <309>: DATABASE ENTRY DATE: 2002-06-15

SEQ ID NO: 3491 - DNA, 1203 bp, Homo sapiens; identical to SEQ ID NO: 3479
  ref <308>: DATABASE ACCESSION NUMBER: Refseq / NM_006003
  ref <309>: DATABASE ENTRY DATE: 2000-11-01

SEQ ID NO: 3492 - protein, 274 aa, Homo sapiens; identical to SEQ ID NO: 3480
  ref <308>: DATABASE ACCESSION NUMBER: Refseq / NP_005994
  ref <309>: DATABASE ENTRY DATE: 2000-11-01

SEQ ID NO: 3493 - DNA, 912 bp, Rattus norvegicus; identical to SEQ ID NO: 3477
  ref <308>: DATABASE ACCESSION NUMBER: EMBL / M24542
  ref <309>: DATABASE ENTRY DATE: 2000-03-04

SEQ ID NO: 3494 - protein, 256 aa, Rattus norvegicus; identical to SEQ ID NO: 3478
  ref <308>: DATABASE ACCESSION NUMBER: SWISS-Prot / AAA42051
  ref <309>: DATABASE ENTRY DATE: 2002-06-15

SEQ ID NO: 3495 - DNA, 1203 bp, Homo sapiens; identical to SEQ ID NO: 3479
  ref <308>: DATABASE ACCESSION NUMBER: Refseq / NM_006003
  ref <309>: DATABASE ENTRY DATE: 2000-11-01

SEQ ID NO: 3496 - protein, 274 aa, Homo sapiens; identical to SEQ ID NO: 3480
  ref <308>: DATABASE ACCESSION NUMBER: Refseq / NP_005994
  ref <309>: DATABASE ENTRY DATE: 2000-11-01

SEQ ID NO: 3497 - DNA, 912 bp, Rattus norvegicus; identical to SEQ ID NO: 3477
  ref <308>: DATABASE ACCESSION NUMBER: EMBL / M24542
  ref <309>: DATABASE ENTRY DATE: 2000-03-04

SEQ ID NO: 3498 - protein, 256 aa, Rattus norvegicus; identical to SEQ ID NO: 3478
  ref <308>: DATABASE ACCESSION NUMBER: SWISS-Prot / AAA42051
  ref <309>: DATABASE ENTRY DATE: 2002-06-15

SEQ ID NO: 3499 - DNA, 1203 bp, Homo sapiens; identical to SEQ ID NO: 3479
  ref <308>: DATABASE ACCESSION NUMBER: Refseq / NM_006003
  ref <309>: DATABASE ENTRY DATE: 2000-11-01

SEQ ID NO: 3500 - protein, 274 aa, Homo sapiens; identical to SEQ ID NO: 3480
  ref <308>: DATABASE ACCESSION NUMBER: Refseq / NP_005994
  ref <309>: DATABASE ENTRY DATE: 2000-11-01

SEQ ID NO: 3501 - DNA, 1160 bp, Rattus norvegicus
  ref <308>: DATABASE ACCESSION NUMBER: EMBL / M24604
  ref <309>: DATABASE ENTRY DATE: 1996-10-01
ttgtcagcaagacctcgctccccttacagtaactctcatctagacgtcgcaactccgccaccatgtttgaggcacgcctgatccagggctccatcctgaagaaggtgctggaggccctcaaagacctcatcaatgaggcctgctgggacatcagttcgggcggcgtgaacctacagagcatggattcgtctcacgtctccttagtgcagcttactctgcgctccgaaggcttcgacacataccgctgcgatcgcaacctggccatgggcgtgaacctcaccagcatgtccaaaattctaaaatgtgctggtaatgaagacatcattacattaagggctgaagataatgctgataccttagcactagtatttgaagcaccaaatcaagagaaagtttcagactatgagatgaagttaatggacttagacgttgagcaacttggaatcccagaacaggagtacagctgcgtagtaaagatgccatctggtgaatttgcacgtatatgccgggaccttagccatattggagatgctgtggtgatctcctgtgcaaaggacggggtgaagttttctgcgagtggggagcttggcaatgggaacattaagttgtcccagacaagcaatgttgataaagaagaggaagctgtgtccatagagatgaatgagccagttcagctaacttttgctctgaggtacctgaactttttcacaaaagccactccactgtctcctacagtaacactcagtatgtctgcagatgtaccccttgttgtagagtataaaattgctgacatgggacacttaaagtattatttggctcccaagatcgaagatgaagaaggatcttaggcgttgctagaaattgagaaactaaacctttgacgatcgcttctgagatgccagcgtgttctgaggtcttttctgtcaccaagtttgtacctgagtattcttaaatattaaaataaaatgtagatatcttctgtaaataaccttttttttcctctccataatttgcttacagaataagctccaaagtaaaaactggttttgttaacataaatgtctctgccttacaaatactggtgattttcataaatgatcttgacgctaaatgcagttttaagaaatatttttcaatttaaataaagttaactgaatttg

SEQ ID NO: 3502 - protein, 261 aa, Rattus norvegicus
  ref <308>: DATABASE ACCESSION NUMBER: SWISS-Prot / CAA68261
  ref <309>: DATABASE ENTRY DATE: 2001-10-16
MFEARLIQGSILKKVLEALKDLINEACWDISSGGVNLQSMDSSHVSLVQLTLRSEGFDTYRCDRNLAMGVNLTSMSKILKCAGNEDIITLRAEDNADTLALVFEAPNQEKVSDYEMKLMDLDVEQLGIPEQEYSCVVKMPSGEFARICRDLSHIGDAVVISCAKDGVKFSASGELGNGNIKLSQTSNVDKEEEAVSIEMNEPVQLTFALRYLNFFTKATPLSPTVTLSMSADVPLVVEYKIADMGHLKYYLAPKIEDEEGS

SEQ ID NO: 3503 - DNA, 1231 bp, Homo sapiens
  ref <308>: DATABASE ACCESSION NUMBER: Refseq / NM_002592
  ref <309>: DATABASE ENTRY DATE: 2000-10-31
aggtctcagccggtcgtcgcgacgttcgcccgctcgctctgaggctcctgaagccgaaactagctagactttcctccttcccgcctgcctgtagcggcgttgttgccactccgccaccatgttcgaggcgcgcctggtccagggctccatcctcaagaaggtgttggaggcactcaaggacctcatcaacgaggcctgctgggatattagctccagcggtgtaaacctgcagagcatggactcgtcccacgtctctttggtgcagctcaccctgcggtctgagggcttcgacacctaccgctgcgaccgcaacctggccatgggcgtgaacctcaccagtatgtccaaaatactaaaatgcgccggcaatgaagatatcattacactaagggccgaagataacgcggataccttggcgctagtatttgaagcaccaaaccaggagaaagtttcagactatgaaatgaagttgatggatttagatgttgaacaacttggaattccagaacaggagtacagctgtgtagtaaagatgccttctggtgaatttgcacgtatatgccgagatctcagccatattggagatgctgttgtaatttcctgtgcaaaagacggagtgaaattttctgcaagtggagaacttggaaatggaaacattaaattgtcacagacaagtaatgtcgataaagaggaggaagctgttaccatagagatgaatgaaccagttcaactaacttttgcactgaggtacctgaacttctttacaaaagccactccactctcttcaacggtgacactcagtatgtctgcagatgtaccccttgttgtagagtataaaattgcggatatgggacacttaaaatactacttggctcccaagatcgaggatgaagaaggatcttaggcattcttaaaattcaagaaaataaaactaagctctttgagaactgcttctaagatgccagcatatactgaagtcttttctgtcaccaaatttgtacctctaagtacatatgtagatattgttttctgtaaataacctattttttttctctattctctccaatttgtttaaagaataaagtccaaagtctgatctggtctagttaacctagaagtatttttgtctcttagaaatacttgtgatttttataatacaaaagggtcttgactctaaatgcagttttaagaagtgtttttgaatttaaataaagttacttgaatttcaaac

SEQ ID NO: 3504 - protein, 261 aa, Homo sapiens
  ref <308>: DATABASE ACCESSION NUMBER: SWISS-Prot / P12004
  ref <309>: DATABASE ENTRY DATE: 2002-06-15
MFEARLVQGSILKKVLEALKDLINEACWDISSSGVNLQSMDSSHVSLVQLTLRSEGFDTYRCDRNLAMGVNLTSMSKILKCAGNEDIITLRAEDNADTLALVFEAPNQEKVSDYEMKLMDLDVEQLGIPEQEYSCVVKMPSGEFARICRDLSHIGDAVVISCAKDGVKFSASGELGNGNIKLSQTSNVDKEEEAVTIEMNEPVQLTFALRYLNFFTKATPLSSTVTLSMSADVPLVVEYKIADMGHLKYYLAPKIEDEEGS

SEQ ID NO: 3505 - DNA, 1160 bp, Rattus norvegicus; identical to SEQ ID NO: 3501
  ref <308>: DATABASE ACCESSION NUMBER: EMBL / M24604
  ref <309>: DATABASE ENTRY DATE: 1996-10-01

SEQ ID NO: 3506 - protein, 261 aa, Rattus norvegicus; identical to SEQ ID NO: 3502
  ref <308>: DATABASE ACCESSION NUMBER: SWISS-Prot / CAA68261
  ref <309>: DATABASE ENTRY DATE: 2001-10-16

SEQ ID NO: 3507 - DNA, 1231 bp, Homo sapiens; identical to SEQ ID NO: 3503
  ref <308>: DATABASE ACCESSION NUMBER: Refseq / NM_002592
  ref <309>: DATABASE ENTRY DATE: 2000-10-31

SEQ ID NO: 3508 - protein, 261 aa, Homo sapiens; identical to SEQ ID NO: 3504
  ref <308>: DATABASE ACCESSION NUMBER: SWISS-Prot / P12004
  ref <309>: DATABASE ENTRY DATE: 2002-06-15

SEQ ID NO: 3509 - DNA, 607 bp, Rattus norvegicus
  ref <308>: DATABASE ACCESSION NUMBER: EMBL / M25584
  ref <309>: DATABASE ENTRY DATE: 2000-03-04
cccaaccctaagtgaccagctacaatcatagaccatcagcaagcaggtatgtactctcctgggtgagcccggttcccccagccaaaactctagggactttaggaaggatgtgggttcctctcttacatggaccttttcctagcctcaaccctgcctatcttccaggtcattgttccaacatggccctgtggatgcgcttcctgcccctgctggccctgctcgtcctctgggagcccaagcctgcccaggcttttgtcaaacagcacctttgtggtcctcacctggtggaggctctgtacctggtgtgtggggaacgtggtttcttctacacacccaagtcccgtcgtgaagtggaggacccgcaagtgccacaactggagctgggtggaggcccggaggccggggatcttcagaccttggcactggaggttgcccggcagaagcgtggcattgtggatcagtgctgcaccagcatctgctccctctaccaactggagaactactgcaactgagtccaccactccccgcccacccctctgcaatgaataaagcctttgaatgagcaccaaaatgagagagtttttatgaatacaaagggattgtgtga

SEQ ID NO: 3510 - protein, 110 aa, Rattus norvegicus
  ref <308>: DATABASE ACCESSION NUMBER: SWISS-Prot / CAA24559
  ref <309>: DATABASE ENTRY DATE: 2001-10-16
MALWMRFLPLLALLVLWEPKPAQAFVKQHLCGPHLVEALYLVCGERGFFYTPKSRREVEDPQVPQLELGGGPEAGDLQTLALEVARQKRGIVDQCCTSICSLYQLENYCN

SEQ ID NO: 3511 - DNA, 4044 bp, Homo sapiens
  ref <308>: DATABASE ACCESSION NUMBER: EMBL / J00265
  ref <309>: DATABASE ENTRY DATE: 2001-02-13
ctcgaggggcctagacattgccctccagagagagcacccaacaccctccaggcttgaccggccagggtgtccccttcctaccttggagagagcagccccagggcatcctgcagggggtgctgggacaccagctggccttcaaggtctctgcctccctccagccaccccactacacgctgctgggatcctggatctcagctccctggccgacaacactggcaaactcctactcatccacgaaggccctcctgggcatggtggtccttcccagcctggcagtctgttcctcacacaccttgttagtgcccagcccctgaggttgcagctgggggtgtctctgaagggctgtgagcccccaggaagccctggggaagtgcctgccttgcctccccccggccctgccagcgcctggctctgccctcctacctgggctccccccatccagcctccctccctacacactcctctcaaggaggcacccatgtcctctccagctgccgggcctcagagcactgtggcgtcctggggcagccaccgcatgtcctgctgtggcatggctcagggtggaaagggcggaagggaggggtcctgcagatagctggtgcccactaccaaacccgctcggggcaggagagccaaaggctgggtgtgtgcagagcggccccgagaggttccgaggctgaggccagggtgggacatagggatgcgaggggccggggcacaggatactccaacctgcctgcccccatggtctcatcctcctgcttctgggacctcctgatcctgcccctggtgctaagaggcaggtaaggggctgcaggcagcagggctcggagcccatgccccctcaccatgggtcaggctggacctccaggtgcctgttctggggagctgggagggccggaggggtgtaccccaggggctcagcccagatgacactatgggggtgatggtgtcatgggacctggccaggagaggggagatgggctcccagaagaggagtgggggctgagagggtgcctggggggccaggacggagctgggccagtgcacagcttcccacacctgcccacccccagagtcctgccgccacccccagatcacacggaagatgaggtccgagtggcctgctgaggacttgctgcttgtccccaggtccccaggtcatgccctccttctgccaccctggggagctgagggcctcagctggggctgctgtcctaaggcagggtgggaactaggcagccagcagggaggggacccctccctcactcccactctcccacccccaccaccttggcccatccatggcggcatcttgggccatccgggactggggacaggggtcctggggacaggggtccggggacagggtcctggggacaggggtgtggggacaggggtctggggacaggggtgtggggacaggggtgtggggacaggggtctggggacaggggtgtggggacaggggtccggggacaggggtgtggggacaggggtctggggacaggggtgtggggacaggggtgtggggacaggggtctggggacaggggtgtggggacaggggtcctggggacaggggtgtggggacaggggtgtggggacaggggtgtggggacaggggtgtggggacaggggtcctggggataggggtgtggggacaggggtgtggggacaggggtcccggggacaggggtgtggggacaggggtgtggggacaggggtcctggggacaggggtctgaggacaggggtgtgggcacaggggtcctggggacaggggtcctggggacaggggtcctggggacaggggtctggggacagcagcgcaaagagccccgccctgcagcctccagctctcctggtctaatgtggaaagtggcccaggtgagggctttgctctcctggagacatttgcccccagctgtgagcagggacaggtctggccaccgggcccctggttaagactctaatgacccgctggtcctgaggaagaggtgctgacgaccaaggagatcttcccacagacccagcaccagggaaatggtccggaaattgcagcctcagcccccagccatctgccgacccccccaccccgccctaatgggccaggcggcaggggttgacaggtaggggagatgggctctgagactataaagccagcgggggcccagcagccctcagccctccaggacaggctgcatcagaagaggccatcaagcaggtctgttccaagggcctttgcgtcaggtgggctcagggttccagggtggctggaccccaggccccagctctgcagcagggaggacgtggctgggctcgtgaagcatgtgggggtgagcccaggggccccaaggcagggcacctggccttcagcctgcctcagccctgcctgtctcccagatcactgtccttctgccatggccctgtggatgcgcctcctgcccctgctggcgctgctggccctctggggacctgacccagccgcagcctttgtgaaccaacacctgtgcggctcacacctggtggaagctctctacctagtgtgcggggaacgaggcttcttctacacacccaagacccgccgggaggcagaggacctgcagggtgagccaaccgcccattgctgcccctggccgcccccagccaccccctgctcctggcgctcccacccagcatgggcagaagggggcaggaggctgccacccagcagggggtcaggtgcacttttttaaaaagaagttctcttggtcacgtcctaaaagtgaccagctccctgtggcccagtcagaatctcagcctgaggacggtgttggcttcggcagccccgagatacatcagagggtgggcacgctcctccctccactcgcccctcaaacaaatgccccgcagcccatttctccaccctcatttgatgaccgcagattcaagtgttttgttaagtaaagtcctgggtgacctggggtcacagggtgccccacgctgcctgcctctgggcgaacaccccatcacgcccggaggagggcgtggctgcctgcctgagtgggccagacccctgtcgccagcctcacggcagctccatagtcaggagatggggaagatgctggggacaggccctggggagaagtactgggatcacctgttcaggctcccactgtgacgctgccccggggcgggggaaggaggtgggacatgtgggcgttggggcctgtaggtccacacccagtgtgggtgaccctccctctaacctgggtccagcccggctggagatgggtgggagtgcgacctagggctggcgggcaggcgggcactgtgtctccctgactgtgtcctcctgtgtccctctgcctcgccgctgttccggaacctgctctgcgcggcacgtcctggcagtggggcaggtggagctgggcgggggccctggtgcaggcagcctgcagcccttggccctggaggggtccctgcagaagcgtggcattgtggaacaatgctgtaccagcatctgctccctctaccagctggagaactactgcaactagacgcagcctgcaggcagccccacacccgccgcctcctgcaccgagagagatggaataaagcccttgaaccagccctgctgtgccgtctgtgtgtcttgggggccctgggccaagccccacttcccggcactgttgtgagcccctcccagctctctccacgctctctgggtgcccacaggtgccaacgccggccaggcccagcatgcagtggctctccccaaagcggccatgcctgttggctgcctgctgcccccaccctgtggctcagggtccagtatgggagcttcgggggtctctgaggggccagggatggtggggccactgagaagtgacttcttgttcagtagctctggactcttggagtccccagagaccttgttcaggaaagggaatgagaacattccagcaattttccccccacctagccctcccaggttctatttttagagttatttctgatggagtccctgtggagggaggaggctgggctgagggagggggt

SEQ ID NO: 3512 - protein, 110 aa, Homo sapiens; identical to SEQ ID NO: 2564
  ref <308>: DATABASE ACCESSION NUMBER: SWISS-Prot / AAA59172
  ref <309>: DATABASE ENTRY DATE: 2002-06-15

SEQ ID NO: 3513 - DNA, 861 bp, Rattus norvegicus
  ref <308>: DATABASE ACCESSION NUMBER: EMBL / M25638
  ref <309>: DATABASE ENTRY DATE: 2000-03-04
aaggcgcggatgagctcgctcgcccgcgccgagctggagaagcgcatcgacagcctgatggacgagatagccttcctgaaaaaggtgcacgaggaagagatcgccgagctgcaggctcagatccagtatgctcagatctccgtggagatggacgtgtcctccaagcccgacctctccgccgctctcaaggacatccgcgctcagtacgagaagctggccgccaagaatatgcagaatgccgaagagtggttcaagagccgcttcacggtgctaaccgagagcgccgccaagaacaccgacgcagtgcgcgctgccaaggacgaggtgtcggaaagccgccgcctactcaaggctaagaccctagagatcgaagcctgccggggtatgaacgaagctctagagaagcagctgcaggagctggaggacaagcagaatgcagacatcagcgccatgcaggacacaatcaacaaactggagaatgagctgcgaagcacgaagagcgagatggctaggtacctgaaggagtaccaggacctcctcaatgtcaagatggcattggacattgagattgcagcttacaggaaactcttggaaggcgaagaaaccaagctcagtttcaccagcgtgggtagcataaccagcggctactctcagagctcgcaggtctttggccgttctgcttacagtggcttgcagagcagctcctacttgatgtctgctcgagcattcccagcctactataccagccacgtccaggaggagcagtcagaggtggaggagaccattgaggctacgaaagctgaggaggccaaggatgagcccccctctgaaggagaagaagaagaggagaagaaggatgaa

SEQ ID NO: 3514 - protein, 541 aa, Rattus norvegicus
  ref <308>: DATABASE ACCESSION NUMBER: SWISS-Prot / AAA41694
  ref <309>: DATABASE ENTRY DATE: 2001-10-16
SSFSYEPYFSTSYKRRYVETPRVHISSVRSGYSTARSAYSSYSAPVSSSLSVRRSYSSSSGSLMPSLENLDLSQVAAISNDLKSIRTQEKAQLQDLNDRFASFIERVHELEQQNKVLEAELLVLRQKHSEPSRFRALYEQEIRDLRLAAEDATNEKQALQGEREGLEETLRNLQARYEEEVLSREDAEGRLMEARKGADEAALARAELEKRIDSLMDEIAFLKKVHEEEIAELQAQIQYAQISVEMDVSSKPDLSAALKDIRAQYEKLAAKNMQNAEEWFKSRFTVLTESAAKNTDAVRAAKDEVSESRRLLKAKTLEIEACRGMNEALEKQLQELEDKQNADISAMQDTINKLENELRSTKSEMARYLKEYQDLLNVKMALDIEIAAYRKLLEGEETRLSFTSVGSITSGYSQSSQVFGRSAYSGLQSSSYLMSARAFPAYYTSHVQEEQSEVEETIEATKAEEAKDEPPSEGEAEEEEKEKEEGEEEEGAEEEEAAKDESEDAKEEEGGEGEEEDTKESEEEEKKEESAGEEQAAKKKD

SEQ ID NO: 3515 - DNA, 1632 bp, Homo sapiens
atgagttccttcagctacgagccgtactactcgacctcctacaagcggcgctacgtggagacgccccgggtgcacatctccagcgtgcgcagcggctacagcaccgcacgctcagcttactccagctactcggcgccggtgtcttcctcgctgtccgtgcgccgcagctactcctccagctctggatcgttgatgcccagtctggagaacctcgacctgagccaggtagccgccatcagcaacgacctcaagtccatccgcacgcaggagaaggcgcagctccaggacctcaatgaccgcttcgccagcttcatcgagcgcgtgcacgagctggagcagcagaacaaggtcctggaagccgagctgctggtgctgcgccagaagcactccgagccatcccgcttccgggcgctgtacgagcaggagatccgcgacctgcgcctggcggcggaagatgccaccaacgagaagcaggcgctccagggcgagcgcgaagggctggaggagaccctgcgcaacctgcaggcgcgctatgaagaggaggtgctgagccgcgaggacgccgagggccggctgatggaagcgcgcaaaggcgccgacgaggcggcgctcgctcgcgccgagctcgagaagcgcatcgacagcttgatggacgaaatctcttttctgaagaaagtgcacgaagaggagatcgccgaactgcaggcgcagatccagtacgcgcagatctccgtggagatggacgtgaccaagcccgacctttccgccgcgctcaaggacatccgcgcgcagtacgagaagctggccgccaagaacatgcagaacgctgaggaatggttcaagagccgcttcaccgtgctgaccgagagcgccgccaagaacaccgacgccgtgcgcgccgccaaggacgaggtgtccgagagccgtcgtctgctcaaggccaagaccctggaaatcgaagcatgccggggcatgaatgaagcgctggagaagcagctgcaggagctggaggacaagcagaacgccgacatcagcgctatgcaggacacgatcaacaaattagaaaatgaattgaggaccacaaagagtgaaatggcacgatacctaaaagaataccaagacctcctcaacgtgaagatggctttggatattgagattgcagcttacaggaaactcttggaaggcgaggagacccgactcagtttcaccagcgtgggaagcataaccagtggctactcccagagctcccaggtctttggccgatctgcctacggcggtttacagaccagctcctatctgatgtccacccgctccttcccgtcctactacaccagccatgtccaagaggagcagatcgaagtggaggaaaccattgaggctgccaaggctgaggaagccaaggatgagcccccctctgaaggagaagccgaggaggaggagaaggacaaggaagaggccgaggaagaggaggcagctgaagaggaagaagctgccaaggaagagtctgaagaagcaaaagaagaagaagaaggaggtgaaggtgaagaaggagaggaaaccaaagaagctgaagaggaggagaagaaagttgaaggtgctggggaggaacaagcagctaagaagaaagattga

SEQ ID NO: 3516 - protein, 543 aa, Homo sapiens
MSSFSYEPYYSTSYKRRYVETPRVHISSVRSGYSTARSAYSSYSAPVSSSLSVRRSYSSSSGSLMPSLENLDLSQVAAISNDLKSIRTQEKAQLQDLNDRFASFIERVHELEQQNKVLEAELLVLRQKHSEPSRFRALYEQEIRDLRLAAEDATNEKQALQGEREGLEETLRNLQARYEEEVLSREDAEGRLMEARKGADEAALARAELEKRIDSLMDEISFLKKVHEEEIAELQAQIQYAQISVEMDVTKPDLSAALKDIRAQYEKLAAKNMQNAEEWFKSRFTVLTESAAKNTDAVRAAKDEVSESRRLLKAKTLEIEACRGMNEALEKQLQELEDKQNADISAMQDTINKLENELRTTKSEMARYLKEYQDLLNVKMALDIEIAAYRKLLEGEETRLSFTSVGSITSGYSQSSQVFGRSAYGGLQTSSYLMSTRSFPSYYTSHVQEEQIEVEETIEAAKAEEAKDEPPSEGEAEEEEKDKEEAEEEEAAEEEEAAKEESEEAKEEEEGGEGEEGEETKEAEEEEKKVEGAGEEQAAKKKD

SEQ ID NO: 3517 - DNA, 602 bp, Rattus norvegicus
  ref <308>: DATABASE ACCESSION NUMBER: EMBL / M25646
  ref <309>: DATABASE ENTRY DATE: 2000-03-04
gctgcacgcagtgcccacctatgctcgccatgatgctcaacactacgctctctgcttgcttcctgagcctgctggccctcacctctgcctgctacttccagaactgcccaagaggaggcaagagggccacatccgacatggagctgagacagtgtctcccctgcggccctggcggcaaagggcgctgcttcgggccgagcatctgctgcgcggacgagctgggctgcttcctgggcaccgccgaggcgctgcgctgccaggaggagaactacctgccctcgccctgccagtctggccagaagccttgcggaagcggaggccgctgcgctgccgcgggcatctgctgcagcgatgagagctgcgtggccgagcccgagtgtcgagagggttttttccgcctcacccgcgctcgggagcagagcaacgccacgcagctggacgggccagcccgggagctgctgcttaggctggtacagctggctgggacacaagagtccgtggattctgccaagccccgggtctactgagccatcgccccccacgcctcccccctacagcatggaaaataaacttttaaaaaatgcaaaaaaaaaaaaaaaaaa

SEQ ID NO: 3518 - protein, 168 aa, Rattus norvegicus
  ref <308>: DATABASE ACCESSION NUMBER: SWISS-Prot / P01186
  ref <309>: DATABASE ENTRY DATE: 2002-06-15
MLAMMLNTTLSACFLSLLALTSACYFQNCPRGGKRATSDMELRQCLPCGPGGKGRCFGPSICCADELGCFLGTAEALRCQEENYLPSPCQSGQKPCGSGGRCAAAGICCSDESCVAEPECREGFFRLTRAREQSNATQLDGPARELLLRLVQLAGTQESVDSAKPRVY

SEQ ID NO: 3519 - DNA, 2297 bp, Rattus norvegicus
  ref <308>: DATABASE ACCESSION NUMBER: EMBL / M25804
  ref <309>: DATABASE ENTRY DATE: 2000-03-04
agacctgaaaggggaatttcctaaatctccaggctggacagtttgtttctccctctcacctcctataactcatctgagtcttatctccatatcacatttctaagtctcttgtactcagagtcattgtgactcttgggaggccagagccaggctgaacagagtccttccctgcagtactctatgagaatatgtctttgggtttgaaagaaaggtggtgttatcacctacattggctccagcggatcctcccccagccggaccagcccagagtccctctatagtgacagctccaatggcagcttccagtccctgactcaaggttgtcccacatacttcccaccatcacctactggctccctcacccaggaccctgcccgctcatttggcactgtgccacccagcctcagtgatgatagctccccttcttctgcttcatcatcatcatcatcttcctcctcctccttctataatgggagcccccccggaagtctacaagtggccatggaagacagcagccgagtgtcccccagcaagggcaccagcaacattaccaagcttaacggcatggtgctactgtgtaaagtgtgtggggacgtggcctcaggcttccactatggcgtgcatgcctgcgagggctgcaagggctttttccgccggagcatccagcagaacatccagtacaagcggtgtttgaaaaacgagaactgctccattgtccgtatcaatcgcaaccgctgccagcagtgtcgcttcaagaagtgtctctccgttggcatgtctagagacgctgtgcgttttggacgtatccccaagagagagaagcaacgaatgcttgctgagatgcagaacgccatgaacttggccaacaaccaactgagcagcctgtgccctctagagacctcacctgccccgcaccccacctcaggctccgtgggcccctcaccacctcctgcaccagccccgacacctttggtgggcttctctcagttcccacaacagctgacaccacccagatccccgagtcctgagcccacggtggaggatgtgatatcccaggtggccagggcccatcgagaaatcttcacctatgcccatgacaaattaggcacctcacctggcaacttcaatgccaatcatgcatcaggtagccctccggctaccactccacagtgctgggagagtcagggatgcccgtctacccccaacgacaacaaccttttggcggctcagcgtcataatgaagcactgaatggtctacgccagggcccctcctcctaccctcctacctggccttctggccctgcccaccacagctgccaccagcctaacagcaatgggcatcgcctgtgccccacccacgtatactcggccccagaaggcaaggcacctgccaacggtctacggcaaggcaacaccaagaatgttctgctggcatgtcccatgaacatgtatccccatggacgtagtggccggactgtgcaggagatctgggaagacttctctatgagcttcacacccgctgtgcgggaggtggtagaatttgccaaacagatccccggcttccgtgacctttctcagcacgaccaggtgaccctgcttaaggctggcacctttgaggtgctgatggtgcgctttgcgtcattgttcaacgtgaaggaccagacagtcatgttcctgagccgcacaacctacagcctgcaggagctcggtgccatgggcatgggtgacctgctcaatgccatgtttgacttcagcgagaagctcaactctctggcgcttactgaggaggagctgggccttttcacggcagtggtacttgtctctgcagagggctcgggaatggagaattccgcttcggtggagcagctccaggagacgctgctgggggctcttcgggctctcgtgctgaagaaccggccctcggagacttcccgcttcaccaaactgctgctcaagctgccggacctgcggaccctgaacaacatgcattccgagaagctgctgtccttccgggtggacgcccagtgacccgcccggccggccttctgccgctgcccccttgtacagaatcgaactctggacttctctctcctttacgagacgaaaaggaaaaccaaaccagaatcttatttatattgttataaaatattccaagatgagcctctggccccctgagccttcttgtaaataactcttcccccccacccccatgctcccttcctcccgtatttaaaccactcttgctctcccaccctcctctggcccctcgatttgttctgttcctgtctcaaatccaa

SEQ ID NO: 3520 - protein, 508 aa, Rattus norvegicus
  ref <308>: DATABASE ACCESSION NUMBER: SWISS-Prot / Q63503
  ref <309>: DATABASE ENTRY DATE: 2001-10-16
MEDSSRVSPSKGTSNITKLNGMVLLCKVCGDVASGFHYGVHACEGCKGFFRRSIQQNIQYKRCLKNENCSIVRINRNRCQQCRFKKCLSVGMSRDAVRFGRIPKREKQRMLAEMQNAMNLANNQLSSLCPLETSPAPHPTSGSVGPSPPPAPAPTPLVGFSQFPQQLTPPRSPSPEPTVEDVISQVARAHREIFTYAHDKLGTSPGNFNANHASGSPPATTPQCWESQGCPSTPNDNNLLAAQRHNEALNGLRQGPSSYPPTWPSGPAHHSCHQPNSNGHRLCPTHVYSAPEGKAPANGLRQGNTKNVLLACPMNMYPHGRSGRTVQEIWEDFSMSFTPAVREVVEFAKQIPGFRDLSQHDQVTLLKAGTFEVLMVRFASLFNVKDQTVMFLSRTTYSLQELGAMGMGDLLNAMFDFSEKLNSLALTEEELGLFTAVVLVSAEGSGMENSASVEQLQETLLGALRALVLKNRPSETSRFTKLLLKLPDLRTLNNMHSEKLLSFRVDAQ

SEQ ID NO: 3521 - DNA, 2768 bp, Homo sapiens
  ref <308>: DATABASE ACCESSION NUMBER: Refseq / NM_021724
  ref <309>: DATABASE ENTRY DATE: 2001-03-22
ccgaggcgctccctgggatcacatggtacctgctccagtgccgcgtgcggcccgggaaccctgggctgctggcgcctgcgcagagccctctgtcccagggaaaggctcgggcaaaaggcggctgagattggcagagtgaaatattactgccgagggaacgtagcagggcacacgtctcgcctctttgcgactcggtgccccgtttctccccatcacctacttacttcctggttgcaacctctcttcctctgggacttttgcaccgggagctccagattcgctaccccgcagcgctgcggagccggcaggcagaggcaccccgtacactgcagagacccgaccctccttgctaccttctagccagaactactgcaggctgattccccctacacactctctctgctcttcccatgcaaagcagaactccgttgcctcaacgtccaacccttctgcagggctgcagtccggccaccccaagaccttgctgcagggtgcttcggatcctgatcgtgagtcgcggggtccactccccgcccttagccagtgcccagggggcaacagcggcgatcgcaacctctagtttgagtcaaggtccagtttgaatgaccgctctcagctggtgaagacatgacgaccctggactccaacaacaacacaggtggcgtcatcacctacattggctccagtggctcctccccaagccgcaccagccctgaatccctctatagtgacaactccaatggcagcttccagtccctgacccaaggctgtcccacctacttcccaccatcccccactggctccctcacccaagacccggctcgctcctttgggagcattccacccagcctgagtgatgacggctccccttcttcctcatcttcctcgtcgtcatcctcctcctccttctataatgggagcccccctgggagtctacaagtggccatggaggacagcagccgagtgtcccccagcaagagcaccagcaacatcaccaagctgaatggcatggtgttactgtgtaaagtgtgtggggacgttgcctcgggcttccactacggtgtgcacgcctgcgagggctgcaagggctttttccgtcggagcatccagcagaacatccagtacaaaaggtgtctgaagaatgagaattgctccatcgtccgcatcaatcgcaaccgctgccagcaatgtcgcttcaagaagtgtctctctgtgggcatgtctcgagacgctgtgcgttttgggcgcatccccaaacgagagaagcagcggatgcttgctgagatgcagagtgccatgaacctggccaacaaccagttgagcagccagtgcccgctggagacttcacccacccagcaccccaccccaggccccatgggcccctcgccaccccctgctccggtcccctcacccctggtgggcttctcccagtttccacaacagctgacgcctcccagatccccaagccctgagcccacagtggaggatgtgatatcccaggtggcccgggcccatcgagagatcttcacctacgcccatgacaagctgggcagctcacctggcaacttcaatgccaaccatgcatcaggtagccctccagccaccaccccacatcgctgggaaaatcagggctgcccacctgcccccaatgacaacaacaccttggctgcccagcgtcataacgaggccctaaatggtctgcgccaggctccctcctcctaccctcccacctggcctcctggccctgcacaccacagctgccaccagtccaacagcaacgggcaccgtctatgccccacccacgtgtatgcagccccagaaggcaaggcacctgccaacagtccccggcagggcaactcaaagaatgttctgctggcatgtcctatgaacatgtacccgcatggacgcagtgggcgaacggtgcaggagatctgggaggatttctccatgagcttcacgcccgctgtgcgggaggtggtagagtttgccaaacacatcccgggcttccgtgacctttctcagcatgaccaagtcaccctgcttaaggctggcacctttgaggtgctgatggtgcgctttgcttcgttgttcaacgtgaaggaccagacagtgatgttcctaagccgcaccacctacagcctgcaggagcttggtgccatgggcatgggagacctgctcagtgccatgttcgacttcagcgagaagctcaactccctggcgcttaccgaggaggagctgggcctcttcaccgcggtggtgcttgtctctgcagaccgctcgggcatggagaattccgcttcggtggagcagctccaggagacgctgctgcgggctcttcgggctctggtgctgaagaaccggcccttggagacttcccgcttcaccaagctgctgctcaagctgccggacctgcggaccctgaacaacatgcattccgagaagctgctgtccttccgggtggacgcccagtgacccgcccggccggccttctgccgctgcccccttgtacagaatcgaactctgcacttctctctcctttacgagacgaaaaggaaaagcaaaccagaatcttatttatattgttataaaatattccaagatgagcctctggccccctgagccttcttgtaaatacctgcctccctcccccatcaccgaacttcccctcctcccctatttaaaccactctgtctcccccacaaccctcccctggccctctgatttgttctgttcctgtctcaaatccaatagttcacagctgagctggg

SEQ ID NO: 3522 - protein, 614 aa, Homo sapiens
  ref <308>: DATABASE ACCESSION NUMBER: SWISS-Prot / P20393
  ref <309>: DATABASE ENTRY DATE: 2002-06-15
MTTLDSNNNTGGVITYIGSSGSSPSRTSPESLYSDNSNGSFQSLTQGCPTYFPPSPTGSLTQDPARSFGSIPPSLSDDGSPSSSSSSSSSSSSFYNGSPPGSLQVAMEDSSRVSPSKSTSNITKLNGMVLLCKVCGDVASGFHYGVHACEGCKGFFRRSIQQNIQYKRCLKNENCSIVRINRNRCQQCRFKKCLSVGMSRDAVRFGRIPKREKQRMLAEMQSAMNLANNQLSSQCPLETSPTQHPTPGPMGPSPPPAPVPSPLVGFSQFPQQLTPPRSPSPEPTVEDVISQVARAHREIFTYAHDKLGSSPGNFNANHASGSPPATTPHRWENQGCPPAPNDNNTLAAQRHNEALNGLRQAPSSYPPTWPPGPAHHSCHQSNSNGHRLCPTHVYAAPEGKAPANSPRQGNSKNVLLACPMNMYPHGRSGRTVQEIWEDFSMSFTPAVREVVEFAKHIPGFRDLSQHDQVTLLKAGTFEVLMVRFASLFNVKDQTVMFLSRTTYSLQELGAMGMGDLLSAMFDFSEKLNSLALTEEELGLFTAVVLVSADRSGMENSASVEQLQETLLRALRALVLKNRPLETSRFTKLLLKLPDLRTLNNMHSEKLLSFRVDAQ

SEQ ID NO: 3523 - DNA, 2297 bp, Rattus norvegicus; identical to SEQ ID NO: 3519
  ref <308>: DATABASE ACCESSION NUMBER: EMBL / M25804
  ref <309>: DATABASE ENTRY DATE: 2000-03-04

SEQ ID NO: 3524 - protein, 508 aa, Rattus norvegicus; identical to SEQ ID NO: 3520
  ref <308>: DATABASE ACCESSION NUMBER: SWISS-Prot / Q63503
  ref <309>: DATABASE ENTRY DATE: 2001-10-16

SEQ ID NO: 3525 - DNA, 2768 bp, Homo sapiens; identical to SEQ ID NO: 3521
  ref <308>: DATABASE ACCESSION NUMBER: Refseq / NM_021724
  ref <309>: DATABASE ENTRY DATE: 2001-03-22

SEQ ID NO: 3526 - protein, 614 aa, Homo sapiens; identical to SEQ ID NO: 3522
  ref <308>: DATABASE ACCESSION NUMBER: SWISS-Prot / P20393
  ref <309>: DATABASE ENTRY DATE: 2002-06-15

SEQ ID NO: 3527 - DNA, 564 bp, Rattus norvegicus
  ref <308>: DATABASE ACCESSION NUMBER: EMBL / M25890
  ref <309>: DATABASE ENTRY DATE: 2000-03-04
tgcggacctgcgtctagactgacccaccgcgctcaagctcggctgtctgaggcaggggagatgctgtcctgccgtctccagtgcgcgctggccgcgctctgcatcgtcctggctttgggcggtgtcaccggggcgccctcggaccccagactccgtcagtttctgcagaagtctctggcggctgccaccgggaaacaggaactggccaagtacttcttggcagaactgctgtctgagcccaaccagacagagaacgatgccctggagcctgaggatttgccccaggcagctgagcaggacgagatgaggctggagctgcagaggtctgccaactcgaacccagccatggcaccccgggaacgcaaagctggctgcaagaacttcttctggaagacattcacatcctgttagctttaatattgttgtctcagccagacctctgatccctctcctccaaatcccatatctcttccttaactcccagccccccccccaatgctcaactagaccctgcgttagaaattgaagactgtaaatacaaaataaaattatggtgaaattatg

SEQ ID NO: 3528 - protein, 116 aa, Rattus norvegicus; identical to SEQ ID NO: 2698
  ref <308>: DATABASE ACCESSION NUMBER: SWISS-Prot / P01167
  ref <309>: DATABASE ENTRY DATE: 2001-10-16

SEQ ID NO: 3529 - DNA, 351 bp, Homo sapiens; identical to SEQ ID NO: 2699
  ref <308>: DATABASE ACCESSION NUMBER: Refseq / NM_001048
  ref <309>: DATABASE ENTRY DATE: 2000-10-31

SEQ ID NO: 3530 - protein, 116 aa, Homo sapiens; identical to SEQ ID NO: 2700
  ref <308>: DATABASE ACCESSION NUMBER: SWISS-Prot / RIHUS1
  ref <309>: DATABASE ENTRY DATE: 2002-06-15

SEQ ID NO: 3531 - DNA, 1733 bp, Rattus norvegicus
  ref <308>: DATABASE ACCESSION NUMBER: EMBL / M26125
  ref <309>: DATABASE ENTRY DATE: 2000-03-04
gacttgggaggaaccagggcctacacttagccctggtaaacagcagagcatgctgggataattcttcccagaaaaggaaaagcaggcacttctgttcccagggaaaacaacaggagcactttggacctccctgctgcagtcaggagtcatgtggctggaacttgtcctggcttcccttctgggctttgtcatctactggtttgtctcccgggacaaggaggaaaccttaccactaggagatggatggtgggggccagggtcaaagccatcagccaaagaagatgagagcatccggcccttcaaggtggaaacatcagatgaggagatcaaggacttacaccagaggatagataggttccgggcatccccacctttggagggcagccgcttccactatggcttcaactccaactacatgaagaaagtggtgtcctactggaggaacgagtttgactggaggaagcaggtggagatcctcaaccagtaccctcacttcaagaccaagatcgaagggcttgacatccacttcatccatgtgaagcctccccagctgccctcagggcgcaccccaaagcccttgctgatggtgcatggctggcctggatccttctatgagttttacaagatcatcccactactgactgaccccaagtcccacggtctgagtgacgagcacgtgtttgaagtcatctgtccctcgattcctggctatggctactcagaggcatccagcaagaaaggtttaaattcggtggccactgcgaggattttctacaagctgatgacacggctgggcttccagaaattctacattcaaggcggggactgggggtccctcatctgcaccaacatggcccagatggttcccaaccacgtgaaaggcctgcacttaaatatggctttcatttcgagaagtttttacaccatgactcctctcctgggccaacgcttcgggagattccttggctacacagagaaggatatcgagctcttgtacccctataaggagaaggttttctacagcatcatgagggagagtggctacttacacatccaagccaccaagccagacactgtgggctgtgctctcaatgactctcccgtgggcctggctgcctacatcttagagaagttctccacctggaccaagtcagagtaccgtgaactggaggatggaggcctggagaggaagttctccctggatgatctgctggttaacatcatgatctactggacgacaggaaccattgtctcctcccaacgctactacaaggagaatttgggccagggcatcatggtccataaacatgaggggatgaaggtctttgtgcccactggcttttcagccttcccttccgagctactgcatgccccagaaaagtgggtgaaggtcaagtaccccaaactcatctcctattcctacatggaacgtgggggccactttgctgcctttgaagagcccaagcttctggcccaggacatccgcaagttcgtgtccctggctgagctgcagtagtgacactggataccaactgtggctttagcagcagccctggttcctcccaagtcacacttatggaagatgacccctttctgaggaataagtttgttccctgaccacactcgaggacccagacttaaactccacagagtcgtatgttacccccatatgcttcacctcactacatagctgtgttagctacatggctttaatgataaatggatttatttct

SEQ ID NO: 3532 - protein, 455 aa, Rattus norvegicus
  ref <308>: DATABASE ACCESSION NUMBER: SWISS-Prot / P07687
  ref <309>: DATABASE ENTRY DATE: 2001-10-16
MWLELVLASLLGFVIYWFVSRDKEETLPLGDGWWGPGSKPSAKEDESIRPFKVETSDEEIKDLHQRIDRFRASPPLEGSRFHYGFNSNYMKKVVSYWRNEFDWRKQVEILNQYPHFKTKIEGLDIHFIHVKPPQLPSGRTPKPLLMVHGWPGSFYEFYKIIPLLTDPKSHGLSDEHVFEVICPSIPGYGYSEASSKKGLNSVATARIFYKLMTRLGFQKFYIQGGDWGSLICTNMAQMVPNHVKGLHLNMAFISRSFYTMTPLLGQRFGRFLGYTEKDIELLYPYKEKVFYSIMRESGYLHIQATKPDTVGCALNDSPVGLAAYILEKFSTWTKSEYRELEDGGLERKFSLDDLLVNIMIYWTTGTIVSSQRYYKENLGQGIMVHKHEGMKVFVPTGFSAFPSELLHAPEKWVKVKYPKLISYSYMERGGHFAAFEEPKLLAQDIRKFVSLAELQ

SEQ ID NO: 3533 - DNA, 460 bp, Homo sapiens
  misc_feature (1)..(460): n=a, c, g or t
  ref <308>: DATABASE ACCESSION NUMBER: EMBL / AI636871
  ref <309>: DATABASE ENTRY DATE: 1999-12-16
ttttttttcactttgnagttttatatttaggatttgatgtgacacagttatttattgctgagtgagcaaacccctagcccccaagtggggactacaggcttcagtgcttcccccacactgcctgagctaccagcccttctgcactggccctcctgccaatactgcctgcactgtccccactccctctggctcccatgatcaccagatccgccctgcaggctccctgtcacctgtggggccctatccagaccccctaatccacttgcctagcagccccactctttcctcgatggctcagatcctgagatccaaggaacaccctgggtttcccaaccactctcttataaaactcgtagaaagagccgggccagccgtgcaccatcagcaagggcttcggggtatggcctgcgggcagctgggggggcttcacgtggatgaagtggatgtccagcccttcaat

SEQ ID NO: 3534 - DNA, 1746 bp, Rattus norvegicus
  ref <308>: DATABASE ACCESSION NUMBER: EMBL / M26161
  ref <309>: DATABASE ENTRY DATE: 2000-03-04
tcctggcctcctacccctgcaccctgcatccatcatgacggtgatgtcaggggagaatgcagacgaggcttcggccgctccaggtcacccccaggatggcagctacccaaggcaggcggaccacgacgaccacgaatgctgcgagcgcgtggtgatcaacatctccgggctgcgcttcgagacgcagctcaagactctggcccagttccccaacacgctgctgggcaacccgaagaaacgcatgcgctactttgaccctctgaggaatgagtacttctttgaccgcaaccggcccagcttcgatgccatcctttattactaccagtcgggggggcgcctgcgcaggccggtcaacgtgcccctggacatgttctccgaggagattaaattttacgagttgggcgaggaggccatggagaagttccgggaagatgagggcttcatcaaggaagaggagcgccccctacccgagaaggagtaccagcgccaggtgtggctgctctttgagtatccggagagctcaggacctgcacgggttattgccattgtatccgtcatggtcatcctcatctccatagtcatcttttgcctggagactctccctgagctgaaggatgacaaggacttcacgggcaccattcaccgcatcgataacaccacagtcatctacacttctaacatcttcacagaccctttcttcattgtggaaaccttgtgtatcatctggttctcttttgagctggtggtgcgcttcttcgcctgccccagcaagacagacttctttaagaacatcatgaacttcatcgacattgtggccatcatcccttatttcattaccctgggcacagagatagctgagcaggaggggaatcagaagggcgagcaggccacttccctggccatcctcagggtcatccgcttggtaagggtgttcagaatcttcaaactctcccgccactccaagggccttcagatcctgggccagaccctcaaagctagtatgagggagttagggctgctcatctttttcctcttcattggcgtcatactgttttctagtgcagtgtactttgcggaggcggaagaagctgagtcgcacttctccagtatccccgatgctttctggtgggcggtggtgtccatgaccactgtgggatacggtgacatgtaccctgtgacaattggaggcaagatcgtgggctccttgtgtgccatcgctggtgtgctgacaattgccctgcccgtacctgtcattgtgtccaatttcaactatttctaccaccgagaaactgagggggaagagcaggctcagttgctccatgttagttctcctaacttagcctctgacagtgacctcagccgccgcagctcctctactatcagcaagtctgagtacatggagatcgaagaggacatgaacaatagcatagcccactacaggcaggctaatatcagaactggtaactgcaccgcaactgatcaaaactgcgttaataagagcaagctcctgaccgatgtttaaaaaaagcaccaggcaagcaatcaaaagcccccaaacaaaacccttggcgactcctgtcccactctgtagatactttactaaaaccgtagtctttgaatgctttatttaactggcaatgcactgttgcattgtgaatttggggggtgggcaaacctgaagctttcaagatcacatttaaaaaacaaaaccaaccaaacaagcaaaaagaaaaaaaaaacccaaca

SEQ ID NO: 3535 - protein, 495 aa, Rattus norvegicus
  ref <308>: DATABASE ACCESSION NUMBER: SWISS-Prot / P10499
  ref <309>: DATABASE ENTRY DATE: 2002-06-15
MTVMSGENADEASAAPGHPQDGSYPRQADHDDHECCERVVINISGLRFETQLKTLAQFPNTLLGNPKKRMRYFDPLRNEYFFDRNRPSFDAILYYYQSGGRLRRPVNVPLDMFSEEIKFYELGEEAMEKFREDEGFIKEEERPLPEKEYQRQVWLLFEYPESSGPARVIAIVSVMVILISIVIFCLETLPELKDDKDFTGTIHRIDNTTVIYTSNIFTDPFFIVETLCIIWFSFELVVRFFACPSKTDFFKNIMNFIDIVAIIPYFITLGTEIAEQEGNQKGEQATSLAILRVIRLVRVFRIFKLSRHSKGLQILGQTLKASMRELGLLIFFLFIGVILFSSAVYFAEAEEAESHFSSIPDAFWWAVVSMTTVGYGDMYPVTIGGKIVGSLCAIAGVLTIALPVPVIVSNFNYFYHRETEGEEQAQLLHVSSPNLASDSDLSRRSSSTISKSEYMEIEEDMNNSIAHYRQANIRTGNCTATDQNCVNKSKLLTDV

SEQ ID NO: 3536 - DNA, 1488 bp, Homo sapiens
  ref <308>: DATABASE ACCESSION NUMBER: EMBL / L02750
  ref <309>: DATABASE ENTRY DATE: 2000-03-04
atgacggtgatgtctggggagaacgtggacgaggcttcggccgccccgggccacccccaggatggcagctacccccgccaggccgaccacgacgaccacgagtgctgcgagcgcgtggtgatcaacatctccgggctgcgcttcgagacgcagctcaagaccctggcgcagttccccaacacgctgctgggcaaccctaagaaacgcatgcgctacttcgaccccctgaggaacgagtacttcttcgaccgcaaccggcccagcttcgacgccatcctctactactaccagtccggcggccgcctgcggaggccggtcaacgtgcccctggacatgttctccgaggagatcaagttttacgagttgggcgaggaggccatggagaagttccgggaggacgagggcttcatcaaggaggaggagcgccctctgcccgagaaggagtaccagcgccaggtgtggctgctcttcgagtaccccgagagctcggggcccgccagggtcatcgccatcgtctccgtcatggtcatcctcatctccatcgtcatcttttgcctggagacgctccccgagctgaaggatgacaaggacttcacgggcaccgtccaccgcatcgacaacaccacggtcatctacaattccaacatcttcacagaccccttcttcatcgtggaaacgctgtgcatcatctggttctccttcgagctggtggtgcgcttcttcgcctgccccagcaagacggacttcttcaaaaacatcatgaacttcatagacattgtggccatcattccttatttcatcaccctgggcaccgagatagctgagcaggaaggaaaccagaagggcgagcaggccacctccctggccatcctcagggtcatccgcttggtaagggtttttagaatcttcaagctctcccgccactctaagggcctccagatcctgggccagaccctcaaagctagtatgagagagctagggctgctcatctttttcctcttcatcggggtcatcctgttttctagtgcagtgtactttgccgaggcggaagaagctgagtcgcacttctccagtatccccgatgctttctggtgggcggtggtgtccatgaccactgtaggatacggtgacatgtaccctgtgacaattggaggcaagatcgtgggctccttgtgtgccatcgctggtgtgctaacaattgccctgcccgtacctgtcattgtgtccaatttcaactatttctaccaccgagaaactgagggggaagagcaggctcagttgctccacgtcagttcccctaacttagcctctgacagtgacctcagtcgccgcagttcctctactatgagcaagtatgagtacatggagatcgaagaggatatgaataatagcatagcccattatagacaggtcaatatcagaactgccaattgcaccacagctaaccaaaactgcgttaataagagcaagctactgaccgatgtttaa

SEQ ID NO: 3537 - protein, 495 aa, Homo sapiens
  ref <308>: DATABASE ACCESSION NUMBER: SWISS-Prot / Q09470
  ref <309>: DATABASE ENTRY DATE: 2002-06-15
MTVMSGENVDEASAAPGHPQDGSYPRQADHDDHECCERVVINISGLRFETQLKTLAQFPNTLLGNPKKRMRYFDPLRNEYFFDRNRPSFDAILYYYQSGGRLRRPVNVPLDMFSEEIKFYELGEEAMEKFREDEGFIKEEERPLPEKEYQRQVWLLFEYPESSGPARVIAIVSVMVILISIVIFCLETLPELKDDKDFTGTVHRIDNTTVIYNSNIFTDPFFIVETLCIIWFSFELVVRFFACPSKTDFFKNIMNFIDIVAIIPYFITLGTEIAEQEGNQKGEQATSLAILRVIRLVRVFRIFKLSRHSKGLQILGQTLKASMRELGLLIFFLFIGVILFSSAVYFAEAEEAESHFSSIPDAFWWAVVSMTTVGYGDMYPVTIGGKIVGSLCAIAGVLTIALPVPVIVSNFNYFYHRETEGEEQAQLLHVSSPNLASDSDLSRRSSSTMSKYEYMEIEEDMNNSIAHYRQVNIRTANCTTANQNCVNKSKLLTDV

SEQ ID NO: 3538 - DNA, 1746 bp, Rattus norvegicus; identical to SEQ ID NO: 3534
  ref <308>: DATABASE ACCESSION NUMBER: EMBL / M26161
  ref <309>: DATABASE ENTRY DATE: 2000-03-04

SEQ ID NO: 3539 - protein, 495 aa, Rattus norvegicus; identical to SEQ ID NO: 3535
  ref <308>: DATABASE ACCESSION NUMBER: SWISS-Prot / P10499
  ref <309>: DATABASE ENTRY DATE: 2002-06-15

SEQ ID NO: 3540 - DNA, 1488 bp, Homo sapiens; identical to SEQ ID NO: 3536
  ref <308>: DATABASE ACCESSION NUMBER: EMBL / L02750
  ref <309>: DATABASE ENTRY DATE: 2000-03-04

SEQ ID NO: 3541 - protein, 495 aa, Homo sapiens; identical to SEQ ID NO: 3537
  ref <308>: DATABASE ACCESSION NUMBER: SWISS-Prot / Q09470
  ref <309>: DATABASE ENTRY DATE: 2002-06-15

SEQ ID NO: 3542 - DNA, 846 bp, Rattus norvegicus
  ref <308>: DATABASE ACCESSION NUMBER: EMBL / M26247
  ref <309>: DATABASE ENTRY DATE: 2000-03-04
agagtttctgttgcctacaattctaaaaagatcacccgtgctgagactgttttttctaataccgactatggaaattccactgaattaatcctggatgacatcaccaacagcaccattcttgataacctcactgaaaatagtgaaccaattaatgacttcactcgagttgttggtggagaaaatgcgaaaccaggtcaaatcccttggcaggtcattctaaatggtgaaattgaggcattctgtggaggcgccatcattaatgaaaaatggattgtaactgctgcccactgtcttaaacctggtgataaaattgaggttgttgctggtgaacataatattgatgagaaggaagacacagaacaaaggagaaatgtgattcgaactatccctcatcaccagtacaatgcaactattaataagtatagtcatgacattgccttgctggaactggataaacctttaatactaaacagctatgtaacacctatctgtgttgccaataaggaatatacaaatatcttcctcaagtttggttctggttatgtgagtggctgggggaaagtcttcaacaaagggagacaggcttccattcttcagtaccttagagttccactggttgaccgagccacatgccttaggtccacaaaattcagcatctataacaacatgttctgtgcaggttaccgtgaaggaggcaaagattcatgtgaaggagatagtgggggaccccatgttactgaagtagaagggacaagtttcttaactggcattattagctggggtgaagaatgtgcaatgaaaggcaaatatggaatatatactaaggtttccaggtatgtcaactgg

SEQ ID NO: 3543 - protein, 282 aa, Rattus norvegicus
  ref <308>: DATABASE ACCESSION NUMBER: SWISS-Prot / AAA41162
  ref <309>: DATABASE ENTRY DATE: 2002-06-15
RVSVAYNSKKITRAETVFSNTDYGNSTELILDDITNSTILDNLTENSEPINDFTRVVGGENAKPGQIPWQVILNGEIEAFCGGAIINEKWIVTAAHCLKPGDKIEVVAGEHNIDEKEDTEQRRNVIRTIPHHQYNATINKYSHDIALLELDKPLILNSYVTPICVANKEYTNIFLKFGSGYVSGWGKVFNKGRQASILQYLRVPLVDRATCLRSTKFSIYNNMFCAGYREGGKDSCEGDSGGPHVTEVEGTSFLTGIISWGEECAMKGKYGIYTKVSRYVNW

SEQ ID NO: 3544 - DNA, 2804 bp, Homo sapiens
  ref <308>: DATABASE ACCESSION NUMBER: Refseq / NM_000133
  ref <309>: DATABASE ENTRY DATE: 2002-11-05
accactttcacaatctgctagcaaaggttatgcagcgcgtgaacatgatcatggcagaatcaccaggcctcatcaccatctgccttttaggatatctactcagtgctgaatgtacagtttttcttgatcatgaaaacgccaacaaaattctgaatcggccaaagaggtataattcaggtaaattggaagagtttgttcaagggaaccttgagagagaatgtatggaagaaaagtgtagttttgaagaagcacgagaagtttttgaaaacactgaaagaacaactgaattttggaagcagtatgttgatggagatcagtgtgagtccaatccatgtttaaatggcggcagttgcaaggatgacattaattcctatgaatgttggtgtccctttggatttgaaggaaagaactgtgaattagatgtaacatgtaacattaagaatggcagatgcgagcagttttgtaaaaatagtgctgataacaaggtggtttgctcctgtactgagggatatcgacttgcagaaaaccagaagtcctgtgaaccagcagtgccatttccatgtggaagagtttctgtttcacaaacttctaagctcacccgtgctgagactgtttttcctgatgtggactatgtaaattctactgaagctgaaaccattttggataacatcactcaaagcacccaatcatttaatgacttcactcgggttgttggtggagaagatgccaaaccaggtcaattcccttggcaggttgttttgaatggtaaagttgatgcattctgtggaggctctatcgttaatgaaaaatggattgtaactgctgcccactgtgttgaaactggtgttaaaattacagttgtcgcaggtgaacataatattgaggagacagaacatacagagcaaaagcgaaatgtgattcgaattattcctcaccacaactacaatgcagctattaataagtacaaccatgacattgcccttctggaactggacgaacccttagtgctaaacagctacgttacacctatttgcattgctgacaaggaatacacgaacatcttcctcaaatttggatctggctatgtaagtggctggggaagagtcttccacaaagggagatcagctttagttcttcagtaccttagagttccacttgttgaccgagccacatgtcttcgatctacaaagttcaccatctataacaacatgttctgtgctggcttccatgaaggaggtagagattcatgtcaaggagatagtgggggaccccatgttactgaagtggaagggaccagtttcttaactggaattattagctggggtgaagagtgtgcaatgaaaggcaaatatggaatatataccaaggtatcccggtatgtcaactggattaaggaaaaaacaaagctcacttaatgaaagatggatttccaaggttaattcattggaattgaaaattaacagggcctctcactaactaatcactttcccatcttttgttagatttgaatatatacattctatgatcattgctttttctctttacaggggagaatttcatattttacctgagcaaattgattagaaaatggaaccactagaggaatataatgtgttaggaaattacagtcatttctaagggcccagcccttgacaaaattgtgaagttaaattctccactctgtccatcagatactatggttctccactatggcaactaactcactcaattttccctccttagcagcattccatcttcccgatcttctttgcttctccaaccaaaacatcaatgtttattagttctgtatacagtacaggatctttggtctactctatcacaaggccagtaccacactcatgaagaaagaacacaggagtagctgagaggctaaaactcatcaaaaacactactccttttcctctaccctattcctcaatcttttaccttttccaaatcccaatccccaaatcagtttttctctttcttactccctctctcccttttaccctccatggtcgttaaaggagagatggggagcatcattctgttatacttctgtacacagttatacatgtctatcaaacccagacttgcttccatagtggagacttgcttttcagaacatagggatgaagtaaggtgcctgaaaagtttgggggaaaagtttctttcagagagttaagttattttatatatataatatatatataaaatatataatatacaatataaatatatagtgtgtgtgtgtatgcgtgtgtgtagacacacacgcatacacacatataatggaagcaataagccattctaagagcttgtatggttatggaggtctgactaggcatgatttcacgaaggcaagattggcatatcattgtaactaaaaaagctgacattgacccagacatattgtactctttctaaaaataataataataatgctaacagaaagaagagaaccgttcgtttgcaatctacagctagtagagactttgaggaagaattcaacagtgtgtcttcagcagtgttcagagccaagcaagaagttgaagttgcctagaccagaggacataagtatcatgtctcctttaactagcataccccgaagtggagaagggtgcagcaggctcaaaggcataagtcattccaatcagccaactaagttgtccttttctggtttcgtgttcaccatggaacattttgattatagttaatccttctatcttgaatcttctagagagttgctgaccaactgacgtatgtttccctttgtgaattaataaactggtgttctggttcat

SEQ ID NO: 3545 - protein, 461 aa, Homo sapiens [sequence omitted]

SEQ ID NO: 3546 - DNA, 521 bp, Rattus norvegicus
  ref <308>: DATABASE ACCESSION NUMBER: EMBL / M26594
  ref <309>: DATABASE ENTRY DATE: 2001-01-24
tttttagattgtgcaagatgcatacaaagaaaagatggccactgtttatcctgaaccccaaaacaaagaagaatttgtctcctcccagatgtacagcactaattatgaccagatcctacctgattgttattcgtggcctgaagaagttccagaaaatacagaccaaagtcaatcagtaacacaacagctagaatttttaactttattaataagatcttgaagttttcagtgatttttaagagtcagaatcttttgtgatgattcacagtatgcttagaataaggtgatttttgtttagcccacagactcatgggagtagattagtgtaagttaggatgaacttcaccctagacaggtttgtttcacttactgtggcagtttatgttttcactgtgattattctctttacgaattctgtttaaaagctactgtacctgctgctgagaaagtcctcactgctatgtaggaagctaatggaagacccacactagtaataaattaatatagcataacttgattac

SEQ ID NO: 3547 - protein, 572 aa, Rattus norvegicus
  ref <308>: DATABASE ACCESSION NUMBER: SWISS-Prot / AAA41563
  ref <309>: DATABASE ENTRY DATE: 2002-06-15
MDPRAPRRRHTHQRGYLLTRDPHLNKDLAFTLEERQQLKIHGLLPPCIVNQEIQVLRVIKNFERLNSDFDRYLLLMDLQDRNEKLFYSVLMSNVEKFMPIVYTPTVGLACQQYSLAFRKPRGLFISIHDKGHIASVLNAWPEDVVKAIVVTDGERILGLGDLGCNGMGIPVGKLALYTACGGVNPQQCLPITLDVGTENEELLKDPLYIGLRHRRVRGPEYDAFLDEFMEAASSKYGMNCLIQFEDFANLNAFRLLNKYRNKYCTFNDDIQGTASVAVAGLLAALRITKNKLSDQTVLFQGAGEAALGIAHLIVMAMEKEGLSKEKARQKIWLVDSKGLIVKGRASLTEEKEVFAHEHEEMKNLEAIVQKIKPTALIGVAAIGGAFTEQILKDMAAFNERPIIFALSNPTSKAECSAEECYKVTKGRAIFASGSPFDPVTLPDGRTLFPGQGNNSYVFPGVALGVVACGLRHINDSVFLTTAEVISQQVSDKHLEEGRLYPPLNTIRDVSLKIAVKIVQDAYKEKMATVYPEPQNKEEFVSSQMYSTNYDQILPDCYSWPEEVQKIQTKVNQ

SEQ ID NO: 3548 - DNA, 1838 bp, Homo sapiens
  ref <308>: DATABASE ACCESSION NUMBER: EMBL / L34035
  ref <309>: DATABASE ENTRY DATE: 1999-02-15
ccggcgccagccatggagcccgaagccccccgtcgccgccacacccatcagcgcggctacctgctgacacggaaccctcacctcaacaaggacttggcctttaccctggaagagagacagcaattgaacattcatggattgttgccaccttccttcaacagtcaggagatccaggttcttagagtagtaaaaaatttcgagcatctgaactctgactttgacaggtatcttctcttaatggatctccaagatagaaatgaaaaactcttttatagagtgctgacatctgacattgagaaattcatgcctattgtttatactcccactgtgggtctggcttgccaacaatatagtttggtgtttcggaagccaagaggtctctttattactatccacgatcgagggcatattgcttcagttctcaatgcatggccagaagatgtcatcaaggccattgtggtgactgatggagagcgtattcttggcttgggagaccttggctgtaatggaatgggcatccctgtgggtaaattggctctatatacagcttgcggagggatgaatcctcaagaatgtctgcctgtcattctggatgtgggaaccgaaaatgaggagttacttaaagatccactctacattggactacggcagagaagagtaagaggttctgaatatgatgattttttggacgaattcatggaggcagtttcttccaagtatggcatgaattgccttattcagtttgaagattttgccaatgtgaatgcatttcgtctcctgaacaagtatcgaaaccagtattgcacattcaatgatgatattcaaggaacagcatctgttgcagttgcaggtctccttgcagctcttcgaataaccaagaacaaactgtctgatcaaacaatactattccaaggagctggagaggctgccctagggattgcacacctgattgtgatggccttggaaaaagaaggtttaccaaaggagaaagccatcaaaaagatatggctggttgattcaaaaggattaatagttaagggacgtgcttccttaacacaagagaaagagaagtttgcccatgaacatgaagaaatgaagaacctagaagccattgttcaagaaataaaaccaactgccctcataggagttgctgcaattggtggtgcattctcagaacaaattctcaaagatatggctgccttcaatgaacggcctattatttttgctttgagtaatccaactagcaaagcagaatgttctgcagagcagtgctacaaaataaccaagggacgtgcaatttttgccagtggcagtccttttgatccagtcactctcccagatggacggactctgtttcctggccaaggcaacaattcctacgtgttccctggagttgctcttggggtggtggcctgcggactgagacacatcgatgataaggtcttcctcaccactgctgaggtcatatctcagcaagtgtcagataaacacctgcaagaaggccggctctatcctcctttgaataccattcgagacgtttcgttgaaaattgcagtaaagattgtgcaagatgcatacaaagaaaagatggccactgtttatcctgaaccccaaaacaaagaagaatttgtctcctcccagatgtacagcactaattatgaccagatcctacctgattgttatccgtggcctgcagaagtccagaaaatacagaccaaagtcaaccagtaacgcaacagctaggatttttaactttattagtaaaatcttgaagttttcatgatctttaagggtcagaatcttttatgatgattcatagtatgcttagaataaggtgc

SEQ ID NO: 3549 - protein, 572 aa, Homo sapiens
  ref <308>: DATABASE ACCESSION NUMBER: SWISS-Prot / P48163
  ref <309>: DATABASE ENTRY DATE: 2002-06-15
MEPEAPRRRHTHQRGYLLTRNPHLNKDLAFTLEERQQLNIHGLLPPSFNSQEIQVLRVVKNFEHLNSDFDRYLLLMDLQDRNEKLFYRVLTSDIEKFMPIVYTPTVGLACQQYSLVFRKPRGLFITIHDRGHIASVLNAWPEDVIKAIVVTDGERILGLGDLGCNGMGIPVGKLALYTACGGMNPQECLPVILDVGTENEELLKDPLYIGLRQRRVRGSEYDDFLDEFMEAVSSKYGMNCLIQFEDFANVNAFRLLNKYRNQYCTFNDDIQGTASVAVAGLLAALRITKNKLSDQTILFQGAGEAALGIAHLIVMALEKEGLPKEKAIKKIWLVDSKGLIVKGRASLTQEKEKFAHEHEEMKNLEAIVQEIKPTALIGVAAIGGAFSEQILKDMAAFNERPIIFALSNPTSKAECSAEQCYKITKGRAIFASGSPFDPVTLPNGQTLYPGQGNNSYVFPGVALGVVACGLRQITDNIFLTTAEVIAQQVSDKHLEEGRLYPPLNTIRDVSLKIAEKIVKDAYQEKTATVYPEPQNKEAFVRSQMYSTDYDQILPDCYSWPEEVQKIQTKVDQ

SEQ ID NO: 3550 - DNA, 521 bp, Rattus norvegicus; identical to SEQ ID NO: 3546
  ref <308>: DATABASE ACCESSION NUMBER: EMBL / M26594
  ref <309>: DATABASE ENTRY DATE: 2001-01-24

SEQ ID NO: 3551 - protein, 572 aa, Rattus norvegicus; identical to SEQ ID NO: 3547
  ref <308>: DATABASE ACCESSION NUMBER: SWISS-Prot / AAA41563
  ref <309>: DATABASE ENTRY DATE: 2002-06-15

SEQ ID NO: 3552 - DNA, 1838 bp, Homo sapiens; identical to SEQ ID NO: 3548
  ref <308>: DATABASE ACCESSION NUMBER: EMBL / L34035
  ref <309>: DATABASE ENTRY DATE: 1999-02-15

SEQ ID NO: 3553 - protein, 572 aa, Homo sapiens; identical to SEQ ID NO: 3549
  ref <308>: DATABASE ACCESSION NUMBER: SWISS-Prot / P48163
  ref <309>: DATABASE ENTRY DATE: 2002-06-15

SEQ ID NO: 3554 - DNA, 1658 bp, Rattus norvegicus
  ref <308>: DATABASE ACCESSION NUMBER: EMBL / M26686
  ref <309>: DATABASE ENTRY DATE: 2000-03-04
aattcgggggaccgtcgccgcgctgaaggtggctctatacctgctcgggtgtgcttcgcgatggcctggaaatccggcggcgccagccactcggagctaatccacaacctccgcaagaatggaatcatcaagacagataaagtatttgaggtgatgctggctacagaccgctcccactatgcaaaatctaacccttacatggattctccacagtcaataggtttccaggcaacaatcagcgctcctcacatgcatgcatatgcactagagctcctgtttgaccagctgcacgaaggcgctaaagcccctgacgtagggtctggaagtggaatcctcaccgcgtgttttgcacggatggttggacacagtgggaaagtcattggaattgatcacattaaagaactagtggacgactcaataactaatgtcaaaaaggatgaccccatgctcctgtcctctgggcgagtacggctggttgtgggcgatggaagaatggggtttgctgaagaagccccttacgatgccattcacgtcggagctgcagccccagttgtgccccaggcattaatagaccagttaaagcctggtggaagattgatattgccagtcggtcctgcaggaggaaaccaaatgttggagcagtatgacaagctacaagatggcagtgtcaaaatgaagcctctgatgggggtgatatacgtgcctttaacagataaagaaaagcagtggtccaggtggaagtgattttctcttctgctctttcttcctccacacattcaagggacgagctgtgagagcaacctgtagcttggccgtctgtaacactgcagtggattgctcatctcggtcctcaaagcattgagagccaacagcatcaccgcttgttttggactttgttacactctcttattttcagcatgaaaatgtgtggtttttgtagggtttcctaattcaaaacggtgcagagccagactgatagaggagggctggagagtgttaactttgtgttgtttaacatgccacatttactttacaaatattaaaagaaagggttctctaaccggaaagcttcgtttgtgacttagtttggaagagtggctttgcttttcttggacacttacttctgttccaatattaatttatgagatttcttttgtgtgtcagataacaccacattcacaagtttagcttttttttctttttttatgtgattttggctagcgagcattattagtgggaggagtcaagttgttagaatgattagtggggtggataatggatcgaggagaatataactagaaatttaggtaattttcgtcattttgtcataggagtgataagcttaataggctcactagaggaaagctgtaggaggtgacattggttcagatttttttgttggctgagagtcatgttagtgggaggagtatgatagatgggaaaataatttttaacattgtagaaggttgaggttttgtacgtagtctgttccgtaagtatttgaaatttttactagtaaggctaaacctacggtctttcgcaggctgcaaaaacatgaatggtaattgggatggttatggagattatggagttggagtttaatgtggatgttgaagttatgacaaatagtgatagtattattccttctccgaaattcc

SEQ ID NO: 3555 - protein, 226 aa, Rattus norvegicus
  ref <308>: DATABASE ACCESSION NUMBER: SWISS-Prot / P22062
  ref <309>: DATABASE ENTRY DATE: 1997-11-01
AWKSGGASHSELIHNLRKNGIIKTDKVFEVMLATDRSHYAKSNPYMDSPQSIGFQATISAPHMHAYALELLFDQLHEGAKAPDVGSGSGILTACFARMVGHSGKVIGIDHIKELVDDSITNVKKDDPMLLSSGRVRLVVGDGRMGFAEEAPYDAIHVGAAAPVVPQALIDQLKPGGRLILPVGPAGGNQMLEQYDKLQDGSVKMKPLMGVIYVPLTDKEKQWSRWK

SEQ ID NO: 3556 - DNA, 1405 bp, Homo sapiens
  ref <308>: DATABASE ACCESSION NUMBER: EMBL / AF219140
  ref <309>: DATABASE ENTRY DATE: 2000-01-11
ctgatgaatcccctaatgattttggtaaaaatcattaagttaaggtggatacacatcttgtcatatgatcaaatggtttcgcgaaaaatcaataatcagacaacaagatgtgcgaactcgatattttacacgactctctttaccaattctgccccgaattacacttaaaacgactcaacagcttaacgttggcttgccacgcattacttgactgtaaaactctcactcttaccgaacttggccgtaacctgccaaccaaagcgagaacaaaacataacatcaaacgaatcgaccgattgttaggtaatcgtcacctccacaaagagcgactcgctgtataccgttggcatgctagctttatctgttcgggcaatacgatgcccattgtacttgttgactggtctgatattcgtgagcaaaaacgacttatggtatttcgagtttgtttcgagtactgggtaaaagatcggccgggaacctcgtataatggctcatgtggtggaggcgagtaccagtcactacgaccgaaaatttcacggtaccatattaggcaatctttcgacccaaccatgaaccaattcagctcattctccttttcatgttatacgtctgaatcctcgccttttgaacctttgggatactcgttgaatgtactatacagtagatcagtgagtttctgcaatccgatattctccgactggttttcgttaggttatagtacgtttaagataacatatttagagcgagatttccggcttttttattcgcgagctgtgcctgagtatcagtggtgggcagtggattttagatgcgtcgcagccgtttcctcggtgcctaagatcgttgattggatggacaactttaagcttgtgggtttgttgaacaattatagatatgcttcgcttacgtctaacttctttggaaggctctcaacttttcaggacggatgcctgatccgcatgcggtatcggcttgctcgtcgagtctcgcaaaactatagtacgacgattagcgggactacgaagttgattgtacaaccgaacgcccgcaagtacgagtctttgttccaaccctgttcgtggaggtccgattgtgtcagtctttagctttgcatgagagttgtcaagcgaatccgtaccttcaaaacgccgtaagaccgatgtgttattgttcccttctgaatgagcaccgacgttgggatgatcgagttttaataaagtgtgtaccaatgcgaaacccctttaatactcccctagagagtcacgtatcgaactcatacccaatgggaaaagattgtgaagcctgtggaaagtttcagctccccgagttgggggaaaaccgctaaactggcagattaggatttttaaaataaagattggattataactctaaaaaaaaaaaaaaa

SEQ ID NO: 3557 - protein, 226 aa, Homo sapiens
  ref <308>: DATABASE ACCESSION NUMBER: SWISS-Prot / P22061
  ref <309>: DATABASE ENTRY DATE: 2002-06-15
AWKSGGASHSELIHNLRKNGIIKTDKVFEVMLATDRSHYAKCNPYMDSPQSIGFQATISAPHMHAYALELLFDQLHEGAKALDVGSGSGILTACFARMVGCTGKVIGIDHIKELVDDSINNVRKDDPTLLSSGRVQLVVGDGRMGYAEEAPYDAIHVGAAAPVVPQALIDQLKPGGRLILPVGPAGGNQMLEQYDKLQDGSIKMKPLMGVIYVPLTDKEKQWSRWK

SEQ ID NO: 3558 - DNA, 1658 bp, Rattus norvegicus; identical to SEQ ID NO: 3554
  ref <308>: DATABASE ACCESSION NUMBER: EMBL / M26686
  ref <309>: DATABASE ENTRY DATE: 2000-03-04

SEQ ID NO: 3559 - protein, 226 aa, Rattus norvegicus; identical to SEQ ID NO: 3555
  ref <308>: DATABASE ACCESSION NUMBER: SWISS-Prot / P22062
  ref <309>: DATABASE ENTRY DATE: 1997-11-01

SEQ ID NO: 3560 - DNA, 1405 bp, Homo sapiens; identical to SEQ ID NO: 3556
  ref <308>: DATABASE ACCESSION NUMBER: EMBL / AF219140
  ref <309>: DATABASE ENTRY DATE: 2000-01-11

SEQ ID NO: 3561 - protein, 226 aa, Homo sapiens; identical to SEQ ID NO: 3557
  ref <308>: DATABASE ACCESSION NUMBER: SWISS-Prot / P22061
  ref <309>: DATABASE ENTRY DATE: 2002-06-15

SEQ ID NO: 3562 - DNA, 418 bp, Rattus norvegicus
  misc_feature (1)..(418): n=a, c, g or t
  ref <308>: DATABASE ACCESSION NUMBER: EMBL / M27467
  ref <309>: DATABASE ENTRY DATE: 2000-03-04
gccatggnccttcaccttagggttacccatgatagcagaggcagaggacattggctaccatcagttccggtgctctgttgccgaaaccacagatgcgtggtcttctggccaagcgtctgcgggttcatattgttggcgcattcgctgtggccctaggagttgctgctgcctataagtttggcgtggctgaaccaagaaagaaggcttatgcagatttctacaggaattatgactccatgaaagattttgaagagatgaggcaggctggtgtctttcagagtgcgaagtgatttcagaatgcaaagaattctttggattgtgctccatagaagttcactgctgacctgtgttcctgaactatgaaacgtgaatatgtgggctaaggagtagtttctctcaataaacattaattatatgg

SEQ ID NO: 3563 - protein, 75 aa, Rattus norvegicus
  ref <308>: DATABASE ACCESSION NUMBER: SWISS-Prot / P11951
  ref <309>: DATABASE ENTRY DATE: 2001-10-16
SSGALLPKPQMRGLLAKRLRVHIVGAFVVALGVAAAYKFGVAEPRKKAYADFYRNYDSMKDFEEMRQAGVFQSAK

SEQ ID NO: 3564 - DNA, 504 bp, Homo sapiens
  misc_feature (1)..(504): n=a, c, g or t
  ref <308>: DATABASE ACCESSION NUMBER: EMBL / BG952851
  ref <309>: DATABASE ENTRY DATE: 2001-06-13
gctgggtgntctagaggatcccgtgtggtggtgtgcgctgtaatcccagccactcaagaagctgaggcaggagaagcgcttgaacctgggaggcggaggttgtagtcagccgagatcgtgccattgcactccagcctggcaacagagcaagactcaaaataaataaataaaataaaataaaataaaatgagtcaggaatgatgttggtgttgaggttggcatacgtatcaaggacagtaactaccatgactcccgaagtgttgccaaaacctcagatgtgtggccttctggccaagcgtctgcgatttcaatgtttggagcattcatggtgtccctgggggttgcagctttgtatgagtttggtgtgggtgatccaagaaagaaggcatatgcagatttctgcagaaattatgagattttgagcagatgaggaaggctggtatctttcagtttaaagtaatcttggaatataaagaatttcttcaggttgaattacccagaagt

SEQ ID NO: 3565 - protein, 75 aa, Homo sapiens
  ref <308>: DATABASE ACCESSION NUMBER: SWISS-Prot / P09669
  ref <309>: DATABASE ENTRY DATE: 2001-10-16
MAPEVLPKPRMRGLLARRLRNHMAVAFVLSLGVAALYKFRVADQRKKAYADFYRNYDVMKDFEEMRKAGIFQSVK

SEQ ID NO: 3566 - DNA, 484 bp, Rattus norvegicus
  ref <308>: DATABASE ACCESSION NUMBER: EMBL / M27726
  ref <309>: DATABASE ENTRY DATE: 2000-03-04
cggatccatgagtacaagcggcagctgctcaactgcttacacatcatcaccctgtacaagcgaataaagaaggatccaaccaagacctttgtgcccaggactgttatgatcggaggcaaggcagctcctggttaccacatggctaagatgatcatcaagctggtcacatccattggagatgttgtcaatcatgatccagttgtgggcgacaggctcagagtgatcttcctggagaactaccgtgtgtctttagctgagaaagtgatcccggccgccgacctgtcacagcagatctccactgcgggcaccgaggcctcgggcaccggcaacatgaagttcatgctcaacggagctctcaccatcggcaccatggatggtgccaacgtggagatggccgaggaggccggggaggagaacctcttcatctttggtatgcgggtggaagatgttgaggccttggaccagaaagggtacaatgcccaga

SEQ ID NO: 3567 - protein, 838 aa, Rattus norvegicus
  ref <308>: DATABASE ACCESSION NUMBER: SWISS-Prot / AAA40815
  ref <309>: DATABASE ENTRY DATE: 2000-05-30
MAKPLTDSERQKQISVRGIAGLGDVAEVRKSFNRHLHFTLVKDRNVATPRDYFFALAHTVRDHLVGRWIRTQQHYYERDPKRIYYLSLEFYMGRTLQNTMVNLGLQTACDEATYQLGLDLEELEEIEEDAGLGNGGLGRLAACFLDSMATLGLAAYGYGIRYEFGIFNQKIVNGWQVEEADDWLRYGNPWEKARPEYMLPVHFYGRVEHTPNGVLWLDTQVVLAMPYDTPVPGYKNNTVNTMRLWSAKAPNDFKLKDFNVGDYIEAVLDRNLAENISRVLYPNDNFFEGKELRLKQEYFVVAATLQDIIRRFKSSKFGCRDPVRTCFETFPDKVAIQLNDTHPALSIPELMRILVDVEKVDWDKAWEITKKTCAYTNHTVLPEALERWPVSMFEKLLPRHLEIIYAINQRHLDHVAALFPGDVDRLRRMSVIEEGDCKRINMAHLCVIGSHAVNGVARIHSEIVKQSVFKDFYELEPEKFQNKTNGITPRRWLLLCNPGLAEIIVERIGEGFLTDLSQLKKLLSLVDDEAFIRDVAKVKQENKLKFSAQLEKEYKVKINPCSMFDVHVKRIHEYKRQLLNCLHIITLYNRIKKDPTKTFVPRTVMIGGKAAPGYHMAKMIIKLVTSIGDVVNHDPVVGDRLRVIFLENYRVSLAEKVIPAADLSQQISTAGTEASGTGNMKFMLNGALTIGTMDGANVEMAEEAGEENLFIFGMRVEDVEALDQKGYNAQEFYERLPELRQAVDQISSGFFSPKDPDCFKDVVNMLMYHDRFKVFADYEAYIQCQAQVDHLYRNPKDWTKKVIRNIACSGKFSSDRTITEYAREIWGVEPSDLQIPPP

SEQ ID NO: 3568 - DNA, 3816 bp, Homo sapiens
  ref <308>: DATABASE ACCESSION NUMBER: EMBL / J03544
  ref <309>: DATABASE ENTRY DATE: 2000-03-04
gagcagctgcaccatcccggcgttcgcgtgtgccgccgctttcctcctccatctcttttcctccgcctccgccggcgcgatgggcgaaccgctgacggacagcgagaagcggaagcagatcagcgtgcgcggcctggcggggctaggcgacgtggccgaggtgcggaagagcttcaaccggcacttgcacttcacgctggtcaaggaccgcaatgtggccacgccccgcgactacttcttcgcgctggcgcacacggtgcgcgaccacctcgtgggccgctggatccgcacgcagcagcactactacgagcgcgaccccaagcgaatttattatctttccctggaattctacatgggtcgcacgctgcagaacacgatggtgaacctgggccttcagaatgcctgcgatgaagccatctatcagttggggttagacttggaggaactcgaggagatagaagaagatgctggccttgggaatggaggcctggggaggctggcagcgtgtttccttgactcaatggctaccttgggcctggcagcatacggctatggaatccgctatgaatttgggatttttaaccagaagattgtcaatggctggcaggtagaggaggccgatgactggctgcgctacggcaacccctgggagaaagcgcggcctgagtatatgcttcccgtgcacttctacggacgcgtggagcacacccccgacggcgtgaagtggctggacacacaggtggtgctggccatgccctacgacaccccagtgcccggctacaagaacaacaccgtcaacaccatgcggctgtggtccgcaagggctcccaacgacttcaagctgcaggacttcaacgtgggagactacatcgaggcggtcctggaccggaacttggctgagaacatctccagggtcctgtatccaaatgataacttctttgaggggaaggagctgcggctgaagcaggagtacttcgtggtgggcgccacgctccaggacatcatccgccgcttcaagtcgtccaagttcggctgccgggaccctgtgagaacctgtttcgagacgttcccagacaaggtggccatccagctgaacgacacccaccccgccctctccatccctgagctcatgcggatcctggtggacgtggagaaggtggactgggacaaggcctgggaaatcacgaagaagacctgtgcatacaccaaccacactgtgctgcctgaggccttggagcgctggcccgtgtccatgtttgagaagctgctgccgcggcacctggagataatctatgccatcaaccagcggcacctggaccacgtggccgcgctgtttcccggcgatgtggaccgcctgcgcaggatgtctgtgatcgaggagggggactgcaagcggatcaacatggcccacctgtgtgtgattgggtcccatgctgtcaatggtgtggcgaggatccactcggagatcgtgaaacagtcggtctttaaggatttttatgaactggagccagagaagttccagaataagaccaatggcatcaccccccgccggtggctgctgctgtgcaacccggggctggccgataccatcgtggagaaaattggggaggagttcctgactgacctgagccagctgaagaagctgctgccgctggtcagtgacgaggtgttcatcagggacgtggccaaggtcaaacaggagaacaagctcaagttctcggccttcctggagaaggagtacaaggtgaagatcaacccctcctccatgttcgatgtgcatgtgaagaggatccacgagtacaagcggcagctgctcaactgcctgcacgtcgtcaccctgtacaatcgaatcaagagagacccggccaaggcttttgtgcccaggactgttatgattgggggcaaggcagcgcccggttaccacatggccaagctgatcatcaagttggtcacctccatcggcgacgtcgtcaatcatgacccagttgtgggtgacaggttgaaagtgatcttcctggagaactaccgtgtgtccttggctgagaaagtgatcccggccgctgatctgtcgcagcagatctccactgcaggcaccgaggcctcaggcacaggcaacatgaagttcatgctcaacggggccctcaccatcggcaccatggacggcgccaacgtggagatggccgaggaggccggggccgagaacctcttcatcttcggcctgcgggtggaggatgtcgaggccttggaccggaaagggtacaatgccagggagtactacgaccacctgcccgagctgaagcaggccgtggaccagatcagcagtggctttttttctcccaaggagccagactgcttcaaggacatcgtgaacatgctgatgcaccatgacaggttcaaggtgtttgcagactatgaagcctacatgcagtgccaggcacaggtggaccagctgtaccggaaccccaaggagtggaccaagaaggtcatcaggaacatcgcctgctcgggcaagttctccagtgaccggaccatcacggagtatgcacgggagatctggggtgtggagccctccgacctgcagcttcagcacctgccccacccagagtgggagtcaggtggagccacctgctgggctcccccagaactttgcacacatcttgctatgtattagccgatggctttagtgttgagcctctggattctggggtctgcggcagtggccatagtgaagcctgggaatgagtgttactgcagcatctggctgccagccacagggaagggccaagccccatgtagccccagtcatcctgcccagccctgcctcctggccatgccgggaggggtcggatcctctaggcatcgcttcacagccccctgccccctgccctctgtcctggctctgcacctggtatatgggtcatggaccagatggggctttccctttgtagccatccaatgggcattgtgtgggtgcttggaacccgggatgactgagggggacactggagtgggtgcttgtgtctgctgtctcagaggccttggtcaggatgaagttggctgacacagcttagcttggttttgcttattcaaaagagaaaataactacacatggaaatgaaactagtgaagccttttcttgttttagaatgaaaattgtacttggtcacttttgtgcttgaggaggcccattttctagcctggcaggggcaggtcctgtgccctcccgcttgactcctgctgtgtcctgaggtgcatttcctgtttgttacacacaagggccaggctccattctccctccctttccaccagtgccacagcctcgtctggaaaaaggaccaggggtcccggaggaacccatttgtgctctgcttggacagcaggcctggcactgggaggtggggtgagcccctcacagccttgcccctccccaaggctcgaacctgcctcccattgcccaagagagaggggcagggaacaggctactgtccttccctgtggaattgccgagaaatctagcaccttgcatgctggatctgggctgcggggaggctctttttctccctggcctccagtgcccaccaggaggatctgcgcacggtgcacagcccaccagagcactacagccttttattgagtggggcaagtgctgggctgtggtcgtgccctgacagcatcttccccaggcagcggctctgtggaggaggccatactcccctagttggccactggggccaccaccctgaccaccactgtgcccctcattgttactgccttgtgagataaaaactgattaaacctttgtggctttggttggtt

SEQ ID NO: 3569 - protein, 843 aa, Homo sapiens
  ref <308>: DATABASE ACCESSION NUMBER: SWISS-Prot / P11216
  ref <309>: DATABASE ENTRY DATE: 2002-06-15
MAKPLTDSEKRKQISVRGLAGLGDVAEVRKSFNRHLHFTLVKDRNVATPRDYFFALAHTVRDHLVGRWIRTQQHYYERDPKRIYYLSLEFYMGRTLQNTMVNLGLQNACDEAIYQLGLDLEELEEIEEDAGLGNGGLGRLAACFLDSMATLGLAAYGYGIRYEFGIFNQKIVNGWQVEEADDWLRYGNPWEKARPEYMLPVHFYGRVEHTPDGVKWLDTQVVLAMPYDTPVPGYKNNTVNTMRLWSAKAPNDFKLQDFNVGDYIEAVLDRNLAENISRVLYPNDNFFEGKELRLKQEYFVVAATLQDIIRRFKSSKFGCRDPVRTCFETFPDKVAIQLNDTHPALSIPELMRILVDVEKVDWDKAWEITKKTCAYTNHTVLPEALERWPVSMFEKLLPRHLEIIYAINQRHLDHVAALFPGDVDRLRRMSVIEEGDCKRINMAHLCVIGSHAVNGVARIHSEIVKQSVFKDFYELEPEKFQNKTNGITPRRWLLLCNPGLADTIVEKIGEEFLTDLSQLKKLLPLVSDEVFIRDVAKVKQENKLKFSAFLEKEYKVKINPSSMFDVHVKRIHEYKRQLLNCLHVVTLYNRIKRDPAKAFVPRTVMIGGKAAPGYHMAKLIIKLVTSIGDVVNHDPVVGDRLKVIFLENYRVSLAEKVIPAADLSQQISTAGTEASGTGNMKFMLNGALTIGTMDGANVEMAEEAGAENLFIFGLRVEDVEALDRKGYNAREYYDHLPELKQAVDQISSGFFSPKEPDCFKDIVNMLMHHDRFKVFADYEAYMQCQAQVDQLYRNPKEWTKKVIRNIACSGKFSSDRTITEYAREIWGVEPSDLQIPPPNIPRD

SEQ ID NO: 3570 - DNA, 484 bp, Rattus norvegicus; identical to SEQ ID NO: 3566
  ref <308>: DATABASE ACCESSION NUMBER: EMBL / M27726
  ref <309>: DATABASE ENTRY DATE: 2000-03-04

SEQ ID NO: 3571 - protein, 838 aa, Rattus norvegicus; identical to SEQ ID NO: 3567
  ref <308>: DATABASE ACCESSION NUMBER: SWISS-Prot / AAA40815
  ref <309>: DATABASE ENTRY DATE: 2000-05-30

SEQ ID NO: 3572 - DNA, 3816 bp, Homo sapiens; identical to SEQ ID NO: 3568
  ref <308>: DATABASE ACCESSION NUMBER: EMBL / J03544
  ref <309>: DATABASE ENTRY DATE: 2000-03-04

SEQ ID NO: 3573 - protein, 843 aa, Homo sapiens; identical to SEQ ID NO: 3569
  ref <308>: DATABASE ACCESSION NUMBER: SWISS-Prot / P11216
  ref <309>: DATABASE ENTRY DATE: 2002-06-15

SEQ ID NO: 3574 - DNA, 2400 bp, Rattus norvegicus
  ref <308>: DATABASE ACCESSION NUMBER: EMBL / M27812
  ref <309>: DATABASE ENTRY DATE: 2000-03-04
gtcgtcctgagccccttgcgctccgcccccgcggcccaccgacccactgccccttggatcccctgccccaagctgccaccatgaactacctgcggcgccgcctgtcggacagcaacttcatggccaatctgcctaatgggtatatgacagacctgcagcgcccgcaaccacctccgccgccgccctcagccgccagcccaggggccactcccggatccgctgctgcctctgctgagagggcctccacagctgctccagtggcctctccagcagcccctagtcccgggtcctcggggggcggtggcttcttctcctcgctgtctaacgcggtcaaacagaccacagcagctgcagccgccaccttcagtgagcaggtgggcggtggctctgggggcgcaggccgcgggggcgccgccgccagggtgctgctggtcatcgacgagccgcacaccgactgggcaaaatacttcaaagggaagaagatccatggagaaattgacattaaagtagagcaagctgaattctccgatctcaatcttgtggctcatgccaatggtggattctccgtggacatggaagttcttcggaatggggtcaaagttgtgaggtctctgaagccagactttgtgctgatccgccagcatgccttcagcatggcacgtaatggagactaccgcagtttggtcattgggctgcagtatgctgggatccccagtgttaactctttgcattctgtctacaacttttgtgacaaaccctgggtgtttgcccagatggttcgactacacaagaagcttggaacagaggaattccctctgattgatcagactttctatcccaatcataaagagatgctcagcagcacaacataccctgtagttgtgaagatgggccacgcacactctgggatgggcaaggtcaaggtagacaaccaacatgacttccaggatattgcaagtgttgtggcactgactaagacatatgccactgctgagcccttcattgatgctaaatacgatgtgcgtgtccagaagattgggcagaactacaaggcctacatgaggacatcagtgtcagggaactggaagaccaatacaggctctgctatgcttgagcagattgctatgtctgacaggtacaagttgtgggtagacacgtgctcagagatttttgggggacttgacatctgcgcagtggaagcactgcatggcaaggacggaagggatcacattattgaggtggtgggctcctccatgccactcattggggatcaccaggatgaagacaagcagctcatcgtggaacttgtggtcaacaagatgactcaggctctgcctcggcagcgggatgcttcccctggcaggggttcccacagccagactccatccccaggagccctgcccttgggccgccagacctcccagcagcctgcaggacctcctgctcaacaacgacccccaccccagggaggccctccacaaccaggcccaggacctcagcgccagggacccccgctgcaacagcgcccacccccacaaggccagcaacatctttctggccttggacccccagctggcagccctctgccccagcgcctaccaagtcccacagcagcacctcagcagtccgcctctcaggccacaccaatgacccagggtcaaggccgccagtcacggccagtggcaggaggccccggagcacctccagcagcccgcccgccggcctccccatctccacagcgtcaggcagggcccccacaggctacccgtcaggcatctatctctggtccagctccaccgaaggtctcaggagcctcacccggagggcagcagcgccaaggccctccccagaaacccccaggccctgctggtcccattcgtcaggccagccaggcaggtcccggacctcgcactgggccacccaccacacagcagccccggcccagcggcccaggtcctgctggacgtcccaccaaaccacagctggctcagaaacccagccaggatgtgccaccacccatcattgctgctgccgggggacccccgcacccccagctcaacaaatcccagtctctgaccaatgccttcaaccttccagagccagccccgcccaggcccagccttagccaggatgaggtgaaagctgagaccatccgcagcctgaggaagtctttcgccagcctcttctccgactgacacctactctgagaaccctaaacccctagacaacccgtctctgggtcctgagtccatttctcacctttggaatctccaaatcccttgagaacccctctctcctggttctacatcccacttctcattcctcaagatgtcccttgagaaacgtggtcctaaatccagttctcacattgggaatccccaagtccatttagaatcctgg

SEQ ID NO: 3575 - protein, 704 aa, Rattus norvegicus
  ref <308>: DATABASE ACCESSION NUMBER: SWISS-Prot / P09951
  ref <309>: DATABASE ENTRY DATE: 2002-06-15
MNYLRRRLSDSNFMANLPNGYMTDLQRPQPPPPPPSAASPGATPGSAAASAERASTAAPVASPAAPSPGSSGGGGFFSSLSNAVKQTTAAAAATFSEQVGGGSGGAGRGGAAARVLLVIDEPHTDWAKYFKGKKIHGEIDIKVEQAEFSDLNLVAHANGGFSVDMEVLRNGVKVVRSLKPDFVLIRQHAFSMARNGDYRSLVIGLQYAGIPSVNSLHSVYNFCDKPWVFAQMVRLHKKLGTEEFPLIDQTFYPNHKEMLSSTTYPVVVKMGHAHSGMGKVKVDNQHDFQDIASVVALTKTYATAEPFIDAKYDVRVQKIGQNYKAYMRTSVSGNWKTNTGSAMLEQIAMSDRYKLWVDTCSEIFGGLDICAVEALHGKDGRDHIIEVVGSSMPLIGDHQDEDKQLIVELVVNKMTQALPRQRDASPGRGSHSQTPSPGALPLGRQTSQQPAGPPAQQRPPPQGGPPQPGPGPQRQGPPLQQRPPPQGQQHLSGLGPPAGSPLPQRLPSPTAAPQQSASQATPMTQGQGRQSRPVAGGPGAPPAARPPASPSPQRQAGPPQATRQASISGPAPPKVSGASPGGQQRQGPPQKPPGPAGPIRQASQAGPGPRTGPPTTQQPRPSGPGPAGRPTKPQLAQKPSQDVPPPIIAAAGGPPHPQLNKSQSLTNAFNLPEPAPPRPSLSQDEVKAETIRSLRKSFASLFSD

SEQ ID NO: 3576 - DNA, 2648 bp, Rattus norvegicus
  ref <308>: DATABASE ACCESSION NUMBER: EMBL / M27925
  ref <309>: DATABASE ENTRY DATE: 2000-03-04
gctggggagacccagagcgccgcgctgtctgctgggctcacggagacgcggaccacctttggtcgccccgcgccgtcctctccgcgccgcctggcccgccgcctcgagcgccctcagtccctcaagccagatgatgaacttcctgaggcgccggctgtcggacagcagcttcattgccaacctgcccaatggctacatgactgaccttcagcgcccggagccgcagcagcccccacccgcccctggccccggtaccgctaccgcgtcggcggccacctcagctgcctcgcctggccccgagcgcaggccgccacccgcccaggcacccgcgccgcagccggcgccgcagcccgcgccgacgccgtcggtgggcagcagcttcttcagctcgctgtcgcaagccgtgaagcagacggccgcctccgccggcctggtggacgcgcccgcgccttcggccgcttccaggaaggccaaggtgctgctggtggtcgacgagccgcacaccgactgggccaagtgctttcggggcaaaaaaatccttggagattatgacatcaaagtagaacaggcagaattttcagagcttaacctggtggcccatgcggatggaacctacgccgtggacatgcaggtactccggaatggcacaaaggttgtcaggtccttcaggccagacttcgtgctcatccgacagcatgcatttggcatggcggagaatgaagacttccgccacctggtcattggcatgcagtatgcaggcctccccagcatcaactcactggagtccatttacaacttctgtgacaagccatgggtgtttgctcagatggtggccatcttcaagacactgggaggggagaaatttccactcattgagcagacctactaccccaatcaccgagagatgcttacacttcctacgtttcctgtcgtggtgaagattggccatgctcactcgggcatgggcaaggtcaaagtggaaaatcactacgacttccaggacattgccagtgtggtggccctcacccaaacctatgccacagcagaacccttcattgacgccaagtatgacatccgggttcagaagattggcaacaactacaaggcttacatgaggacatccatctcagggaactggaagacaaacactggctccgcgatgctggagcagatcgccatgtcagaccggtacaagctctgggtcgacgcctgctctgagatgtttgggggcttggacatctgtgcagtcaaagctgtgcatggcaaagatggcaaagactacatttttgaggtcatggactgtagcatgccactgattggggaacaccaagtggaggacagacaactcatcactgatctagtcatcagcaagatgaaccagctattgtccaggactcctgccctgtctccacagagacctttaaccacccaacagccacagagtggaacacttaaggaaccggactccagcaagacccctcctcagcggccagccccccaagggggccctgggcaaccccaaggaatgcagcccccaggcaaggtgctgcctccacgtcggctcccctcgggaccatcactgccaccttcttcctcttcctcctcctcttcctcctcctcttcctcggctcctcagaggccgggcggccctacctccacccaggtgaatgcatcctccagcagcaactccctggcagagccccaggcacctcaggctgctccaccacagaagccccagcctcacccacagctcaacaagtcgcagtccctgacaaatgcgttcagcttctctgagtcctccttcttccggtcttcagccaatgaagatgaagccaaagcggagaccatccggagcttgaggaagtcctttgccagcctcttttcagattagctcttcagatacacgagggcatccggcccaaccaggaaaggcatctaagacattcatcaacagcagtccgccatgtttggtggcaatgtcccatgacttggacatgtgtggccccttcttctgttcctttgtgctcagtaatttgtgcagcccagaaatgaccatgtgatggtctcagggcaggtggctaccctgagaaagacctgacagtagaggaaagggctgtttccctgtagtcttaagagctttattctgaagtcatcgttgctgtgaattcagtggccttattgtgacagagccatcgtgtcttactcttccctgtgaagccaggatctctgtaacgtaggactcctggcagcttacctatctcagcatatcctagtagtcagtgctacctgtgggaaatatattcttaccttagaagtattgttggctctaagttttaggagcttctccccaaagctgggtctcctgtggtccctgttgaaagcacattcacctgaccctgcactccctagactgctgtggaggtcaagttccttgtgactgtttgaaacaagagaacaaggatccacagtgtctcctttctcccctctggagagcagttctgttgtgtgagcatcagtaaccttgacctttcgaagctgtactgtagaagagaatgcatgccgctataacagcagtccaccaacctttgtgttcctcaccttatgaatgtcaagaccttggtgtaataaaagcagcagctttaaccagc

SEQ ID NO: 3577 - protein, 586 aa, Rattus norvegicus
  ref <308>: DATABASE ACCESSION NUMBER: SWISS-Prot / Q63537
  ref <309>: DATABASE ENTRY DATE: 2002-06-15
MMNFLRRRLSDSSFIANLPNGYMTDLQRPEPQQPPPAPGPGTATASAATSAASPGPERRPPPAQAPAPQPAPQPAPTPSVGSSFFSSLSQAVKQTAASAGLVDAPAPSAASRKAKVLLVVDEPHTDWAKCFRGKKILGDYDIKVEQAEFSELNLVAHADGTYAVDMQVLRNGTKVVRSFRPDFVLIRQHAFGMAENEDFRHLVIGMQYAGLPSINSLESIYNFCDKPWVFAQMVAIFKTLGGEKFPLIEQTYYPNHREMLTLPTFPVVVKIGHAHSGMGKVKVENHYDFQDIASVVALTQTYATAEPFIDAKYDIRVQKIGNNYKAYMRTSISGNWKTNTGSAMLEQIAMSDRYKLWVDACSEMFGGLDICAVKAVHGKDGKDYIFEVMDCSMPLIGEHQVEDRQLITDLVISKMNQLLSRTPALSPQRPLTTQQPQSGTLKEPDSSKTPPQRPAPQGGPGQPQGMQPPGKVLPPRRLPSGPSLPPSSSSSSSSSSSSSAPQRPGGPTSTQVNASSSSNSLAEPQAPQAAPPQKPQPHPQLNKSQSLTNAFSFSESSFFRSSANEDEAKAETIRSLRKSFASLFSD

SEQ ID NO: 3578 - DNA, 2074 bp, Homo sapiens
  ref <308>: DATABASE ACCESSION NUMBER: EMBL / U40215
  ref <309>: DATABASE ENTRY DATE: 1999-07-01
ctccctccgcgccaccagaccccgtagccccgcgcgcccccagccctttaagccagatgatgaacttcctgcggcgccggctgtcggacagcagcttcatcgccaacctgcccaacggctacatgaccgacctgcagcggcccgagccccagcagccgccgccgccgccgccccccggtccgggcgccgcctcggcctcggcggcgcccccgaccgcctcgccgggcccggagcggaggccgccgcccgcctcggcgcccgccgcgcagcccgcgccgacgccgtcggtgggcagcagcttcttcagctcgctgtcccaagccgtgaagcagacggccgcctcggctggcctggtggacgcgcccgctcccgcgcccgcagccgccaggaaggccaaggtgctgctggtggtcgacgagccgcacgccgactgggccaagtgctttcggggcaaaaaagtccttggagattatgatatcaaggtggaacaggcagaattttcagagctcaacctggtggcccatgcagatggcacctatgctgtggatatgcaggttctccggaatggcacaaaggttgtccggtccttccggccagacttcgtgctcatccggcagcatgcatttggcatggcggagaatgaggacttccgccacctgatcattggtatgcagtatgcaggcctccccagcatcaactcactggaatccatatacaacttctgtgacaagccatgggtgtttgcccagctggtcgctatctataagacactgggaggagaaaagttccctctcattgaacagacatactaccccaaccacaaagagatgctgacactgcccacgttccctgtggtggtgaagattggccacgctcactcaggcatgggcaaggtcaaagtggaaaaccactacgacttccaggacattgccagcgtggtggctctcacccagacctatgccactgcagagcctttcattgactccaagtatgacatccgggtccagaagattggcaacaactacaaggcttatatgaggacatcgatctcagggaactggaagacgaacactggctctgcgatgctggagcagattgccatgtcagacaggtacaaactgtgggtggacacctgctctgagatgtttggcggcctggacatctgtgctgtcaaagctgtacatggcaaagatgggaaagactacatttttgaggtcatggactgtagcatgccactgattggggaacatcaggtggaggacaggcaactcatcaccgaactagtcatcagcaagatgaaccagctgctgtccaggactcctgccctgtctcctcagagacccctaacaacccagcagccacagagcggaacacttaaggatccggactcaagcaagaccccacctcagcggccaccccctcaaggttgtttacagtatattctcgactgtaatggcattgcagtagggccaaaacaagtccaagcttcttaaaatgattggtggttaatttttcaaagcagaaattttaagccaaaaacaaacgaaaggaaagcggggaggggaaaacagaccctcccactggtgccgttgctgcgttctttcaatgctgactggactgtgtttttcctatgacgtgtcagctcctctgtctggttgtttacctgttcctgttcgtgcttgtaatgctcacttatgttttctctgtataacttgtgattccagggctgtttgtcaacagtatacaaaagaattgtgcctctcccaagtccagtgtgactttatcttctgggtggtttgatagtgtttttaaaagtaatatataatgtggggtgaaatgggagtagggggtggacaggggagaaacgaaaaccacaaaaagaaacccaactcctctcctccccaagctcagttaaatcccccaccttcccaacctttccctccaccagtgtgcttgggatcttcaatgaactgtgctttcgcttcttctgcatgactattataactagatagaacattaagagatttcaagatcaactccatagcttctaccactgaattgaggcatcaccttt

SEQ ID NO: 3579 - protein, 582 aa, Homo sapiens [sequence omitted]

SEQ ID NO: 3580 - DNA, 334 bp, Rattus norvegicus
  misc_feature (1)..(334): n=a, c, g or t
  ref <308>: DATABASE ACCESSION NUMBER: EMBL / M28255
  ref <309>: DATABASE ENTRY DATE: 2002-03-27
ggcggggtcctggatatcaccattgggctcacttcctgcttcgtgtgttgtcttctacctgcgggctgggtcctgtcacacctggaaagctacaagaagcgggagtgaagggagcgtcttccctcatcctttgactagaccactcttgccagcccaccttgatcatgtttcctgcattcctggctggcttacccngggatcatgttattcaattccagtcacctcttctgcaatcatgacctctcgatgtctccatggtgacaactgggaccacatatattggttctgcttgatggggtccccctttgtaacaataaagtctatttaaaccttg

SEQ ID NO: 3581 - protein, 44 aa, Rattus norvegicus; identical to SEQ ID NO: 3251
  ref <308>: DATABASE ACCESSION NUMBER: SWISS-Prot / P80433
  ref <309>: DATABASE ENTRY DATE: 2002-06-15

SEQ ID NO: 3582 - DNA, 2787 bp, Rattus norvegicus
  ref <308>: DATABASE ACCESSION NUMBER: EMBL / M28648
  ref <309>: DATABASE ENTRY DATE: 2000-03-04
atgaatcttaaaaaagatgacaagagctcgcccaagaagagcaaggccaaagagcgccgggacctggatgacctcaagaaggaagtggctatgacagagcataaaatgtcagtagaagaggtctgccggaaatacaataccgactgcgtgcagggtctgacacacagtaaagcccaggagatcctagcccgggatgggcctaacgccctcacaccaccgcccaccaccccagaatgggtcaagttctgccgacagctatttggtggcttctccatcctgctgtggatcggggcgatcctttgcttcctgcgctatggcatccaggcagggactgaggatgaaccttccggtgacaatctgtacctgggcatagtgctggccggtgtggtgatcatcaccggctgcttctcctactaccaagaagccaagagctctaagattatgcagtccttcacgaacatggttccccagcaagcccttgtgatccgggaaggtgataagatgcaggtgaatgcggaggaggtggtcgtcggggacctggtggagatcaagggtggcgatcgggtgcccgctgagctgggcatcatctcggcccatcggtgcaaggtggacaactcttccctgactggcgaatctgagcctcagacccgctccccggactgcacacacgacaacccattggagacccggaacatcaccttcttttccaccaactgtgtggaaggcaccgctcgtggtgtggtggtagccacaggtgaccgcaccgtcatgggccgcattgccaccctggcctcaggcctggaggtgggcaagacgcccatcgccattgagatcgagcacttcatccagctcatcactggcgtggccgtgttcctgggcgtctccttcttcatcctctccctcattctgggctacacctggctggaggctgtcatcttcctcatcggtatcattgtggccaatgtcccagagggcctgctggctactgtcacggtgtgtctgacgctgaccgcaaggatggctcggaagaactgtctggtaaagaacctggaggcggtggagacgctaggctccacatccaccatctgctccgacaagaccggcaccctcacccagaaccgcatgaccgtcgcccacatgtggtttgacaaccagatccacgaggccgacactactgaggatcagtcagggacctctttcgacaagagctcacacacctgggtggccctgtcccacatcgccggtctctgcaaccgggctgtctttaagggcgggcaggataacatccctgtactcaagagggacgtggcgggtgatgcctcagagtccgccctgcttaagtgcatcgagctgtcctcgggttccgtaaagctgatgcgcgaacgaaacaagaaagtcgccgagattcccttcaactccactaacaaataccagctatccatccatgagactgaggaccccaatgacaaccgatacctgttagtgatgaagggcgcccctgaacgcattctggaccgctgtgcgaccatcctcctgcagggcaaggagcagcctctggatgaggagatgaaggaggccttccagaacgcctacctggagcttggtggcctgggcgagcgtgtgctgggtttctgccattactacctgccggaggaacagttccccaagggctttgcctttgactgtgatgacgtgaacttcaccacagacaacctttgcttcgtgggtctcatgtccatgatcgaccctccccgggcagctgtccctgatgctgttggcaaatgccgcagtgcaggcatcaaggtcatcatggtcaccggcgatcaccccatcactgcgaaggccatcgccaaaggtaagggcatcatctccgagggtaacgagactgtggaggacatcgctgcccggctcaacatccctgtcagccaggtcaaccccagggatgccaaagcctgtgtgattcatggcactgacctcaaggacttcacctctgagcagattgacgagatcctccagaaccacactgagatcgtctttgcccgaacctcccctcagcagaagctcatcatcgtggagggctgtcagagacagggagcaattgtggctgtgactggcgatggtgtgaatgactcccctgctctgaagaaggctgatattggggtggccatgggcattgctggctctgatgtctctaagcaggctgccgacatgattctgctggatgacaattttgcttccattgtcactggtgtggaggaaggccgcctgatctttgacaacctgaagaaatccatcgcctacactctgaccagcaacatccctgagatcacacccttccttctcttcatcatggccaacatcccactgccccttggcaccatcaccatcctctgcattgacctgggcaccgacatggaccctacaatctccttggcctacgaggctgcagagagtgacatcatgaagaggcagcccaggaacccacgcacagacaaactggtcaacgaaaggctcatcagcatggcctatgggcagatcgggatgatccaggccctcggaggtttcttctcctactttgtcatcctggcagaaaatggtttcttgcccggtaacctggtgggcatccggctcaactgggatgaccgcactgtcaacgacctggaagacagctacgggcagcagtggacttatgagcagaggaaggtggttgagttcacgtgccacacagccttcttcgtgagcatagtggtggtccagtgggctgacctgatcatttgcaagaccagg

SEQ ID NO: 3583 - protein, 1013 aa, Rattus norvegicus
  ref <308>: DATABASE ACCESSION NUMBER: SWISS-Prot / AAA41672
  ref <309>: DATABASE ENTRY DATE: 2002-06-15
MGDKKDDKSSPKKSKAKERRDLDDLKKEVAMTEHKMSVEEVCRKYNTDCVQGLTHSKAQEILARDGPNALTPPPTTPEWVKFCRQLFGGFSILLWIGAILCFLAYGIQAGTEDDPSGDNLYLGIVLAAVVIITGCFSYYQEAKSSKIMESFKNMVPQQALVIREGEKMQVNAEEVVVGDLVEIKGGDRVPADLRIISAHGCKVDNSSLTGESEPQTRSPDCTHDNPLETRNITFFSTNCVEGTARGVVVATGDRTVMGRIATLASGLEVGKTPIAIEIEHFIQLITGVAVFLGVSFFILSLILGYTWLEAVIFLIGIIVANVPEGLLATVTVCLTLTAKRMARKNCLVKNLEAVETLGSTSTICSDKTGTLTQNRMTVAHMWFDNQIHEADTTEDQSGTSFDKSSHTWVALSHIAGLCNRAVFKGGQDNIPVLKRDVAGDASESALLKCIELSSGSVKLMRERNKKVAEIPFNSTNKYQLSIHETEDPNDNRYLLVMKGAPERILDRCATILLQGKEQPLDEEMKEAFQNAYLELGGLGERVLGFCHYYLPEEQFPKGFAFDCDDVNFTTDNLCFVGLMSMIDPPRAAVPDAVGKCRSAGIKVIMVTGDHPITAKAIAKGVGIISEGNETVEDIAARLNIPVSQVNPRDAKACVIHGTDLKDFTSEQIDEILQNHTEIVFARTSPQQKLIIVEGCQRQGAIVAVTGDGVNDSPALKKADIGVAMGIAGSDVSKQAADMILLDDNFASIVTGVEEGRLIFDNLKKSIAYTLTSNIPEITPFLLFIMANIPLPLGTITILCIDLGTDMVPAISLAYEAAESDIMKRQPRNPRTDKLVNERLISMAYGQIGMIQALGGFFSYFVILAENGFLPGNLVGIRLNWDDRTVNDLEDSYGQQWTYEQRKVVEFTCHTAFFVSIVVVQWADLIICKTRRNSVFQQGMKNKILIFGLFEETALAAFLSYCPGMDVALRMYPLKPSWWFCAFPYSFLIFVYDEIRKLILRRNPGGWVEKETYY

SEQ ID NO: 3584 - DNA, 587 bp, Homo sapiens
  ref <308>: DATABASE ACCESSION NUMBER: EMBL / M37457
  ref <309>: DATABASE ENTRY DATE: 2000-03-04
tctttgtctctccaggttcggtggagaaggaaacctactactgacctcagccccaccacatcgcccatctcttccccgtccgcaggccaggaccgcccctgtcagtccccccaattttgtattctggggggaggagccctcttcctgtggccccaccttggcccccaccccctccactatctcctgccgcccccactctggctggcttctctcccctgccccaaacctctctcctctctcttttctgtgtcagtttctctccctctcctcacccctctatccattcctcccgccccagccacctccctgggctcttttttactccccttcagccccccggtgatgccatctctggttctggacaattatcaaatatatcagtggggagagagaagcggtgtgtgtgttgtgcctgctttccagacggggactgcggctgggacagcatcccctctgttggggcgcgctgccaggcgactctcgaaactgcaggaacttagcctggcactggcttggaagtcacggaatctcagagccatctaatcacggagttttcaactccacgaaagtcagagcagcttgaattc

SEQ ID NO: 3585 - protein, 1013 aa, Homo sapiens; identical to SEQ ID NO: 1523
  ref <308>: DATABASE ACCESSION NUMBER: SWISS-Prot / P13637
  ref <309>: DATABASE ENTRY DATE: 2002-06-15

SEQ ID NO: 3586 - DNA, 2787 bp, Rattus norvegicus; identical to SEQ ID NO: 3582
  ref <308>: DATABASE ACCESSION NUMBER: EMBL / M28648
  ref <309>: DATABASE ENTRY DATE: 2000-03-04

SEQ ID NO: 3587 - protein, 1013 aa, Rattus norvegicus; identical to SEQ ID NO: 3583
  ref <308>: DATABASE ACCESSION NUMBER: SWISS-Prot / AAA41672
  ref <309>: DATABASE ENTRY DATE: 2002-06-15

SEQ ID NO: 3588 - DNA, 4346 bp, Rattus norvegicus
  misc_feature (1)..(4346): n=a, c, g or t
  ref <308>: DATABASE ACCESSION NUMBER: EMBL / M29249
  ref <309>: DATABASE ENTRY DATE: 2000-03-04
ataagcgcagttccttccgccctggtctccnttggctggagacggcggaagggcggcttggtggcctccattgagatccggaggatccaaggactgtgtagctacaatgttgtcaagacttttccgtatgcatggcctctttgtggcctcccatccctgggaggtaattgtgggaacggtgacacttactatctgtatgatgtccatgaacatgttcaccggcaacaacaagatctgtggttggaattatgagtgcccaaaatttgaagaggacgtgctgagcagcgacatcatcatcctcacgataacccggtgcatcgccatcctgtacatctacttccagttccagaacctgcgtcagcttgggtcaaagtacattttgggtattgccggcctcttcacaattttctcaagtttcgtcttcagcactgtcgtcattcatttcctcgacaaagaattgacaggcttaaatgaagctttgccctttttcctgctcttgattgacctttctagagcgagtgcattggccaagtttgccctgagttcaaactcacaggatgaagtaagggagaatatagcgcgtgggatggcgatcctgggccccacgttcacccttgacgctctggtggaatgtcttgtgattggagttggcaccatgtcaggggtgcggcagcttgagatcatgtgctgctttggctgtatgtccgtgcttgccaactactttgtcttcatgacattcttcccagcctgcgtgtccctggtcctagagctttctcgggaaagccgtgagggtcgtccaatttggcagctcagccattttgccagagttttagaagaagaagagaataaaccaaacccagtaacccaaagggtcaagatgatcatgtctttaggcctggttcttgttcacgctcacagtcgctggatagctgatccttctcctcagaacagcacagcagaacagtctaaggtttccttgggtctggctgaagatgtgtccaagagaattgagccgagtgtttctctctggcagttttacctctccaagatgatcagcatggacatcgagcaagtgattaccctgagcttagcgttgcttttggctgtcaagtatattttctttgaacaagcagagacagaatcaacactctcattaaaaaatcctatcacatctcctgtcgtgaccccaaagaaagctcaagacaactgttgtagacgtgagcctctgcttgtgaggaggaaccagaagctttcgtcagtggaggaggatccaggagtgaaccaagacagaaaagttgaggttataaaacctttagtggcagaagccgagacttcgggcagagctacgtttgtgcttggcgcctctgcagccagccctccattggccctgggggcacaggagcctgggatcgaactccccagcgagcctcgacctaatgaagagtgtctacagatactggagagtgcagagaaaggtgcgaagttccttagtgatgcagagatcatccagttggtcaatgctaagcacatcccagcctacaaactggaaaccctcatggagacgcacgagcgtggtgtgtctattcgccggcagctcctctccgccaagcttgcagagccatcttctctgcagtacctgccttacagagactataattactccttggtgatgggagcttgctgtgagaacgtgatcggatatatgcccatccctgttggagtggcaggacctctgtgcctggatggaaaagagtaccaggtgccaatggcaacaacagaaggttgtcttgtggccagcacgaacagaggctgcagagcgatcagtcttggtggaggtgccagcagccgggtccttgcagatgggatgagccgaggcccagtggtgcgtcttcctcgtgcttgtgactcagcagaggtgaagagctggcttgaaacacctgaagggtttgcagtggtaaaggaggccttcgacagcacgagcagatttgcacgtctacagaaacttcacgtgacgctggcaggacgcaacctctacatccgtctccagtccaaaacgggggacgccatggggatgaacatgatttccaagggtacggagaaagcacttctgaagctgcaagagggcgtgccggagctgcagatactggcggtcagtggtaactattgcaccgacaagaaacctgctgccataaactggatcgaagggagaggaaagactgtggtttgtgaagctgtcattccagccaaggtggtgagagaagtattaaagacgactacggaagctatggttgacgtaaacattaacaagaatcttgtgggctctgccatggctggtagcataggaggctacaacctccatgctgccaacatcgtcactgccatctacattgcatgtggccaggatgcagcacagaatgtggggagttcaaactgtattacgttaatggaagcaagtggtcccacaaatgaagacttatacatcagctgtaccatgccgtctatagagatcggaaccgtgggtggtgggaccaaccttctacctcagcaagcctgcctgcagatgctaggtgttcaaggggcgtgcaaagacaatcctggagaaaatgcacggcagcttgcacgaattgtgtgtggcactgtgatggctggtgagttgtccttgatggcagcattggcagcaggacatcttgtcagaagtcacatggttcacaacagatcaaagataaatttacaagatctgcaaggaacatgcaccaagaaggcagcttgagcatcctgacatactggactgaaacacgggcattgggttctccaggactaacatgaaatctgtgaattaaaaatgtcagtgcagtgtcttgtggaagatgaacgtgatcagtgaggcaggcacctgcttggtttctggcctctttagagacgtctgcggtcctttgcacagactcctcagacgtgggaactatggttctttccgtgccgtgttctagaaaatctcatgtggatgtcatgtgctctgagcaccacagatgtgactgcagctcgtttctgaaagctgccacaagctggaagctggtgttttgacgaaatgatggatcctggtgatcagtgtggggctcacctccaatgggttaaaatggagttttaaatgacactgtagctgacagaacttctgatttttatttattcagtctgggttgtagaactttgcaatctaagtttattttttgtaaactaataattcatttggtgctggtctattgatttttggggacctacttcttcatggaagaattacttttattctcaaactacagaataatgtgctaagtagtgctaaatagttctcgacgaagaaaagagtcgctgtgttcatctcagtctttgttcagagaggcctttagctgtgcacagtctgcactaaagacacagagctcttagtgttagagcagagtacaagcaggtcggacctctcaggacttagagtgtgggagcagtttttaaagaaaacaaccattgctctaagccaactttcttgggagacattttaacttatttagctgaattctagatttcttggtaaactatcaaatctgtatatgttgtaataaagtgtctaatgctaggagtttattggaagtgtttaagaaataaaagtactcatcagcttttacacggataaaatgctctagcttgggccagagaagacctcgctcaggagcattggtccgggaaagcctggcttgcttgccgagcctaatgaagggaagtcagcctacagagccagtgatggagccacatgaatggccctggagctgtgtgccttgttcctgtggccaggagttaggtgactgaatcatttatgggctcctttggtggaccccataaaagctcttagcttccctcagggggggtcagcagagttgttgaatcttaattttttttttaatgtaccagtttgtgataaataataataaagagctccttattttgtattctatctaatgcttcgtttggtcttggaagcggacgtctgtgtagaagacggactctgaaagtgagcatcgatgacgcgcgcgcgcgcgactgacgctagtgatggctagatatgtggaaggtagcttcgtgtgtatgtaaagtttccagttgcgcctcttgtgacttttcagccagtaccattttatttacctgagcttgtcgtgggaagtggtagtaaaccgcattgagtgttgatgctggtgacttgtgatcagtgtcatcgtgctaagtccatgttttgtacaattactaaattgtatacattttgttatagaatactttttccagttgagtaattatgaaaggaagtt

SEQ ID NO: 3589 - protein, 887 aa, Rattus norvegicus
  ref <308>: DATABASE ACCESSION NUMBER: SWISS-Prot / P51639
  ref <309>: DATABASE ENTRY DATE: 2002-06-15
MLSRLFRMHGLFVASHPWEVIVGTVTLTICMMSMNMFTGNNKICGWNYECPKFEEDVLSSDIIILTITRCIAILYIYFQFQNLRQLGSKYILGIAGLFTIFSSFVFSTVVIHFLDKELTGLNEALPFFLLLIDLSRASALAKFALSSNSQDEVRENIARGMAILGPTFTLDALVECLVIGVGTMSGVRQLEIMCCFGCMSVLANYFVFMTFFPACVSLVLELSRESREGRPIWQLSHFARVLEEEENKPNPVTQRVKMIMSLGLVLVHAHSRWIADPSPQNSTAEQSKVSLGLAEDVSKRIEPSVSLWQFYLSKMISMDIEQVITLSLALLLAVKYIFFEQAETESTLSLKNPITSPVVTPKKAQDNCCRREPLLVRRNQKLSSVEEDPGVNQDRKVEVIKPLVAEAETSGRATFVLGASAASPPLALGAQEPGIELPSEPRPNEECLQILESAEKGAKFLSDAEIIQLVNAKHIPAYKLETLMETHERGVSIRRQLLSAKLAEPSSLQYLPYRDYNYSLVMGACCENVIGYMPIPVGVAGPLCLDGKEYQVPMATTEGCLVASTNRGCRAISLGGGASSRVLADGMSRGPVVRLPRACDSAEVKSWLETPEGFAVVKEAFDSTSRFARLQKLHVTLAGRNLYIRLQSKTGDAMGMNMISKGTEKALLKLQEGVPELQILAVSGNYCTDKKPAAINWIEGRGKTVVCEAVIPAKVVREVLKTTTEAMVDVNINKNLVGSAMAGSIGGYNLHAANIVTAIYIACGQDAAQNVGSSNCITLMEASGPTNEDLYISCTMPSIEIGTVGGGTNLLPQQACLQMLGVQGACKDNPGENARQLARIVCGTVMAGELSLMAALAAGHLVRSHMVHNRSKINLQDLQGTCTKKAA

SEQ ID NO: 3590 - DNA, 2904 bp, Homo sapiens
  ref <308>: DATABASE ACCESSION NUMBER: EMBL / M11058
  ref <309>: DATABASE ENTRY DATE: 1999-07-02
ttcggtggcctctagtgagatctggaggatccaaggattctgtagctacaatgttgtcaagactttttcgaatgcatggcctctttgtggcctcccatccctgggaagtcatagtggggacagtgacactgaccatctgcatgatgtccatgaacatgtttactggtaacaataagatctgtggttggaattatgaatgtccaaagtttgaagaggatgttttgagcagtgacattataattctgacaataacacgatgcatagccatcctgtatatttacttccagttccagaatttacgtcaacttggatcaaaatatattttgggtattgctggccttttcacaattttctcaagttttgtattcagtacagttgtcattcacttcttagacaaagaattgacaggcttgaatgaagctttgccctttttcctacttttgattgacctttccagagcaagcacattagcaaagtttgccctcagttccaactcacaggatgaagtaagggaaaatattgctcgtggaatggcaattttaggtcctacgtttaccctcgatgctcttgttgaatgtcttgtgattggagttggtaccatgtcaggggtacgtcagcttgaaattatgtgctgctttggctgcatgtcagttcttgccaactacttcgtgttcatgactttcttcccagcttgtgtgtccttggtattagagctttctcgggaaagccgcgagggtcgtccaatttggcagctcagccattttgcccgagttttagaagaagaagaaaataagccgaatcctgtaactcagagggtcaagatgattatgtctctaggcttggttcttgttcatgctcacagtcgctggatagctgatccttctcctcaaaacagtacagcagatacttctaaggtttcattaggactggatgaaaatgtgtccaagagaattgaaccaagtgtttccctctggcagttttatctctctaaaatgatcagcatggatattgaacaagttattaccctaagtttagctctccttctggctgtcaagtacatcttctttgaacaaacagagacagaatctacactctcattaaaaaaccctatcacatctcctgtagtgacacaaaagaaagtcccagacaattgttgtagacgtgaacctatgctggtcagaaataaccagaaatgtgattcagtagaggaagagacagggataaaccgagaaagaaaagttgaggttataaaacccttagtggctgaaacagataccccaaacagagctacatttgtggttggtaactcctccttactcgatacttcatcagtactggtgacacaggaacctgaaattgaacttcccagggaacctcggcctaatgaagaatgtctacagatacttgggaatgcagagaaaggtgcaaaattccttagtgatgctgagatcatccagttagtcaatgctaagcatatcccagcctacaagttggaaactctgatggaaactcatgagcgtggtgtatctattcgccgacagttactttccaagaagctttcagaaccttcttctctccagtacctaccttacagggattataattactccttggtgatgggagcttgttgtgagaatgttattggatatatgcccatccctgttggagtggcaggacccctttgcttagatgaaaaagaatttcaggttccaatggcaacaacagaaggttgtcttgtggccagcaccaatagaggctgcagagcaataggtcttggtggaggtgccagcagccgagtccttgcagatgggatgactcgtggcccagttgtgcgtcttccacgtgcttgtgactctgcagaagtgaaagcctggctcgaaacatctgaagggttcgcagtgataaaggaggcatttgacagcactagcagatttgcacgtctacagaaacttcatacaagtatagctggacgcaacctttatatccgtttccagtccaggtcaggggatgccatggggatgaacatgatttcaaagggtacagagaaagcactttcaaaacttcacgagtatttccctgaaatgcagattctagccgttagtggtaactattgtactgacaagaaacctgctgctataaattggatagagggaagaggaaaatctgttgtttgtgaagctgtcattccagccaaggttgtcagagaagtattaaagactaccacagaggctatgattgaggtcaacattaacaagaatttagtgggctctgccatggctgggagcataggaggctacaacgcccatgcagcaaacattgtcaccgccatctacattgcctgtggacaggatgcagcacagaatgttggtagttcaaactgtattactttaatggaagcaagtggtcccacaaatgaagatttatatatcagctgcaccatgccatctatagagataggaacggtgggtggtgggaccaacctactacctcagcaagcctgtttgcagatgctaggtgttcaaggagcatgcaaagataatcctggggaaaatgcccggcagcttgcccgaattgtgtgtgggaccgtaatggctggggaattgtcacttatggcagcattggcagcaggacatcttgtcaaaagtcacatgattcacaacaggtcgaagatcaatttacaagacctccaaggagcttgcaccaagaagacagcctgaatagcccgacagttctgaactggaacatgggcattgggttctaaaggactaacataaaatctgtgaattaaaaaagctcaatgcattgtcttgtggaggatgaataaatgtgatcactgagacagccacttggtttttggctctttcagagaggtctcaggttctttccatgcagactcctcagatc

SEQ ID NO: 3591 - protein, 888 aa, Homo sapiens [sequence omitted]

SEQ ID NO: 3592 - DNA, 4346 bp, Rattus norvegicus; identical to SEQ ID NO: 3588
  misc_feature (1)..(4346): n=a, c, g or t
  ref <308>: DATABASE ACCESSION NUMBER: EMBL / M29249
  ref <309>: DATABASE ENTRY DATE: 2000-03-04

SEQ ID NO: 3593 - protein, 887 aa, Rattus norvegicus; identical to SEQ ID NO: 3589
  ref <308>: DATABASE ACCESSION NUMBER: SWISS-Prot / P51639
  ref <309>: DATABASE ENTRY DATE: 2002-06-15

SEQ ID NO: 3594 - DNA, 2904 bp, Homo sapiens; identical to SEQ ID NO: 3590
  ref <308>: DATABASE ACCESSION NUMBER: EMBL / M11058
  ref <309>: DATABASE ENTRY DATE: 1999-07-02

SEQ ID NO: 3595 - protein, 888 aa, Homo sapiens [sequence omitted]

SEQ ID NO: 3596 - DNA, 1428 bp, Rattus norvegicus
  ref <308>: DATABASE ACCESSION NUMBER: EMBL / M29293
  ref <309>: DATABASE ENTRY DATE: 2000-03-04
ccgtctgaccgactccttgggtatattagtgcggcatctgcgtgtaacacgttgcctttattatggtggtctgaggttgttgattgtgaaatccaggatgtaggagctatgttgccgcagcctctgggctccgggatccgagagctcttttgtatcggccggtggaatctttggatgttcgagctgtattgccgcgacctgtagattcagggatcgtttacacttgagaagaactactgaacagcacgtgccagagattgaggtccaggtcaaacgtagaaggacagcctcactgagcaaccaagagtgtcacttgtacccacggcgttctcagcaacagcaaattcctgtggtggatttccaggcagaactgagacaggcgttcttagctgagacaccaagaggtggttaaagcagtattggaacttcaaggtggtggaagtcaacaaacacaggacctatccactgattgtgaaactttggtcaagcttacactgtgttaatagcctgcatcaaacctttatttattgcccttctccaagtattaaggatcttgaaattttagtgttgacaactgctattgtggaacagcaatcatgactgtgggtaagagtagcaagatgctccagcatattgactatagaatgagatgtatcctgcaagatggaagaatcttcattggcacctttaaggcttttgacaagcatatgaatttgatcctctgtgattgtgatgagttcaggaagatcaagccaaagaatgcaaaacagccagaacgtgaagaaaaacgggttttgggtctggtcttgctacgtggagagaacttggtttccatgacagtggagggtccacctcctaaagatactggcattgctcgtgtgccacttgctggtgctgcaggtggccctggtgttggaagagcagctggcagaggagtaccagcaggtgtacctattccccaagctcctgctggattagcaggccctgtccgaggagttggaggcccatcccagcaggtcatgaccccacagggaagaggcactgttgcagctgctgctgttgctgctactgctagcattgcaggagccccaacccagtacccgccaggacggggaactccacctccacctgtaggcagagcaaccccacctccaggcattatggctcctccacctggaatgagaccacccatgggcccaccaattggacttccccctgctcgagggacacctataggcatgccccctccaggaatgagaccccctcctccaggaattagaggcccacctcccccaggaatgcgtccaccaagaccctaagatacagttgataaatctcagcccttctctttccctacaatgcttcttgtgaaattgtgtcgcctgcaagcttttgacccctcttactgcattaactatagataatacc

SEQ ID NO: 3597 - protein, 240 aa, Rattus norvegicus [sequence omitted]

SEQ ID NO: 3598 - DNA, 588 bp, Homo sapiens
  misc_feature (1)..(588): n=a, c, g or t
  ref <308>: DATABASE ACCESSION NUMBER: EMBL / AF319523
  ref <309>: DATABASE ENTRY DATE: 2001-03-17
gcggtcagtgacgcgatggagcgggcaagggatcgcttacacctgagacgaactacagaacagcacgtaccagaggtggaagtccaagtcaaacgcagaaggactgcctcactgagcaaccaagagtaatgactccacagggaagaggcactgtagcagctgctgctgttgctgcgactgccagtattgctggagccccaacacagtacccaccaggacggggcactccgcccccacccgtcggcagagcaaccccacctccaggcattatggctcctccacctggtatgagaccacccatgggcccaccaattgggcttccccctgctcgagggacgccaataggcatgccgcctccgggaatgagaccccctccaccaggcattagaggggaagcatttctccttgcattggtttgctggtatggatggcccttagattttggcatgagtgattatgcagcctatttgaagaaaacctgttttctaggacctttttaattaaatatngcctgttacatgagttaaaggcaatcaggatgagtgaaaaattgatttgcagctgacctgcaaatggaatcatcaggaa

SEQ ID NO: 3599 - protein, 240 aa, Homo sapiens [sequence omitted]

SEQ ID NO: 3600 - DNA, 868 bp, Rattus norvegicus
  ref <308>: DATABASE ACCESSION NUMBER: EMBL / M31032
  ref <309>: DATABASE ENTRY DATE: 2001-04-05
cagttgggagaaagtccatagactcctccaagatgcttgtggtcctgctcacagcagccttgctggctctgagctcagctcagggcacggatgaagaggtcaacaatgctgagaccagtgatgtaccagcagattctgaacaacaacccgtggactcgggttcagatccaccttctgctgatgcagatgcagagaatgttcaagagggtgaatcagccccaccagcaaatgaagagcctcctgccacctctgggagtgaagaggaacagcagcagcaggaacccacacaggcagagaatcaagagcctcctgccacctctgggagtgaagaggaacagcagcagcaggaacccacacaggcagagaatcaagagcctcctgccacctctgggagtgaagaggaacagcagcagcagcaacccacacaggcagagaatcaagagcctcctgccacctctgggagtgaagaggaacagcagcagcaggaatccacacaggcagagaatcaagagccttctgactctgctggggaaggacaggaaactcaacctgaggaaggaaatgtagagtcacctccctcttctcctgaaaactcacaagaacaaccacagcaaacaaatccagaggagaaaccgcctgctcctaagactcaggaagagccacagcactatagaggtcgtcctccaaagaagatttttccttttttcatttacagaggaagaccagtagtagtattcaggctcgagcctaggaatccattcgccagaagattttagagagtacctgagaagattatgaccttcagatgtgtaggtcaacaaatcactgttgattgtctataatattccaataaaaattttcagcatgc

SEQ ID NO: 3601 - protein, 247 aa, Rattus norvegicus
  ref <308>: DATABASE ACCESSION NUMBER: SWISS-Prot / AAA40969
  ref <309>: DATABASE ENTRY DATE: 2002-06-15
MLVVLLTAALLALSSAQGTDEEVNNAETSDVPADSEQQPVDSGSDPPSADADAENVQEGESAPPANEEPPATSGSEEEQQQQEPTQAENQEPPATSGSEEEQQQQEPTQAENQEPPATSGSEEEQQQQQPTQAENQEPPATSGSEEEQQQQESTQAENQEPSDSAGEGQETQPEEGNVESPPSSPENSQEQPQQTNPEEKPPAPKTQEEPQHYRGRPPKKIFPFFIYRGRPVVVFRLEPRNPFARRF

SEQ ID NO: 3602 - DNA, 507 bp, Homo sapiens
  ref <308>: DATABASE ACCESSION NUMBER: Refseq / NM_007244
  ref <309>: DATABASE ENTRY DATE: 2002-01-25
cagagcctccttcaagatgctgctggtcctgctctcagtggtccttctggctctgagctcagctcagagcacagataatgatgtgaactatgaagactttactttcaccataccagatgtagaggactcaagtcagagaccagatcagggaccccagagacctcctcctgaaggactcctacctagaccccctggtgatagtggtaaccaagatgatggtcctcagcagagaccaccaaaaccaggaggccatcaccgccatcctcccccacctccttttcaaaatcagcaacgaccaccccaacgaggacaccgtcaactctctctaccccgatttccttctgtcagcctgcaggaagcatcatcattcttccggagggacagaccagcaagacatccccaggagcaaccactctggtaatctagaattcagtggcagaaaataaataagaagataacttccttcagaaagccatgacattgaaataatgtggtcataactctttc

SEQ ID NO: 3603 - protein, 134 aa, Homo sapiens
  ref <308>: DATABASE ACCESSION NUMBER: SWISS-Prot / Q16378
  ref <309>: DATABASE ENTRY DATE: 2002-06-15
MLLVLLSVVLLALSSAQSTDNDVNYEDFTFTIPDVEDSSQRPDQGPQRPPPEGLLPRPPGDSGNQDDGPQQRPPKPGGHHRHPPPPPFQNQQRPPQRGHRQLSLPRFPSVSLQEASSFFRRDRPARHPQEQPLW

SEQ ID NO: 3604 - DNA, 868 bp, Rattus norvegicus; identical to SEQ ID NO: 3600
  ref <308>: DATABASE ACCESSION NUMBER: EMBL / M31032
  ref <309>: DATABASE ENTRY DATE: 2001-04-05

SEQ ID NO: 3605 - protein, 247 aa, Rattus norvegicus; identical to SEQ ID NO: 3601
  ref <308>: DATABASE ACCESSION NUMBER: SWISS-Prot / AAA40969
  ref <309>: DATABASE ENTRY DATE: 2002-06-15

SEQ ID NO: 3606 - DNA, 507 bp, Homo sapiens; identical to SEQ ID NO: 3602
  ref <308>: DATABASE ACCESSION NUMBER: Refseq / NM_007244
  ref <309>: DATABASE ENTRY DATE: 2002-01-25

SEQ ID NO: 3607 - protein, 134 aa, Homo sapiens; identical to SEQ ID NO: 3603
  ref <308>: DATABASE ACCESSION NUMBER: SWISS-Prot / Q16378
  ref <309>: DATABASE ENTRY DATE: 2002-06-15

SEQ ID NO: 3608 - DNA, 2280 bp, Rattus norvegicus
  ref <308>: DATABASE ACCESSION NUMBER: EMBL / M31178
  ref <309>: DATABASE ENTRY DATE: 2000-03-04
tgtaaatacagggctgaaagtgggagtggcgctccctcttcctgttatccccttggctcagcctcactgcctgatagaaatgtttctaatatggcacctggtcacagtccattgtagctgaactcccaggtcctgcactgtacaaccctcaccttcccagttcccttaccacctaataaagggcctgcctccggacagcgcccggcccgccgcgcccagctcagcctgctcagccctctggtcccgaggttccgctcagcgctctctcaaactagccgctgcaccatggcagaatcccacctgcagtcatctctgatcacagcctcacagttttttgagatctggcttcatttcgacgctgatggaagtggttacctggaaggaaaggagctgcagaacttgatccaggagcttctgcaggcacgaaagaaggctggattggagctatcacctgagatgaaaacctttgtggatcaatatgggcagagagatgatgggaaaataggaattgtagagttggcccatgtcttacccaccgaagagaatttcctgctgctctttcgatgccagcaactgaagtcctgcgaggaattcatgaagacttggagaaagtatgacactgaccacagtggcttcatagaaacggaggaacttaagaactttcttaaggacctgctagagaaagcaaacaagaccgtggatgatacgaaacttgctgagtacacagacctcatgctgaagctgttcgactcaaataatgatgggaagctggagctgacagagatggccaggttactaccagtgcaggaaaatttccttcttaaattccagggaatcaaaatgtgtgggaaagagttcaataaggcttttgagttatatgatcaggatggcaacggatacatagatgaaaatgagctggatgccttactgaaagacctgtgtgagaaaaacaaacaggaattggatattaacaatatttctacatacaagaagaacataatggccttgtcggatggagggaagctgtaccgaacagatcttgcccttattctctctgctggggacaactagagttggtggccacaaccacttgctagtgatacattgtatctaaaaccataactgtgcgctataaaggagtaggctgtattttcttttatatctgtaaattctactgcatatagagaattatccaggatgtgtggcacattcttttctgcttgtttctatactgtttgtaatgtacagtttttgtaagcatataattgaaaagaagaaagtctatgcttaggccagtcagtataatccattttcaaagatgaatctaacatgattctgctttcataaatacagatgaacacttggatttccctaaaactctaccatctcaacaattctagtgtcagatgtgtaaatgcacagctgtcagtgagtaaaagaataattcatgacaagccaagtgttttttaatttaggcaatcatagaactgtcccacaaagcacttctgtgcgttttccatctagtggaagggatgtgcttctgcttgtgaagcaccaaatgtcaatagttaactatggctttatcataaaacgatctccctagagatttaatttactgatcagtggcatgtctactgcttgaatagataccacactgttggttcaagctggcttggtggcaagggaaggtagccagatgacacataaatctgtctgatactatgcctatatttccaagaagtctattgcagagagtatgaccttagcccattttctaaattattttcatgtgttccagatgacaattattctagtaaactgctgttttgtgtcatattctgtgtgtactctctgattaaattcaatgtacctctgaggcctgtcgcagttgggctccggctcctttgcggagcaccatgtcgcagagggggaggagaccctgcagggcgcctgggtagaactgcacttcagcaatgggaatgggagcagcgttccagcttccgtctctatttataatggtgacatggaaaaaatactgctggatgcgcagatgaatctggacgaagcatctccaagagctctcactgtgacagcccacctcgctcccagacaccacaagataccaacaagagctgaaatagcaccacacgtttggtgagaaaaaacagcatgtgtgtctgaggaagattatattgagagaagaagagaagttgaaagtatcctgaagaaaactcagattggatatgggattggtcaagtcggccagaaaatgttcccccc

SEQ ID NO: 3609 - protein, 260 aa, Rattus norvegicus
  ref <308>: DATABASE ACCESSION NUMBER: SWISS-Prot / P07171
  ref <309>: DATABASE ENTRY DATE: 2002-06-15
AESHLQSSLITASQFFEIWLHFDADGSGYLEGKELQNLIQELLQARKKAGLELSPEMKTFVDQYGQRDDGKIGIVELAHVLPTEENFLLLFRCQQLKSCEEFMKTWRKYDTDHSGFIETEELKNFLKDLLEKANKTVDDTKLAEYTDLMLKLFDSNNDGKLELTEMARLLPVQENFLLKFQGIKMCGKEFNKAFELYDQDGNGYIDENELDALLKDLCEKNKQELDINNISTYKKNIMALSDGGKLYRTDLALILSAGDN

SEQ ID NO: 3610 - DNA, 2376 bp, Homo sapiens
  ref <308>: DATABASE ACCESSION NUMBER: EMBL / X06661
  ref <309>: DATABASE ENTRY DATE: 1993-09-12
ccagacacacaccccgctgtacaatggcagaatcccacctgcagtcatccctcatcacagcctcacagtttttcgagatctggctccatttcgacgctgacggaagtggttacctggaaggaaaggagctgcagaacttgatccaggagctccagcaggcgcgaaagaaggctggattggagttatcacctgaaatgaaaacttttgtggatcagtatgggcaaagagatgatggaaaaataggaattgtagagttggctcacgtattacccacagaagagaatttcctgctgctcttccgatgccagcagctgaagtcctgtgaggaattcatgaagacatggagaaaatatgatactgaccacagtggcttcatagaaactgaggagcttaagaactttctaaaggacctgctagaaaaagcaaacaagactgttgatgacacaaaattagccgagtatacagacctaatgctgaaactatttgattcaaataatgatgggaagctggaattaactgagatggccaggttactaccagtgcaggagaattttcttcttaaattccagggaatcaaaatgtgtgggaaagagttcaataaggcttttgagctgtatgatcaggacggcaatggatacatagatgaaaatgaactggatgctttactgaaggatctgtgcgagaagaataaacaggatctggatattaataatattacaacatacaagaagaacataatggctttgtcggatggagggaagctgtaccgaacggatcttgctcttattctctgtgctggggataactagagttggtggccgcaaccacttgctagtgatacactgtatctaaaaaataactgtgcactataagggagtaggctgtattttcttttatatctgtaaatttaactgcatatagataattatccaggatgtgtggctcattcttttcagcttgtttctatactgtttgtaatatacagtttttgtaaccatatgattgaaaagaagaaagtctatgcttaggccagtcagtacacccaattttaaaaaataacatattcttgctttcacaaatatagttgaacaagatttccctaaaaattccaccaggattaatctctaaaattctagtctctgatttgcaaatgcacatttgtcactgaataatggaattatgtataacaagccaaacattcttattttagacaaccatagaactgtcccacaaaatatttctaagcttatttctaactattaggaggaatgtgcttttccatctaaaatactcaccaaaatatagttaattgtggctttatgaagttaacagtctcattacagatttagtttaccaatcaacagcatgtctactgcttggatccatacaaaactatcggttcaagttgatgtgacaagggaagggagcaccagatgacacataaatctgtctgattctatgcctgtatttccaacaaacttactgtcagagaatatgacctaaatccattttctaaactgttttcatgtgttgcaaattattctagtcaactgctgttttatgtcatactctgtgtaatctctgattaaatttaatatactgcatatcctggtgtctagtttgcatacttcctggattttctttctatgtagaactgttcatttccaccaagggtatctgctgcctctgaaaatatttttttctagctataacaactctattttttactacataattaaattttaatgtaaaattcatagcatcctgattattgaatgttatatcatcaatacttttgtgtattctgtggattctatatttcatattgagatcagcattcaaaatagttctatttctatctgcaaatagtttcaaatgagtttaaaaaaataacatctgaaaagaaatgctaatgtaatcatttatcttatctagcaagaagattctaaaacattctttaacatacatctaagtcagtttcacatatttgtagctagaatatcctatactggttatagttgatatgtaacagttggtgattttagatttctttgattgtgaaacagggagctatgagagatgtgtccatgtgaaatttacagttactgcctaggagttaatgatcgttctgggtcagcttgaatgtccccattctataaattcaacacttattttctgaattcataaaaataaccaaaaaatgtgagctataatgtttccctcaagaacaaacagaaacgagatttgccaaaaactaaaattcaacaaatgatgttgagtgggagattggctttgcctttagcgtgtaaatggaagcactgccattagactgaatttaactactaagaataaataaagaagaaaataaccttaaaa

SEQ ID NO: 3611 - protein, 260 aa, Homo sapiens
  ref <308>: DATABASE ACCESSION NUMBER: SWISS-Prot / P05937
  ref <309>: DATABASE ENTRY DATE: 2002-06-15
AESHLQSSLITASQFFEIWLHFDADGSGYLEGKELQNLIQELQQARKKAGLELSPEMKTFVDQYGQRDDGKIGIVELAHVLPTEENFLLLFRCQQLKSCEEFMKTWRKYDTDHSGFIETEELKNFLKDLLEKANKTVDDTKLAEYTDLMLKLFDSNNDGKLELTEMARLLPVQENFLLKFQGIKMCGKEFNKAFELYDQDGNGYIDENELDALLKDLCEKNKQDLDINNITTYKKNIMALSDGGKLYRTDLALILCAGDN

SEQ ID NO: 3612 - DNA, 2280 bp, Rattus norvegicus; identical to SEQ ID NO: 3608
  ref <308>: DATABASE ACCESSION NUMBER: EMBL / M31178
  ref <309>: DATABASE ENTRY DATE: 2000-03-04

SEQ ID NO: 3613 - protein, 260 aa, Rattus norvegicus; identical to SEQ ID NO: 3609
  ref <308>: DATABASE ACCESSION NUMBER: SWISS-Prot / P07171
  ref <309>: DATABASE ENTRY DATE: 2002-06-15

SEQ ID NO: 3614 - DNA, 2376 bp, Homo sapiens; identical to SEQ ID NO: 3610
  ref <308>: DATABASE ACCESSION NUMBER: EMBL / X06661
  ref <309>: DATABASE ENTRY DATE: 1993-09-12

SEQ ID NO: 3615 - protein, 260 aa, Homo sapiens; identical to SEQ ID NO: 3611
  ref <308>: DATABASE ACCESSION NUMBER: SWISS-Prot / P05937
  ref <309>: DATABASE ENTRY DATE: 2002-06-15

SEQ ID NO: 3616 - DNA, 1675 bp, Rattus norvegicus
  ref <308>: DATABASE ACCESSION NUMBER: EMBL / M31788
  ref <309>: DATABASE ENTRY DATE: 2000-03-04
ggcctctctccgggcctctcgacctcacggtgttgccaaaatgtcgctttctaacaagctgactttggacaagctggacgtgaaggggaagcgggtcgtgatgagggtggacttcaatgttcctatgaagaacaaccagataacgaataaccaaaggatcaaggctgctgtcccaagcatcaaattctgcttggacaatggagccaactcggttgtgcttatgagccacctgggccgtcctgatggtgtgcccatgcccgacaagtactccttagagccagttgctgcagaactcaaatctctgctgggcaaggatgttctgttcttgaaggattgtgtgggctcagaagtagagaatgcctgtgccaacccagcggctgggactgtcatcctcctggagaacctccgctttcatgtagaggaagaagggaagggaaaagatgcttctgggaacaaggttaaagctgagccagctaaaattgatgctttccgagcctccctgtccaaacttggagatgtctatgtcaatgatgcttttgggactgcacacagagcccacagttccatggtgggtgtgaatctgccacagaaggctggtggatttttgatgaagaaggagctgaactactttgccaaggctttggagagtccagagcgacccttcctggctatcttgggaggagctaaagttgcagacaagatccagctgatcaataatatgctagacaaagtcaatgagatgatcatcggtgggggaatggcttttaccttccttaaggtgctcaacaacatggagattggcacatctctgtatgatgaagagggagccaagattgtcaaagatctcatgaccaaagctgagaaaaatggtgtgaagattaccttgcctgttgactttgtcactgctgacaaatttgatgagaatgcaaagactggccaagctactgtggcctctggtatacctgctggctggatgggcttggactgtggtactgagagcagtaagaaatatgctgaggctgtggctcgagctaagcagattgtttggaacggccctgttggggtatttgaatgggaagcatttgccaggggaaccaagtccctcatggatgaggtggtgaaagccacgtctaggggctgcatcactatcataggtggtggagacaccgccacttgctgtgccaaatggaacacagaggataaagtcagccatgtgagcactgggggcggcgccagtttggagctcctggaaggtaaagtccttcctggggtggatgctctcagcaatgtttagtattttcctgccttttggttcctgtgcacagcccctaagtcgacttagtgttttccgcatctccatttggtgttagtgcagctagtggccaagacgagcaccaggaacctaagcagcagctgcacagcatctcagctcgtctttactgcatgggattcattatagttaagtccatttaatttcttagtgactaaaccttgcattaaggcatatatttatactctgcctgtgaaaggaagtgagctgtaaaagcttagctctcttcgctgtatgtagcctctggttagcctgtcactgttcatgacagcatggaaataacgatgaggattccagctgtaggtttgggaggttgatgatattgaaccaataaaagatcccact

SEQ ID NO: 3617 - protein, 416 aa, Rattus norvegicus
  ref <308>: DATABASE ACCESSION NUMBER: SWISS-Prot / P16617
  ref <309>: DATABASE ENTRY DATE: 2002-06-15
SLSNKLTLDKLDVKGKRVVMRVDFNVPMKNNQITNNQRIKAAVPSIKFCLDNGANSVVLMSHLGRPDGVPMPDKYSLEPVAAELKSLLGKDVLFLKDCVGSEVENACANPAAGTVILLENLRFHVEEEGKGKDASGNKVKAEPAKIDAFRASLSKLGDVYVNDAFGTAHRAHSSMVGVNLPQKAGGFLMKKELNYFAKALESPERPFLAILGGAKVADKIQLINNMLDKVNEMIIGGGMAFTFLKVLNNMEIGTSLYDEEGAKIVKDLMTKAEKNGVKITLPVDFVTADKFDENAKTGQATVASGIPAGWMGLDCGTESSKKYAEAVARAKQIVWNGPVGVFEWEAFARGTKSLMDEVVKATSRGCITIIGGGDTATCCAKWNTEDKVSHVSTGGGASLELLEGKVLPGVDALSNV

SEQ ID NO: 3618 - DNA, 1767 bp, Homo sapiens
  ref <308>: DATABASE ACCESSION NUMBER: Refseq / NM_000291
  ref <309>: DATABASE ENTRY DATE: 2002-11-05
aagcctccggagcgcacgtcggcagtcggctccctcgttgaccgaatcaccgacctctctccccagctgtatttccaaaatgtcgctttctaacaagctgacgctggacaagctggacgttaaagggaagcgggtcgttatgagagtcgacttcaatgttcctatgaagaacaaccagataacaaacaaccagaggattaaggctgctgtcccaagcatcaaattctgcttggacaatggagccaagtcggtagtccttatgagccacctaggccggcctgatggtgtgcccatgcctgacaagtactccttagagccagttgctgtagaactcaaatctctgctgggcaaggatgttctgttcttgaaggactgtgtaggcccagaagtggagaaagcctgtgccaacccagctgctgggtctgtcatcctgctggagaacctccgctttcatgtggaggaagaagggaagggaaaagatgcttctgggaacaaggttaaagccgagccagccaaaatagaagctttccgagcttcactttccaagctaggggatgtctatgtcaatgatgcttttggcactgctcacagagcccacagctccatggtaggagtcaatctgccacagaaggctggtgggtttttgatgaagaaggagctgaactactttgcaaaggccttggagagcccagagcgacccttcctggccatcctgggcggagctaaagttgcagacaagatccagctcatcaataatatgctggacaaagtcaatgagatgattattggtggtggaatggcttttaccttccttaaggtgctcaacaacatggagattggcacttctctgtttgatgaagagggagccaagattgtcaaagacctaatgtccaaagctgagaagaatggtgtgaagattaccttgcctgttgactttgtcactgctgacaagtttgatgagaatgccaagactggccaagccactgtggcttctggcatacctgctggctggatgggcttggactgtggtcctgaaagcagcaagaagtatgctgaggctgtcactcgggctaagcagattgtgtggaatggtcctgtgggggtatttgaatgggaagcttttgcccggggaaccaaagctctcatggatgaggtggtgaaagccacttctaggggctgcatcaccatcataggtggtggagacactgccacttgctgtgccaaatggaacacggaggataaagtcagccatgtgagcactgggggtggtgccagtttggagctcctggaaggtaaagtccttcctggggtggatgctctcagcaatatttagtactttcctgccttttagttcctgtgcacagcccctaagtcaacttagcattttctgcatctccacttggcattagctaaaaccttccatgtcaagattcagctagtggccaagagatgcagtgccaggaacccttaaacagttgcacagcatctcagctcatcttcactgcaccctggatttgcatacattcttcaagatcccatttgaattttttagtgactaaaccattgtgcattctagagtgcatatatttatattttgcctgttaaaaagaaagtgagcagtgttagcttagttctcttttgatgtaggttattatgattagctttgtcactgtttcactactcagcatggaaacaagatgaaattccatttgtaggtagtgagacaaaattgatgatccattaagtaaacaataaaagtgtccattg

SEQ ID NO: 3619 - protein, 417 aa, Homo sapiens
  ref <308>: DATABASE ACCESSION NUMBER: SWISS-Prot / P00558
  ref <309>: DATABASE ENTRY DATE: 2002-06-15
SLSNKLTLDKLDVKGKRVVMRVDFNVPMKNNQITNNQRIKAAVPSIKFCLDNGAKSVVLMSHLGRPDGVPMPDKYSLEPVAVELKSLLGKDVLFLKDCVGPEVEKACANPAAGSVILLENLRFHVEEEGKGKDASGNKVKAEPAKIEAFRASLSKLGDVYVNDAFGTAHRAHSSMVGVNLPQKAGGFLMKKELNYFAKALESPERPFLAILGGAKVADKIQLINNMLDKVNEMIIGGGMAFTFLKVLNNMEIGTSLFDEEGAKIVKDLMSKAEKNGVKITLPVDFVTADKFDENAKTGQATVASGIPAGWMGLDCGPESSKKYAEAVTRAKQIVWNGPVGVFEWEAFARGTKALMDEVVKATSRGCITIIGGGDTATCCAKWNTEDKVSHVSTGGGASLELLEGKVLPGVDALSNIL

SEQ ID NO: 3620 - DNA, 1675 bp, Rattus norvegicus; identical to SEQ ID NO: 3616
  ref <308>: DATABASE ACCESSION NUMBER: EMBL / M31788
  ref <309>: DATABASE ENTRY DATE: 2000-03-04

SEQ ID NO: 3621 - protein, 416 aa, Rattus norvegicus; identical to SEQ ID NO: 3617
  ref <308>: DATABASE ACCESSION NUMBER: SWISS-Prot / P16617
  ref <309>: DATABASE ENTRY DATE: 2002-06-15

SEQ ID NO: 3622 - DNA, 1767 bp, Homo sapiens; identical to SEQ ID NO: 3618
  ref <308>: DATABASE ACCESSION NUMBER: Refseq / NM_000291
  ref <309>: DATABASE ENTRY DATE: 2002-11-05

SEQ ID NO: 3623 - protein, 417 aa, Homo sapiens; identical to SEQ ID NO: 3619
  ref <308>: DATABASE ACCESSION NUMBER: SWISS-Prot / P00558
  ref <309>: DATABASE ENTRY DATE: 2002-06-15

SEQ ID NO: 3624 - DNA, 1341 bp, Rattus norvegicus
  ref <308>: DATABASE ACCESSION NUMBER: EMBL / M32062
  ref <309>: DATABASE ENTRY DATE: 2000-03-04
ccagcaatttcatctcctagacctcatcagactctgacccagttcttgaatgactttggagacccagatgtttcagaatgcacattctggaagccaatggctactcccaccactgacaatgttgctgctgtttgcttttgcagacaggcagacgggagatcttctgaaggctgtggtgaaacgtgatcccccatggatccaggtgctcaaggacgacactgtgacgctgacgtgcgaagggacccacaatcctggaaactcttctacccagtggttccacaaccagagctccacctggggccaggtccaagccagctacacgtttaaggccacagtcaatgacagtggagaataccggtgccgaatggcgcacaccagcctcagcgaccccatacatctggaagtgatttctgactggctgctgctccagacccctcaactggtgtttgaggaaggggaaaccatcacattaaggtgccatagctggaagaacaaacagctgactaaggtcttgttgttccagaatggaaaacctgtgaggtattattatcaaagcagcaatttttcaatccccaaagccaaccacagtcacagtgggaactactactgcaaagcatatctaggaaggacaatgcatgtgtccaagcctgtcaccatcactgtccaaggttcagcaaccgcgtccaccagctctctagtgtggttccatgccgctttctgcctagtgatgtgcctcctgtttgcagtggacaccggcctgtatttctgtgtacggagaaatcttcaaacctcgggggaggactggaggaaatccctgtcagtcggaaagtacaaggctccacaggacaaatgacatcccatcgtatggctaaacagcggcagcttcttttcagccacaccgccgcttcatctacagccttcctttgaaagcaacttaccaccaggctggatatttggtcctgcaatcacaactgctaggaggctgaggcaggaggatcaccaaaggctgcccgggttttagagaagagagagtgcaagtctatcctggataacccaataagaccctgggtttagatggcttatcaggaaagagcacccattgctaagctcacagacaagaccacagattgatccctaaggacacagggcaaagggggagaacaaattcctgaaagttgtcctctgacctccacacgtccaccatggcagatgcacacaataaacaaattaaaatgtaatatatatattttaaacaagaggtggggaaaggctgggggttggtggcacagtttttatccaggacacatgatgctctggattttgacctcctataataaaacg

SEQ ID NO: 3625 - protein, 267 aa, Rattus norvegicus
  ref <308>: DATABASE ACCESSION NUMBER: SWISS-Prot / P27645
  ref <309>: DATABASE ENTRY DATE: 2002-06-15
MTLETQMFQNAHSGSQWLLPPLTMLLLFAFADRQTANLPKAVVKRDPPWIQVLKEDTVTLTCEGTHNPGNSSTQWFHNQSSTWGQVQASYTFKATVNDSGEYRCRMAHTSLSDPVHLEVISDWLLLQTPQLVFEEGETITLRCHSWKNKQLTKVLLFQNGKPVRYYYQSSNFSIPKANHSHSGNYYCKAYLGRTMHVSKPVTITVQGSATASTSSLVWFHAAFCLVMCLLFAVDTGLYFCVRRNLQTSGEDWRKSLSVGKYKAPQDK

SEQ ID NO: 3626 - DNA, 634 bp, Homo sapiens
  ref <308>: DATABASE ACCESSION NUMBER: EMBL / AV703731
  ref <309>: DATABASE ENTRY DATE: 2000-10-03
caggagaaagaacactatggtaatttcattgttacttgaggtctctttcaatctgaagaactgggttgtctggagaattgaacatagccaagcaatattatcaattagtaatgtcatcttaaaaatgttcacttttactaagttttattcagaggatctatgtattattagaaaaatgaagtatttctgacatggaacaaagaaagtggaaactggtacttaatgggggaagcaaaattagctgggactaaaacggacatgttttgttttgtgaattctacctaaatgtctctctatccacagagaaactagtattacttgaagatgtgaaagttcctgtggtagccataccttgaagcacagtgtttgtacataagtaaatatcttgattctaaattaaatccagatttaactaatatatattattttatatctttgttgtattaaaatgtttaaaaacactaaaaataaaacatttgaaagttggattacaaaaaaaaaaaaaaaaaactcgagggggggcccggtacccacttcgccctatagtgagtcgtattacaattcactggcccgccgtttacaacgtcgtgactggggctgcgtaataacgaagaggcccgcaccggtcgccttt

SEQ ID NO: 3627 - protein, 317 aa, Homo sapiens [sequence omitted]

SEQ ID NO: 3628 - DNA, 1341 bp, Rattus norvegicus; identical to SEQ ID NO: 3624
  ref <308>: DATABASE ACCESSION NUMBER: EMBL / M32062
  ref <309>: DATABASE ENTRY DATE: 2000-03-04

SEQ ID NO: 3629 - protein, 267 aa, Rattus norvegicus; identical to SEQ ID NO: 3625
  ref <308>: DATABASE ACCESSION NUMBER: SWISS-Prot / P27645
  ref <309>: DATABASE ENTRY DATE: 2002-06-15

SEQ ID NO: 3630 - DNA, 634 bp, Homo sapiens; identical to SEQ ID NO: 3626
  ref <308>: DATABASE ACCESSION NUMBER: EMBL / AV703731
  ref <309>: DATABASE ENTRY DATE: 2000-10-03

SEQ ID NO: 3631 - protein, 317 aa, Homo sapiens [sequence omitted]

SEQ ID NO: 3632 - DNA, 1341 bp, Rattus norvegicus; identical to SEQ ID NO: 3624
  ref <308>: DATABASE ACCESSION NUMBER: EMBL / M32062
  ref <309>: DATABASE ENTRY DATE: 2000-03-04

SEQ ID NO: 3633 - protein, 267 aa, Rattus norvegicus; identical to SEQ ID NO: 3625
  ref <308>: DATABASE ACCESSION NUMBER: SWISS-Prot / P27645
  ref <309>: DATABASE ENTRY DATE: 2002-06-15

SEQ ID NO: 3634 - DNA, 634 bp, Homo sapiens; identical to SEQ ID NO: 3626
  ref <308>: DATABASE ACCESSION NUMBER: EMBL / AV703731
  ref <309>: DATABASE ENTRY DATE: 2000-10-03

SEQ ID NO: 3635 - protein, 317 aa, Homo sapiens [sequence omitted]

SEQ ID NO: 3636 - DNA, 1341 bp, Rattus norvegicus; identical to SEQ ID NO: 3624
  ref <308>: DATABASE ACCESSION NUMBER: EMBL / M32062
  ref <309>: DATABASE ENTRY DATE: 2000-03-04

SEQ ID NO: 3637 - protein, 267 aa, Rattus norvegicus; identical to SEQ ID NO: 3625
  ref <308>: DATABASE ACCESSION NUMBER: SWISS-Prot / P27645
  ref <309>: DATABASE ENTRY DATE: 2002-06-15

SEQ ID NO: 3638 - DNA, 634 bp, Homo sapiens; identical to SEQ ID NO: 3626
  ref <308>: DATABASE ACCESSION NUMBER: EMBL / AV703731
  ref <309>: DATABASE ENTRY DATE: 2000-10-03

SEQ ID NO: 3639 - protein, 317 aa, Homo sapiens [sequence omitted]

SEQ ID NO: 3640 - DNA, 1603 bp, Rattus norvegicus
  ref <308>: DATABASE ACCESSION NUMBER: EMBL / M32397
  ref <309>: DATABASE ENTRY DATE: 2000-03-04
cacctcctacagctgccacaagcagctctcttcccccaccatgagagctgtccctctgcacctcgtcgggacagcaagcctcacccttggcttcttgctcctgctatctctccgcctggacccaggccaagccaaggagttgaagtttgtgacattggtgttccggcatggagaccgaggtcccatcgagacctttcctaatgaccccattaaggaatcctcgtggccacaaggatttggccaactcaccaagtggggcatgggacagcactacgaactcggaagttatataaggagaagatacgggagattcttgaacaactcctataaacatgaccaggtttatatccgaagcacagatgttgacaggactctgatgagcgctatgacaaacctcgcagccctgtttccccctgaggggatcagcatctggaatcccagactgctctggcagcccatcccagtgcacaccgtgtctctctctgaggatcggttgctatacctgcctttcagggactgtcctcgctttcaagaactcaagagtgagactttaaaatctgaggagttcctgaagaggcttcaaccatataaaagcttcatagacaccttgccatcgctgtcgggattcgaggaccaggatctttttgaaatctggagtaggctttacgaccctttatattgcgagagtgttcacaatttcaccttccgcacctgggccacagaggacgccatgactaagttgaaggagttgtcagaattatctctgttatctctttatggaattcacaagcagaaagagaaatctagactccaggggggcgtcctggtcaatgaaattctcaagaacatgaagcttgcaactcaaccacagaaggccaggaagttgatcatgtattctgcatatgacactactgtgagtggcctgcagatggcgctagagctttataatggacttctacctccctacgcttcctgccacataatggaattgtaccaggataatggggggaccttcgtggagatgtactaccggaatgagacccagaacgagccctacccactcacgctgccgggctgtacccacagctgccctctggagaagtttgcagagctactggaccccgtgatcccccaggactgggccacagagtgtatgggcacaagcaaccaccaagcgtcgctgtaaaagaacaaccagttgccagtgtaatcaggaaaagagttaggtcaaacttgtgggtctgccggggatccatgattagcacaaagaactctattgctgaaggattcgaagattttgcttgagcgggtgagtaaagctgccctgggaatgtctgatgtaaaaacaggtttcagacgaagcctaccaagttagcgtgcaagcatgaaaaagaagacacttatcccaggctaatgggcaaaggacctgattcacctgacaacaacgctcacctgttcccctgccttctctcacgaggcaaaaagatgagacaggaggacacctggaggagttttccatacccagcctagaacgatcagattttatatgtatgtcaaaagacgctgggtagcagaactgaataataaaagcctcttggtgtcc

SEQ ID NO: 3641 - protein, 381 aa, Rattus norvegicus
  ref <308>: DATABASE ACCESSION NUMBER: SWISS-Prot / P20646
  ref <309>: DATABASE ENTRY DATE: 2002-06-15
MRAVPLHLVGTASLTLGFLLLLSLRLDPGQAKELKFVTLVFRHGDRGPIETFPNDPIKESSWPQGFGQLTKWGMGQHYELGSYIRRRYGRFLNNSYKHDQVYIRSTDVDRTLMSAMTNLAALFPPEGISIWNPRLLWQPIPVHTVSLSEDRLLYLPFRDCPRFQELKSETLKSEEFLKRLQPYKSFIDTLPSLSGFEDQDLFEIWSRLYDPLYCESVHNFTFRTWATEDAMTKLKELSELSLLSLYGIHKQKEKSRLQGGVLVNEILKNMKLATQPQKARKLIMYSAYDTTVSGLQMALELYNGLLPPYASCHIMELYQDNGGTFVEMYYRNETQNEPYPLTLPGCTHSCPLEKFAELLDPVIPQDWATECMGTSNHQASL

SEQ ID NO: 3642 - DNA, 3061 bp, Homo sapiens
  ref <308>: DATABASE ACCESSION NUMBER: EMBL / M34840
  ref <309>: DATABASE ENTRY DATE: 1999-07-02
cggctctcctcaacatgagagctgcacccctcctcctggccagggcagcaagccttagccttggcttcttgtttctgctttttttctggctagaccgaagtgtactagccaaggagttgaagtttgtgactttggtgtttcggcatggagaccgaagtcccattgacacctttcccactgaccccataaaggaatcctcatggccacaaggatttggccaactcacccagctgggcatggagcagcattatgaacttggagagtatataagaaagagatatagaaaattcttgaatgagtcctataaacatgaacaggtttatattcgaagcacagacgttgaccggactttgatgagtgctatgacaaacctggcagccctgtttcccccagaaggtgtcagcatctggaatcctatcctactctggcagcccatcccggtgcacacagttcctctttctgaagatcagttgctatacctgcctttcaggaactgccctcgttttcaagaacttgagagtgagactttgaaatcagaggaattccagaagaggctgcacccttataaggattttatagctaccttgggaaaactttcaggattacatggccaggacctttttggaatttggagtaaagtctacgaccctttatattgtgagagtgttcacaatttcactttaccctcctgggccactgaggacaccatgactaagttgagagaattgtcagaattgtccctcctgtccctctatggaattcacaagcagaaagagaaatctaggctccaagggggtgtcctggtcaatgaaatcctcaatcacatgaagagagcaactcagataccaagctacaaaaaacttatcatgtattctgcgcatgacactactgtgagtggcctacagatggcgctagatgtttacaacggactccttcctccctatgcttcttgccacttgacggaattgtactttgagaagggggagtactttgtggagatgtactatcggaatgagacgcagcacgagccgtatcccctcatgctacctggctgcagccctagctgtcctctggagaggtttgctgagctggttggccctgtgatccctcaagactggtccacggagtgtatgaccacaaacagccatcaaggtactgaggacagtacagattagtgtgcacagagatctctgtagaaagagtagctgccctttctcagggcagatgatgctttgagaacatactttggccattaccccccagctttgaggaaaatgggctttggatgattattttatgttttagggacccccaacctcaggcaattcctacctcttcacctgaccctgcccccacttgccataaaacttagctaagttttgttttgtttttcagcgttaatgtaaaggggcagcagtgccaaaatataatcagagataaagcttaggtcaaagttcatagagttcccatgaactatatgactggccacacaggatcttttgtatttaaggattctgagattttgcttgagcaggattagataagtctgttctttaaatttctgaaatggaacagatttcaaaaaaaattcccacaatctagggtgggaacaaggaaggaaagatgtgaataggctgatggggaaaaaaccaatttacccatcagttccagccttctctcaaggagaggcaaagaaaggagatacagtggagacatctggaaagttttctccactggaaaactgctactatctgtttttatatttctgttaaaatatatgaggctacagaactaaaaattaaaacctctttgtgtcccttggtcctggaacatttatgttccttttaaagaaacaaaaatcaaactttacagaaagatttgatgtatgtaatacatatagcagctcttgaagtatatatatcatagcaaataagtcatctgatgagaacaagctatttgggcacaacacatcaggaaagagagcaccacgtgatggagtttctccagaagctccagtgataagagatgttgactctaaagttgatttaaggccaggcatggtggtttacgcctataatcccagcattttgggactccgaggtgggcagatcacttgagctcaggagctcaagatcagcctgggcaacatggtgaaaccttgtctctacataaaatacaaaaacttagatgggcatggtgctgtgtgcctatagtccactacttgtggggctaaggcaggaggatcacttgagccccggaggtcgaggctacagtgacccaagagtgcactactgtactccagccagggcaagagagcgagaccctgtctcaataaataaataaataaataaataaataaataaataaaaacaaagttgattaagaaaggaagtataggccaggcacagtggctcacacctgtaatccttgcattttggaaggctgaggcaggaggatcactttaggcctggtgtgttcaagaccagcctggtcaacatagtgagacactgtctctaccaaaaaaaggaaggaagggacacatatcaaactgaaacaaaattagaaatgtaattatgttatgttctaagtgcctccaagttcaaaacttattggaatgttgagagtgtggttacgaaatacgttaggaggacaaaaggaatgtgtaagtctttaatgccgatatcttcagaaaacctaagcaaacttacaggtcctgctgaaactgcccactctgcaagaagaaatcatgatatagctttccatgtggcagatctacatgtctagagaacactgtgctctattaccattatggataaagatgagatggtttctagagatggtttctactggctgccagaatctagagcaaagccatcccccctcctggttggtcacagaatgactgacaaagacatcgattgatatgcttctttgtgttatttccctcccaagtaaatgtttgtccttgggtccattttctatgcttgtaactgtcttctagcagtgagccaaatgtaaaatagtgaataaagtcattattaggaagttcaaaaaaaaaaaa

SEQ ID NO: 3643 - protein, 386 aa, Homo sapiens
  ref <308>: DATABASE ACCESSION NUMBER: SWISS-Prot / P15309
  ref <309>: DATABASE ENTRY DATE: 2002-06-15
MRAAPLLLARAASLSLGFLFLLFFWLDRSVLAKELKFVTLVFRHGDRSPIDTFPTDPIKESSWPQGFGQLTQLGMEQHYELGEYIRKRYRKFLNESYKHEQVYIRSTDVDRTLMSAMTNLAALFPPEGVSIWNPILLWQPIPVHTVPLSEDQLLYLPFRNCPRFQELESETLKSEEFQKRLHPYKDFIATLGKLSGLHGQDLFGIWSKVYDPLYCESVHNFTLPSWATEDTMTKLRELSELSLLSLYGIHKQKEKSRLQGGVLVNEILNHMKRATQIPSYKKLIMYSAHDTTVSGLQMALDVYNGLLPPYASCHLTELYFEKGEYFVEMYYRNETQHEPYPLMLPGCSPSCPLERFAELVGPVIPQDWSTECMTTNSHQGTEDSTD

SEQ ID NO: 3644 - DNA, 1603 bp, Rattus norvegicus; identical to SEQ ID NO: 3640
  ref <308>: DATABASE ACCESSION NUMBER: EMBL / M32397
  ref <309>: DATABASE ENTRY DATE: 2000-03-04

SEQ ID NO: 3645 - protein, 381 aa, Rattus norvegicus; identical to SEQ ID NO: 3641
  ref <308>: DATABASE ACCESSION NUMBER: SWISS-Prot / P20646
  ref <309>: DATABASE ENTRY DATE: 2002-06-15

SEQ ID NO: 3646 - DNA, 3061 bp, Homo sapiens; identical to SEQ ID NO: 3642
  ref <308>: DATABASE ACCESSION NUMBER: EMBL / M34840
  ref <309>: DATABASE ENTRY DATE: 1999-07-02

SEQ ID NO: 3647 - protein, 386 aa, Homo sapiens; identical to SEQ ID NO: 3643
  ref <308>: DATABASE ACCESSION NUMBER: SWISS-Prot / P15309
  ref <309>: DATABASE ENTRY DATE: 2002-06-15

SEQ ID NO: 3648 - DNA, 3201 bp, Rattus norvegicus
  ref <308>: DATABASE ACCESSION NUMBER: EMBL / M32867
  ref <309>: DATABASE ENTRY DATE: 2000-03-04
ccgggtaagaaaataagctgccctatttttctttcttcttctcttacaactggaaccagccatttccccaaactaccaccatggaggtggcaatggtgagtgccgagagctcagggtgcaacagccacatgccttatggttatgctgcccaggccagggctcgagagagggagagacttgctcactccagggcagctgcagctctggctgttgcagctgccacggctgcggtggaaggcactggaggttctggtggaggcccccaccatcatcatcagacacgtggggcctactcctcccatgatcctcaaggaagccgaggtagtcggaggaggaggcgacagcgaactgagaagaagaaactccaccacaggcagagcagttttcctcattgctcagacctgatgcccagtggctctgaagagaagatccttagggagctgagcgaggaggaggaagacgaggaggaggaagaggaggaggaagaggagggaaggttttactatagtgaagaggaccatggggatgggtgttcctacactgacctactgccacaggatgatgggggtggcggcggctacagttcagtccgctacagtgactgttgtgaacgcgtggtaataaatgtgtctggtctacgcttcgaaacccaaatgaaaactttggctcagtttccagaaactctgttgggagaccctgagaagaggactcagtacttcgaccctttgcgcaatgagtatttttttgataggaaccgtcccagctttgatgccattttgtattattaccagtcaggaggccgcctgaagaggccagtcaatgtcccctttgatatcttcactgaggaggtgaagttctatcagttgggagaggaagccctgctcaagttccgtgaggatgagggctttgtgagagaagaggaggacagggctctgccagaaaatgaatttaaaaaacagatttggcttctctttgaatatcccgagagttccagccctgccagggcgatagccatcgtatctgtcctggtcatcttaatctctattgtcatattttgcctggaaaccttgcctgagttcagggatgatagggacctcatcatggccctcagcgcaggtggacacagcagattattgaatgacacctcggcaccccacctggagaactcagggcacacaatattcaatgaccctttcttcattgtggagacagtatgtatcgtgtggttttcctttgagtttgtggttcgatgctttgcttgtcccagtcaagcactcttcttcaaaaacatcatgaacatcattgatatcgtctccattttgccttacttcatcactctgggcaccgatctggcccagcagcaggggggtggcaacggccagcagcagcaggctatgtcctttgccatcctcaggatcatccgtctggtccgagtgttccggatcttcaagctctccagacactccaagggcctgcagatcctgggccacaccctaagagccagcatgcgtgaactgggccttcttatctttttcctcttcatcggggtcatcctcttttccagcgctgtgtattttgcagaggcagatgaacctaccacccatttccaaagcattccagatgcgttttggtgggctgtggtaaccatgacaactgtgggctacggggacatgaagcccatcacagtgggaggaaagattgtggggtccctgtgtgccattgcgggtgtcttaaccattgctttgcccgtgccggtgattgtgtctaactttaactatttctaccacagagagactgaaaacgaagaacagacccagctgacccaaaacgcagtcagttgcccatacctaccttctaatttgctcaagaaatttcggagctctacttcttcttccctgggggacaagtcagagtatctagagatggaagaaggggtcaaggagtctttatgtggaaaggaagagaagtgtcagggaaagggggatgacagcgagacagataaaaacaactgttctaatgcaaaggctgtggagactgatgtgtgaatctctttccccacctgccgtgccgccgcccagctccgaatatattcatacataaagaatgcagttatgaaaatgagatatgcactgcatacagtaatacactgcttaatggcgatacatggcataattgtggcgaaacgtgtattgcatatcaaataagtgatgcatcttggagaagagggaggcattaaaaacagcagatctatctttatattttttaatagaatgcaagaattttgcacataatgggaaaatgttaatagtaaaggtggtcccgaggagagtgagtgtgtgtgagagagtgagagagtgtgtggccatgggagtgtaagtaaattgtcaacattgttgggaattgtgccgtgatgggaaaagttggcattctgaagtatttactatgtaagaactaatgaacttgagcagtcttttaccagtgttttaataacatctcctatgtctttggattctgtagttgttttctagaaattgtaagaattactgtgtagaaaaaagagaaagtaaattatttaatagtatataggtcacaatttaatcttggatttaattaaagtttatttttaactggaaattaacttttgaaaaggctgcagggccttagaaattgattatattttgttattaattttgggagatatactagcaaatgcctaatgttctggaggaaatgtaacaagttttgttcacaggtcttaagactggaatttttttttcttttgcactactttctatgctgaagcccgagagagacttcatactgtgaatgtttactaacgcaccaatcagttcaatgacaatcattggaagaatggtttcttcgtctcatttattgttcttttcattttgtgagactaatgagcacacagataacagcacacgattcctgctttaaaatctgaacaaccgatctacaaagggactacgaagtaacgttcagcagccgaatctttcaaaattggtttgttacaatgatgcttcagaaaccatactattttcaatactcttctgccttttaagtccagaataatttaaccaaagttattgcatgcacagaaagaattccggcattttgttgcatatttaataaaaagatcttaagccataattgctgtagctgctgggcgccttatttctccaa

SEQ ID NO: 3649 - protein, 655 aa, Rattus norvegicus
  ref <308>: DATABASE ACCESSION NUMBER: SWISS-Prot / P15385
  ref <309>: DATABASE ENTRY DATE: 2002-06-15
MEVAMVSAESSGCNSHMPYGYAAQARARERERLAHSRAAAAAAVAAATAAVEGTGGSGGGPHHHHQTRGAYSSHDPQGSRGSREEEATRTEKKKKLHHRQSSFPHCSDLMPSGSEEKILRELSEEEEDEEEEEEEEEEGRFYYSEEDHGDGCSYTDLLPQDDGGGGGYSSVRYSDCCERVVINVSGLRFETQMKTLAQFPETLLGDPEKRTQYFDPLRNEYFFDRNRPSFDAILYYYQSGGRLKRPVNVPFDIFTEEVKFYQLGEEALLKFREDEGFVREEEDRALPENEFKKQIWLLFEYPESSSPARGIAIVSVLVILISIVIFCLETLPEFRDDRDLIMALSAGGHSRLLNDTSAPHLENSGHTIFNDPFFIVETVCIVWFSFEFVVRCFACPSQALFFKNIMNIIDIVSILPYFITLGTDLAQQQGGGNGQQQQAMSFAILRIIRLVRVFRIFKLSRHSKGLQILGHTLRASMRELGLLIFFLFIGVILFSSAVYFAEADEPTTHFQSIPDAFWWAVVTMTTVGYGDMKPITVGGKIVGSLCAIAGVLTIALPVPVIVSNFNYFYHRETENEEQTQLTQNAVSCPYLPSNLLKKFRSSTSSSLGDKSEYLEMEEGVKESLCGKEEKCQGKGDDSETDKNNCSNAKAVETDV

SEQ ID NO: 3650 - DNA, 1962 bp, Homo sapiens
  ref <308>: DATABASE ACCESSION NUMBER: EMBL / L02751
  ref <309>: DATABASE ENTRY DATE: 2000-03-04
atggaggttgcaatggtgagtgcggagagctcagggtgcaacagtcacatgccttatggttatgctgcccaggcccgggcccgggagcgggagaggcttgctcactccagggcagctgcagcagctgctgttgcagcggccacagctgctgtcgaaggtagcgggggttctggtgggggctcccaccaccaccaccagtcacgcggggcctgtacctcccatgaccctcagagcagccggggtagtcggaggaggaggcgacagcggtctgagaagaagaaagcccactaccggcagagcagcttccctcattgctctgacctgatgcccagtggctctgaggagaagatcctgagggagctgagtgaggaggaggaagatgaggaggaggaggaagaggaggaagaggagggaaggttttactatagtgaagatgaccatggtgatgagtgttcctacacggatctgctgcctcaggatgagggcggtggcggctacagttcagtccgctacagtgactgttgtgaacgtgtggtgataaatgtgtcaggcctacgctttgagacccaaatgaaaactctggcccagtttccagagactttgttgggagaccctgaaaagaggactcagtactttgaccctttgcgcaatgagtatttttttgacaggaaccgccccagctttgatgccatcttgtattattatcaatcaggaggccgcctgaagaggccagtcaatgtcccctttgatatcttcactgaggaggtgaagttctatcagttgggggaggaggccctgttgaagtttcgggaggacgagggctttgtgagagaagaggaagacagggccctccccgagaatgaatttaaaaagcagatttggctcctctttgaatatccagagagctccagtcctgcaaggggcatagccattgtgtccgtcctggtcatcttaatctccattgtcatcttttgcctggaaaccttgcctgagtttagggacgacagggatctcgtcatggcactgagtgctggcgggcatggtgggttgttgaatgatacttcagcaccccatctggagaactcaggccacacaatattcaatgaccccttcttcatcgtggaaacagtctgtattgtatggttttcctttgagtttgtggttcgctgctttgcttgtcccagccaagcactcttcttcaaaaacatcatgaacatcattgacattgtctccattttgccttacttcatcacactgggcactgacctggcccagcaacaggggggtggcaatggtcagcagcagcaggccatgtcctttgccatcctcagaatcattcgtctggtccgagtattccggatcttcaaactctccaggcactccaaaggcctgcagatcctgggccacaccctcagagccagcatgcgggaactgggccttctgatcttcttcctcttcattggggtcatcctcttttctagtgctgtgtattttgcagaggcggatgaacctactacccatttccaaagcatcccagatgcattttggtgggctgtggtgaccatgacaactgtgggctatggggacatgaagcccatcactgtagggggcaagattgtcgggtccctgtgtgccattgcgggtgtcttaaccattgctttgccagtgccagtgattgtctctaactttaactatttctaccacagagagactgaaaatgaggaacagacacagctaacgcagaatgcagtcagttgtccatacctcccctctaatttgctcaagaaatttcggagctctacttcttcttccctgggggacaagtcagagtatctagagatggaagaaggagttaaggaatctctgtgtgcaaaggaggagaagtgtcagggaaagggggatgacagtgagacagataaaaacaactgttctaatgcaaaggctgtggagactgatgtgtga

SEQ ID NO: 3651 - protein, 653 aa, Homo sapiens [sequence omitted]

SEQ ID NO: 3652 - DNA, 1994 bp, Rattus norvegicus
  ref <308>: DATABASE ACCESSION NUMBER: EMBL / M33648
  ref <309>: DATABASE ENTRY DATE: 2000-03-04
atctctcccaggggctgtggactgctggctttctgttgataccttagagatgcagcggcttttggctccagcaaggcgggtcctgcaagtgaagagagtcatgcaggaatcttcgctctcacccgctcacctgctccccgcagcccagcagaggttttctacaatccctcctgctcccctggccaaaactgatacatggccaaaagatgtgggcatccttgccctggaggtctactttccagcccaatatgtggaccaaactgacctggagaagttcaacaatgtggaagcagggaagtacacagtgggcttgggccagacccgtatgggcttctgttcggtccaggaggacatcaactccttgtgcctcacagtggtgcagaggctgatggaacgcacaaagctgccatgggatgccgtaggccgcctggaagtgggcacggaaaccatcattgacaagtccaaggctgtcaagacagtgctcatggagctcttccaggattcaggcaacactgacatcgagggcatagataccaccaacgcctgctatggtggcactgcctccctcttcaacgctgccaactggatggagtccagctactgggatggtcgctatgccctggtggtctgtggtgatatcgcagtctacccaagtggtaacccccgccccacaggtggtgccggggctgtggcaatgctgattgggcccaaggccccgctagtcctggaacaagggctgaggggaacccacatggagaacgcctatgacttctacaaaccaaacttggcctcagagtatccactggtggatgggaagctgtctatccagtgctacctgcgggccttggaccgatgctatgcagcttaccgcaggaaaatccagaatcagtggaagcaagctggaaacaaccagcctttcaccctcgatgacgtgcaatatatgatcttccacacacccttttgcaagatggtccagaaatccctagctcggctgatgttcaatgacttcctgtcatctagcagtgacaagcagaacaacttatacaagggtctagaggccttcaagggtctaaagctggaagaaacctacaccaacaaggatgttgacaaggctctgctgaaggcctccctggacatgttcaacaagaaaaccaaggcctccctttacctctccacaaacaatgggaacatgtacacctcgtccctctacgggtgcctggcctcacttctctcccaccactctgcccaagaattggccggctccaggattggagccttctcctacggctcaggcttagcagcaagtttcttctcatttcgagtgtccaaggacgcttccccaggttcccctctggagaagctggtgtctagtgtgtcagatctgcccaaacgtctagactcccggagacgcatgtcccctgaggaattcacagaaataatgaatcagagagagcaattttaccacaaggtgaacttctctccccctggtgacacaagcaacctcttcccaggcacttggtaccttgaacgagtggatgagatgcaccgcagaaaatatgcccggcgtcccgtctaaggagaccaatccatacaaccattccccggggaaagaatgtgagcagagccgttacccaaacggcttccacttaaaattccacccacagcagtgaacggtgaatagacacagcgaccccataggatctgctccgcggtgaagggcctccctctgtggatcctgggtgaccctccctgaagcagtgagcaccacaggttctgctgtggaccagagcccccctgtggagagggagaaagaaaggggagccgctgacctgcagggatacagaccttccccacagcctggcagccgcccgtttgttgcagcttattatcagactgtgggctatcatagttcatgctcgtttcttaaagtttcccgagaatttctaaaattttgtatctaaacttttaatatggcgattaaaaggagagaagga

SEQ ID NO: 3653 - protein, 508 aa, Rattus norvegicus
  ref <308>: DATABASE ACCESSION NUMBER: SWISS-Prot / P22791
  ref <309>: DATABASE ENTRY DATE: 1996-10-01
MQRLLAPARRVLQVKRVMQESSLSPAHLLPAAQQRFSTIPPAPLAKTDTWPKDVGILALEVYFPAQYVDQTDLEKFNNVEAGKYTVGLGQTRMGFCSVQEDINSLCLTVVQRLMERTKLPWDAVGRLEVGTETIIDKSKAVKTVLMELFQDSGNTDIEGIDTTNACYGGTASLFNAANWMESSYWDGRYALVVCGDIAVYPSGNPRPTGGAGAVAMLIGPKAPLVLEQGLRGTHMENAYDFYKPNLASEYPLVDGKLSIQCYLRALDRCYAAYRRKIQNQWKQAGNNQPFTLDDVQYMIFHTPFCKMVQKSLARLMFNDFLSSSSDKQNNLYKGLEAFKGLKLEETYTNKDVDKALLKASLDMFNKKTKASLYLSTNNGNMYTSSLYGCLASLLSHHSAQELAGSRIGAFSYGSGLAASFFSFRVSKDASPGSPLEKLVSSVSDLPKRLDSRRRMSPEEFTEIMNQREQFYHKVNFSPPGDTSNLFPGTWYLERVDEMHRRKYARRPV

SEQ ID NO: 3654 - DNA, 2058 bp, Homo sapiens
  ref <308>: DATABASE ACCESSION NUMBER: EMBL / X83618
  ref <309>: DATABASE ENTRY DATE: 1995-07-31
cggtttctgctgggtttctgaactgctgggtttctgcttgctcctctggagatgcagcgtctgttgactccagtgaagcgcattctgcaactgacaagagcggtgcaggaaacctccctcacacctgctcgcctgctcccagtagcccaccaaaggttttctacagcctctgctgtccccctggccaaaacagatacttggccaaaggacgtgggcatcctggccctggaggtctacttcccagcccaatatgtggaccaaactgacctggagaagtataacaatgtggaagcaggaaagtatacagtgggcttgggccagacccgtatgggcttctgctcagtccaagaggacatcaactccctgtgcctgacggtggtgcaacggctgatggagcgcatacagctcccatgggactctgtgggcaggctggaagtaggcactgagaccatcattgacaagtccaaagctgtcaaaacagtgctcatggaactcttccaggattcaggcaatactgatattgagggcatagataccaccaatgcctgctacggtggtactgcctccctcttcaatgctgccaactggatggagtccagttcctgggatggtcgttatgccatggtggtctgtggagacattgccgtctatcccagtggtaatgctcgtcccacaggtggggccggagctgtggctatgctgattggcccaaaggcccctctggccctggagcgagggctgaggggaacccatatggagaatgtgtatgacttctacaaaccaaatttggcctcggagtacccaatagtggatgggaagctttccatccagtgctacttgcgggccttggatcgatgttacacatcataccgtaaaaaaatccagaatcagtggaagcaagctggcagcgatcgacccttcacccttgacgatttacagtatatgatctttcatacacccttttgcaagatggtccagaagtctctggctcgcctgatgttcaatgacttcctgtcagccagcagtgacacacaaaccagcttatataaggggctggaggctttcggggggctaaagctggaagacacctacaccaacaaggacctggataaagcacttctaaaggcctctcaggacatgttcgacaagaaaaccaaggcttccctttacctctccactcacaatgggaacatgtacacctcatccctgtacgggtgcctggcctcgcttctgtcccaccactctgcccaagaactggctggctccaggattggtgccttctcttatggctctggtttagcagcaagtttcttttcatttcgagtatcccaggatgctgctccaggctctcccctggacaagttggtgtccagcacatcagacctgccaaaacgcctagcctcccgaaagtgtgtgtctcctgaggagttcacagaaataatgaaccaaagagagcaattctaccataaggtgaatttctccccacctggtgacacaaacagccttttcccaggtacttggtacctggagcgagtggacgagcagcatcgccgaaagtatgcccggcgtcccgtctaaaggtgttctgcagatccatggaaagcttcctgggaaacgtatgctagcagagcttctccccgtgaatcatatttttaagatcccactcttagctggtaaatgaatttgaatcgacatagtagccccataagcatcagccctgtagagtgaggagccatctctagcgggcccttcattcctctccatgctgcaatcactgtcctgggcttatggtgcctatggactaggggtcctttgtgaaagagcaagatggagcaatggagagaagacctcttcctgaatcactggactccagaaatgtgcatgcagatcagctgttgccttcaagatccagataaactttcctgtcatgtgttagaactttattattattaatattgttaaacttctgtgctgttcctgtgaatctccaaattttgtaccttgttctaagctaatatatagcaattaaaaagagagaaagagaaaaaaaaaaaaaaa

SEQ ID NO: 3655 - protein, 508 aa, Homo sapiens
  ref <308>: DATABASE ACCESSION NUMBER: SWISS-Prot / P54868
  ref <309>: DATABASE ENTRY DATE: 2001-10-16
MQRLLTPVKRILQLTRAVQETSLTPARLLPVAHQRFSTASAVPLAKTDTWPKDVGILALEVYFPAQYVDQTDLEKYNNVEAGKYTVGLGQTRMGFCSVQEDINSLCLTVVQRLMERIQLPWDSVGRLEVGTETIIDKSKAVKTVLMELFQDSGNTDIEGIDTTNACYGGTASLFNAANWMESSSWDGRYAMVVCGDIAVYPSGNARPTGGAGAVAMLIGPKAPLALERGLRGTHMENVYDFYKPNLASEYPIVDGKLSIQCYLRALDRCYTSYRKKIQNQWKQAGSDRPFTLDDLQYMIFHTPFCKMVQKSLARLMFNDFLSASSDTQTSLYKGLEAFGGLKLEDTYTNKDLDKALLKASQDMFDKKTKASLYLSTHNGNMYTSSLYGCLASLLSHHSAQELAGSRIGAFSYGSGLAASFFSFRVSQDAAPGSPLDKLVSSTSDLPKRLASRKCVSPEEFTEIMNQREQFYHKVNFSPPGDTNSLFPGTWYLERVDEQHRRKYARRPV

SEQ ID NO: 3656 - DNA, 1994 bp, Rattus norvegicus; identical to SEQ ID NO: 3652
  ref <308>: DATABASE ACCESSION NUMBER: EMBL / M33648
  ref <309>: DATABASE ENTRY DATE: 2000-03-04

SEQ ID NO: 3657 - protein, 508 aa, Rattus norvegicus; identical to SEQ ID NO: 3653
  ref <308>: DATABASE ACCESSION NUMBER: SWISS-Prot / P22791
  ref <309>: DATABASE ENTRY DATE: 1996-10-01

SEQ ID NO: 3658 - DNA, 2058 bp, Homo sapiens; identical to SEQ ID NO: 3654
  ref <308>: DATABASE ACCESSION NUMBER: EMBL / X83618
  ref <309>: DATABASE ENTRY DATE: 1995-07-31

SEQ ID NO: 3659 - protein, 508 aa, Homo sapiens; identical to SEQ ID NO: 3655
  ref <308>: DATABASE ACCESSION NUMBER: SWISS-Prot / P54868
  ref <309>: DATABASE ENTRY DATE: 2001-10-16

SEQ ID NO: 3660 - DNA, 3477 bp, Rattus norvegicus
  ref <308>: DATABASE ACCESSION NUMBER: EMBL / M34176
  ref <309>: DATABASE ENTRY DATE: 2000-03-04
cggggctgtgctctctgactgccgccgccaccccgccccttgcctccggttcacgctgaagatccagaatcatgactgactccaagtacttcacaaccaataagaagggagaaatctttgaattaaaagctgaactcaacaatgaaaagaaagaaaagaggaaggaggctgtgaagaaagtgattgctgctatgactgtggggaaagacgttagctctctcttcccagatgtggtgaactgtatgcagactgacaacctggaactaaagaagcttgtgtacctctatctgatgaactatgccaagagtcagccagacatggccatcatggctgtcaacagctttgtgaaggattgtgaagaccccaatcctttgattcgagccttggcagttagaaccatgggatgcatccgggtggacaagattacagagtatctctgtgaacccctccgcaagtgcttgaaggatgaagacccctatgttcggaaaacagcagcagtatgcgtggcaaaactccatgatatcaatgcccagatggtggaagatcagggatttctggattctctgcgggatctcatagcagattcaaacccaatggtggtggctaatgctgtagcagcattgtctgagatcagtgagtctcacccaaacagcaacttacttgatctgaaccctcagaatatcaataagctgctcacagccctgaatgagtgcactgagtggggccagattttcatcttggactgcctgtctaattacaaccctaaagatgaccgggaagctcagagcatctgtgagcgagtgacgcctcggctctctcatgccaattctgcagtggtgctttcagcagtaaaagttctgatgaagtttctagagttgttacccaaggactctgactactacaatatgctgctaaagaagctagcgcctccacttgtcactttgctctctggggagccagaagtgcagtatgttgccctgaggaacatcaacctaattgtccagaaaaggcctgaaatcttgaagcaggaaatcaaggtcttctttgtgaagtacaatgatcctatctatgttaaactagagaagttagacatcatgattcgtcttgcatcccaagccaacattgctcaggttctggcagaactgaaggaatatgccactgaagttgatgtggactttgttcgcaaagctgtgagggccattggacggtgtgccatcaaagtggagcaatcagcagaacgctgtgtgagcacactgcttgatctaatccagaccaaagtaaattatgtggtccaagaggcaattgttgtcatcagggacatcttccgaaaataccccaacaagtatgagagcattatcgccacgctgtgtgagaacttggactccctggatgaacccgatgcccgagcggctatgatttggattgtaggagagtatgctgaaagaatcgataatgccgatgagttactagagagcttcctggaaggttttcatgatgaaagcacccaggtgcagctcacgttgcttaccgccatagtgaaactgtttctcaagaagccatcagaaacacaggagctggtccaacaggtcttgagcttggccacacaggattctgataatcctgaccttcgagatcggggttatatttattggcgccttctttcaactgaccctgtgacagccaaagaagtagtgttgtctgagaagccattgatctctgaggaaacagacctcattgaacctaccctcctggatgagctcatctgccacattggttctttggcctccgtgtaccataaacctccgaatgcttttgtggaagggagccatggcattcatcgcaaacacttgccaattcaccatgggagcactgatgcaggtgatagccctgttggcaccaccactgcaaccaacctggaacagcctcaggtcatcccctctcaaggtgaccttctgggggatcttttaaatcttgacctgggtcccccagtgaatgtcccgcaagtgtcctccatgcagatgggagcagtggatcttttaggaggaggactggatagcctggtaggacagtccttcatcccgtcatcagtgcctgcaaccttcgctccttcacctactcctgctgtggtcagcagtggtctgaatgacctgtttgagctttccactgggataggcatggcacctggcggatatgtggctcctaaggcagtctggctacctgctgtaaaggctaaaggcttggagatttcggggacgtttactcaccgccaagggcacatctatatggaaatgaacttcaccaacaaagctctgcagcacatgacggattttgccatccagtttaacaagaatagcttcggtgtcatcccgagcactcccttggccatacatactccgctgatgccaaaccagagcattgatgtgtctctgcctctcaacaccttgggcccagtcatgaagatggagcctctgaataacttgcaggtggctgttaaaaacaatattgatgtcttctacttcagctgcctcatcccactcaatgtgctttttgtagaagatggcaaaatggaacgccaggtcttccttgcgacgtggaaggatattcccaatgaaaatgagctccaatttcagattaaggagtgtcatttaaacgctgacacagtttccagcaagttgcaaaacaacaatgtttacactatcgccaagaggaatgtggaggggcaggacatgctgtaccagtccctgaagctcactaatggcatttggattttggcagagctgcggatccagccaggaaaccccaattatacgctgtcgctgaagtgtagagcccctgaagtctctcagtacatctatcaggtctacgacagcattttgaaaaactaataaatgggtccagtcagcctgtaatcagtgcaagccacgaactcttaactgaaagacactgtattgttgtgtagagcctgaacccaaaccctgcggtacccaccccggtagtggccagtcattttgtgctgatattagcactcaccccattggtaggttagcttcccgtgacatctccttccactatcgcccacctctgccacctgccgctgctctctgtccttagttgtgagttcctctgtgctgtgccaatggctagccttttctacaccctcttttgagtgtagtttgatattttgtaatcgaaagctcatttcacaagcagaaaaaggcaacaagttaattagagcgaggaagagtgtcactgaaacatacactgcaccttattgttttatatttttgtacagatgagatagatattgaggtagaacgctgagtagaaagggtgactgaccctcctcagacacagtcttattggagacatatggccctggccccttctgggcaaggagaggcgaccccactcctggtcttttgcattttcaccttggccacgccttccagctctcttatgcccatgctctctcatttg

SEQ ID NO: 3661 - protein, 937 aa, Rattus norvegicus
  ref <308>: DATABASE ACCESSION NUMBER: SWISS-Prot / P21851
  ref <309>: DATABASE ENTRY DATE: 2001-10-16
MTDSKYFTTNKKGEIFELKAELNNEKKEKRKEAVKKVIAAMTVGKDVSSLFPDVVNCMQTDNLELKKLVYLYLMNYAKSQPDMAIMAVNSFVKDCEDPNPLIRALAVRTMGCIRVDKITEYLCEPLRKCLKDEDPYVRKTAAVCVAKLHDINAQMVEDQGFLDSLRDLIADSNPMVVANAVAALSEISESHPNSNLLDLNPQNINKLLTALNECTEWGQIFILDCLSNYNPKDDREAQSICERVTPRLSHANSAVVLSAVKVLMKFLELLPKDSDYYNMLLKKLAPPLVTLLSGEPEVQYVALRNINLIVQKRPEILKQEIKVFFVKYNDPIYVKLEKLDIMIRLASQANIAQVLAELKEYATEVDVDFVRKAVRAIGRCAIKVEQSAERCVSTLLDLIQTKVNYVVQEAIVVIRDIFRKYPNKYESIIATLCENLDSLDEPDARAAMIWIVGEYAERIDNADELLESFLEGFHDESTQVQLTLLTAIVKLFLKKPSETQELVQQVLSLATQDSDNPDLRDRGYIYWRLLSTDPVTAKEVVLSEKPLISEETDLIEPTLLDELICHIGSLASVYHKPPNAFVEGSHGIHRKHLPIHHGSTDAGDSPVGTTTATNLEQPQVIPSQGDLLGDLLNLDLGPPVNVPQVSSMQMGAVDLLGGGLDSLVGQSFIPSSVPATFAPSPTPAVVSSGLNDLFELSTGIGMAPGGYVAPKAVWLPAVKAKGLEISGTFTHRQGHIYMEMNFTNKALQHMTDFAIQFNKNSFGVIPSTPLAIHTPLMPNQSIDVSLPLNTLGPVMKMEPLNNLQVAVKNNIDVFYFSCLIPLNVLFVEDGKMERQVFLATWKDIPNENELQFQIKECHLNADTVSSKLQNNNVYTIAKRNVEGQDMLYQSLKLTNGIWILAELRIQPGNPNYTLSLKCRAPEVSQYIYQVYDSILKN

SEQ ID NO: 3662 - DNA, 5701 bp, Homo sapiens
  ref <308>: DATABASE ACCESSION NUMBER: EMBL / M34175
  ref <309>: DATABASE ENTRY DATE: 2000-03-04
ctgcccaccatctttgtccctggcaaagtgggttttgcgcagtggcttagacctagaaaagaatcgtgacgggcaggaaaccattacaccaccacctgggctgtgctctccggctcccgccgccacccccgccctcgccttcgcctccgctccggtgcacattaaagatccaaagtcatgactgactccaagtatttcacaaccaataaaaaaggagaaatatttgaactaaaagctgaactcaacaatgaaaagaaagaaaagagaaaggaggctgtgaagaaagtgattgctgctatgaccgtggggaaggatgttagttctctctttccagacgtagtgaactgtatgcagactgacaatctggaactaaagaagcttgtgtatctctacttgatgaactacgccaagagtcagccagacatggccatcatggctgtaaacagctttgtgaaggactgtgaagatcctaatcctttgattcgagccttggcagtcagaaccatggggtgcatccgggtagacaaaattacagaatatctctgtgagccgctccgcaagtgcttgaaggatgaggatccctatgttcggaaaacagcagcagtctgcgtggcaaaactccatgatatcaatgcccaaatggtggaagatcagggatttctggattctctacgggatctcatagcagattcaaatccaatggtggtggctaatgccgtagcggcattatctgaaatcagtgagtctcacccaaacagcaacttacttgatctgaacccacagaacattaataagctgctgacagccctgaatgaatgcactgaatggggccagattttcatcctggactgcctgtctaattacaaccctaaagatgatcgggaggctcagagcatctgtgagcgggtaactccccggctatcccatgccaactcagcagtggtgctttcagcggtaaaagtcctaatgaagtttctagaattgttacctaaggattctgactactacaatatgctgctgaagaagttagcccctccacttgtcactttgctgtctggggagccagaagtgcagtatgtcgccctgaggaacatcaacttaattgtccagaaaaggcctgaaatcttgaagcaggaaatcaaagtcttctttgtgaagtacaatgatcccatctatgttaaactagagaagttggacatcatgattcgtttggcatctcaagccaacattgctcaggttctggcagaactgaaagaatatgctacagaggtggatgttgactttgttcgaaaagctgtgcgggccattggacggtgtgccatcaaggtggagcaatctgcagagcgctgtgtaagcacattgcttgatctaatccagaccaaagtgaattatgtggtccaagaagcaattgttgtcatcagggacatcttccgcaaataccccaacaagtatgaaagtatcatcgccactctgtgtgagaacttagactcgctggatgagccagatgctcgagcagctatgatttggattgtgggagaatatgctgaaagaattgacaatgcagatgagttactagaaagcttcctggagggttttcacgatgaaagcacccaggtgcagctcactctgcttactgccatagtgaagctgtttctcaagaaaccatcagaaacacaggagctagtccagcaggtcttgagtttggcaacacaggattctgataatcctgaccttcgagaccggggctatatttattggcgccttctctcaactgaccctgttacagctaaagaagtagtcttgtctgagaagccactgatctctgaggagacggaccttattgagccaactctgctggatgagctaatctgccacattggttctttggcctctgtgtatcataagcctcccaatgcttttgtggaaggaagtcatggaattcatcgtaaacacttgccaattcatcatgggagcactgatgcaggtgacagccctgttggcactaccactgcaacgaacctggaacagcctcaggttatcccctctcaaggtgatcttctaggggatcttttaaaccttgacctcggtcccccagtcaatgtgccacaggtgtcctccatgcagatgggagcagtggatctcctaggaggaggactagatagtctggtgggacaatccttcatcccatcatcggtgcctgcaacctttgctccttcacctacacctgctgtggtcagcagtggactgaatgacctgtttgaactctccacagggataggcatggcacctggtggatatgtggctcctaaggctgtctggctacctgcagtaaaggctaaaggcttggagatttccggaacatttactcaccgccaagggcacatctatatggaaatgaacttcaccaataaagctctgcagcacatgacagattttgcaatccagtttaacaaaaatagctttggtgtcatccccagcactcctctggccatccatacaccactgatgccaaaccagagcattgatgtctccctgcctctcaataccttgggcccagtcatgaagatggaacctctgaataacctccaggtggctgtgaaaaacaatatcgatgtcttctacttcagctgcctcatcccactcaatgtgctttttgtagaagatggcaaaatggagcgccaggtcttccttgcaacatggaaggatattcccaatgaaaatgaacttcagtttcagattaaggaatgtcatttaaatgctgacactgtttccagcaagttgcaaaacaacaatgtttatactattgccaagaggaatgtggaagggcaggacatgctgtaccaatccctgaagctcactaatggcatttggattttggccgaactacgtatccagccaggaaaccccaattacacgctgtcactgaagtgtagagctcctgaagtctctcaatacatctatcaggtctacgacagcattttgaaaaactaacaagactggtccagtacccttcaaccatgctgtgatcggtgcaagtcaagaactcttaactggaagaaattgtattgctgcgtagaatctgaacacactgaggccacctagcaaggtagtaactagtctaacctgtgctaacattagggcacaacctgttggatagttttagcttcctgtgaacatttgtaaccactgcttcagtcacctcccacctcttgccacctgctgctgctatctgtccttacttgtgggcttctccatgctgtgccaatggctggctttttctacaccctcttttgagtgtagtttggtattttgtaattgagagctcatttcaaaagcagaaaaagacaacaaatattaaagcaaggaaaagtgtaactgaaacactgcactttactgttttatacttttgtacatatgagaaatcaagggattagtgcaaccagtagaaggcattgaaatgactgtcattaaccacacagtcctggaggcagagatgcagttacctaccctagcttttgatgggttctcttacctgtagtagccttatccctggtcatttggattttcagtttgcttttttctttttttcccctccaaactccttttccttggccaagccttcatgcttccccctttccatattataatctcatttgattgctctgcagttgggaacggtgatcttcttgaatgatgtttcagtgtgcaaaaactatagagcctgtcagcaccaaagctgacagaagttataccttactcctttcctttcccctgaacaaacctgctaatcccactaattcaggaatttgagtagagatggggaacaagaacccagatgctgtcccctcaccccctctcctgtatttctcaggtccagttcaaatctaaaattctacttttagagttgaaacagagtaataacttatctaaccctcttttcctacaaaggagaaagataaaaggcacaaaggttaccgccaaggcccgtcagctgtgtagtggcaaagccgagaccgagtctcctaagtccccgtcagtgtggttttcaccacaggactgtctcttgtcgttttcccctaatgccttctcctgccttttctgtgcctagtttttggctcttcacatattccatattgattttgacgctctgtatattggcatcaggtggcagctgaatatcttttgaattactcgaaggtaaagccagatgccagaatgaaggtgtagccagtgtttcccatatgcccctggagccccacttattgaggccagcagaataggtgcagagatgaagtgagcttagagatgttgcaaatgctctttatcccttcagctctctgatctgctctttcttcatgatacttagtctgcagggcatattaagatcatcccagaggttcaggcagttcctgtcatctctgaaaagactgggggatatgaaatcttccccctaccccacttaatgcgttggatatgatttttcaaagaatgcttcatgcccaaaataccagcctgtttagcagtgttacactgtttgatctgcgggcacttgttgcattgcctggcacccaatattcagggtccatgactaagactggtcttctcagatgccctgcttaaatcaggggcacttcaggctccacaggcgtcatgttggactgagacctaactcactggactcagaggaggaatcgtggaaaacaagagcaaaactaccccacacccctatttcatgtctgaaataaccctgtttcataccagttgcaaagcttgtggggagcggtcccacaaagcactttcttaaaccttgagaatctccaagagaaaaatatttggggaaggagggaggaaatatgtcccttgcacaccacccctgaagcacatggcagtaggaaacagcataggattgtatgtgggaggtggataggtcggtgatgtgtggagcggaaaagcaggttggtaaagttcccttcttgggacttattcctggagtcagtggatacaagtagtgcagaaggttcacactgcaaatagtgttctcatctcaaagcaaactatcattccagaaggaaaagtgtgtcagggcaagcagacaacacaatttcctatcagaatatgtccctcaacccccgaaacaaggcttctctcagcctccccaccagtgatggataacagctcctattctcagctgacctgactgagccaacccatgaactcttcactccttggggaagccacctcccatcacacccctgagcagagttagggaggaattctacttcccataaaaggacctctcctgagaggcaaaacctgttgcctccaccacggcttccctcttggctcattccaagcttggccaaattggggaagtgggatggaggttgccctgcatcccccctcctctgcctgagtgtgtctttgtaatgtcagctggcatcatacaaagagcaggagaagcaaacacccagaactcttttgctggtcagagattccctgagtgtctgtcctcacccaagcctgctctgtgtctgtgttgtgaagcttgagactctggaaagaaatggggagggggggcaggggaaatgttgccctaagaatgcttctcattcctctgttcttattgggtcctgtttttcgggagggtgggggttgggggaagcttgaccttgtgtcttcgtcaataaactcacatttacac

SEQ ID NO: 3663 - protein, 937 aa, Homo sapiens; identical to SEQ ID NO: 3661

SEQ ID NO: 3664 - DNA, 2078 bp, Rattus norvegicus
  ref <308>: DATABASE ACCESSION NUMBER: EMBL / M34253
  ref <309>: DATABASE ENTRY DATE: 2000-03-04
ctcgacgaaggagtaggacgagctctcactgtctgagccaaaccgaaccgggccgagctgagccgaggtcagcggtggccagaggaacccagcatctcgggcatcattcgctccgtgcacgcatcgtgtacctacaccgcaactccgtgcctcattcccgggtaccctctgtgactcgctcctgcagcaaagccaccatgcctatcactcggatgcgaatgagaccctggctagagatgcagattaattccaaccaaattccagggctgagctggatcaataaagaagagatgatcttccagatcccatggaagcatgctgccttgcacggttgggatatcaacaaggatgcctgtctgttccggagctgggccattcacacaggccgatacaaagctggggaaaaagagccagatcccaagacttggaaggcaaacttccggtgtgccatgaactccctaccagacatcgaggaagtgaaggaccagagcaggaacaagggcagctctgctgtacgcgtgtaccggatgctgccacccctcaccaagaaccagaggaaagagagaaagtccaagtccagccgtgacactaagagcaaaaccaagaggaagctgtgcggagattctagccctgacaccttatctgacggactgagcagctctactctgcctgatgaccacagcagttacacagctcagggatacctgggtcaggacttggacatggacagggacattaccccagctctgtcaccgtgcgtcgtcagcagcagtctctctgagtggcatatgcagatggacatcatgccagacagcaccactgatctgtacaacttgcaggtgtcgcccatgccctccacctctgaagctgcaacagatgaggatgaggaagggaagttacctgaggacatcatgaagctctttgaacagtctgagtggcagccgacgcacgtggatggcaagggatacttgctcaatgaaccaggagcccaactctctactgtctatggagacttcagctgcaaggaggaaccagagatcgacagccctggaggggacatcgagataggcatacagcgtgtcttcacagagatgaagaatatggaccccgtcatgtggatggacaccctgctgggcaactctaccaggccgccctccattcaggctattccttgtgcaccataatttgggtccctgacccgttcttgccctcctgagtgagctaggtccagcatcatggtggctgtgatacaacataaagctaaacttccgtggaccccttgatgtggcaaaacataatcccattgccaagcagggaagggaccaaaccatcctccttgggtcagtggactgactcttcagagcttaggaggcagggtctaagtttttcaagctggtcctgactcctaggaagatggattggcgttctgaggttagtgtgaggcagaggacctggacggaagttaccttctagctctttgaaagcttcattgcttagagagggtctcaccactgggctggcctgggggatagaccagcgcccacagaagagcattgcactggccttagggctggctccacactgggagacaattgcactaagtcctattcccaaagaactgctgcccttcccaaccgagccctgggatggttctagagccagtgaaatgtgaaggaaaaaatggggtcctgtgagggttgtctcccttagcctcagagggattctgcctcactccctgctccagctgtggggctcaggaaaaaaaaatggcactttctctgtggactttgccacatttctgatcagaagtgtacactaacatttctcccaagtcttggcctttgcatttatttatatagtgccttgccctgtgcctgctgtctctcctcaggcctcagcagtcctcagcaggcccagggagggggttgtgagcgccttggcgtgactctgaacattggaaacgccacctaactactaagttgtgtctgatctcgtgtggatctgtgtaaatatgtatattcatctttttataaaaacctaagttgtttaaaaaaaaaaaaaaaaaaaaaaaaaaaaaa

SEQ ID NO: 3665 - protein, 328 aa, Rattus norvegicus
  ref <308>: DATABASE ACCESSION NUMBER: SWISS-Prot / P23570
  ref <309>: DATABASE ENTRY DATE: 1997-11-01
MPITRMRMRPWLEMQINSNQIPGLSWINKEEMIFQIPWKHAALHGWDINKDACLFRSWAIHTGRYKAGEKEPDPKTWKANFRCAMNSLPDIEEVKDQSRNKGSSAVRVYRMLPPLTKNQRKERKSKSSRDTKSKTKRKLCGDSSPDTLSDGLSSSTLPDDHSSYTAQGYLGQDLDMDRDITPALSPCVVSSSLSEWHMQMDIMPDSTTDLYNLQVSPMPSTSEAATDEDEEGKLPEDIMKLFEQSEWQPTHVDGKGYLLNEPGAQLSTVYGDFSCKEEPEIDSPGGDIEIGIQRVFTEMKNMDPVMWMDTLLGNSTRPPSIQAIPCAP

SEQ ID NO: 3666 - DNA, 2035 bp, Homo sapiens
  ref <308>: DATABASE ACCESSION NUMBER: EMBL / X14454
  ref <309>: DATABASE ENTRY DATE: 1996-09-05
cgagccccgccgaaccgaggccacccggagccgtgcccagtccacgccggccgtgcccggcggccttaagaaccaggcaacctctgccttcttccctcttccactcggagtcgcgctccgcgcgccctcactgcagcccctgcgtcgccgggaccctcgcgcgcgaccagccgaatcgctcctgcagcagagccaacatgcccatcactcggatgcgcatgagaccctggctagagatgcagattaattccaaccaaatcccggggctcatctggattaataaagaggagatgatcttccagatcccatggaagcatgctgccaagcatggctgggacatcaacaaggatgcctgtttgttccggagctgggccattcacacaggccgatacaaagcaggggaaaaggagccagatcccaagacgtggaaggccaactttcgctgtgccatgaactccctgccagatatcgaggaggtgaaagaccagagcaggaacaagggcagctcagctgtgcgagtgtaccggatgcttccacctctcaccaagaaccagagaaaagaaagaaagtcgaagtccagccgagatgctaagagcaaggccaagaggaagtcatgtggggattccagccctgataccttctctgatggactcagcagctccactctgcctgatgaccacagcagctacacagttccaggctacatgcaggacttggaggtggagcaggccctgactccagcactgtcgccatgtgctgtcagcagcactctccccgactggcacatcccagtggaagttgtgccggacagcaccagtgatctgtacaacttccaggtgtcacccatgccctccacctctgaagctacaacagatgaggatgaggaagggaaattacctgaggacatcatgaagctcttggagcagtcggagtggcagccaacaaacgtggatgggaaggggtacctactcaatgaacctggagtccagcccacctctgtctatggagactttagctgtaaggaggagccagaaattgacagcccagggggggatattgggctgagtctacagcgtgtcttcacagatctgaagaacatggatgccacctggctggacagcctgctgaccccagtccggttgccctccatccaggccattccctgtgcaccgtagcagggcccctgggcccctcttattcctctaggcaagcaggacctggcatcatggtggatatggtgcagagaagctggacttctgtgggcccctcaacagccaagtgtgaccccactgccaagtggggatgggcctccctccttgggtcattgacctctcagggcctggcaggccagtgtctgggtttttcttgtggtgtaaagctggccctgcctcctgggaagatgaggttctgagaccagtgtatcaggtcagggacttggacaggagtcagtgtctggctttttcctctgagcccagctgcctggagagggtctcgctgtcactggctggctcctaggggaacagaccagtgaccccagaaaagcataacaccaatcccagggctggctctgcactaagcgaaaattgcactaaatgaatctcgttccaaagaactaccccttttcagctgagccctggggactgttccaaagccagtgaatgtgaaggaaactcccctccttcggggcaatgctccctcagcctcagaggagctctaccctgctccctgctttggctgaggggcttgggaaaaaaacttggcactttttcgtgtggatcttgccacatttctgatcagaggtgtacactaacatttcccccgagctcttggcctttgcatttatttatacagtgccttgctcggggcccaccaccccctcaagccccagcagccctcaacaggcccagggagggaagtgtgagcgccttggtatgacttaaaattggaaatgtcatctaaccattaagtcatgtgtgaacacataaggacgtgtgtaaatatgtacatttgtctttttataaaaagtaaaattgtt

SEQ ID NO: 3667 - protein, 325 aa, Homo sapiens
  ref <308>: DATABASE ACCESSION NUMBER: SWISS-Prot / P10914
  ref <309>: DATABASE ENTRY DATE: 2002-06-15
MPITRMRMRPWLEMQINSNQIPGLIWINKEEMIFQIPWKHAAKHGWDINKDACLFRSWAIHTGRYKAGEKEPDPKTWKANFRCAMNSLPDIEEVKDQSRNKGSSAVRVYRMLPPLTKNQRKERKSKSSRDAKSKAKRKSCGDSSPDTFSDGLSSSTLPDDHSSYTVPGYMQDLEVEQALTPALSPCAVSSTLPDWHIPVEVVPDSTSDLYNFQVSPMPSTSEATTDEDEEGKLPEDIMKLLEQSEWQPTNVDGKGYLLNEPGVQPTSVYGDFSCKEEPEIDSPGGDIGLSLQRVFTDLKNMDATWLDSLLTPVRLPSIQAIPCAP

SEQ ID NO: 3668 - DNA, 2078 bp, Rattus norvegicus; identical to SEQ ID NO: 3664
  ref <308>: DATABASE ACCESSION NUMBER: EMBL / M34253
  ref <309>: DATABASE ENTRY DATE: 2000-03-04

SEQ ID NO: 3669 - protein, 328 aa, Rattus norvegicus; identical to SEQ ID NO: 3665
  ref <308>: DATABASE ACCESSION NUMBER: SWISS-Prot / P23570
  ref <309>: DATABASE ENTRY DATE: 1997-11-01

SEQ ID NO: 3670 - DNA, 2035 bp, Homo sapiens; identical to SEQ ID NO: 3666
  ref <308>: DATABASE ACCESSION NUMBER: EMBL / X14454
  ref <309>: DATABASE ENTRY DATE: 1996-09-05

SEQ ID NO: 3671 - protein, 325 aa, Homo sapiens; identical to SEQ ID NO: 3667
  ref <308>: DATABASE ACCESSION NUMBER: SWISS-Prot / P10914
  ref <309>: DATABASE ENTRY DATE: 2002-06-15

SEQ ID NO: 3672 - DNA, 1595 bp, Rattus norvegicus
  ref <308>: DATABASE ACCESSION NUMBER: EMBL / M35270
  ref <309>: DATABASE ENTRY DATE: 2001-03-25
aggacaaacatcgatcagggtcaaattgacaataaaagggctggagcaagcaacagggactcaccaaccaggcctcgcctctgagttcagcccagagctagctgggaaatgttccggatgttggccaaggccagtgtgacgctgggctccagggcagcaagttgggtacggaacatgggctcgcaccagctgctggtgccacccccagaggccctgagcaagcccctgtcaattcctaagaggctcctgttgggtccgggaccctccaacctggctcctcgtgtgctagcagctggaagtctgaggatgattggccacatgcaaaaagagatgtttcagatcatggatgagatcaagcagggcatccagtatgtgttccagaccaggaaccccctcacactggttgtcagcggctcaggacattgtgccatggagactgccctgttcaacctcctggagcctggggactcctttcttgtgggaaccaatggcatctgggggatacgggctgcagagatcgctgagcggattggagcccgtgtgcaccagatgatcaagaagcctggagaacattacacactgcaggaggtggaggagggcctggctcagcataaaccagtgttgctgttcctgacccacggggagtcatccactggtgtgctgcagcccctggatggtttcggggagctctgccacaggtatcagtgcctactcctggtggactcggtggcatcattgggcggagtccctatctacatggaccaacaaggcatcgacatcttgtactctggctctcagaaggtcctgaatgccccaccagggatctccctcatctccttcaacgacaaggccaaatccaaagtctactcccggaagacaaagccagtctccttctacacagacatcacttatttgtccaagttgtggggctgtgagggcaagaccagagtaattcatcatacgttgcctgtcatcagcttatactgcctgagggagagcctagcactcatttcagagcagggcctggagaattcctggcggcgtcacagggaggctacagcacatctgcacaagtgcctgcgggagttgggcttaaagttctttgtgaaggacccggaaatccggctacctacaatcaccaccgtgaccgtgcctgccggctacaactggagggacatcgtcagctacgtgctggaccacttcaacattgaaatctctggtggtcttgggccctctgaggataaggtgctgcggattggcctcctgggctacaacgccaccacagagaatgcggaccgtgtagcggaggccctgagggaggccctgcaacattgtcctaagaataaattgtgagcatcgtctcaccagactgtgccctcctggaggggctgggaatatagcaggaacgagaagactgtgcaagccctccagccagcaaaggctgccgatgtaaccaggcgggaagggtcagggcgaagctgcccctctccccacagatggagccctgtggtcacatgatgctaatcaccttccgatgaagctgcattctgcaggccactggacttcgggaatattcaataaagtacttgccagac

SEQ ID NO: 3673 - protein, 414 aa, Rattus norvegicus
  ref <308>: DATABASE ACCESSION NUMBER: SWISS-Prot / P09139
  ref <309>: DATABASE ENTRY DATE: 2001-10-16
MFRMLAKASVTLGSRAASWVRNMGSHQLLVPPPEALSKPLSIPKRLLLGPGPSNLAPRVLAAGSLRMIGHMQKEMFQIMDEIKQGIQYVFQTRNPLTLVVSGSGHCAMETALFNLLEPGDSFLVGTNGIWGIRAAEIAERIGARVHQMIKKPGEHYTLQEVEEGLAQHKPVLLFLTHGESSTGVLQPLDGFGELCHRYQCLLLVDSVASLGGVPIYMDQQGIDILYSGSQKVLNAPPGISLISFNDKAKSKVYSRKTKPVSFYTDITYLSKLWGCEGKTRVIHHTLPVISLYCLRESLALISEQGLENSWRRHREATAHLHKCLRELGLKFFVKDPEIRLPTITTVTVPAGYNWRDIVSYVLDHFNIEISGGLGPSEDKVLRIGLLGYNATTENADRVAEALREALQHCPKNKL

SEQ ID NO: 3674 - DNA, 1600 bp, Homo sapiens
  ref <308>: DATABASE ACCESSION NUMBER: Refseq / NM_000030
  ref <309>: DATABASE ENTRY DATE: 2002-11-05
ccggaagcccatccaccaatcctcacctctcacctctgtgtccgccctgctgggaaatattccaggctttggccaaggccagtgcagccccaggttcccgagcggcaggttgggtgcggaccatggcctctcacaagctgctggtgaccccccccaaggccctgctcaagcccctctccatccccaaccagctcctgctggggcctggtccttccaacctgcctcctcgcatcatggcagccggggggctgcagatgatcgggtccatgagcaaggatatgtaccagatcatggacgagatcaaggaaggcatccagtacgtgttccagaccaggaacccactcacactggtcatctctggctcgggacactgtgccctggaggccgccctggtcaatgtgctggagcctggggactccttcctggttggggccaatggcatttgggggcagcgagccgtggacatcggggagcgcataggagcccgagtgcacccgatgaccaaggaccctggaggccactacacactgcaggaggtggaggagggcctggcccagcacaagccagtgctgctgttcttaacccacggggagtcgtccaccggcgtgctgcagccccttgatggcttcggggaactctgccacaggtacaagtgcctgctcctggtggattcggtggcatccctgggcgggacccccctttacatggaccggcaaggcatcgacatcctgtactcgggctcccagaaggccctgaacgcccctccagggacctcgctcatctccttcagtgacaaggccaaaaagaagatgtactcccgcaagacgaagcccttctccttctacctggacatcaagtggctggccaacttctggggctgtgacgaccagcccaggatgtaccatcacacaatccccgtcatcagcctgtacagcctgagagagagcctggccctcattgcggaacagggcctggagaacagctggcgccagcaccgcgaggccgcggcgtatctgcatgggcgcctgcaggcactggggctgcagctcttcgtgaaggacccggcgctccggcttcccacagtcaccactgtggctgtacccgctggctatgactggagagacatcgtcagctacgtcatagaccacttcgacattgagatcatgggtggccttgggccctccacggggaaggtgctgcggatcggcctgctgggctgcaatgccacccgcgagaatgtggaccgcgtgacggaggccctgagggcggccctgcagcactgccccaagaagaagctgtgacctgcccactggcacacagctggcactggcacacacctgtcccatgcccaccctgagggatcaggagcaaacagaccctgcaaggtcctccaggcctggggacaggaaagccactgacccagcccgggaggcagaaccaggcagcctccctggccccaggcagcccttttccctccagtggcacctcctggaaacagtccacttgggcgcaaaacccagtgccttccaaatgagctgcagtccccaggccatgagcctcccgggaatgtttaataaagggcctggccacctctcctcac

SEQ ID NO: 3675 - protein, 392 aa, Homo sapiens
  ref <308>: DATABASE ACCESSION NUMBER: SWISS-Prot / P21549
  ref <309>: DATABASE ENTRY DATE: 2001-10-16
MASHKLLVTPPKALLKPLSIPNQLLLGPGPSNLPPRIMAAGGLQMIGSMSKDMYQIMDEIKEGIQYVFQTRNPLTLVISGSGHCALEAALVNVLEPGDSFLVGANGIWGQRAVDIGERIGARVHPMTKDPGGHYTLQEVEEGLAQHKPVLLFLTHGESSTGVLQPLDGFGELCHRYKCLLLVDSVASLGGTPLYMDRQGIDILYSGSQKALNAPPGTSLISFSDKAKKKMYSRKTKPFSFYLDIKWLANFWGCDDQPRMYHHTIPVISLYSLRESLALIAEQGLENSWRQHREAAAYLHGRLQALGLQLFVKDPALRLPTVTTVAVPAGYDWRDIVSYVIDHFDIEIMGGLGPSTGKVLRIGLLGCNATRENVDRVTEALRAALQHCPKKKL

SEQ ID NO: 3676 - DNA, 1595 bp, Rattus norvegicus; identical to SEQ ID NO: 3672
  ref <308>: DATABASE ACCESSION NUMBER: EMBL / M35270
  ref <309>: DATABASE ENTRY DATE: 2001-03-25

SEQ ID NO: 3677 - protein, 414 aa, Rattus norvegicus; identical to SEQ ID NO: 3673
  ref <308>: DATABASE ACCESSION NUMBER: SWISS-Prot / P09139
  ref <309>: DATABASE ENTRY DATE: 2001-10-16

SEQ ID NO: 3678 - DNA, 1600 bp, Homo sapiens; identical to SEQ ID NO: 3674
  ref <308>: DATABASE ACCESSION NUMBER: Refseq / NM_000030
  ref <309>: DATABASE ENTRY DATE: 2002-11-05

SEQ ID NO: 3679 - protein, 392 aa, Homo sapiens; identical to SEQ ID NO: 3675
  ref <308>: DATABASE ACCESSION NUMBER: SWISS-Prot / P21549
  ref <309>: DATABASE ENTRY DATE: 2001-10-16

SEQ ID NO: 3680 - DNA, 562 bp, Rattus norvegicus
  ref <308>: DATABASE ACCESSION NUMBER: EMBL / M36151
  ref <309>: DATABASE ENTRY DATE: 2000-03-04
agagactccccaagggatttcgtgtaccagttcgagggccagtgctactacaccaccgggacgcagcgcatgcggctcgtgaccagacacatctacaaccgggaggagtacgtgcgcttcgacagcgacctgggcgagtaccgcgcgctgaccgagctggggcggccctcagccgagtactggaataagcagtacctcgagcagacgcgggccgagctggacagggtctgcagatacaactacgaggggccgggggctctcacctccctgagacggcttgagcagcccaatgtggccatctccctgtccaggacagaggcccttaaccaccacaacctgctggtctgctcagtgacagatttctacccagcccagatcaaagtgcgctggttccggaatggccaggaggagacgacgggggtcgtgtccacacagcttattaggaatggggactggaccttccagatcctggtcatgctggagatcacgcctcagcggggagatgtgtacacctgccatgttgaccaccccagccttcagagccctgtcacagtggagtggc

SEQ ID NO: 3681 - protein, 187 aa, Rattus norvegicus
  ref <308>: DATABASE ACCESSION NUMBER: SWISS-Prot / AAA41612
  ref <309>: DATABASE ENTRY DATE: 2003-02-01
RDSPRDFVYQFEGQCYYTTGTQRMRLVTRHIYNREEYVRFDSDLGEYRALTELGRPSAEYWNKQYLEQTRAELDRVCRYNYEGPGALTSLRRLEQPNVAISLSRTEALNHHNLLVCSVTDFYPAQIKVRWFRNGQEETTGVVSTQLIRNGDWTFQILVMLEITPQRGDVYTCHVDHPSLQSPVTVEW

SEQ ID NO: 3682 - DNA, 1171 bp, Homo sapiens
  ref <308>: DATABASE ACCESSION NUMBER: EMBL / M81141
  ref <309>: DATABASE ENTRY DATE: 2000-03-04
ctgtgttgactaccacttttcccttcgtctcaattatgtcttggaaaaaggctttgcggatccccggaggccttcgggcagcaactgtgaccttgatgctgtcgatgctgagcaccccagtggctgagggcagagactctcccgaggatttcgtgtaccagtttaagggcatgtgctacttcaccaacgggacagagcgcgtgcgtcttgtgagcagaagcatctataaccgagaagagatcgtgcgcttcgacagcgacgtgggggagttccgggcggtgaccgtgctggggctgcctgccgccgagtactggaacagccagaaggacatcctggagaggaaacgggcggcggtggacagggtgtgcagacacaactaccagttggagctccgcacgaccttgcagcggcgagtggagcccacagtgaccatctccccatccaggacagaggccctcaaccaccacaacctgctggtctgctcggtgacagatttctatccagcccagatcaaagtccggtggtttcggaatggccaggaggagacagctggcgttgtgtccaccccccttattaggaatggtgactggaccttccagatcctggtgatgctggaaatgactccccagcgtggagacgtctacacctgccacgtggagcaccccagcctccagagccccatcaccgtggagtggcgggctcaatctgaatctgcccagagcaagatgctgagtggcattggaggcttcgtgctggggctgatcttcctcgggctgggccttatcatccatcacaggagtcagaaagggctcctgcactgactcctgagactattttaactgggattggttatcacttttctgtaacgcctgcttgtccctgcccagaattcccagctgtctgtgtcagcctgtccccctgagatcagagtcctacagtggctgtcacgcagccaccaggtcatctcctttcatccccaccttgaggcggatggctgtgaccctacttcctgcactgacccacagcccctgcctgtgcacagccagctgcatctactcaggccccaaggggtttctgtttctattctctcctcagactgctcaagagaagcacatgaaaactattacctgactttagagcttttttacataattaaacatgatcctgagtt

SEQ ID NO: 3683 - protein, 261 aa, Homo sapiens [sequence omitted]

SEQ ID NO: 3684 - DNA, 1157 bp, Rattus norvegicus
  ref <308>: DATABASE ACCESSION NUMBER: EMBL / M36410
  ref <309>: DATABASE ENTRY DATE: 2000-03-04
ggcaggctaggttgcgctgtctgcgtgctgaccggggcttcccggggcttcggccgcgccctggccccgcagctggccgggttgctgtcgcccggttcggtgttgcttctaagcgcacgcagtgactcgatgctgcggcaactgaaggaggagctctgtacgcagcagccgggcctgcaagtggtgctggcagccgccgatttgggcaccgagtccggcgtgcaacagttgctgagcgcggtgcgcgagctccctaggcccgagaggctgcagcgcctcctgctcatcaacaatgcaggcactcttggggatgtttccaaaggcttcctgaacatcaatgacctagctgaggtgaacaactactgggccctgaacctaacctccatgctctgcttgaccaccggcaccttgaatgccttctccaatagccctggcctgagcaagactgtagttaacatctcatctctgtgtgccctgcagcctttcaagggctggggactctactgtgcagggaaggctgcccgagacatgttataccaggtcctggctgttgaggaacccagtgtgagggtgctgagctatgccccaggtcccctggacaccaacatgcagcagttggcccgggaaacctccatggacccagagttgaggagcagactgcagaagttgaattctgagggggagctggtggactgtgggacttcagcccagaaactgctgagcttgctgcaaagggacaccttccaatctggagcccacgtggacttctatgacatttaagcccatgtcctgtcacagcgccccccccccccagccctgcctaacacacatacaagccctccaacccagccagcgggagccacgggcactgccagtcctgagaaggcttctgcagaggctcgggagagagctgatgtgtactggagtcctctgtccccaggaagagaacttagggctgggagagcaggagaagcagaaacactgagcagatgaggcagagtctctcgtctgtggtcgttctcaggtgaagagggcggggtctgattcacagagaggaccgagggtattgaatctttgttgtactgccttcatcctggggtattcactggtcctccctcgactctggtcaaatacatggttatggcagatgccctaga

SEQ ID NO: 3685 - protein, 262 aa, Rattus norvegicus
  ref <308>: DATABASE ACCESSION NUMBER: SWISS-Prot / P18297
  ref <309>: DATABASE ENTRY DATE: 1997-11-01
MEGGRLGCAVCVLTGASRGFGRALAPQLAGLLSPGSVLLLSARSDSMLRQLKEELCTQQPGLQVVLAAADLGTESGVQQLLSAVRELPRPERLQRLLLINNAGTLGDVSKGFLNINDLAEVNNYWALNLTSMLCLTTGTLNAFSNSPGLSKTVVNISSLCALQPFKGWGLYCAGKAARDMLYQVLAVEEPSVRVLSYAPGPLDTNMQQLARETSMDPELRSRLQKLNSEGELVDCGTSAQKLLSLLQRDTFQSGAHVDFYDI

SEQ ID NO: 3686 - DNA, 833 bp, Homo sapiens
  ref <308>: DATABASE ACCESSION NUMBER: EMBL / M76231
  ref <309>: DATABASE ENTRY DATE: 1999-07-02
gccgccggcggagaacaggagcatggagggcgggctggggcgtgctgtgtgcttgctgaccggggcctcccgcggcttcggccggacgctggccccgctcctggcctcgctgctgtcgcccggctccgtgcttgtccttagcgcccgcaacgacgaggcactgcgccagctggaggccgagctgggcgccgagcggtctggcctgcgcgtggtgcgggtgcccgccgacctgggcgccgaggccggcttgcagcagctgctcggcgccctgcgcgagctcccccggcccaaggggctgcagcgactgctgcttatcaacaacgcgggctctcttggggatgtgtccaaaggcttcgtggacctgagtgactccactcaagtgaacaactactgggcactgaacttgacctccatgctctgcctgacttccagcgtcctgaaggccttcccggacagtcctggcctcaacagaaccgtggttaacatctcgtccctctgtgccctgcaacctttcaaaggctgggcgctgtactgtgcaggaaaggctgctcgtgatatgctgttccaggtcctggcgctggaggaacctaatgtgagggtgctgaactatgccccaggtcctctggacacagacatgcagcagttggcccgggagacctccgtggacccagacatgcgaaaagggctgcaggagctgaaggcaaaggggaagctggtggattgcaaggtgtcagcccagaaactgctgagcttactggaaaaggacgagttcaagtctggagcccacgtggacttctatgacaaataagcccatgtttttggcttcctgaacc

SEQ ID NO: 3687 - protein, 261 aa, Homo sapiens
  ref <308>: DATABASE ACCESSION NUMBER: SWISS-Prot / P35270
  ref <309>: DATABASE ENTRY DATE: 2002-06-15
MEGGLGRAVCLLTGASRGFGRTLAPLLASLLSPGSVLVLSARNDEALRQLEAELGAERSGLRVVRVPADLGAEAGLQQLLGALRELPRPKGLQRLLLINNAGSLGDVSKGFVDLSDSTQVNNYWALNLTSMLCLTSSVLKAFPDSPGLNRTVVNISSLCALQPFKGWALYCAGKAARDMLFQVLALEEPNVRVLNYAPGPLDTDMQQLARETSVDPDMRKGLQELKAKGKLVDCKVSAQKLLSLLEKDEFKSGAHVDFYDK

SEQ ID NO: 3688 - DNA, 1157 bp, Rattus norvegicus; identical to SEQ ID NO: 3684
  ref <308>: DATABASE ACCESSION NUMBER: EMBL / M36410
  ref <309>: DATABASE ENTRY DATE: 2000-03-04

SEQ ID NO: 3689 - protein, 262 aa, Rattus norvegicus; identical to SEQ ID NO: 3685
  ref <308>: DATABASE ACCESSION NUMBER: SWISS-Prot / P18297
  ref <309>: DATABASE ENTRY DATE: 1997-11-01

SEQ ID NO: 3690 - DNA, 833 bp, Homo sapiens; identical to SEQ ID NO: 3686
  ref <308>: DATABASE ACCESSION NUMBER: EMBL / M76231
  ref <309>: DATABASE ENTRY DATE: 1999-07-02

SEQ ID NO: 3691 - protein, 261 aa, Homo sapiens; identical to SEQ ID NO: 3687
  ref <308>: DATABASE ACCESSION NUMBER: SWISS-Prot / P35270
  ref <309>: DATABASE ENTRY DATE: 2002-06-15

SEQ ID NO: 3692 - DNA, 3641 bp, Rattus norvegicus
  ref <308>: DATABASE ACCESSION NUMBER: EMBL / M55015
  ref <309>: DATABASE ENTRY DATE: 2000-03-04
ggatccaatttgatatggttatatccaattataatttgtataagcaccacatatgtattaggtgtttgttgactccactgcaacacaaattgtactagctgtccctgctgctgctgcactcaaacttgttcctaagttagggccttgtgtgcacctaccattgagccacattcctcactccagttagcaaaatttccaaactattatatgccaggcaatggcttaggtaccaagaataaacaatccgtgttctgtctgggtaaggggcaaattaacaataaacgcccaagtactaggcaactgataatacctaacagtgtaacctagggtcacaagagtaagtctcttagtggcactttacaccagagggctgaggaaagcccaacagattgaattgacaaagagaagtcatgtcatttcacactcagagctcatcttctctcctcccgaatgcctttagcttgctctgcttggaaatatccaggtcttcctcacaccatccttcctatccctctacccaagagtctcccttggctccatactatacagttgaaggtgtgaccggtctcactttaaagacaatgcccccacacaacactggtccgcatcacctgccctgactagagagcacttgtgtgtagctgtggctgccctccaccatgttgggaaggccttaggaagtaagcatcacgcagtgactatttctacttatctccaaaggcccgtgttcagatagaaaacccggggtctcaacacatcccacttgagttaaaatctcccgaggatggcaaaggagggggcaggggtatctccgagttcgaaggcagcctggtctagaatgagtcccggggcagccagggctacaaagagaaaacctatctcaaaaactccaatcaaggggttggggatttagctcagcggtagagcgcttgcctagcaagcgcaaggccctgggttcgatccccagctccgaaaaaagaaccaaaaaacaaaaaactccaatcaaatcttctagattgggccgggcgtgacgacgcggtcgaggctagcctggtctacacagtgtgctctaccacggccagagcaaatagtgaggccctatctcaacccccaccagcacctccacaggtaatttttaatcgatattgtcagctgatgagggcacccgtttgctacgcttggaaccagttagtggcaatccgtttaaagcaatccaagacaactctctcgtcctctgccacggagggaactcgtgagcggtcccaggcaggccgagtacttctcccaccacacaccaggaagtcacctctctgaacctggagttatacctaccgcgtgaggtcagagattaaatggactgtttgtgcactgctcacacacacacacacgcgcgcgcgcgcgcgaaattgcttttattaggagctctcaggaaagtggtggctcgcatcaggctaccacagccaagaggaccgccacctctaccgagggcaggccaaggcccactaaacggcccgaatgaactctaggccttccggcgctctccagctcttcagcgcggcgaacgttctaggcccctgagaagtccaccgggaggcgcaggtttccgctacgcgagggggaaatccccgagaaatgcccagaccacctaagcacagacgtccatgcggcgtacggatacctgagggaatccgggccataccgccacctactcgcgcctcactcaagccgcgccaaactcgcgcgtttcactgcgcaggcgtgtacgcagcgggcgctcaggaacactcaaaggaccagcacactgaccaatcaacgtccgccttggccaaaactagtcccgccctcaaaagcagacgtcaggccccgcccctaagagccccgccctcccccacgctttaggcccgacccacgccgtcctgggttaaggctcgcggttggttcgggggacggacgcgagctctggttggtggaggtgaggtcacgagaacaccttcgtcgcctttccagaggcgattactgggcaagctcagtcttttgcctcagacgctagctgtagctggcaggcggttgtacgtgctccagagtcttcattacccgccgatccagtcgtcttcgcgtgggttccgctaagctcttctgagctgctcgctctctacacacgccgtcgccgtaatccgccatcatggtgaaactcgcaaaggtaataggcctgacgcgcgaacacggacgactaggcctgctttctgagagacgcgcgcgcgcccgtcgcggaggggaggagggcctgcgcacagtcccgggcgcgttcgagggcgcatgctgagggaagtctcgcgcgactagcggaagggtctcgcggtgtttggcctctgacttgagggatgagaggagccgaggcaggttctgggagggcgatgtagagtgcaccggggccgggggtcggtgtgaggggaagtcggaggagttgagcgcggagagggggttggaggctcggcgagtgaagtgggccaaccttaagcggctaccgctctcgggggcccccgcctcccggcgcacgtgctccggtgcgcggcccgccacgtggttacggcgctccgcacgtgtcgcgcgtccgaggcagtgaggggagtgggagtacacgggaaagggggacagtagagttgggccatgttacctagcgatcgcatgtccctgaccgtgacggtagatggacacgtggtgggctcctgaggtagcgcgtggtgacccggcctaggtgactccacgtggtttggctgtaagcgtgagaaagtaggaagtagctccgatacagagatgcttttaagaggtgccttcgagataacccccttccccggcaaatagttaaaatggaacctttaactgggtttttttcttttttgtggaaggtgccagaaaataaagtgccacgactaagtagactttaaaaacctgtggctgtttcctggtgaaggtttctgtctgtaagacaaattatgcgcagttctcagaaaaatttgccaggaagagtgtgctgcctggccacgagaagtctttatgcttgtgttctttagtaagaaaggaggtggtggccgaggacaaagtggcttacaatgcgggtgatttttttgtgtgcatttgtaggccggcaaaacccacggagagtccaagaaaatggctcctcctccaaaggaggtggaagaagatagtgaggatgaagaaatgtcagaagatgaagatgacagcagtggagaagaggaggtaggatgctatttgaaaaattgtgtgatttgcagtggtagattgactggaagtgtcagaaataacagtcagttcggggggtgtctgggcagagttttgtatgttgtattgagtagagtttactgtagatttgtggggtggttttccctccgtttttgggaaaattgcttattctagcctaatttttattcagtccatggtcacttggctttgtgaattttggcaggacattatgacaggaagctgtagaccagcctaacctcagataggttctcctgaattaggtgttagccacagtatccacgacaaatgacaagtttagtgagaaacccagactttgatctaggtagagatggaatcagggtctcagcttaggtggtacc

SEQ ID NO: 3693 - protein, 712 aa, Rattus norvegicus
  ref <308>: DATABASE ACCESSION NUMBER: SWISS-Prot / AAA41732
  ref <309>: DATABASE ENTRY DATE: 2002-06-15
VKLAKAGKTHGESKKMAPPPKEVEEDSEDEEMSEDEDDSSGEEEVVIPQKKGKKATTTPAKKVVVSQTKKAAVPTPAKKAAVTPGKKAAATPAKKAVTPAKVVPTPGKKGAAQAKALVPTPGKKGAVTPAKGAKNGKNAKKEDSDEDEDEEDEDDSDEDEDEEDEFEPPVVKGVKPAKAAPAAPASEDEDEEDDDDEDDDDDDEEEEEEDDSEEEVMEITPAKGKKTPAKVVPVKAKSVAEEEEDDEDDEDEEEDEDEEDEEDDEDEDEEEEEEPVKAAPGKRKKEMTKQKEAPEAKKQKIEGSEPTTPFNLFIGNLNPNKSVAELKVAISELFAKNDLAAVDVRTGTNRKFGYVDFESAEDLEKALELTGLKVFGNEIKLEKPKGRDSKKVRAARTLLAKNLSFNITEDELKEVFEDAVEIRLVSQDGRSKGIAYIEFKSEADAEKNLEEKQGAEIDGRSVSLYYTGEKGQRQERTGKNSTWSGESKTLVLSNLSYSATEETLQEVFEKATFIKVPQNPHGKSKGYAFIEFASFEDAKEALNSCNKMEIEGRTIRLELQGPRGSPNARSQPSKTLFVKGLSEDTTEETLKESFEGSVRARIVTDRETGSSKGFGFVDFNSEEDAKAAKEAMEDGEIDGNKVTLDWAKPKGEGGFGGRGGGRGGFGGRGGGRGGRGGFGGRGRGGFGGRGGFRGGRGGGGDFKPQGKKTKFE

SEQ ID NO: 3694 - DNA, 896 bp, Rattus norvegicus
  ref <308>: DATABASE ACCESSION NUMBER: EMBL / M55017
  ref <309>: DATABASE ENTRY DATE: 2000-03-04
ttatgtgtgtgagtgcattaagcatgcttggtcccctcatgctagaatagaatgtacttggtatacctgaaactggtattacagctacatgtggatgttaaacttgttataagagtaacaagtggggctggggatttatttagctcagtggtagtgcgcttacctaggaagcgcaaggccctgggttcggtccccagctccgaaaaaaaaaaagagtaacaagtgctcttaacttctgagccatctctccagttctttactttttagaaacatatctaatgtctatcttgtgttagtaacttaacatagcattggatatagaggaatgcttatgatttgtttgctttcaaggttgtcatccctcagaagaaaggcaaaaaggctaccacaactccagcaaagaaggtggttgtttcacaaacaaaaaaggctgcagttcccacaccagctaagaaagcagctgttaccccaggcaaaaaggcagcagccacaccagccaagaaagctgttacaccagccaaagtagttccaacacctggtaaaaagggagctgcacaagcaaaagcattggtaccaactcctggtaaaaagggagctgtcactccagccaagggggctaagaatggtaagaatgccaagaaggaagacagcgatgaggatgaagatgaagaggatgaagatgacagcgatgaggatgaagatgaagaggatgaatttgagccaccggtagtaaaaggagtgaaaccagcaaaagcagctcctgctgctcctgcctcagaggatgaggatgaggaagatgatgatgatgaagatgatgatgatgatgatgaagaggaggaggaggaagatggtgagttagagcttaggatattgagtactgcatgtacactcctgca

SEQ ID NO: 3695 - protein, 712 aa, Rattus norvegicus; identical to SEQ ID NO: 3693
  ref <308>: DATABASE ACCESSION NUMBER: SWISS-Prot / AAA41732
  ref <309>: DATABASE ENTRY DATE: 2002-06-15

SEQ ID NO: 3696 - DNA, 2122 bp, Rattus norvegicus
  ref <308>: DATABASE ACCESSION NUMBER: EMBL / M55417
  ref <309>: DATABASE ENTRY DATE: 2000-03-04
gaattccagacgacctcagcaaaaccgcaaagactgaacagacacccgcatcaccggagcggccagcctgatgcgcattgcacgtcgggagcagtagttctccgttgcgttccaagaatagagtacacgagggccccaactataagtcccagagtgcactgagcttgacagcctctgggcgccacagctccccagaacggcttcctgccagaatggacccataggagggctggaactgggagaaaggcgcatggtggggcgtgacctgggggaggaactcaagagaggaaacctgggcgtgtgcgtaggaaatcccagagtgagactgagttgggagaacgctccaggtggagagtcacaaggaaacacgagagacgacacccaagacaaagtcatagggagatccagagacaagaaagactcaggtatagtcagtcatagggagatatggagggacgaggccctcagagatggagagttaccgggagacatggataaaggagagaccgccagagatggagagccatagggagagacagtagagagaacacccgagacggagtcacggggaggcaaatgagaaagaaagagagagagagagagacgactaagaggggacaatacaaggagtcacctaggcagggtcgagattcccctgaagacagttccaaggagcacaccgacaagggtcgatattcctccagagacagtcattgggagacaaggaaggagaagagaccactagagacagagtcacaaggaatggagatgaacccgcagaaataaagagggtcacagggccaaaaggataaactctgaatgggtcagagaaaaaaggacagaaggacaaggtgattattcagagagagcacccccttgcgacagaaaagggagaaatacagaagcagggagtgacggacgtcgggaaacgctgaattaataggcaaaggtgaacgcgattagggaagaccgggaaaggctggaagatgaaaacgaaaacatttccagtacaccatgtggggcgtgaggagagacgtgagcaagaaaaggaaagaagcagagaggggggaaatggagagagtaaataggagagaagagaggaaaagagagacaagagaaggcagagaaagagacacacccagagggaggcatggcaccaagcccagaggctgtaagagcgataaagagcccgaagcatcacggagaatgagacattagcctccgcggtcatcagaaagtcctcagcactgaagacaaagtttcttgattaaaagagtaatatgtccagagacacacaggtcgaccccagatcctagattctggcaagacccacacaagcggctgagtcgaggaggaagatgggtgtgggagccaagataacagactggaatgtatttgggagaaagggggtggacaaggcttggaggacgtcccctccttgcatagagctcgggcaatgggagtgtgcacgtggagaggagggaggggcaactgtccgggattcttgggggtgggggaacgcctttaaactgaaaccccgccccttggtgctcatggcaagcctacccccacccccgacttctactttcagcaggtgcgatagcgacgtcccgccgccgcccgtgcctgccgtcctagatgccccagtcttctactgctctgaccccacccgctttctcccggctcggtacagctggtgccggggggtgctgctttctgccctgcgctgcgcaccgttagtgccctgcccctgtccttccgatctcagagtctgcggagtggcccctatcgccgtccacctgtttcctcagaaaaaaggccagctcgtgatccctgctgcgttcctggggccatggcgggtctgggtcctggcgggggcgactcagaagggggaccccgacccctgttttgcagaaagggggcgctgaggcagaaggtggtccacgaggtgaagagccacaagttcaccgctcgtttcttcaagcagccaaccttctgcagtcactgtaccgacttcatctggtgagggaagcgggctgggagagagggccggagaaggaggggacttgggaacagtcaagtcacactggcccccaagcgattgaacagagaggggctgcag

SEQ ID NO: 3697 - protein, 697 aa, Rattus norvegicus
  ref <308>: DATABASE ACCESSION NUMBER: Refseq / NP_036760
  ref <309>: DATABASE ENTRY DATE: 2000-11-01
MAGLGPGGGDSEGGPRPLFCRKGALRQKVVHEVKSHKFTARFFKQPTFCSHCTDFIWGIGKQGLQCQVCSFVVHRRCHEFVTFECPGAGKGPQTDDPRNKHKFRLHSYSSPTFCDHCGSLLYGLVHQGMKCSCCEMNVHRRCVRSVPSLCGVDHTERRGRLQLEIRAPTSDEIHITVGEARNLIPMDPNGLSDPYVKLKLIPDPRNLTKQKTKTVKATLNPVWNETFVFNLKPGDVERRLSVEVWDWDRTSRNDFMGAMSFGVSELLKAPVDGWYKLLNQEEGEYYNVPVADADNCSLLQKFEACNYPLELYERVRMGPSSSPIPSPSPSPTDSKRCFFGASPGRLHISDFSFLMVLGKGSFGKVMLAERRGSDELYAIKILKKDVIVQDDDVDCTLVEKRVLALGGRGPGGRPHFLTQLHSTFQTPDRLYFVMEYVTGGDLMYHIQQLGKFKEPHAAFYAAEIAIGLFFLHNQGIIYRDLKLDNVMLDAEGHIKITDFGMCKENVFPGSTTRTFCGTPDYIAPEIIAYQPYGKSVDWWSFGVLLYEMLAGQPPFDGEDEEELFQAIMEQTVTYPKSLSREAVAICKGFLTKHPGKRLGSGPDGEPTIRAHGFFRWIDWERLERLEIAPPFRPRPCGRSGENFDKFFTRAAPALTPPDRLVLASIDQADFQGFTYVNPDFVHPDARSPTSPVPVPVM

SEQ ID NO: 3698 - DNA, 2506 bp, Homo sapiens
  ref <308>: DATABASE ACCESSION NUMBER: Refseq / NM_002739
  ref <309>: DATABASE ENTRY DATE: 2001-03-20
ccttgcggagccggcgcgcccggggtgccgctccctgcctggcgcgctccgcacctggaggtgccttgcccctctcctgcccacctcggaatttccctgtggctcctttgatccttcgagtctccagctcctctcccttccacctgtttcccccaagaaaggcaggatcctggtccctgctacgtttctggggccatggctggtctgggccccggcgtaggcgattcagaggggggaccccggcccctgttctgcagaaagggggctctgaggcagaaggtggtccacgaagtcaagagccacaagttcaccgctcgcttcttcaagcagcccaccttctgcagccactgcaccgacttcatctggggtatcggaaagcagggcctgcaatgtcaagtctgcagctttgtggttcatcgacgatgccacgaatttgtgaccttcgagtgtccaggcgctgggaagggcccccagacggacgacccccggaacaaacacaagttccgcctgcatagctacagcagccccaccttctgcgaccactgtggctccctcctctacgggcttgtgcaccagggcatgaaatgttcttgctgcgagatgaacgtgcaccggcgctgtgtgcgtagcgtgccctctctgtgcggtgtggaccacaccgagcgccgcgggcgcctgcagctggagatccgggctcccacagcagatgagatccacgtaactgttggcgaggcccgtaacctaattcctatggaccccaatggtctctctgatccctatgtgaaactgaagctcatcccagaccctcggaacctgacgaaacagaagacccgaacggtgaaagccacgctaaaccctgtgtggaatgagacctttgtgttcaacctgaagccaggggatgtggagcgccggctcagcgtggaggtgtgggactgggaccggacctcccgcaacgacttcatgggggccatgtcctttggcgtctcggagctgctcaaggcgcccgtggatggctggtacaagttactgaaccaggaggagggcgagtattacaatgtgccggtggccgatgctgacaactgcagcctcctccagaagtttgaggcttgtaactaccccctggaattgtatgagcgggtgcggatgggcccctcttcctctcccatcccctccccttcccctagtcccaccgaccccaagcgctgcttcttcggggcgagtccaggacgcctgcacatctccgacttcagcttcctcatggttctaggaaaaggcagttttgggaaggtgatgctggccgagcgcaggggctctgatgagctctacgccatcaagatcttgaaaaaggacgtgatcgtccaggacgacgatgtggactgcacgctggtggagaaacgtgtgctggcgctggggggccggggtcctggcggccggccccacttcctcacccagctccactccaccttccagaccccggaccgcctgtatttcgtgatggagtacgtcaccgggggagacttgatgtaccacattcaacagctgggcaagtttaaggagccccatgcagcgttctacgcggcagaaatcgctatcggcctcttcttccttcacaatcagggcatcatctacagggacctgaagctggacaatgtgatgctggatgctgagggacacatcaagatcactgactttggcatgtgtaaggagaacgtcttccccgggacgacaacccgcaccttctgcgggaccccggactacatagccccggagatcattgcctaccagccctatgggaagtctgtcgattggtggtcctttggagttctgctgtatgagatgttggcaggacagcctcccttcgatggggaggacgaggaggagctgtttcaggccatcatggaacaaactgtcacctaccccaagtcgctttcccgggaagccgtggccatctgcaaggggttcctgaccaagcacccagggaagcgcctgggctcagggcctgatggggaacctaccatccgtgcacatggctttttccgctggattgactgggagcggctggaacgattggagatcccgcctcctttcagaccccgcccgtgtggccgcagcggcgagaactttgacaagttcttcacgcgggcggcgccagcgctgacccctccagaccgcctagtcctggccagcatcgaccaggccgatttccagggcttcacctacgtgaaccccgacttcgtgcacccggatgcccgcagccccaccagcccagtgcctgtgcccgtcatgtaatctcacccgccgccactaggtgtccccaacgtcccctccgccgtgccggcggcagccccacttcacccccaacttcaccaccccctgtcccattctagatcctgcaccccagcattccagctctgcccccgcgggttctagacgcccctcccaagcgttcctggccttctgaactccatacagcctctacagccgtcccgcgttcaagacttgagcg

SEQ ID NO: 3699 - protein, 697 aa, Homo sapiens
  ref <308>: DATABASE ACCESSION NUMBER: SWISS-Prot / P05129
  ref <309>: DATABASE ENTRY DATE: 2001-10-16
MAGLGPGVGDSEGGPRPLFCRKGALRQKVVHEVKSHKFTARFFKQPTFCSHCTDFIWGIGKQGLQCQVCSFVVHRRCHEFVTFECPGAGKGPQTDDPRNKHKFRLHSYSSPTFCDHCGSLLYGLVHQGMKCSCCEMNVHRRCVRSVPSLCGVDHTERRGRLQLEIRAPTADEIHVTVGEARNLIPMDPNGLSDPYVKLKLIPDPRNLTKQKTRTVKATLNPVWNETFVFNLKPGDVERRLSVEVWDWDRTSRNDFMGAMSFGVSELLKAPVDGWYKLLNQEEGEYYNVPVADADNCSLLQKFEACNYPLELYERVRMGPSSSPIPSPSPSPTDPKRCFFGASPGRLHISDFSFLMVLGKGSFGKVMLAERRGSDELYAIKILKKDVIVQDDDVDCTLVEKRVLALGGRGPGGRPHFLTQLHSTFQTPDRLYFVMEYVTGGDLMYHIQQLGKFKEPHAAFYAAEIAIGLFFLHNQGIIYRDLKLDNVMLDAEGHIKITDFGMCKENVFPGTTTRTFCGTPDYIAPEIIAYQPYGKSVDWWSFGVLLYEMLAGQPPFDGEDEEELFQAIMEQTVTYPKSLSREAVAICKGFLTKHPGKRLGSGPDGEPTIRAHGFFRWIDWERLERLEIPPPFRPRPCGRSGENFDKFFTRAAPALTPPDRLVLASIDQADFQGFTYVNPDFVHPDARSPTSPVPVPVM

SEQ ID NO: 3700 - DNA, 1699 bp, Rattus norvegicus
  ref <308>: DATABASE ACCESSION NUMBER: EMBL / M57276
  ref <309>: DATABASE ENTRY DATE: 2000-03-04
gaattcggcacgaggtattttttctctcttcacttctccttttacacaaatagacatagacttctgggttaccagactgtgctcgccactttaaagataataagcaaattctacctgaagtactgagggacactgccttctaaagggcatactatcccagcatgggcatgagcagcctgaaattgctgaaatatgttctgtttttctttaactttcttttttgggtctgtggctgttgcattttgggctttgggatccaccttctggtccagaatacctatggaatactcttccgtaatctccccttcctgacacttggcaatgttctggtcattgtgggctccattatcatggtagttgccttcttgggctgcatgggatcaatcaaggagaataagtgcctgcttatgtcgttctttgttctgctgctgcttattctccttgctgaggtgaccttagccatcctgctctttgtgtatgaaaaaaagatcaacacgttagtggcagagggcctgaatgacagcatccaacattatcactctgacaacagcaccaggatggcatgggacttcatccagtcacaactgcagtgttgtggtgtaaatggctcaagtgattggatcagtggtccaccatcttcctgcccatcaggtgcagatgttcagggttgttataaaaaagggcaggcgtggtttcactccaatttcttgtatattggaatcgttaccatctgcgtatgtgtgatacaggtgctggggatgtcctttgctctgacactgaactgccagattgacaaaaccagccaggctttagggctgtgatttacacctaccttctgcttaagtgatttatttctctctagaaagtcaaagcacccattccataaggagttaaacaattacgtgcctcactggcattttgactttctcttattccttctttgactggacctctgtcttatacacatccagggaagagaacatttgtcatggacttcccacatcaagcagaagacaaacattaaccaactgatagcagtaaccatatcccttaaagatgatgaaacatacctgggtaattttttaaaagagacactgtagcactgtaatttgatatccactgctagctgcaggtgtgatatatctcagaatactggcctaccacatgtaatccattgagtttagccccaaatccaataaaaagaggtccaagtttaaatgttagactcttaacaattgtaaaatcaatctctaccttctaaatcttgctgctgtcactctacaaagtcacataggagacaagctgaaggaaaatttggagtcccattcattagataattgacatgtccagttcccttttgaacacagtccttgggaataggaatcatacagagatcttttatcactggaaaaacattctgatttctttgttaaaatgtattattgattttgttacatcatccacacatccatccatccatccatccatccatccatccatccatccataaaagactaattattctcatcctaccatcagccagtttgcagctttgaattacattgccaaagaacaactcagaagaattaatatctccagtgtgttagctgataatcatatccatgttgatgttgttgttatttctctattaaataaggttctgttaatgtaccattttaacctgtctcgtgccgaattc

SEQ ID NO: 3701 - protein, 218 aa, Rattus norvegicus
  ref <308>: DATABASE ACCESSION NUMBER: SWISS-Prot / P24485
  ref <309>: DATABASE ENTRY DATE: 2001-10-16
GMSSLKLLKYVLFFFNFLFWVCGCCILGFGIHLLVQNTYGILFRNLPFLTLGNVLVIVGSIIMVVAFLGCMGSIKENKCLLMSFFVLLLLILLAEVTLAILLFVYEKKINTLVAEGLNDSIQHYHSDNSTRMAWDFIQSQLQCCGVNGSSDWISGPPSSCPSGADVQGCYKKGQAWFHSNFLYIGIVTICVCVIQVLGMSFALTLNCQIDKTSQALGL

SEQ ID NO: 3702 - DNA, 1480 bp, Homo sapiens
  ref <308>: DATABASE ACCESSION NUMBER: EMBL / M37033
  ref <309>: DATABASE ENTRY DATE: 1999-07-02
accagccttgtctcggccacctcaaggataatcactaaattctgccgaaaggactgaggaacggtgcctggaaaagggcaagaatatcacggcatgggcatgagtagcttgaaactgctgaagtatgtcctgtttttcttcaacttgctcttttggatctgtggctgctgcattttgggctttgggatctacctgctgatccacaacaacttcggagtgctcttccataacctcccctccctcacgctgggcaatgtgtttgtcatcgtgggctctattatcatggtagttgccttcctgggctgcatgggctctatcaaggaaaacaagtgtctgcttatgtcgttcttcatcctgctgctgattatcctccttgctgaggtgaccttggccatcctgctctttgtatatgaacagaagctgaatgagtatgtggctaagggtctgaccgacagcatccaccgttaccactcagacaatagcaccaaggcagcgtgggactccatccagtcatttctgcagtgttgtggtataaatggcacgagtgattggaccagtggcccaccagcatcttgcccctcagatcgaaaagtggagggttgctatgcgaaagcaagactgtggtttcattccaatttcctgtatatcggaatcatcaccatctgtgtatgtgtgattgaggtgttggggatgtcctttgcactgaccctgaactgccagattgacaaaaccagccagaccatagggctatgatctgcagtagttctgtggtgaagagacttgtttcatctccggaaatgcaaaaccatttatagcatgaagccctacatgatcactgcaggatgatcctcctcccatcctttccctttttaggtccctgtcttatacaaccagagaagtgggtgttggccaggcacatcccatctcaggcagcaagacaatctttcactcactgacggcagcagccatgtctctcaaagtggtgaaactaatatctgagcatcttttagacaagagaggcaaagacaaactggatttaatggcccaacatcaaagggtgaacccaggatatgaatttttgcatcttcccattgtcgaattagtctccagcctctaaataatgcccagtcttctccccaaagtcaagcaagagactagttgaagggagttctggggccaggctcactggaccattgtcacaaccctctgtttctctttgactaagtgccctggctacaggaattacacagttctctttctccaaagggcaagatctcatttcaatttctttattagagggccttattgatgtgttctaagtctttccagaaaaaaactatccagtgatttatatcctgatttcaaccagtcacttagctgataatcacagtaagaagacttctggtattatctctctatcagataagattttgttaatgtactattttactcttcaataaataaaacagtttattatctc

SEQ ID NO: 3703 - protein, 219 aa, Homo sapiens
  ref <308>: DATABASE ACCESSION NUMBER: SWISS-Prot / P19397
  ref <309>: DATABASE ENTRY DATE: 2002-06-15
MGMSSLKLLKYVLFFFNLLFWICGCCILGFGIYLLIHNNFGVLFHNLPSLTLGNVFVIVGSIIMVVAFLGCMGSIKENKCLLMSFFILLLIILLAEVTLAILLFVYEQKLNEYVAKGLTDSIHRYHSDNSTKAAWDSIQSFLQCCGINGTSDWTSGPPASCPSDRKVEGCYAKARLWFHSNFLYIGIITICVCVIEVLGMSFALTLNCQIDKTSQTIGL

SEQ ID NO: 3704 - DNA, 1800 bp, Rattus norvegicus
  ref <308>: DATABASE ACCESSION NUMBER: EMBL / M57428
  ref <309>: DATABASE ENTRY DATE: 2000-03-04
tcctataacccacctcagggttatggacaacagaaccagtacaacagcagcagtggaggtggtggagggggcggtggaggcaactatggccaagatcagtcctctatgagtggcggcggcggtggtggtggttatggcaggagtgtttgacatagacctggaccagccagaggatgcaggctctgaggatgagctggaggaggggggtcagttaaatgaaagcatggaccatgggggagttggaccatatgaacttggcatggaacattgtgagaaatttgaaatctcagaaactagtgtgaacagagggccagaaaaaatcagaccagaatgttttgagctacttcgggtacttggtaaagggggctatggaaaggtttttcaagtacgaaaagtaacaggagcaaatactgggaagatatttgccatgaaggtgcttaaaaaggcaatgatagtaagaaatgctaaagatacagctcatacaaaagcagagcggaatattctggaggaagtaaagcatcccttcatcgtggatttaatttatgcctttcagaccggtggaaaactctacctcatccttgagtatctcagtggaggagaactatttatgcagttagaaagagaggggatattcatggaagatacagcttgcttttacttggctgaaatctccatggctttggggcatttacatcaaaaagggatcatctacagagacctgaagccggagaacatcatgcttaatcaccaaggtcacgtgaagctgacagactttggactatgcaaagaatctattcatgatggaacagtcacgcacacattttgtggaacaatagaatacatggcccctgaaatcttgatgagaagcggccacaaccgtgctgtggattggtggagtttgggagcattaatgtatgacatgctgactggagcacctccattcactggggagaatagaaagaaaacaattgacaaaatcctcaaatgtaaacttaatttgcctccctacctcacacaagaagctcgagatctgcttaaaaagctgctgaaaagaaatgctgcttctcgtcttggagctggccctggggatgctggagaagtccaagcgcatccattttttagacacattaactgggaagagcttttggctcggaaggtggagcccccctttaagcctctgttgcaatctgaagaggatgtgagtcagtttgattcaaagtttactcgtcagacacctgttgacagccccgatgactcaactctcagtgaaagtgccaaccaggtctttctgggttttacatatgtggctccatctgtacttgaaagtgtgaaagaaaagttttcttttgaaccaaaaatccgatcgcctcgaagatttattggtagcccacgaacgcctgtcagcccagtcaaattctctcctggggatttctggggacgaggtgcttcagccagcacagcaaatcctcagacacctgtggaatacccaatggaaacaagtggaatagagcagatggatgtgacaacgagcggggaagcttcagcgccacttccaatccgacagcccaactctgggccatacaaaaaacaagcttttcctatgatctccaaacggccagagcacctgcgtatgaatctatgatgaaacaatgcttttattaatgcaaatgcaaaaaggaaacaaatcctggaaggggatgtgtgaggatcctgcaagataaaaatgagaaaatggcagtctcaaagagtcagtgtcattacctggaatgctttcgatggaggaaaaaataaacatggatt

SEQ ID NO: 3705 - protein, 502 aa, Rattus norvegicus
  ref <308>: DATABASE ACCESSION NUMBER: SWISS-Prot / P21425
  ref <309>: DATABASE ENTRY DATE: 2001-10-16
MAGVFDIDLDQPEDAGSEDELEEGGQLNESMDHGGVGPYELGMEHCEKFEISETSVNRGPEKIRPECFELLRVLGKGGYGKVFQVRKVTGANTGKIFAMKVLKKAMIVRNAKDTAHTKAERNILEEVKHPFIVDLIYAFQTGGKLYLILEYLSGGELFMQLEREGIFMEDTACFYLAEISMALGHLHQKGIIYRDLKPENIMLNHQGHVKLTDFGLCKESIHDGTVTHTFCGTIEYMAPEILMRSGHNRAVDWWSLGALMYDMLTGAPPFTGENRKKTIDKILKCKLNLPPYLTQEARDLLKKLLKRNAASRLGAGPGDAGEVQAHPFFRHINWEELLARKVEPPFKPLLQSEEDVSQFDSKFTRQTPVDSPDDSTLSESANQVFLGFTYVAPSVLESVKEKFSFEPKIRSPRRFIGSPRTPVSPVKFSPGDFWGRGASASTANPQTPVEYPMETSGIEQMDVTTSGEASAPLPIRQPNSGPYKKQAFPMISKRPEHLRMNL

SEQ ID NO: 3706 - DNA, 2346 bp, Homo sapiens
  ref <308>: DATABASE ACCESSION NUMBER: EMBL / M60724
  ref <309>: DATABASE ENTRY DATE: 2000-03-04
gcacgaggctgcggcgggtccgggcccatgaggcgacgaaggaggcgggacggcttttacccagccccggacttccgagacagggaagctgaggacatggcaggagtgtttgacatagacctggaccagccagaggacgcgggctctgaggatgagctggaggaggggggtcagttaaatgaaagcatggaccatgggggagttggaccatatgaacttggcatggaacattgtgagaaatttgaaatctcagaaactagtgtgaacagagggccagaaaaaatcagaccagaatgttttgagctacttcgggtacttggtaaagggggctatggaaaggtttttcaagtacgaaaagtaacaggagcaaatactgggaaaatatttgccatgaaggtgcttaaaaaggcaatgatagtaagaaatgctaaagatacagctcatacaaaagcagaacggaatattctggaggaagtaaagcatcccttcatcgtggatttaatttatgcctttcagactggtggaaaactctacctcatccttgagtatctcagtggaggagaactatttatgcagttagaaagagagggaatatttatggaagacactgcctgcttttacttggcagaaatctccatggctttggggcatttacatcaaaaggggatcatctacagagacctgaagccggagaatatcatgcttaatcaccaaggtcatgtgaaactaacagactttggactatgcaaagaatctattcatgatggaacagtcacacacacattttgtggaacaatagaatacatggcccctgaaatcttgatgagaagtggccacaatcgtgctgtggattggtggagtttgggagcattaatgtatgacatgctgactggagcacccccattcactggggagaatagaaagaaaacaattgacaaaatcctcaaatgtaaactcaatttgcctccctacctcacacaagaagccagagatctgcttaaaaagctgctgaaaagaaatgctgcttctcgtctgggagctggtcctggggacgctggagaagttcaagctcatccattctttagacacattaactgggaagaacttctggctcgaaaggtggagcccccctttaaacctctgttgcaatctgaagaggatgtaagtcagtttgattccaagtttacacgtcagacacctgtcgacagcccagatgactcaactctcagtgaaagtgccaatcaggtctttctgggttttacatatgtggctccatctgtacttgaaagtgtgaaagaaaagttttcctttgaaccaaaaatccgatcacctcgaagatttattggcagcccacgaacacctgtcagcccagtcaaattttctcctggggatttctggggaagaggtgcttcggccagcacagcaaatcctcagacacctgtggaatacccaatggaaacaagtggcatagagcagatggatgtgacaatgagtggggaagcatcggcaccacttccaatacgacagccgaactctgggccatacaaaaaacaagcttttcccatgatctccaaacggccagagcacctgcgtatgaatctatgacagagcaatgcttttaatgaatttaaggcaaaaaggtggagagggagatgtgtgagcatcctgcaaggtgaaacaagactcaaaatgacagtttcagagagtcaatgtcattacatagaacacttcggacacaggaaaaataaacgtggattttaaaaaatcaatcaatggtgcaaaaaaaaacttaaagcaaaatagtattgctgaactcttaggcacatcaattaattgattcctcgcgacatctttctcaaccttatcaaggattttcatgttgatgactcgaaactgacagtattaagggtaggatgttgctctgaatcactgtgagtctgatgtgtgaagaagggtatcctttcattaggcaagtacaaattgcctataatacttgcaactaaggacaaattagcatgcaagcttggtcaaacttttcccaggcaaaatgggaaggcaaagacaaaagaaacttaccaattgatgttttacgtgcaaacaacctgaatcttttttttatataaatatatatttttcaaatagatttttgattcagctcattatgaaaaacatcccaaactttaaaatgcgaaattattggttggtgtgaagaaagccagacaacttctgtttcttctcttggtgaaataataaaatgcaaatgaatcattgttaacacagctgtggctcgtttgagggattggggtggacctggggtttattttcagtaacccagctgcggagcct

SEQ ID NO: 3707 - protein, 502 aa, Homo sapiens
  ref <308>: DATABASE ACCESSION NUMBER: SWISS-Prot / P23443
  ref <309>: DATABASE ENTRY DATE: 2002-06-15
MAGVFDIDLDQPEDAGSEDELEEGGQLNESMDHGGVGPYELGMEHCEKFEISETSVNRGPEKIRPECFELLRVLGKGGYGKVFQVRKVTGANTGKIFAMKVLKKAMIVRNAKDTAHTKAERNILEEVKHPFIVDLIYAFQTGGKLYLILEYLSGGELFMQLEREGIFMEDTACFYLAEISMALGHLHQKGIIYRDLKPENIMLNHQGHVKLTDFGLCKESIHDGTVTHTFCGTIEYMAPEILMRSGHNRAVDWWSLGALMYDMLTGAPPFTGENRKKTIDKILKCKLNLPPYLTQEARDLLKKLLKRNAASRLGAGPGDAGEVQAHPFFRHINWEELLARKVEPPFKPLLQSEEDVSQFDSKFTRQTPVDSPDDSTLSESANQVFLGFTYVAPSVLESVKEKFSFEPKIRSPRRFIGSPRTPVSPVKFSPGDFWGRGASASTANPQTPVEYPMETSGIEQMDVTMSGEASAPLPIRQPNSGPYKKQAFPMISKRPEHLRMNL

SEQ ID NO: 3708 - DNA, 1712 bp, Rattus norvegicus
  ref <308>: DATABASE ACCESSION NUMBER: EMBL / M57728
  ref <309>: DATABASE ENTRY DATE: 2000-03-04
atggcgacggcagtgtgggcggctgcgcggctacttcggggttctgcggcgctgtgcgcgcggcccaagttcggttctcctgcacacagacggttcagcagtggcgccacctaccccaacatccctctctcttctcccttgcccggagtgcccaagcctatttttgctacagttgatggacaggaaaagtttgaaaccaaagtcaccactctggacaatgggcttcgtgtggcatctcaaaataagtttggacagttctgtaccttaggaattcttattaattcaggatcacgatatgaagcgaaatatcttagtggaattgctcattttctggaaaaattggcattttcgtctaccgctcgatttgacagcaaagatgaaattctgcttaccctggaaaaacatggtggtatctgtgactgccagacctcgagagacaccaccatgtatgctgtgtctgctgacagcaaaggcttggacactgtggtgggcctgctggctgatgtggttctgcacccccgcctgacagatgaggaaattgagatgacgaggatggctgttcagtttgaacttgaggacctgaacatgagacctgacccagagccactgctcaccgagatgattcatgaagctgcttttagggagaacacggtgggcctgcaccggttttgtcctgtggagaatatcgggaagattgaccgagaagtgctgcattcctacctgaagaactactacacccccgaccgcatggtgcttgctggagtgggcgtggagcatgagcacctggtcgaatgtgccagaaagtacctcctgggagtgcagcctgcctggggagctccgggagctgtgtggatgttgacagctcagtggcacagtacacgggggggatcatcaaggtggagagagacatgtcaaatgtcagccttgcgcccaccccgattccagagctcacacatatatggtggggctagagagctgctccttctggaggaggatttcatcccctttgctgtgttgaatatgatgatgggaggcgggggctccttctcggccggagggcctggcaaaggcatgttctccaggctctacctcaacgtgctcaatcggcaccactggatgtataatgcaacctcctaccaccacagctatgaagacacaggcctcctgtgcatccatgccagcgcagaccctcgacaggttcgagaaatggtagaaatcatcacaaaggagtttattttgatgggccgaacggtggatttggtggagctggagcgggccaagacacagctgatgtccatgctcatgatgaacttggagtccaggcctgtgatctttgaggatgtggggaggcaggtgttggctacacattcaagaaagctgccccatgagctgtgcacactcattcgcaatgtgaagccggaagatatcaagagggttgcttccaagatgctccgaggcaagcctgctgtggcggctctgggtgatttgactgacctgcccacgtatgaacacatccaggcagcgctgtccagcagagatgggcgcctgcccagaacataccggctgttccggtagagccctccagcggaggctgcagagtgcttctgtgcatgttactgttggtgtggacactgcataagaatagctagctctgtgaacagtgccaacagggaagctctggaaacttgaatgaaagttactgttgccactgc

SEQ ID NO: 3709 - protein, 524 aa, Rattus norvegicus
  ref <308>: DATABASE ACCESSION NUMBER: SWISS-Prot / P20069
  ref <309>: DATABASE ENTRY DATE: 2002-06-15
MATAVWAAARLLRGSAALCARPKFGSPAHRRFSSGATYPNIPLSSPLPGVPKPIFATVDGQEKFETKVTTLDNGLRVASQNKFGQFCTLGILINSGSRYEAKYLSGIAHFLEKLAFSSTARFDSKDEILLTLEKHGGICDCQTSRDTTMYAVSADSKGLDTVVGLLADVVLHPRLTDEEIEMTRMAVQFELEDLNMRPDPEPLLTEMIHEAAFRENTVGLHRFCPVENIGKIDREVLHSYLKNYYTPDRMVLAGVGVEHEHLVECARKYLLGVQPAWGAPGAVWMLTAQWHSTRGGSSRWRETCQMSALRPPRFQSSHIYGGARELLLLEEDFIPFAVLNMMMGGGGSFSAGGPGKGMFSRLYLNVLNRHHWMYNATSYHHSYEDTGLLCIHASADPRQVREMVEIITKEFILMGRTVDLVELERAKTQLMSMLMMNLESRPVIFEDVGRQVLATHSRKLPHELCTLIRNVKPEDIKRVASKMLRGKPAVAALGDLTDLPTYEHIQAALSSRDGRLPRTYRLFR

SEQ ID NO: 3710 - DNA, 2083 bp, Homo sapiens
  ref <308>: DATABASE ACCESSION NUMBER: EMBL / D21064
  ref <309>: DATABASE ENTRY DATE: 2002-05-29
agacgcaagatggcggctgtggtgctggcggcgacgcggttgctgcggggctcgggttcttggggctgttcgcggctgaggtttggacctcctgcgtacagacggtttagtagtggtggtgcctatcccaacatccccctctcttctcccttacctggagtacccaagcctgtttttgctacagttgatggacaggaaaagtttgaaaccaaagtaaccacattggataatgggcttcgcgtggcatctcagaataagtttggacagttttgtacagtaggaattcttatcaattcaggatcgagatatgaagcgaaataccttagtggaattgctcactttttggaaaaattggcattttcgtctactgctcgatttgacagcaaagatgaaattctgcttacgttggaaaagcatgggggtatctgtgactgccagacatcaagagacaccaccatgtatgctgtgtctgctgatagcaaaggcttggacacggtggttgccttactggctgatgtggttctgcagccccggctaacagatgaagaagtcgagatgacgcggatggcggtccagtttgagctggaggacctgaacctgcggcctgacccagagccacttctcaccgagatgattcatgaagcggcttacagggagaacacagttggcctccaccgtttctgccccacagaaaacgtagcaaagatcaaccgagaggtgctgcattcctacctgaggaactactacactcccgaccgcatggtgctggccggcgtgggcgtggagcacgagcatctggtggactgtgcccggaagtacctcctgggggtccagccggcctgggggagcgcagaggccgtggatattgacagatctgtggcccagtacactggggggattgccaagctagaaagagacatgtccaatgtcagcctgggcccgacccccatccccgagctcacgcacatcatggttggactggagagctgctccttcctggaggaggacttcatcccctttgcagtgttgaacatgatgatgggcggaggtggctccttctcggctggtgggcccggcaagggcatgttctccaggctctacctcaacgtgctcaacaggcaccactggatgtataacgcgacctcctaccaccacagctacgaggacactggcctcctttgcatccatgccagcgccgacccaagacaggttcgagaaatggtagaaatcatcacaaaggagtttattttaatgggcggaaccgtggacacggtggagctggaacgagccaagacgcagctgacatcaatgctcatgatgaacctggaatccaggcctgtgatcttcgaggatgtggggaggcaggtgctggccactcgctccagaaagctgccgcacgagctgtgcacgctcatccgcaacgtgaagccggaagatgtgaagagagtcgcttctaagatgctccgagggaagccggcagtggccgccctgggtgacctgactgacctgcccacgtatgaggacatccagaccgccctgtcgagtaaggacgggcgcctgcccaggacgtaccggctcttccggtagaaccgctccccggcctgacagacccagggagctgcagctggagcccgttcccgtgcgtgttagtttggacacgaatttagtctaaaaagctgtctggttgtataaacggtgcaaacaatgtcgccacagcacccacgcggtttgcattcttttggaactcaatgtgccgatcagtggagtcagtatcgagcctgaccaccgcaagccaggaagcaggtgaagtgcccagcgctggagtgcagcgtgccacgaggagggcggtcggtgcttccctcctcgggctgtgggcacatggggccccgcaggttccttggaggagccctgagctgggaggcagcaaaggctgacctatcaaagcctcccggaggccaccgtgctgggtaccaggactcacctctgacaagcaggagaaggtaagggcccggtcagctccaaggagcgcgctccacgcgcgtgcacacagcttccctggtaataaagagctggcatctttctt

SEQ ID NO: 3711 - protein, 525 aa, Homo sapiens
  ref <308>: DATABASE ACCESSION NUMBER: SWISS-Prot / Q10713
  ref <309>: DATABASE ENTRY DATE: 2002-06-15
MAAVVLAATRLLRGSGSWGCSRLRFGPPAYRRFSSGGAYPNIPLSSPLPGVPKPVFATVDGQEKFETKVTTLDNGLRVASQNKFGQFCTVGILINSGSRYEAKYLSGIAHFLEKLAFSSTARFDSKDEILLTLEKHGGICDCQTSRDTTMYAVSADSKGLDTVVALLADVVLQPRLTDEEVEMTRMAVQFELEDLNLRPDPEPLLTEMIHEAAYRENTVGLHRFCPTENVAKINREVLHSYLRNYYTPDRMVLAGVGVEHEHLVDCARKYLLGVQPAWGSAEAVDIDRSVAQYTGGIAKLERDMSNVSLGPTPIPELTHIMVGLESCSFLEEDFIPFAVLNMMMGGGGSFSAGGPGKGMFSRLYLNVLNRHHWMYNATSYHHSYEDTGLLCIHASADPRQVREMVEIITKEFILMGGTVDTVELERAKTQLTSMLMMNLESRPVIFEDVGRQVLATRSRKLPHELCTLIRNVKPEDVKRVASKMLRGKPAVAALGDLTDLPTYEDIQTALSSKDGRLPRTYRLFR

SEQ ID NO: 3712 - DNA, 1712 bp, Rattus norvegicus; identical to SEQ ID NO: 3708
  ref <308>: DATABASE ACCESSION NUMBER: EMBL / M57728
  ref <309>: DATABASE ENTRY DATE: 2000-03-04

SEQ ID NO: 3713 - protein, 524 aa, Rattus norvegicus; identical to SEQ ID NO: 3709
  ref <308>: DATABASE ACCESSION NUMBER: SWISS-Prot / P20069
  ref <309>: DATABASE ENTRY DATE: 2002-06-15

SEQ ID NO: 3714 - DNA, 2083 bp, Homo sapiens; identical to SEQ ID NO: 3710
  ref <308>: DATABASE ACCESSION NUMBER: EMBL / D21064
  ref <309>: DATABASE ENTRY DATE: 2002-05-29

SEQ ID NO: 3715 - protein, 525 aa, Homo sapiens; identical to SEQ ID NO: 3711
  ref <308>: DATABASE ACCESSION NUMBER: SWISS-Prot / Q10713
  ref <309>: DATABASE ENTRY DATE: 2002-06-15

SEQ ID NO: 3716 - DNA, 1712 bp, Rattus norvegicus; identical to SEQ ID NO: 3708
  ref <308>: DATABASE ACCESSION NUMBER: EMBL / M57728
  ref <309>: DATABASE ENTRY DATE: 2000-03-04

SEQ ID NO: 3717 - protein, 524 aa, Rattus norvegicus; identical to SEQ ID NO: 3709
  ref <308>: DATABASE ACCESSION NUMBER: SWISS-Prot / P20069
  ref <309>: DATABASE ENTRY DATE: 2002-06-15

SEQ ID NO: 3718 - DNA, 2083 bp, Homo sapiens; identical to SEQ ID NO: 3710
  ref <308>: DATABASE ACCESSION NUMBER: EMBL / D21064
  ref <309>: DATABASE ENTRY DATE: 2002-05-29

SEQ ID NO: 3719 - protein, 525 aa, Homo sapiens; identical to SEQ ID NO: 3711
  ref <308>: DATABASE ACCESSION NUMBER: SWISS-Prot / Q10713
  ref <309>: DATABASE ENTRY DATE: 2002-06-15

SEQ ID NO: 3720 - DNA, 1712 bp, Rattus norvegicus; identical to SEQ ID NO: 3708
  ref <308>: DATABASE ACCESSION NUMBER: EMBL / M57728
  ref <309>: DATABASE ENTRY DATE: 2000-03-04

SEQ ID NO: 3721 - protein, 524 aa, Rattus norvegicus; identical to SEQ ID NO: 3709
  ref <308>: DATABASE ACCESSION NUMBER: SWISS-Prot / P20069
  ref <309>: DATABASE ENTRY DATE: 2002-06-15

SEQ ID NO: 3722 - DNA, 2083 bp, Homo sapiens; identical to SEQ ID NO: 3710
  ref <308>: DATABASE ACCESSION NUMBER: EMBL / D21064
  ref <309>: DATABASE ENTRY DATE: 2002-05-29

SEQ ID NO: 3723 - protein, 525 aa, Homo sapiens; identical to SEQ ID NO: 3711
  ref <308>: DATABASE ACCESSION NUMBER: SWISS-Prot / Q10713
  ref <309>: DATABASE ENTRY DATE: 2002-06-15

SEQ ID NO: 3724 - DNA, 1016 bp, Rattus norvegicus
  ref <308>: DATABASE ACCESSION NUMBER: EMBL / M58364
  ref <309>: DATABASE ENTRY DATE: 2000-03-04
gacttcgaacctcattcggtgcagaactcctgtcccggtgacagccacaggtcacggccgccggctaagccgagccgcagcgcttggtagcaccttagggtgtctcgggagcaatcgcgccgggtccatggagaagccgcggggtgtaaggtgcaccaatgggttccccgagcgggagctgccgcggcccggggccagccgacctgccgagaagtcccggccgcccgaggccaagggcgcacagccagccgacgcctggaaggcagggcggccccgcagcgaggaggataacgagctgaacctccccaacctggcggccgcttactcgtccatcctgcgctcgctgggcgaggacccccagcggcaggggctgctcaagacgccctggagggcggccaccgccatgcagttcttcaccaagggataccaggagaccatctcagatgtcctgaacgatgctatatttgatgaggaccatgacgagatggtgattgtgaaggacattgacatgttttccatgtgtgagcatcacctggtcccatttgtgggaagggtccatattggttatcttcctaacaagcaagtccttggtctcagcaaacttgccaggattgtggaaatctacagtagaagactacaagttcaagaacgccttaccaaacagattgcagtggccatcacagaagccttgcagcctgctggcgtcggggtagtgattgaagcaacacacatgtgtatggtcatgcgaggtgtgcagaaaatgaacagcaagactgtcactagcaccatgctaggcgtgttccgggaagacccaaagactcgggaggagttcctcacactcatcaggagctgaacttccgtgtgcgagccccggtttgcagacccccgctgaggccagcgttatctgtctcgattgtacattccagttccagttggtatacttgtcaactttatttctcaccatgaattgtatttaataattatttatagagatgtcaaataaaggtgatcaactt

SEQ ID NO: 3725 - protein, 241 aa, Rattus norvegicus
  ref <308>: DATABASE ACCESSION NUMBER: SWISS-Prot / P22288
  ref <309>: DATABASE ENTRY DATE: 2002-06-15
MEKPRGVRCTNGFPERELPRPGASRPAEKSRPPEAKGAQPADAWKAGRPRSEEDNELNLPNLAAAYSSILRSLGEDPQRQGLLKTPWRAATAMQFFTKGYQETISDVLNDAIFDEDHDEMVIVKDIDMFSMCEHHLVPFVGRVHIGYLPNKQVLGLSKLARIVEIYSRRLQVQERLTKQIAVAITEALQPAGVGVVIEATHMCMVMRGVQKMNSKTVTSTMLGVFREDPKTREEFLTLIRS

SEQ ID NO: 3726 - DNA, 1413 bp, Homo sapiens
  ref <308>: DATABASE ACCESSION NUMBER: EMBL / U63810
  ref <309>: DATABASE ENTRY DATE: 1998-07-02
ggtgagtttccggggcgacccaggtcctccggcggaacggggagcctctgtcggccgcggaagcctggagtgggcggtacgcagacgcgcgcggcgagacccgctgtctgctcagcggactctgcccgcccccacctccccctgcgtcgggccgacatgaaggactcgctggtgctgctgggccgtgtcccggcgcacccggactcccgttgctggttcctggcctggaaccccgcggggaccctgctggcctcgtgcggcggcgaccggagaatccgcatctggggcacggagggtgacagctggatctgcaagtctgtcctttctgaaggccaccagcgcaccgtgcggaaggtagcctggtccccctgcggtaattacctggcctctgccagctttgatgctaccacttgcatttggaagaagaaccaggatgactttgagtgtgtaaccactctcgagggccatgaaaatgaggtcaagtcagtggcttgggccccatctggcaacctcctggccacttgcagccgagataagagcgtttgggtctgggaagttgatgaagaggatgagtatgaatgtgtcagtgttctcaactcccacacacaggatgtcaagcatgtggtttggcacccaagtcaggagctcttagcttctgccagctatgatgacacagtgaagctgtaccgggaggaagaggatgactgggtatgctgtgccacccttgagggccatgaatccactgtgtggagcttggcctttgacccgagtggccagcgcctggcgtcttgtagtgatgaccgtactgtgcgtatctggcgtcagtatctaccaggcaatgaacaaggggtggcatgcagcggctctgaccccagttggaaatgtatctgtactttgtccggcttccactcaaggaccatttatgacattgcttggtgtcagctgacaggggctctggccacagcttgtggggatgacgcgatccgcgtgtttcaggaggatcccaactcggatccacagcagcccaccttctccctgacagcccacttgcatcaggcccattcccaggatgtcaactgtgtggcctggaaccccaaggagccagggctactggcctcctgcagtgatgatggggaggtggccttctggaagtatcagcggcctgaaggcctctgagctaccacgtctttggacagagtaatgactccccagaaaacgtcatataagacttttaccagcccctgagaggaccaggaggagcatccttgaccttcatttaacttggctcacttctcttcagacttgggtagaagtgcagagccacagaattgctttccttccccgcctttgacatgaggccttcagtaaagagctacagaacatgaaaaaaaaaaaaaaaaaaaaaaaaaaaaa

SEQ ID NO: 3727 - protein, 339 aa, Homo sapiens
  ref <308>: DATABASE ACCESSION NUMBER: SWISS-Prot / O76071
  ref <309>: DATABASE ENTRY DATE: 2002-06-15
MKDSLVLLGRVPAHPDSRCWFLAWNPAGTLLASCGGDRRIRIWGTEGDSWICKSVLSEGHQRTVRKVAWSPCGNYLASASFDATTCIWKKNQDDFECVTTLEGHENEVKSVAWAPSGNLLATCSRDKSVWVWEVDEEDEYECVSVLNSHTQDVKHVVWHPSQELLASASYDDTVKLYREEEDDWVCCATLEGHESTVWSLAFDPSGQRLASCSDDRTVRIWRQYLPGNEQGVACSGSDPSWKCICTLSGFHSRTIYDIAWCQLTGALATACGDDAIRVFQEDPNSDPQQPTFSLTAHLHQAHSQDVNCVAWNPKEPGLLASCSDDGEVAFWKYQRPEGL

SEQ ID NO: 3728 - DNA, 492 bp, Rattus norvegicus
  ref <308>: DATABASE ACCESSION NUMBER: EMBL / M58370
  ref <309>: DATABASE ENTRY DATE: 1994-10-09
ggccttctgccatcctggcatcgcccagctcccatccaccccagccgtaccagtcaccatgaaggtccttgttgttctgcttgtaaccctcgttgccgtggcctatgcagctcctggaccccggggtctttttatcaacctggaggacggtgagatctgcgtaaacagtatgcagtgtaagagcagatgctgccaacatgacaccatcctgggcatcgcccggtgcacacacaaggccatggagaacagcgagtgctccccaaagaccctctatgggatctactacaggtgtccctgtgagcggggcctgacctgtgagggggacaggagcatcattggcgccatcaccaacaccaactacggcgtctgcctcgactccacccgctccaagcagtgagatcgtgcagtgagctgggccacctctccctttcccttcactcgccccatctgagtcacccattggcaattaaagcccattgcaaccttaaaaaa

SEQ ID NO: 3729 - protein, 112 aa, Rattus norvegicus
  ref <308>: DATABASE ACCESSION NUMBER: SWISS-Prot / P17084
  ref <309>: DATABASE ENTRY DATE: 2002-06-15
MKVLVVLLVTLVAVAYAVPGPRGLFINLEDGEICVNSMQCKSRCCQHDTILGIARCTHKAMENSECSPKTLYGIYYRCPCERGLTCEGDRSIIGAITNTNYGVCLDSTRSKQ

SEQ ID NO: 3730 - DNA, 485 bp, Homo sapiens
  ref <308>: DATABASE ACCESSION NUMBER: EMBL / BG311131
  ref <309>: DATABASE ENTRY DATE: 2002-03-15
ttccagcttccatccaccccagctttaccagacaccatggagaaggtccttgttcttctgcttgtgtccctccttgcagtggcctatgcagctcccggaccccggggtcttattatcaacctgaatgacggtgagatctgtttgaacagtatgcagtgtaagagcagatgctgccaacatgacaccatcctgggcattgcccgttgcacacacaaggccatggagaacagcgagtgctccccaaagaccctctatgggatctactaccggtgtccctgtgagcggggcctgacctgtgagggggacaggagcatcatcggcgccatcaccaacaccaactatggcatctgcctcgactccaggcgctccaagcagtgagatcacgcagttagctgggttataccttcttctctttctccctctgtcccatctgagccagccagctgttggcaattaaaacccacttgcaaccttaaaaaaaaaaa

SEQ ID NO: 3731 - protein, 112 aa, Homo sapiens
  ref <308>: DATABASE ACCESSION NUMBER: Refseq / NP_001823
  ref <309>: DATABASE ENTRY DATE: 2001-02-03
MEKILILLLVALSVAYAAPGPRGIIINLENGELCMNSAQCKSNCCQHSSALGLARCTSMASENSECSVKTLYGIYYKCPCERGLTCEGDKTIVGSITNTNFGICHDAGRSKQ

SEQ ID NO: 3732 - DNA, 15627 bp, Rattus norvegicus
  ref <308>: DATABASE ACCESSION NUMBER: EMBL / M60322
  ref <309>: DATABASE ENTRY DATE: 2000-03-04
ggatccagggagttcaaatggcagagaagtctctatgccaagagggatttcacagaggacaagtggcgggtgtcaggtcgcctgttatcttacacaaacctaatccccaacactacactcaaattcaaattctactatttagagaaaaattacacaagaacttccacatgccaacagctgtggggttttgttttgttaacaaaatccaagtggaaaatatctgttctttataaattttcccagggatgggagtggaagaatgccaccttttaggagggcaccaactggaaaatcaccagaatggcacttagagaggtggggttcctgactcattactctgcagatgcagttgtctgtgttgcataatcaggggggcgactgaagcatgacccagcagaaggagactcagacaaaacagagcatcacgcagaggggtgttggaagagtgccaaatttccgccattgttcttggggcaactccgattatttcagggaaagtctttgtttttctacccaataccaactgattcatttattttgtgtccccttaacttggaatcattgctgtatgaaaacggacttttcctagtatgggattctgcctgttcacttttcttccagagagagtttggtcaacttgctatactggaacctgcccgctcaacagttttactttcccaaatcatttatgtgtgatccggagatcaagcttatgagggtttatagctaacggttgctgggtttcgcatcaaggcttgttgaaccagattgagcatgttcagacactggtaatggtagaaagctactacaagcgggcattttgtagtattttgcaaagctggttacaatcatttcaattgagggggctgagggagggggaggcttaaatacacctgaagcttaacttttaacataagacaaaaaaaaaaaaaaaaaaaaaaaaaaaagctcttaagtacacctgacgcctatctgctccatcagtttcaaaacaagatgtgcaggattccagaagagtattattctgagattagaaaaaaacacaagcgtctttttctggcctctaaaatgaaaccaaaaccttttcccagtctccttatctctagtctgccggttattttcagagcgtttagtctggtgcttcaacagcaggcaaacactctgccacgtggggcgcagagcagctggagaattccgtgcctctaggacctagggaaagaagcatcctcgctgaccctttaaggaccacggaagagaccaatcagaaggcgccgtctcttagccgtgcgccaatcgcaggcgtcctttctgcaggctgttggggctatttaaaggtgcgcgccggagccagcgctgcactcttgcgggtcgttgtgcgtaacttgcagcaatcatggctagccatctggaactcaacaacggcaccaagatgcccaccctgggtctgggcacctggaaggtaggtgctcatcagggcgtggcccgccacccgctgggtgaccctgagcggcctgcgcggagcggggctcgggtggttggggcctgtgggcgcatccggccgcggccccgcgtgtggggctctgggcgagcattgcgcgagtccgcgtgggtgccccaggtggagacacacccacgggggtgagaggaactgaagcagggctctagatttgtcatctggcaccccaaactcacgagtgagttgacctcacttggagcagatgttgccctctcgggaatgagccacttggccgataggcctgagataattaaattaggaggcgagagtttgcagtgaaccagcctgtttctcttttccttaaatcgctgagtgcagctcttaacgggtgcggaactcctctagaattaatctggtttccgctttgctgggtgccaccctccccaaaccccaacacaacacagcaggcttgagaagacggcctgatacgttagagtgaaatacaaaaagaaagaaccgataattaaaaactaaaaattataactgatttgattatttgaaaaataaggaaccagttttggtggtattgctgaagcagaaaaacccagctcttaagctactgctgtgacctggatctttaagaacctggagtatgggtgaacctgggctgtatgtaagcacttagacacagtgaaggaaagagaaaatcatgcagggttgagttcagatggtttgaaactggacagtctgtttctacccagactacagttaaagtgggtaatgtatatggtgaataagaaacaagtcatagacttgtctttctctgaatgtgtttctaagccagtagattagcaagtgcggctttcgtttccttccaaagggtccttggtgactgtaaagatgtgattgaatgagaaccatcataccagattaaattctatgcattggaaggataagaaagatggtttccttgctgtaataaacacagcacagtaaaggcacacataactacagtggttttgtaatacacgaccctcaacatgggtgggatgctgatactttaattctgtcccatttctctaaaaaccaagctcataactttagaaaagcattttgagatcagttctcgggtaaacacgagtaaacattcataagccggtggctagagcggatgcaacagccccagagagctgggtgtttgtttaaaattacatacattttaatgtatagatcattctgccgccttcacagatattcctgtcacttcccgcagcgcctggcttgtagaatggatccagaagtcatgttgagttagggcagggtgaagaaaatgtctgcctgtgtctgggggcagggggaggttggtgcagagagcgtggagggacgaagggtggcagtgagagacaggaggacagccgagacttccagatttcctttttttttttttttttttttttggttctttttttttcggagctggggaccgaacccagggccttgcgcttcctaggcaagcgctctaccactgagctaaatccccagcccccagatttccctttttaaaaaaagaatatcaacttaatactttccttgcacatgtgtggcgttccttcatagatgacacagtatatcatagtcactgtgatggtcacagagggtgtgtgggtgcggtctcttgttctggaacttcatctgtggccacctggtacctcacagaccacagcgggactctgacagggtatgatccactcttcccttgagggaatctgtttctcctgggaggtgaggatttgaggcagttgggagacactcttacttgcatggactttcttcctggccaacttgcctgccctctggaccccccaaatgcatgctaaatatacaatattacattaaaatactgttttaagttttgtgtggtcaggaggcctttaaggcagagctggcctgatacagaccaccaggcccttttactgataatgttttgacctagttgaaaatctttgaaggacacggccattgtctcttccacacataggctaggaattgctgctaggaatgtagggacagctgtgttctcagactattttccagttaatgccctctgtgcctcaaaaccatgagtctcttgaggtgaactttttttttctttttggcctaattgtatcccaattggattctggtatctcagataaaactactatatatgtgctcacgccctgtattccctttcacagggtcacatggcattcttaagctgtgatatattttctttgcttgctttttgagtgtgatttttgcctctctgggataatagtacttgtccttagaagaaaactgtgcaagggtcctcctgccatttcatgagttaaagcaagtgtccactgacagtcctagagcctgtggtcagggagaaatgctgtgctcattgaagtaggagtttggttttctggtggcctgccagtgaccaggctacactcctcaacctttccatatttaagataaaaaaaaaaaatcaaatatatcttgtctatgcagggccggtcctggagctacatctctgtggagtggagatgtgtcttaaaatccggacagctttattgaccgataacagtagaacacgttttattagtgttgttgctaaactaggctgtgggctttcagtgttctcaggctggggaaaaggccattcttgagggttcagtcttcatctcttggaatcaccgttaaagttcttgaactgtgaggcgaggttataccatcaaaacaaacaagtgaggctggtttctctcaatccagcagtgggaagtgctctttgtggcgactgggtagggcatgaaaggtggcacattgtgatcattctgggggttttctgtcagagacttggggaggtggtacatttaagcctgtttactaagccaccagggttctggcctgtgtgggaaggaagcccctggaagcagtgttctttctcctgacctgcgctttgagcctttatctgtctttgtctttccgtgaaaacatcacacagaatttttttcctgtgggttttggtttggcgtcagatgttccacgacgtcgctcagtgtagtgttggtctgcgacagtgtagtctcagtgcatgctgcactctagcttggaggaacagaaaagccaggttaacctcacgcagaaggcaagcagaaaagttggggtaggggtggggcctcattgcaatagccatgacagtcactagattcacggtttggattccattctgggttataaattaggttaccagaattgagacgtttgagaccccattctctcaaggagttgcgagccctcattctcccagcaaaggactccaggatgattcctcagcgggtgggcgcaggtcctgaaatggagtaccatagccccgctcggctcacgccatgttcctgcttctgtgtgagtggctgtggcaaatgtcgggtggctttgcccagcctggaccttgtgcccagcgctctatccaaagccaagctctgccaggctctaagtaggcttcctacaaggcgagcatgagagtcagcacaagggccctggatcctgctataaattcatcgtatgtccgaggcaggagaaacacacacacactctccaggcccctcttgtgtggtctttctcaatcagggattttccttttccctcacagctagtaccagccatggctgtgtctggctgccccagagggccctgtccgggagagcctttccctgcataggccgagatagttcctttaaccacaggaggaacctgtggagaagctaagctacaggtgcactcttgggtcctccagggaaatgagaggggggccaagcagtctaaaggcacgtagtgaaggtaactcagtcctaagaacgctgtggcccttccaccgggcaggtccttccccactgggtgaggagcaaagaccactgcccacaggtgctggggatgggcttcttctgctgtttgctgttttatcccctgactgttttgttcacaaggctccagacaaaacagacgttggcggctgctgatggccttggggagttttctttttcatccgattttgccccagctcgccagaggaatgtgctgtgttcgttcagcggcgcccagcgcagggtcttgtttggctctctagtcttggcaagagcagcctggggatgggtaacagtgctgtgcagtccggggactggtgaagctcaggactatgcaggctcctcctcttcttcctcctcctcagtggccaggcttctcacgttccttaccaagctcaggtgataatcttgcaaggagccatcttccctttccactcacttctgtctgctgttacctctgagagaccacgtgtccatgtccgtgcccacctcctgggtcagcagcagttgagctcttgttctgtgataaatgccatgaactatttgagtgaaatggtgccttttgttacatagatcttggctagtgcttttttttttttctttcttctgaccaggctaccccaaacctcacagtgttcatgcttctgccttcagaggatcatacctaggctgctggcctgtggctgtcaggctctgctgaggtgaaattgacacccctgtcgggggctgactggaatgctgtagcataaatgcgtgttggcctgacatggcctaacctcagaacaggagcctgatccaggattactaaccccactgtcctttctcggctctgggcaggcacggctctgtttggtttgggttttaatcgatgactgacattcctccctttgcagtctcctcctggccaggtgaccgaggctgtgaaggttgctatcgacatggggtatcgccacattgactgcgcccaggtgtaccagaatgagaaggaggtgggggtggccctccaggagaagctcaaggagcaggtggtgaagcgccaggatctcttcattgtcagcaaggtaccaccaatctgtgaggatgctggggtccagttcactcccagccagggggacccagctgccagtcaggtccacccttaacatgatggcggttagtgctgggcgggtggtggacctgttacttgtccacctgtgtatctctttgctgggcctgtagatgagagcctggttgggggttgacttgcccttgtaaggagtgacttcagggacagagttaagttagttgacaaactgggtttcactgctggcctttagttttagctagaggctgtggatgtacaaaggagcccagattggagggcgatgctggctccatgtggaccagcttggctgggaagtagacctagagcatgtgtttagcacctcctgatctacagccgtgcctcgtttagtctctgtgaggtgctcttgacctgaccaccccacttgcctttgggaagttgggatccgcagtatgaactggaaactctccagctactcctagcgtcatggttatggggagaggagagcatgtgtgtcctcagccttgggactgtgtggctcccagccgggaagaggcattggcatggcagggtaacctgtgccgtttgctggctccagctgtggtgcacgttccacgaccagagcatggtgaaaggggcctgccagaagacgctgagcgacctgcagctggactacctggacctctaccttattcactggccaactggcttcaaggtgagaggcacacgggggctggatccgagcggttcaggtgcggtcttctctttcttctcagcaccttataggtgcttgactcatcttgtctctgctgcttggggtgtgcttctgggccagcatcagcgtcatcacctaaaacgtattagaaaccaacttcaggcctctctgcactgtctgaagcgctggtggctcagatgcagcctttggagtctgggggacaccactcttttcactcagtgcctccagaacttaaaactgacagtaaatatggctgacaggactgctgttgtccctgttgcacacggctgtaggtgaagcctgccccgctgagtttcctctggggcttacatgtgatgcacgcctgcgcgcgcgcgcgcacgcacacacacacacacacacacacacacacacacacacacacacatgagtctgcacctccgttgcatgccagtctcatttgtgtggtgacccgcagatctcagagtcacttcttgtatttctgtgtggtgacccagatggaaaggtcactggttttatcctccactctgttttagcttaccatggtctcttggggcccgagggactagattttcaccctgtgttttttatgacaagccagaaagagagaggcagagtgatagctttctaggtctgagagccactgagactcacagtgcctgagtttccctaccctgcccacaggcccttctccatgtcaggcttgggctcagagacttggatatgtctgaatctccatttgacaccctcacagctccagtcatgacagggattcccatcggggtcactttctggttccttttcatcttggctaccagatatacctcttaccatcttccacagtttgtagtgctgtgagattaataagtctgtgaagaagtgtcactgatgattttgtgtgtgtgcttgttgttactgacagcctgggcctgactatttccccctggatgcatcgggaaacgtgattcctagtgacaccgattttgtggacacttggacggtaagatgcccctggctgagacccgtgtttattgctggtaccctgttattgtgtgcaagccaggcgtgagtgatctgctctgccatgtcctgtgcttagatcattccgtctctgtgtctgtctgctaagtctcgtgaaagccagtccagttttcctcttggcttctgaaagatagaagggtctggccgcggatgggagggctcacctgtaaagtgctggacacaaacatgcttctggttcttgttctcttggagttcattttagaactcagatctcttttctttttaggctatggagcaactagtggatgaaggtttggtaaaagcaatcggagtctccaacttcaaccctcttcagattgagaggatcttgaacaaacctggcttaaagtataagcctgctgttaaccaggtaagcgtccccaagggaggatgctggcatgctgttttaccagtcctggctctagcctgtggaccacagagagtagaagctctgcagggataggatttgaggccagtcagcaaagacgtggcttctaacataagccgtgggtagctggtgagagctgcaggcttttatctattgataatggccaaggccagggaaggccttatgggcttatggccatagagcattggcaacaaaattattcttgctcttaatgtgaaggccatcagctgggaaatgtggagagttgttccagcttatctgggaggcagacatttctgtgtggggagaaaagggacattgaccacgtcacatgaatttgtgtccactgccacagtcacccctcctgcttgtgttgcagatcgagtgccacccatacctaactcaggagaagctgattgagtactgccattgcaaaggcatcgtggtgactgcatacagtccccttggttctcctgacaggccctggtgagcttctgtgggagcactgttggagataagaaataaccaaagggaatgattggttgtcagagagaatgcttctgtgctggctgcaggccttccgtgggtcctctgggcttcctgggaggttcatgtttctaggagcaagagatggatatatattcttttgcaaagggtcagcaggtagatcatgacccagcttcggtctaggagcctgaccaaccacccaggagtcagtgggaggatcagggctaggtggccggctgccttgagtggcagtggtgaagattgttgatttccccatctctctgctccagggccaagcctgaggacccctctctcctggaggatcccaggatcaaggaaattgcagccaagtacaataaaactacagcccaggtatggatgcttcttggtacttttgactgaactctacactcacagtggtccctgtcagtcaggagtggagggggctgagcctgaagccctctgtggaagtgtggtttggagtcctagaatgcagttcaggggcacagatgtagaaattgagagaattaagtgacacgtggccctggcacaatagtgcctgtccccaccgtctctatgtgcggcacaggcatcagcccagcgtttagtgctgttcttagaagctcttcccggttactaatagaagagctcttactgcctgcggtgtgggaggtgttctctttcttccaggggtagtgtgaccaggcagtgacttcctgtggccttgtgacatgcctggagccactgatggagcaggactgtagggtcagatttgcaccaactcgtggctgtcacttggcgtctcacaacctctttgcctgtgcacttattgactgagatggtaacacggtgtatttacacactccacacctctgcatccgcaggtgctgatccggttccccatccaaaggaacctggtcgtgatccccaagtctgtgacaccagcacgtattgctgagaactttaaggtaagatcccagctccaggcctggctttcctccatggcaggtgggtcctgggggttctcgtcctccccttcctttcccagctgtgtgattccgagcaagtcacttgactacactcaaaacagtgcctatggtgagggctgaggtgagactaaagttcgtggtgcacacgcgacagcacttgatagccctggttccacactaagtgctcaggaaacattgctgtgctggtggtgggtccatggacgcccaggacatacaccgatccactggctctgttaagacctaagcagtcatgagcaggggtgggaatgcttgggcaccaggagtgtaggcatggagaatgccctacccccaccactgcagcagctcaggctacctggtgagaggctagctgggaaagagctgctccaggacggtcctgggaccacatcacaggagcctctggcccgtcaaagcaaagggatgctctgccgaagtctggttcaaagtcagccccacagagtccacaatgggcactagagtggttctgacgacatagtaagctactctaatcctacctcctcctcgtgaccgtgaccatacataccacttacatgtaacgatgtgggacgagagacatgtcctgctagaaatgggttaatacctcaccccataattcatttctaaagtattagggaagaaaacacagccaggcggtggtggcgcacacctttaatcccagcacttgggaatcagaggcaggtggatctgtgagtttgaggccagcctggattgcagagcaagttccaggacagccagggctacacagagaaactgtcttgaaaaagaagaaagaatgtcggtgaccaatcttaacccactgacctagtgtttcgtttttgtttgtttctgtttttcatcttactgtgcactttgcttgtttctccatggctgcagtcacaagagaatgtagcagagtctagtcctgcacattccgccatcagaatgtgccaagtggagtgggttgtcagggtgcagctccatttccaagtcctggtgctgcggaaggccgtctggtctagttgtccaccctgtaccctaacttcttttctgtattctgttgtggggtatccaccggagaagactaagcagacatgagtttaaacaagtagaaagtctttattagccagcctgtgactacactgggtgtttgggatcccaagcctttctcagggtttaagcacacaatcacatcttgggtgtgatacacctcagttaacaagaacaattagccagaggtagaactgcagaagccagaaggcgaggctagcacatgtagagacttttccagaactatggacattgatgtgaattaaaaataaaaacaaacaaaaaaattagaaaggaaaggacatgactgctcctgaaccggggggttggggtgagggggaccaagtacaacagccaggaagccaaaggtacaaaaggagcgaagtgggtagtaagggaaccgtcgggctgtataggggaggggctggagagctgagtagaaggtgggtgtgcccgccacaccctgtaattggtagggactgaagggtattgaacctggaggccaggtctgcttagctaccttaaataggcaccttagacgcttgccctgggattgaaatttaacagcagggtagccccaggtctggcacaaaacaccccatgactgtaatgcatccttcagcttcaccttcgctgggtgttttgcttggtctttgatttggctgacggtgttgtgtacctgctgagttttatgacttgaatggtacttccttccatcatggagtcagtgtgctagggtctgttacatattcctgtattcattcttttgtcttcgtggaagcctttcttgctctgtatgtcaaaacctgacatattttcttaggccttgtcacacatggatccgcgaggcattgtccttcggtccccagctggagtgccttgctggggacagcccagagcctttctttcatcacagcgcagaacccagaacccggattaatgggtgttccagctattgaggcgtctcctcttacacttctggtgaatggagcagtcaggacactcagtaacatttcccctggtgcttatcacagtagagcggctcaggagcctgacaggaatgactgaacagtgccctctgcttggaaatcctggaagggagaggccatttcagatagggccacaagcctgcaccttctggagcataattaccagtcttcttgaagtcccatgtcctctcctgccctctgcactccaggcagtgagggccatctggaacttcctgctttgtctctgttttattgtgagcttattgactttgtttctttcctccatgtttgtatgtaaggtctttgactttgagctgagcaatgaggacatggccactctactcagctacaacaggaactggagggtgtgcgccttgatgaggtgagttccagtgtggtgcctgttctacctattctatgtcaccaaatgtttagactaacaggcatctctcaggccccagaggcagggtccttcccctgcagcccgccctgctttcacacagaccttgtctcctaatctatacagacccggaggcactgcacaaagccaggggagggtggctgtcaggagacctgcctgggagcacagttggtccactttggcttttctgaactcagatggtcccaggggcttctctggtacccaccttcctagaagagtttgcatgtgaccgattgacttaatgacgctaacgaggagtttggtaggaagaccctggtgctgggctcagggtagccccagctctggcacaaaacaccctgtgactgtaatgccactcagatggctgtaatgccactcagatggctgtaatgccactcagatggcttaatgccactcgggcacccagggcccttcagcttcacctctgctggttttttgcttccctctgaaatggggtttggactccgaatccctggggatgagtttgctttaagaagcagcctgtgtccccaatgcctgctttgtcttcctgtcttgattctcactcacactctcttgctttcactcgccatctgcataactcggtgtttgcctggtggtggccgcaacctctacggtctctataggcagtaaggtttgtgattcgggctttttacatgttgccatcacagagtcctcaggttctaagtaagctgtaaacagaactagcccaggactctgaaacaggaccctttctgatattacactaaggacgtttaaccttttaatgtgaaaatcatcttttactttggatctaacggacaggagagaagcgaatcacctgcctgtagcatccatccggttcctagagcctgtagtagttaagtcactcagccctgcgagttccctggtactgctgatgctgacatcaaagcttgtggggagagcaaaccctttgtgtctgctcacctccttgcaccttccatgactattctagaagcagctgtgcttggacagtactgagttgacatgggttgcagttggggttggggcaggggcgggctctagtgctcccagcaaacctttcctaacatgccagccctcctgtggacacacacggctatactgagctcttgctgctggtgtctgagtccaggatgcgaagaaaggcagttgcgggggagcttgagtgatctgagtgttcagtgagagctgcatacccggggcctggctcatcctcatcctctggggtgtggaaagaaacgagcagtgcacttttgcttggattctagaagagaagcacaacctcagacgaaaacatactcatcttctgaggagtagcgcaacctttcttagtttgatttgattaagaaagaaatgacctttcttatatttgatttaccttcctgctcttctccaaagagcaggagctgtctgggacttcatggtattgtctctgattttttattgcagaattaactggatttttttttaatgtgagtgtgtgtgtgtcacactagttgtcctttgattccaacatgtgcgcgcacgcgcacacacacacacacacacacacacacacacacacacacacacacacacacacacacacacacacacgtgttcaggctttgacactgtgcctgcctagtttctctagtgttcttgccattttgttcccattataagccattggccctaccaaatagactgtgaaccttggctccatgccagcccttgccctgttcctgcagtacatccccagctgctgttaggtgctcatttcactccagatgtcacagaggggcctctcctttcctgtgagtggctggctgtttgacttgcccttcagggttcagtgaggtacagctcgtaaacccttctactgctttgttatctctgttcttttggtcctgtgttcaggagctgataaaatgaactgggtgtagtgccacacgcctgtaatcccagcacttgggagttggagtcagaaagacctgaacttcaaggtcatcctcagctaagcagtgtgtttgaggccagccccgcctcaccagaccctgtcttaaaagacagcagaaagttgacatgaggctgtatgatcctgccagctcctcagagttcccacgcaggacttgctgcccagtgtgctccaggctagggcttagtgcagcctgtcacatgatgcagttcctgacatcacaagacaagaggagctcagagcctgagtagctgtacctaagatcagaaggctctaagactgctcagtccacagtgagactccgtttctctgtgttggtgactcgttcgttacagacagaatctttttccttgagagctggcaaggtggtgcagagtgttcagacatttggatcaatcctgaggataaacagagtttatccaggacccacacgataggagagaagcaactcacactaaataaataagtgaacccaattaattttaggaagtctttaacttgtaaattgcatgtattcttttctgacagctgtgccaaacacaaggattaccccttccacgcagaagtctgaagctgtggtggacgaatcctgctcctccccaagcgacttaacacatgttctttctgcctcatctgcccttgcaagtgtccctctgcactgggtggcaccttgcagaccagatggtgagagtttgttagtttgacgtagaatgtggagggcagtaccagtagctgaggagtttcttcggcctttcttggtcttcttcccacctggaggactttaacacgagtaccttttccaaccaaagagaaagcaagatttatagcccaagtcatgccactaacacttaaatttgagtgcttagaactccagtcctatgggggtcagactttttgcctcaaataaaaactgcttttgtgaatttggtggtcgtctgttttgcttttgcgctgtaatacagtgcaccccttctgccccacacccagcctgagtgccaagcacaggccagtgctgtgaacaaactgagaactcgtatcctagcacgacactgcagagtgtcagggtggtgagtagcatcctggtgacatggtgagctc

SEQ ID NO: 3733 - protein, 315 aa, Rattus norvegicus
  ref <308>: DATABASE ACCESSION NUMBER: SWISS-Prot / AAA40721
  ref <309>: DATABASE ENTRY DATE: 2002-06-15
ASHLELNNGTKMPTLGLGTWKSPPGQVTEAVKVAIDMGYRHIDCAQVYQNEKEVGVALQEKLKEQVVKRQDLFIVSKLWCTFHDQSMVKGACQKTLSDLQLDYLDLYLIHWPTGFKPGPDYFPLDASGNVIPSDTDFVDTWTAMEQLVDEGLVKAIGVSNFNPLQIERILNKPGLKYKPAVNQIECHPYLTQEKLIEYCHCKGIVVTAYSPLGSPDRPWAKPEDPSLLEDPRIKEIAAKYNKTTAQVLIRFPIQRNLVVIPKSVTPARIAENFKVFDFELSNEDMATLLSYNRNWRVCALMSCAKHKDYPFHAEV

SEQ ID NO: 3734 - DNA, 1367 bp, Homo sapiens
  ref <308>: DATABASE ACCESSION NUMBER: Refseq / NM_001628
  ref <309>: DATABASE ENTRY DATE: 2002-11-03
gaaggccgcaccgtactgggcgggggtctggggagcgcagcagccatggcaagccgtctcctgctcaacaacggcgccaagatgcccatcctggggttgggtacctggaagtcccctccagggcaggtgactgaggccgtgaaggtggccattgacgtcgggtaccgccacatcgactgtgcccatgtgtaccagaatgagaatgaggtgggggtggccattcaggagaagctcagggagcaggtggtgaagcgtgaggagctcttcatcgtcagcaagctgtggtgcacgtaccatgagaagggcctggtgaaaggagcctgccagaagacactcagcgacctgaagctggactacctggacctctaccttattcactggccgactggctttaagcctgggaaggaatttttcccattggatgagtcgggcaatgtggttcccagtgacaccaacattctggacacgtgggcggccatggaagagctggtggatgaagggctggtgaaagctattggcatctccaacttcaaccatctccaggtggagatgatcttaaacaaacctggcttgaagtataagcctgcagttaaccagattgagtgccacccatatctcactcaggagaagttaatccagtactgccagtccaaaggcatcgtggtgaccgcctacagccccctcggctctcctgacaggccctgggccaagcccgaggacccttctctcctggaggatcccaggatcaaggcgatcgcagccaagcacaataaaactacagcccaggtcctgatccggttccccatgcagaggaacttggtggtgatccccaagtctgtgacaccagaacgcattgctgagaactttaaggtctttgactttgaactgagcagccaggatatgaccaccttactcagctacaacaggaactggagggtctgtgccttgttgagctgtacctcccacaaggattaccccttccatgaagagttttgaagctgtggttgcctgctcgtccccaagtgacctatacctgtgtttcttgcctcatttttttccttgcaaatgtagtatggcctgtgtcactcagcagtgggacagcaacctgtagagtggccagcgagggcgtgtctagcttgatgttggatctcaagagccctgtcagtagagtagaagtctcttccagtttgctttgcccttctttctaccctgctggggaaagtacaacctgaatacccttttctgaccaaagagaagcaaaatctaccaggtcaaaatagtgccactaacggttgagttttgactgcttggaactggaatcctttcagcaagacttctctttgcctcaaataaaaagtgcttttgtg

SEQ ID NO: 3735 - protein, 315 aa, Homo sapiens
  ref <308>: DATABASE ACCESSION NUMBER: SWISS-Prot / P15121
  ref <309>: DATABASE ENTRY DATE: 2002-06-15
ASRLLLNNGAKMPILGLGTWKSPPGQVTEAVKVAIDVGYRHIDCAHVYQNENEVGVAIQEKLREQVVKREELFIVSKLWCTYHEKGLVKGACQKTLSDLKLDYLDLYLIHWPTGFKPGKEFFPLDESGNVVPSDTNILDTWAAMEELVDEGLVKAIGISNFNHLQVEMILNKPGLKYKPAVNQIECHPYLTQEKLIQYCQSKGIVVTAYSPLGSPDRPWAKPEDPSLLEDPRIKAIAAKHNKTTAQVLIRFPMQRNLVVIPKSVTPERIAENFKVFDFELSSQDMTTLLSYNRNWRVCALLSCTSHKDYPFHEEF

SEQ ID NO: 3736 - DNA, 15627 bp, Rattus norvegicus; identical to SEQ ID NO: 3732
  ref <308>: DATABASE ACCESSION NUMBER: EMBL / M60322
  ref <309>: DATABASE ENTRY DATE: 2000-03-04

SEQ ID NO: 3737 - protein, 315 aa, Rattus norvegicus; identical to SEQ ID NO: 3733
  ref <308>: DATABASE ACCESSION NUMBER: SWISS-Prot / AAA40721
  ref <309>: DATABASE ENTRY DATE: 2002-06-15

SEQ ID NO: 3738 - DNA, 1367 bp, Homo sapiens; identical to SEQ ID NO: 3734
  ref <308>: DATABASE ACCESSION NUMBER: Refseq / NM_001628
  ref <309>: DATABASE ENTRY DATE: 2002-11-03

SEQ ID NO: 3739 - protein, 315 aa, Homo sapiens; identical to SEQ ID NO: 3735
  ref <308>: DATABASE ACCESSION NUMBER: SWISS-Prot / P15121
  ref <309>: DATABASE ENTRY DATE: 2002-06-15

SEQ ID NO: 3740 - DNA, 15627 bp, Rattus norvegicus; identical to SEQ ID NO: 3732
  ref <308>: DATABASE ACCESSION NUMBER: EMBL / M60322
  ref <309>: DATABASE ENTRY DATE: 2000-03-04

SEQ ID NO: 3741 - protein, 315 aa, Rattus norvegicus; identical to SEQ ID NO: 3733
  ref <308>: DATABASE ACCESSION NUMBER: SWISS-Prot / AAA40721
  ref <309>: DATABASE ENTRY DATE: 2002-06-15

SEQ ID NO: 3742 - DNA, 1367 bp, Homo sapiens; identical to SEQ ID NO: 3734
  ref <308>: DATABASE ACCESSION NUMBER: Refseq / NM_001628
  ref <309>: DATABASE ENTRY DATE: 2002-11-03

SEQ ID NO: 3743 - protein, 315 aa, Homo sapiens; identical to SEQ ID NO: 3735
  ref <308>: DATABASE ACCESSION NUMBER: SWISS-Prot / P15121
  ref <309>: DATABASE ENTRY DATE: 2002-06-15

SEQ ID NO: 3744 - DNA, 15627 bp, Rattus norvegicus; identical to SEQ ID NO: 3732
  ref <308>: DATABASE ACCESSION NUMBER: EMBL / M60322
  ref <309>: DATABASE ENTRY DATE: 2000-03-04

SEQ ID NO: 3745 - protein, 315 aa, Rattus norvegicus; identical to SEQ ID NO: 3733
  ref <308>: DATABASE ACCESSION NUMBER: SWISS-Prot / AAA40721
  ref <309>: DATABASE ENTRY DATE: 2002-06-15

SEQ ID NO: 3746 - DNA, 1367 bp, Homo sapiens; identical to SEQ ID NO: 3734
  ref <308>: DATABASE ACCESSION NUMBER: Refseq / NM_001628
  ref <309>: DATABASE ENTRY DATE: 2002-11-03

SEQ ID NO: 3747 - protein, 315 aa, Homo sapiens; identical to SEQ ID NO: 3735
  ref <308>: DATABASE ACCESSION NUMBER: SWISS-Prot / P15121
  ref <309>: DATABASE ENTRY DATE: 2002-06-15

SEQ ID NO: 3748 - DNA, 15627 bp, Rattus norvegicus; identical to SEQ ID NO: 3732
  ref <308>: DATABASE ACCESSION NUMBER: EMBL / M60322
  ref <309>: DATABASE ENTRY DATE: 2000-03-04

SEQ ID NO: 3749 - protein, 315 aa, Rattus norvegicus; identical to SEQ ID NO: 3733
  ref <308>: DATABASE ACCESSION NUMBER: SWISS-Prot / AAA40721
  ref <309>: DATABASE ENTRY DATE: 2002-06-15

SEQ ID NO: 3750 - DNA, 1367 bp, Homo sapiens; identical to SEQ ID NO: 3734
  ref <308>: DATABASE ACCESSION NUMBER: Refseq / NM_001628
  ref <309>: DATABASE ENTRY DATE: 2002-11-03

SEQ ID NO: 3751 - protein, 315 aa, Homo sapiens; identical to SEQ ID NO: 3735
  ref <308>: DATABASE ACCESSION NUMBER: SWISS-Prot / P15121
  ref <309>: DATABASE ENTRY DATE: 2002-06-15

SEQ ID NO: 3752 - DNA, 15627 bp, Rattus norvegicus; identical to SEQ ID NO: 3732
  ref <308>: DATABASE ACCESSION NUMBER: EMBL / M60322
  ref <309>: DATABASE ENTRY DATE: 2000-03-04

SEQ ID NO: 3753 - protein, 315 aa, Rattus norvegicus; identical to SEQ ID NO: 3733
  ref <308>: DATABASE ACCESSION NUMBER: SWISS-Prot / AAA40721
  ref <309>: DATABASE ENTRY DATE: 2002-06-15

SEQ ID NO: 3754 - DNA, 1367 bp, Homo sapiens; identical to SEQ ID NO: 3734
  ref <308>: DATABASE ACCESSION NUMBER: Refseq / NM_001628
  ref <309>: DATABASE ENTRY DATE: 2002-11-03

SEQ ID NO: 3755 - protein, 315 aa, Homo sapiens; identical to SEQ ID NO: 3735
  ref <308>: DATABASE ACCESSION NUMBER: SWISS-Prot / P15121
  ref <309>: DATABASE ENTRY DATE: 2002-06-15

SEQ ID NO: 3756 - DNA, 2519 bp, Rattus norvegicus
  ref <308>: DATABASE ACCESSION NUMBER: EMBL / M60921
  ref <309>: DATABASE ENTRY DATE: 2002-10-24
agagcccgtgaggcggccggaccatcatcgtcctgctaatacagctacttcctcaaccaccggtatgagccacgggaagagaaccgacatgctcccggagatcgccgccgccgtaggtttcctcaccagtctcctgaggactcggggctgcgtgagcgagcagagactcaaggttttcagtagggcgctccaggacgcactgaccgatcattacaaacaccactggtttccagaaaagccatccaagggctccggctatcgctgtatccgcatcaaccacaagatggaccccatcatcagcaaggtggccagccagatcggactcagccagccccagctgcaccagctcctgcccagcgagctgaccctgtgggtcgatccctacgaagtgtcctaccgcatcggggaagatggatccatctgcgtgctgtatgaggaggcgccggtggccacctcctacgggctcctcacctgcaagaaccagatgatgctgggcaggagcagtccatcgaagaactacgtgatgactgtctccagctagagaggagccgccccgccctggcactctactgttctcatgctgccctgacaacaggccaccgtatacctcaacctggggaactgtatttttaaagtgaagagctatttatacatgttatttttttttttaagaaaagaggaggaaaaaaaccaaaagtttttttttaaaaaaacaaaaaagaaaaaacaattcgttaacgggagctgcttggaagtggtctccccaggtgcctttggagagaactgttcttgattgagtctatgagccagtgtttgcctaggggagtgggttggggattggcctagccaaggtaaaaggggattcttggctgatcccccaggaggtggtggaagggagcaaggttagcaactgtgaacgagaggggtcagggtctgctctgggttaccgttcccgctgggatgcctgtattcctggtccctctcttactcaggggcattcaagcctggtctcaaataatactacattgcctaatcttctcttttgtttttctgctgagatcctgggcacacggaaaggcctctcctgtcccttccgtctgagcagagtttcttgaaactgtgtctcgtttctgatcctaccctcggggtcctgaagaggtggtttcccggcctagaatctatctaaacgtttttggagggtgggctataaggcagatataatggaggggaaccgcacaaaccctttgctttgctctgtgctgctttgtatggatggatggttaataacttagggatgatttgcaatggaattttgggacccaaagagtatccaatgggggtgggtgttttggacctaagccctccttttgggaaccacgtgacagtctgaatgctgctaccattattcctttgagaggtggctcaaagctccagggaactccaggtcctttcttactgccttctcttcaagagcaacctcccccatttcttttccctctttcctgcggttgggtcctggagggccccatttcctaggacaagagttctcaatcactgtgcaatagtcccaggaagctctggaactgggcctcccagcccctcctgattcctggtgggttttaggaccccgccttccccgttcttctgactggctggtgggccttgaggagatctccctcggccgcagggagggcacctgtgcactgcaggactacctggtactcctgtggggctgccacggagagccaaaccttaggcatagctttgtctcctcggtgctcagagcacctgcagggggaggttgcccccctcagtaaaaatccaaatttatttgtagatgtgtgcaatatttactgttctgggttggagaaaatcgggaaacactgggaagaagtggccttccttcaggttcagtgacactgatgagggcttctcagaaggcctcgagtctctcaaaccaaaggacagagctagagccagccagtcacccttagtgaggatccccttccccatgtctctccactgccgtggcatcccatgtcctggatttctcaattcctcagtttctactcaaaggtgctacttaccaaacactctgcccgtcccgctctccccagcttcgcacagccgtcccaggtggcttcgtctctcctgctttaaagttaactttgggcccacagacccgagagctgtgggttgaagcaaagctgtgaatcgctccagatggtccctgtgttctgtccacacacaggtccccgcctttttagaagcagcctcctggtctcatgcttaaatctgttcctcactgcccgtgttcactttagaaatggcagaaccacagagctggactgttgagcaggcctgtctctctcattaaatagaaataagtaagtttgtaagctattccgacagaagagacaaaggttactgattgtacaatagcgcttttatatggaagactgtacagctttatggacaaatgtaaaacttttttgtttttaataaaaatgtagcagacc

SEQ ID NO: 3757 - protein, 158 aa, Rattus norvegicus
  ref <308>: DATABASE ACCESSION NUMBER: SWISS-Prot / P27049
  ref <309>: DATABASE ENTRY DATE: 2001-10-16
MSHGKRTDMLPEIAAAVGFLTSLLRTRGCVSEQRLKVFSRALQDALTDHYKHHWFPEKPSKGSGYRCIRINHKMDPIISKVASQIGLSQPQLHQLLPSELTLWVDPYEVSYRIGEDGSICVLYEEAPVATSYGLLTCKNQMMLGRSSPSKNYVMTVSS

SEQ ID NO: 3758 - DNA, 2717 bp, Homo sapiens
  ref <308>: DATABASE ACCESSION NUMBER: EMBL / U72649
  ref <309>: DATABASE ENTRY DATE: 2000-03-04
cagggtaacgctgtcttgtggacccgcacttcccacccgagacctctcactgagcccgagccgcgcgcgacatgagccacgggaagggaaccgacatgctcccggagatcgccgccgccgtgggcttcctctccagcctcctgaggacccggggctgcgtgagcgagcagaggcttaaggtcttcagcggggcgctccaggaggcactcacagagcactacaaacaccactggtttcccgaaaagccgtccaagggctccggctaccgctgcattcgcatcaaccacaagatggaccccatcatcagcagggtggccagccagatcggactcagccagccccagctgcaccagctgctgcccagcgagctgaccctgtgggtggacccctatgaggtgtcctaccgcattggggaggacggctccatctgcgtcttgtacgaggaggccccactggccgcctcctgtgggctcctcacctgcaagaaccaagtgctgctgggccggagcagcccctccaagaactacgtgatggcagtctccagctaggcccttccgcccccgccctgggcgccgccgtgctcatgctgccgtgacaacaggccaccacatacctcaacctggggaactgtatttttaaatgaagagctatttatatatattatttttttttaagaaaggaggaaaagaaaccaaaagttttttttaagaaaaaaaatccttcaagggagctgcttggaagtggcctccccaggtgcctttggagagaactgttgcgtgcttgagtctgtgagccagtgtctgcctataggagggggagctgttagggggtagacctagccaaggagaagtgggagacgtttggctagcaccccaggaagatgtgagagggagcaagcaaggttagcaactgtgaacagagaggtcgggatttgccctgggggaggaagagaggccaagttcagagctctctgtctcccccagccagacacctgcatccctggctcctctattactcaggggcattcatgcctggacttaaacaatactatgttatcttttcttttatttttctaatgaggtcctgggcagagagtgaaaaggcctctcctgattcctactgtcctaagctgcttttcttgaaatcatgacttgtttctaattctaccctcaggggcctgtagatgttgctttccagccaggaatctaaagctttgggttttctgagggggggaggagggaactggaggttattggggttaggatggaagggaactctgcacaaaacctttgctttgctagtgctgctttgtgtgtatgtgtggcaaataatttgggggtgatttgcaatgaaattttgggacccaaagagtatccactggggatgttttttggccaaaactcttccttttggaaccacatgaaagtcttgatgctgctgccatgatccctttgagaggtggctcaaaagctacagggaactccaggtcctttattactgccttcttttcaaaagcacaactctcctctaaccctcccctcccccttcccttctggtcgggtcatagagctaccgtattttctaggacaagagttctcagtcactgtgcaatatgccccctgggtcccaggagggtctggaggaaaactggctatcagaacctcctgatgccctggtgggcttagggaaccatctctcctgctctccttgggatgatggctggctagtcagccttgcatgtattccttggctgaatgggagagtgccccatgttctgcaagactacttggtattcttgtagggccgacactaaataaaagccaaaccttgggcactgttttttctccctggtgctcagagcacctgtgggaaaggttgctgtctgtctcagtacaatccaaatttgtcgtagacttgtgcaatatatactgttgtgggttggagaaaagtggaaagctacactgggaagaaactcccttccttcaatttctcagtgacattgatgaggggtcctcaaaagacctcgagtttcccaaaccgaatcaccttaagaaggacagggctagggcatttggccaggatggccaccctcctgctgttgccccttagtgaggaatcttcaccccacttcctctacccccaggttctcctccccacagccagtcccctttcctggatttctaaactgctcaattttgactcaaaggtgctatttaccaaacactctccctacccattcctgccagctctgcctccttttcaactctccacattttgtattgccttcccagacctgcttccagtctttattgctttaaagttcactttgggcccacagacccaagagctaattttctggtttgtgggttgaaacaaagctgtgaatcactgcaggctgtgttcttgcatcttgtctgcaaacaggtccctgcctttttagaagcagcctcatggtctcatgcttaatcttgtctctcttctcttctttatgatgttcactttaaaaacaacaaaacccctgagctggactgttgagcaggcctgtctctcctattaagtaaaaataaatagtagtagtatgtttgtaagctattctgacagaaaagacaaaggttactaattgtatgatagtgtttttatatggaagaatgtacagcttatggacaaatgtacacctttttgttactttaataaaaatgtagtaggataaaaaaaaa

SEQ ID NO: 3759 - protein, 158 aa, Homo sapiens
  ref <308>: DATABASE ACCESSION NUMBER: SWISS-Prot / P78543
  ref <309>: DATABASE ENTRY DATE: 2002-06-15
MSHGKGTDMLPEIAAAVGFLSSLLRTRGCVSEQRLKVFSGALQEALTEHYKHHWFPEKPSKGSGYRCIRINHKMDPIISRVASQIGLSQPQLHQLLPSELTLWVDPYEVSYRIGEDGSICVLYEEAPLAASCGLLTCKNQVLLGRSSPSKNYVMAVSS

SEQ ID NO: 3760 - DNA, 2519 bp, Rattus norvegicus; identical to SEQ ID NO: 3756
  ref <308>: DATABASE ACCESSION NUMBER: EMBL / M60921
  ref <309>: DATABASE ENTRY DATE: 2002-10-24

SEQ ID NO: 3761 - protein, 158 aa, Rattus norvegicus; identical to SEQ ID NO: 3757
  ref <308>: DATABASE ACCESSION NUMBER: SWISS-Prot / P27049
  ref <309>: DATABASE ENTRY DATE: 2001-10-16

SEQ ID NO: 3762 - DNA, 2717 bp, Homo sapiens; identical to SEQ ID NO: 3758
  ref <308>: DATABASE ACCESSION NUMBER: EMBL / U72649
  ref <309>: DATABASE ENTRY DATE: 2000-03-04

SEQ ID NO: 3763 - protein, 158 aa, Homo sapiens; identical to SEQ ID NO: 3759
  ref <308>: DATABASE ACCESSION NUMBER: SWISS-Prot / P78543
  ref <309>: DATABASE ENTRY DATE: 2002-06-15

SEQ ID NO: 3764 - DNA, 2519 bp, Rattus norvegicus; identical to SEQ ID NO: 3756
  ref <308>: DATABASE ACCESSION NUMBER: EMBL / M60921
  ref <309>: DATABASE ENTRY DATE: 2002-10-24

SEQ ID NO: 3765 - protein, 158 aa, Rattus norvegicus; identical to SEQ ID NO: 3757
  ref <308>: DATABASE ACCESSION NUMBER: SWISS-Prot / P27049
  ref <309>: DATABASE ENTRY DATE: 2001-10-16

SEQ ID NO: 3766 - DNA, 2717 bp, Homo sapiens; identical to SEQ ID NO: 3758
  ref <308>: DATABASE ACCESSION NUMBER: EMBL / U72649
  ref <309>: DATABASE ENTRY DATE: 2000-03-04

SEQ ID NO: 3767 - protein, 158 aa, Homo sapiens; identical to SEQ ID NO: 3759
  ref <308>: DATABASE ACCESSION NUMBER: SWISS-Prot / P78543
  ref <309>: DATABASE ENTRY DATE: 2002-06-15

SEQ ID NO: 3768 - DNA, 2519 bp, Rattus norvegicus; identical to SEQ ID NO: 3756
  ref <308>: DATABASE ACCESSION NUMBER: EMBL / M60921
  ref <309>: DATABASE ENTRY DATE: 2002-10-24

SEQ ID NO: 3769 - protein, 158 aa, Rattus norvegicus; identical to SEQ ID NO: 3757
  ref <308>: DATABASE ACCESSION NUMBER: SWISS-Prot / P27049
  ref <309>: DATABASE ENTRY DATE: 2001-10-16

SEQ ID NO: 3770 - DNA, 2717 bp, Homo sapiens; identical to SEQ ID NO: 3758
  ref <308>: DATABASE ACCESSION NUMBER: EMBL / U72649
  ref <309>: DATABASE ENTRY DATE: 2000-03-04

SEQ ID NO: 3771 - protein, 158 aa, Homo sapiens; identical to SEQ ID NO: 3759
  ref <308>: DATABASE ACCESSION NUMBER: SWISS-Prot / P78543
  ref <309>: DATABASE ENTRY DATE: 2002-06-15

SEQ ID NO: 3772 - DNA, 1688 bp, Rattus norvegicus
  ref <308>: DATABASE ACCESSION NUMBER: EMBL / M61219
  ref <309>: DATABASE ENTRY DATE: 2000-03-04
cagaaggagtcatggctgccaaagtgtttgagtccatcggaaagttcggcctggccttagcagttgcaggaggcgtggtgaactctgctctatataacgtggatgccggacacagagctgtcatcttcgaccgattccgtggcgtgcaggacatcgtggtaggggaagggactcacttcctcatcccctgggtacagaagccaatcatctttgactgccgctctcgaccacgtaatgtgccggtcatcaccggcagcaaagacttgcagaatgtcaacatcacactacgtatcctcttccggccggtggccagccagcttcctcgtatctacaccagcattggcgaggactatgatgagcgggtgctgccatctatcaccacagagatcctcaagtcggtggtggctcgattcgatgctggagaattgattacccagcgagagctggtctccaggcaggtgagtgatgacctcacagagcgagcagcaacattcgggctcatcctggatgacgtgtccctgacacatctgaccttcgggaaggagttcacagaggcggtggaagccaaacaggtggctcagcaggaagcagagagagccagatttgtggtggaaaaggctgagcagcagaagaaggcggccatcatctctgctgagggtgactccaaagcggctgagctgatcgccaactcactggccaccgccggggatggcctgatcgagctgcgaaagctggaagctgctgaggacattgcttatcagctctcccgctctcggaacatcacctacctgccagcagggcagtccgtgctcctccagctcccccagtaaggccagccagccagggcctccatcgctctgaatgacgccttccttctgccccaccccagaaatcactgtgaaatttaatgattggcttaacatgaaggaaataaaggtaaaatcacttcatatctctaattatcaaatgaagcttttattgttacactttttgcccactttcataacaaaattgccaagtgcctatgcagactggccttccaccctgggtgctggcagtcggcggaagaaaggcagggcagtgtgtgtggtggacggggagccagctggcagcctgagtagaccttgagcctccattctgccatatattgaagatttacagacagtggtgcacacacgtgaaccaaaagcaagccctcaatttttccagccatacgaacccggacagatgcagctgaggagggcctgaggaagtggtctgtcttaactgtaaggccattccctcttaaccgtgaccagcggaagcaggtgtgtgcgtgcgactagggcatggagtgaagaatctgcccatcacggtgggtgggcctaattttgctgcccccaccagagacctaaactttggatagacttggatagaataagaggcctggactgagatgtgagtcctgtggaagacttcctgtccaccccccacattggtcctctcaaataccaatgggattccagcttgaaggattgcatctgccggggctgagcacacctgccaaggacacgtgcgcctgccttcccgctccctctcttcgagattgcccttccttcccaagggctgtgggccagagctccgaaggaagcaatcaaggaaagaaaacacaatgtaagctgctgtcaataaatgacacccagaccctc

SEQ ID NO: 3773 - protein, 272 aa, Rattus norvegicus
  ref <308>: DATABASE ACCESSION NUMBER: SWISS-Prot / P24142
  ref <309>: DATABASE ENTRY DATE: 1997-11-01
MAAKVFESIGKFGLALAVAGGVVNSALYNVDAGHRAVIFDRFRGVQDIVVGEGTHFLIPWVQKPIIFDCRSRPRNVPVITGSKDLQNVNITLRILFRPVASQLPRIYTSIGEDYDERVLPSITTEILKSVVARFDAGELITQRELVSRQVSDDLTERAATFGLILDDVSLTHLTFGKEFTEAVEAKQVAQQEAERARFVVEKAEQQKKAAIISAEGDSKAAELIANSLATAGDGLIELRKLEAAEDIAYQLSRSRNITYLPAGQSVLLQLPQ

SEQ ID NO: 3774 - DNA, 1826 bp, Homo sapiens
  ref <308>: DATABASE ACCESSION NUMBER: Refseq / NM_002634
  ref <309>: DATABASE ENTRY DATE: 2000-10-31
agtatgtgtggttggggaattcatgtggaggtcagagtggaagcaggtgtgagagggtccagcagaaggaaacatggctgccaaagtgtttgagtccattggcaagtttggcctggccttagctgttgcaggaggcgtggtgaactctgccttatataatgtggatgctgggcacagagctgtcatctttgaccgattccgtggagtgcaggacattgtggtaggggaagggactcattttctcatcccgtgggtacagaaaccaattatctttgactgccgttctcgaccacgtaatgtgccagtcatcactggtagcaaagatttacagaatgtcaacatcacactgcgcatcctcttccggcctgtcgccagccagcttcctcgcatcttcaccagcatcggagaggactatgatgagcgtgtgctgccgtccatcacaactgagatcctcaagtcagtggtggctcgctttgatgctggagaactaatcacccagagagagctggtctccaggcaggtgagcgacgaccttacagagcgagccgccacctttgggctcatcctggatgacgtgtccttgacacatctgaccttcgggaaggagttcacagaagcggtggaagccaaacaggtggctcagcaggaagcagagagggccagatttgtggtggaaaaggctgagcaacagaaaaaggcggccatcatctctgctgagggcgactccaaggcagctgagctgattgccaactcactggccactgcaggggatggcctgatcgagctgcgcaagctggaagctgcagaggacatcgcgtaccagctctcacgctctcggaacatcacctacctgccagcggggcagtccgtgctcctccagctgccccagtgagggcccaccctgcctgcacctccgcgggctgactgggccacagccccgatgattcttaacacagccttccttctgctcccaccccagaaatcactgtgaaatttcatgattggcttaaagtgaaggaaataaaggtaaaatcacttcagatctctaattagtctatcaaatgaaactctttcattcttctcacatccatctacttttttatccacctccctaccaaaaattgccaagtgcctatgcaaaccagctttaggtcccaattcggggcctgctggagttccggcctgggcaccagcatttggcagcacgcaggcggggcagtatgtgatggactggggagcacaggtgtctgcctagatccacgtgtggcctccgtcctgtcactgatggaaggtttgcggatgagggcatgtgcggctgaactgagaaggcaggcctccgtcttcccagcggttcctgtgcagatgctgctgaagagaggtgccggggaggggcagagaggaagtggtctgtctgttaccataagtctgattctctttaactgtgtgaccagcggaaacaggtgtgtgtgaactgggcacagattgaagaatctgcccctgttgaggtgggtgggcctgactgttgccccccagggtcctaaaacttggatggacttgtatagtgagagaggaggcctggaccgagatgtgagtcctgttgaagacttcctctctaccccccaccttggtccctctcagatacccagtggaattccaacttgaaggattgcatcctgctggggctgaacatgcctgccaaagacgtgtccgacctacgttcctggccccctcgttcagagactgcccttctcacgggctctatgcctgcactgggaaggaaacaaatgtgtataaactgctgtcaataaatgacacccagaccttcc

SEQ ID NO: 3775 - protein, 272 aa, Homo sapiens
  ref <308>: DATABASE ACCESSION NUMBER: SWISS-Prot / P35232
  ref <309>: DATABASE ENTRY DATE: 2002-06-15
MAAKVFESIGKFGLALAVAGGVVNSALYNVDAGHRAVIFDRFRGVQDIVVGEGTHFLIPWVQKPIIFDCRSRPRNVPVITGSKDLQNVNITLRILFRPVASQLPRIFTSIGEDYDERVLPSITTEILKSVVARFDAGELITQRELVSRQVSDDLTERAATFGLILDDVSLTHLTFGKEFTEAVEAKQVAQQEAERARFVVEKAEQQKKAAIISAEGDSKAAELIANSLATAGDGLIELRKLEAAEDIAYQLSRSRNITYLPAGQSVLLQLPQ

SEQ ID NO: 3776 - DNA, 2747 bp, Rattus norvegicus
  ref <308>: DATABASE ACCESSION NUMBER: EMBL / M61875
  ref <309>: DATABASE ENTRY DATE: 2000-03-04
ctcattgcccagcagcccccagccagtgacaggttccattcaccctctttgccccttcccccgcgacccttttccagaggctactagatcctttggtttcatcctgcacatcatggacaaggtttggtggcacacagcttggggactactttgcctcttacagttgagcctggcacagcagcagatcgatttgaatataacctgccgttacgcaggtgtattccatgtggagaaaaatggccgctacagtatctccaggactgaagcagctgacctctgcgaggctttcaacaccaccttgcccaccatggctcagatggagttagccctgagaaaggggtttgaaacatgcaggtatgggttcatagaaggacacgtggtaatcccgaggatccaccccaacgctatctgtgcagccaacaacacaggagtgtatatcctcctcgcatccaacacctcccactatgacacatattgcttcaatgcctcagctcctcttgaagaagactgtacatcagtcacagacctacccaattccttcgatggaccagttaccataactattgtcaaccgtgatggcacccgctacagcaagaagggcgagtatagaacacaccaagaagacatcgatgcctcaaacattatagatgaggatgtcagcagtggatccaccattgagaagagcaccccagaaggctacattttgcacaccgaccttcccacttcacagcctactggagaccgggatgacgccttctttattgggagcaccctggccaccagtgatggagactcatccatggaccccaggggtggtttcgacactgtgactcatggatccgaattagctggacactcaagtgggaatcaagacagtggagtgaccacaacttctggtcctgcgaggagacctcagattccagagtggcttatcatcttggcatccctcctggcgctggctctgattcttgccgtctgcattgctgtcaacagtaggagaaggtgtgggcagaagaagaagctggtgatcaacagtggcaatggaacagtggaagacaggaaaccaagtgaactcaacggggaggccagcaagtctcaggaaatggtgcatttggtgaacaaggaaccaacagagactccggaccagtttatgacagctgatgagacccggaatctgcagagtgtggatatgaagattggggtgtagtgcctatgccactaacttgaaaagacacaacaattggagacatgtcattactgggagctgggacccttaacagatgcaatgtgctactgattattttttattgggattattttgggcataaaatttccctttttttgttttttaaaagtttgttttccaatttatgaaaatagcattgctttctgaaatgagggtctcttccagttcctccttagaggccttgcattaccagggtatgctaccataggcttctaccaaatgaatactcttggtcccgattgaacccaaagtcccaggtaacatccaccagctaaggatttccccagaacttagagagattggtctctgggaggaaatttgaatgggtccatattgcctcccagcagtccaatctgtaggcattgctttgcagtggatgggagatcaggtgtactggttacacactctctttatagactcccttctgctggaaaatttccacatgcttctgagagattccccaaaggtgacgctatttatctttagtaagctatttatctttgtttttgaaatatcaaaccctggaggtccttttttcagtatgactttttttattttgtttttttttattttgttttttaggttactttgtcagaagcataacagggtataagttgattcataataaatacctgtccatcttccatcttgacctgttgtgctgtgatccttcagtttctaaatcagcaaggtctgagtctttgtagcacatcaatgtgaccttagtatggtcctctgaaactcatgttagagcatccgtgccctgcttgggtttacccagctgaatctcagaagatcaaggacaggagcactgttttcattctaggactatcaaaggggtttctctcctgttcaagaatctgaattgggagtaggagagcttctgtcccttttatgtttcgataaccacccatttctctttcttaaagggcacattaagtttttatatcttacaacattcgcggtcctgtttcatagacactgatcttattggcactttcacaaaacagtgtggaggggacttctgacaccttatagtaaaaggagaagccaacagaaatgaaagtgtggacagagagcagtagattggcatgaggaggcatgatgtacaacccccagaccactctttccatcaccacatttgttgatgctttcgcaagccagttggtacttagaatcagttccccagggaatccttcaaaaagccataagaatgcccacccctggaatcttaccaccaccagatgagcaggtttatggtttagcaaaaggagaatgctgtcaccctctgacctcatagttttcacatactgggcaagtgttcatctgccaggatgccccattgctcctaggtcttcccaggtaccttgtagaagaacttaaatctataaaataaggctttctctaaaatggaacttcctttctaaggctcccatttttactgttgactaaatttatatgtttaatagttttttttcaaataaaaacaaacacaaaaagg

SEQ ID NO: 3777 - protein, 503 aa, Rattus norvegicus
  ref <308>: DATABASE ACCESSION NUMBER: SWISS-Prot / P26051
  ref <309>: DATABASE ENTRY DATE: 2002-06-15
MDKVWWHTAWGLLCLLQLSLAQQQIDLNITCRYAGVFHVEKNGRYSISRTEAADLCEAFNTTLPTMAQMELALRKGFETCRYGFIEGHVVIPRIHPNAICAANNTGVYILLASNTSHYDTYCFNASAPLEEDCTSVTDLPNSFDGPVTITIVNRDGTRYSKKGEYRTHQEDIDASNIIDEDVSSGSTIEKSTPEGYILHTDLPTSQPTGDRDDAFFIGSTLATIATTPWVSAHTKQNQERTQWNPIHSNPEVLLQTTTRMTDIDRNSTSAHGENWTQEPQPPFNNHEYQDEEETPHATSTTWADPNSTTEEAATQKEKWFENEWQGKNPPTPSEDSHVTEGTTASAHNNHPSQRMTTQSQEDVSWTDFFDPISHPMGQGHQTESKGHSSGNQDSGVTTTSGPARRPQIPEWLIILASLLALALILAVCIAVNSRRRCGQKKKLVINSGNGTVEDRKPSELNGEASKSQEMVHLVNKEPTETPDQFMTADETRNLQSVDMKIGV

SEQ ID NO: 3778 - DNA, 376 bp, Homo sapiens
  ref <308>: DATABASE ACCESSION NUMBER: EMBL / BF748398
  ref <309>: DATABASE ENTRY DATE: 2001-08-31
cgttctgtattcatcctttctggacatagcgggatgccatcacggtataacaatagttatggtaatggtccatcaaaggcattgggcaggtctgtgactgatgtacaatcttcttcaggtggagctgaagcattgaagcaatatgtgtcatactgggaggtgttggatgtgaggatgaggatgaaggggaaggccagggaggcagctgtggacatgacggcccagagcagggccaggcagagcagctgcagggccgtgaacaggtgcatacggagggtccggaccttcttgacgtaagtgacatctgggtggtgtttgggcggcatgagcagcagatgcagccgctcatagaactggatcccgttaagggaggtga

SEQ ID NO: 3779 - protein, 1241 aa, Homo sapiens
  ref <308>: DATABASE ACCESSION NUMBER: SWISS-Prot / P04920
  ref <309>: DATABASE ENTRY DATE: 2002-06-15
MSSAPRLPAKGADSFCTPEPESLGPGTPGFPEQEEDELHRTLGVERFEEILQEAGSRGGEEPGRSYGEEDFEYHRQSSHHIHHPLSTHLPPDARRRKTPQGPGRKPRRRPGASPTGETPTIEEGEEDEDEASEAEGARALTQPSPVSTPSSVQFFLQEDDSADRKAERTSPSSPAPLPHQEATPRASKGAQAGTQVEEAEAEAVAVASGTAGGDDGGASGRPLPKAQPGHRSYNLQERRRIGSMTGAEQALLPRVPTDEIEAQTLATADLDLMKSHRFEDVPGVRRHLVRKNAKGSTQSGREGREPGPTPRARPRAPHKPHEVFVELNELLLDKNQEPQWRETARWIKFEEDVEEETERWGKPHVASLSFRSLLELRRTLAHGAVLLDLDQQTLPGVAHQVVEQMVISDQIKAEDRANVLRALLLKHSHPSDEKDFSFPRNISAGSLGSLLGHHHGQGAESDPHVTEPLMGGVPETRLEVERERELPPPAPPAGITRSKSKHELKLLEKIPENAEATVVLVGCVEFLSRPTMAFVRLREAVELDAVLEVPVPVRFLFLLLGPSSANMDYHEIGRSISTLMSDKQFHEAAYLADEREDLLTAINAFLDCSVVLPPSEVQGEELLRSVAHFQRQMLKKREEQGRLLPTGAGLEPKSAQDKALLQMVEAAGAAEDDPLRRTGRPFGGLIRDVRRRYPHYLSDFRDALDPQCLAAVIFIYFAALSPAITFGGLLGEKTQDLIGVSELIMSTALQGVVFCLLGAQPLLVIGFSGPLLVFEEAFFSFCSSNHLEYLVGRVWIGFWLVFLALLMVALEGSFLVRFVSRFTQEIFAFLISLIFIYETFYKLVKIFQEHPLHGCSASNSSEVDGGENMTWAGARPTLGPGNRSLAGQSGQGKPRGQPNTALLSLVLMAGTFFIAFFLRKFKNSRFFPGRIRRVIGDFGVPIAILIMVLVDYSIEDTYTQKLSVPSGFSVTAPEKRGWVINPLGEKSPFPVWMMVASLLPAILVFILIFMETQITTLIISKKERMLQKGSGFHLDLLLIVAMGGICALFGLPWLAAATVRSVTHANALTVMSKAVAPGDKPKIQEVKEQRVTGLLVALLVGLSIVIGDLLRQIPLAVLFGIFLYMGVTSLNGIQFYERLHLLLMPPKHHPDVTYVKKVRTLRMHLFTALQLLCLALLWAVMSTAASLAFPFILILTVPLRMVVLTRIFTDREMKCLDANEAEPVFDEREGVDEYNEMPMPV

SEQ ID NO: 3780 - DNA, 923 bp, Rattus norvegicus
  ref <308>: DATABASE ACCESSION NUMBER: EMBL / M62388
  ref <309>: DATABASE ENTRY DATE: 2000-03-04
gggactcttttctttcagactgaccgcggggcagctgcggagcatgtcgaccccggcccgtaggaggctcatgcgggatttcaagcgattgcaagaggacccacctgtgggggtcagtggtgcaccatctgaaaacaacatcatgcagtggaacgcagttatatttggaccagaagggacaccctttgaagatggtacttttaaactagtaatagaattttctgaagaatatccaaataaaccaccaaccgttaggtttttatccaaaatgtttcatccaaatgtgtatgctgacggcagcatatgcttagacatcctgcagaaccgatggagccccacgtacgacgtctcctccatcttaacttcaattcagtctctgttggatgagccgaatccaaacagtccggccaatagccaagcagcacagctttatcaggaaaacaaacgggagtatgagaagagggtttcggccattgttgagcagagctggaatgactcataatagacacctggtctgtccacctttccatcgtcgttgtgtataatttacctcccagtaggaaggctagcaagttttaagtgccacgggttttaaggattctgcagagaaaaaagaaaaagtccttcagtttagaacctacaaaagcttgtgtatcttgattaatgtactttttattgcatggtgtgaactaagttattgctgcataaatttgtaatatatcctgtttgtatttttttccaagtgtataatgttggtgtggagttttcatgacagaatatacacattttgtaaatctgtacttttttcaaatattgaatgccttatttttgaattctttagatttttaaattggagaaaagcacttaaagttttttatatatgaatattacatgtaaagctgttaaaatacataacttcagtg

SEQ ID NO: 3781 - protein, 152 aa, Rattus norvegicus
  ref <308>: DATABASE ACCESSION NUMBER: SWISS-Prot / P23567
  ref <309>: DATABASE ENTRY DATE: 2002-06-15
MSTPARRRLMRDFKRLQEDPPVGVSGAPSENNIMQWNAVIFGPEGTPFEDGTFKLVIEFSEEYPNKPPTVRFLSKMFHPNVYADGSICLDILQNRWSPTYDVSSILTSIQSLLDEPNPNSPANSQAAQLYQENKREYEKRVSAIVEQSWNDS

SEQ ID NO: 3782 - DNA, 1355 bp, Homo sapiens
  ref <308>: DATABASE ACCESSION NUMBER: EMBL / BC005979
  ref <309>: DATABASE ENTRY DATE: 2001-07-13
agactgaccgcggggcagctgcggagcatgtcgaccccggcccggaggaggctcatgcgggatttcaagcggttacaagaggacccacctgtgggtgtcagtggcgcaccatctgaaaacaacatcatgcagtggaatgcagttatatttggaccagaagggacaccttttgaagatggtacttttaaactagtaatagaattttctgaagaatatccaaataaaccaccaactgttaggtttttatccaaaatgtttcatccaaatgtgtatgctgatggtagcatatgtttagatatccttcagaatcgatggagtccaacatatgatgtatcttctatcttaacatcaattcagtctctgctggatgaaccgaatcctaacagtccagccaatagccaggcagcacagctttatcaggaaaacaaacgagaatatgagaaaagagtttcggccattgttgaacaaagctggaatgattcataatagacaactggtctgttaatctttttcatcattgttgtgtataatttacctctcattagaaaggctaacaaattttaagtgccacaggttttaaggattctgcagaaaaaaaagaaaaattccttcagtttagaacctacaaaagcttgtgtatcttgattaatgtactttttattgcatggtgtgaactaagttattgctgcataaatttgtaatatatcctgtttgtatttttttccaagtgtataatgttggtgtggagttttcatgacagaatatacacattttgtaaatctgtacttttttcaaatattgaatgccttatttttgaattctttagatttttaaattggagaaaagcacttaaagttttttatatatgaatattacatgtaaagctgttaaaatacataacttcagtgcaagagactttgtcacttatttccttatgtgtgtaggaggggttaataagtctctagctctccatctattgatagtttcatttacaatttcaaaagaacattcttatattttatcaaggaagtcttcaaatttgattctaaatagcgattataatctccaactttattttgaatgtacctctattagtttcaattgagtaattctagacataactggtttgactctgtccaactctgtatttaggccatttgttacagtttcttcatgcattacttactgttaaaactgtaccttttgcgatttcacagttggcacttctgccatgagcagagaactgatgcgacttgttttgctgcttggtagcactttaaaaaattttttgattaatgaagaaagtaaaaccataaacatttgccgaaaaaaaaaaaaaaaaaaaaaaaaaaaaa

SEQ ID NO: 3783 - protein, 152 aa, Homo sapiens; identical to SEQ ID NO: 3781

SEQ ID NO: 3784 - DNA, 923 bp, Rattus norvegicus; identical to SEQ ID NO: 3780
  ref <308>: DATABASE ACCESSION NUMBER: EMBL / M62388
  ref <309>: DATABASE ENTRY DATE: 2000-03-04

SEQ ID NO: 3785 - protein, 152 aa, Rattus norvegicus; identical to SEQ ID NO: 3781
  ref <308>: DATABASE ACCESSION NUMBER: SWISS-Prot / P23567
  ref <309>: DATABASE ENTRY DATE: 2002-06-15

SEQ ID NO: 3786 - DNA, 1355 bp, Homo sapiens; identical to SEQ ID NO: 3782
  ref <308>: DATABASE ACCESSION NUMBER: EMBL / BC005979
  ref <309>: DATABASE ENTRY DATE: 2001-07-13

SEQ ID NO: 3787 - protein, 152 aa, Homo sapiens; identical to SEQ ID NO: 3781

SEQ ID NO: 3788 - DNA, 3912 bp, Rattus norvegicus
  ref <308>: DATABASE ACCESSION NUMBER: EMBL / M62992
  ref <309>: DATABASE ENTRY DATE: 2000-03-04
cacagcttgggccttagagcagcaactagagagtgtgacaactgtgcctgtgatatctacatttgaaagatttgtacaaaaaagattacaaggttcaatgtcagtggctagggagatagcttagtcaataaagtgcttaccacacaagcatggagttcctagcagccacatgaaaaagctgaacatagtagccaacaccataatcttgatgcaggagaggcggaataggtgggttcctggggctttctggtcagccagcctgtccagcctaataggtgagttacaggtcccagtaaatgactccatctcaaaagatgatgtagataataactaaaaaggacacgagggctacctgctcacacacaagggtataaacaatgaggaaactcaccagcattgcttcttcactgtggaataagccttttggcagtgtagcctcccccatcactttgagaggtccaagtagaagtcatactgctctgaagggtacattctgatatattcccattcaacatggaatatgtgtctatggtactatgtgggctatccaactttgcatcttggtctcattgtcccacaccagtgtggggggaattgccctgggaagatgatgcaatgttccctgtcatcatcatcgccatataagctttgtatatggatgtacctggatgactctgcctggagcgggcgtaagtcaaaactttgagagtctagtgcttttgcatgggatggactgtggctgctcttggcttatggagtgcttggtctcttttccccttgtccctcccaaccactactggtttccacctagagaaaaccccaagtaacatctgattagctgacctgggtctccacttatccctaagcactgggctctcatacccacccttgtgtcctggttccaactcactagagtgccttcttgtgaactgcctcagacttccaccttggtagtgggacgtgcgcctgcccaggagcactcaactcccattggtttactggagttggtcatgttagcaaaggaaagagcaggggtgctgccagctctgcatccagcccactaccctccacaccactgagcttgcctgtcccaaactgccatctgaccatgtcacttcctctgctctagacatcttcccaaggttgcagacgctgacggatttgccccagagtcgaagtaactgccacctggaaattccacagccatgagtgggtttaactttggaggcaccggggctcctgctggcggctttacatttgggaccgcaaagactgcgaccaccacacccgccactggcttttccttctctgcttctggcaccggcaccggagggtttaattttgggactccctcccagccagctgcgaccaccccttccaccagcctcttctcacttgccacacagacctcaaccacacagaccccaggattcaactttggaacaacacctgcttctgggggaacaggcttctccctggggatcagcaccccaaagctcagcctaagtagcacagccgccacaccagccacagccaacactggcagctttgggcttggcagcagtactcttaccaatgccatctcaggtgccagcacctccagccaggggacagcccccactggctttgtctttggctcttctaccacctctgctccgtccaccggcaccacgggattctcattcaccagtggcagtgcatcccagcctggagcctccggcttcaacattggctctgtgggtagtttggcccagcccacagcactgtctggctctcccttcactccagccactctggcgacaactacggcaggagcaacacagccagctgctgctacacccactgctgccaccaccagtgcagggtctacactgtttgcttcaatagctgctgctcctgcctcatccagtactacagtgctttccctctcagctccagcgacaactgcagccactcctactgctgggactttgggcttcagcctcaaggcccctggagcagctcctggtgcctccaccaccagcaccaccactactactaccaccaccactactactgcctccacctcctcctccaccacgaccactggctttgccttaagcctgaaacccctggtgccagctggccccagcagcgtggcagctactgctctgcctgcctccagcacagcagttgggactacgacgggtccagcaatgacctacgcgcagctggaaagcctgatcaacaagtggagtctggagctggaggaccaggagcggcacttcctgcagcaggccacgcaggtcaatgcctgggaccgcacactgattgagaatggggagaagatcaccagcctgcaccgagaggtggaaaaggtgaagctggatcagaagcgtctggaccaggagctggactttatcctgtcacagcagaaggagctggaagaccttctgagcccgttagaggagtcagtgaaggagcaaagtggcaccatctaccttcagcatgctgatgaggagcgtgagaagacctacaagctggctgagaacatcgatgctcagctcaagcgcatggcccaggacctcaaggacattattgagcacctgaacatggctggtggccctgcagacaccagtgacccactgcagcagatctgcaagatcctcaatgcacacatggactcccttcagtgggtggaccagagctctgccctgctgcagaggagggtggaggaggccagccgtgtgtgtgagagccggcgcaaggaacaggaacgcagcctgcgcattgcctttgactagccatacatgagttgggggtgggggtacctcttttgttgtagggctgctggctttggggtggttgtattgttgagaaaaatgctctttggtttggttccctgttatcagaagtggtttgcgaaggcatgatgtcatggatgtaataacctgtgtgctctggagacaggtgtgaaggtcactgaactctaggccagcatttaaagaacaagggcaaactcatcctttagccactccaatacaactgtgacagtgggatggcatgctccagagattggaatggagacatggcttctgtgcttccctgcttctctaactcccatctaacccatgtcctccagagcctgtgctgcacaaagcagagtcaccaagggagactgagcttaacaccggtttgcactggctacccctctcacccctctcttgtgagcttctgtggcagggactgactgctgatagttctttgagaacagagtggctgcggatttgcttctgaatgtcccagtgtcaaaccttagattcatagatagtgttgaaggctggcagttatgtctggtctattttatttctccacactctactgtagcctctatggtccctgatcaaaacattgcttttctaaataaagaaaacattgtgaaatcagacttgctgtgaatgtgtgtgtagtgggtccaagatttggcaggacactgctggtgtgatactcttcctgtgccaccaggttggaagcgctggactgagtgagccacagagtctagtctctaccttctatggggtgggcaggctgcaggtacaagaagaaagtcctgtctaccagtgtgcataagtaataagtcatccattaccctaatagatacaggtgtcattgtgatgtcatcagcagtaggaaataggggaacactagaagggatttcactggaccagcagtagagccactaagttattttcttgggtcttgttgggctttgaagcacaagagaaagctgggggtggggtgagggtatagaggtaagtagctcggcgggtaagagcactggttagctgctgctctttcaaggacccaggtttattcacagcacccacgtggtagcttacaaccaccctataaccagtccaggttatctggtgt

SEQ ID NO: 3789 - protein, 525 aa, Rattus norvegicus
  ref <308>: DATABASE ACCESSION NUMBER: SWISS-Prot / AAA41789
  ref <309>: DATABASE ENTRY DATE: 2002-06-15
MSGFNFGGTGAPAGGFTFGTAKTATTTPATGFSFSASGTGTGGFNFGTPSQPAATTPSTSLFSLATQTSTTQTPGFNFGTTPASGGTGFSLGISTPKLSLSSTAATPATANTGSFGLGSSTLTNAISGASTSSQGTAPTGFVFGSSTTSAPSTGTTGFSFTSGSASQPGASGFNIGSVGSLAQPTALSGSPFTPATLATTTAGATQPAAATPTAATTSAGSTLFASIAAAPASSSTTVLSLSAPATTAATPTAGTLGFSLKAPGAAPGASTTSTTTTTTTTTTTASTSSSTTTTGFALSLKPLVPAGPSSVAATALPASSTAVGTTTGPAMTYAQLESLINKWSLELEDQERHFLQQATQVNAWDRTLIENGEKITSLHREVEKVKLDQKRLDQELDFILSQQKELEDLLSPLEESVKEQSGTIYLQHADEEREKTYKLAENIDAQLKRMAQDLKDIIEHLNMAGGPADTSDPLQQICKILNAHMDSLQWVDQSSALLQRRVEEASRVCESRRKEQERSLRIAFD

SEQ ID NO: 3790 - DNA, 3912 bp, Rattus norvegicus; identical to SEQ ID NO: 3788
  ref <308>: DATABASE ACCESSION NUMBER: EMBL / M62992
  ref <309>: DATABASE ENTRY DATE: 2000-03-04

SEQ ID NO: 3791 - protein, 525 aa, Rattus norvegicus; identical to SEQ ID NO: 3789
  ref <308>: DATABASE ACCESSION NUMBER: SWISS-Prot / AAA41789
  ref <309>: DATABASE ENTRY DATE: 2002-06-15

SEQ ID NO: 3792 - DNA, 2130 bp, Rattus norvegicus
  ref <308>: DATABASE ACCESSION NUMBER: EMBL / M63122
  ref <309>: DATABASE ENTRY DATE: 2000-03-04
ttttctccgagttttctgaactctggctcatgatcgggcttactggatacgagaatcctggaggaccgtaccctgatttccatctacctctgactttgagcctttctaacccggggctcacgctgccaacacccgggccacctggtccgatcgtcttacttcattcaccagcgttgccaattgctgccctgtccccagccccaatgggggagtgagagaggccactgccggccggacatgggtctccccatcgtgcctggcctgctgctgtcactggtgctcctggctctgctgatggggatacacccatcaggggtcaccggactggttccttctcttggtgaccgggagaagagggataatttgtgtccccagggaaagtatgcccatccaaagaataattccatctgctgcaccaagtgccacaaaggaacctacttggtgagtgactgtccaagcccagggcaggaaacagtctgcgaggtgtgtgataaaggcacctttacagcttcgcagaaccacgtcagacagtgtctcagttgcaagacatgtcggaaagaaatgttccaggtggagatttctccttgcaaagctgacatggacaccgtgtgtggctgcaagaagaaccaattccagcgctacctgagtgagacgcatttccagtgtgtggactgcagcccctgcttcaatggcaccgtgacaatcccctgtaaggagaaacagaacaccgtgtgtaactgccacgcaggattctttctaagcggaaatgagtgcaccccttgcagccactgcaagaaaaatcaggaatgtatgaagctgtgcctacctccagttgcaaatgtcacaaacccccaggactcaggtactgccgtgctgttgcctctggttatcttcctaggtctttgccttttattctttatctgcatcagtctactgtgccgatatccccagtggaggcccagggtctactccatcatttgtagggattcagctcctgtcaaagaggtggagggtgaaggaattgttactaagcccctaactccagcctctatcccagccttcagccccaaccccggcttcaaccccactctgggcttcagcaccaccccacgcttcagtcatcctgtctccagtacccccatcagccccgtcttcggtcctagtaactggcacaacttcgtgccacctgtaagagaggtggtcccaacccagggtgctgaccctctcctctacggatccctcaaccctgtgccaatccccgcccctgttcggaaatgggaagacgtcgtcgcggcccagccacaacggcttgacactgcagaccctgcgatgctgtatgctgtggtggatggcgtgcctccgacacgctggaaggagttcatgcggctcctggggctgagcgagcacgagatcgagcggctggagctgcagaacgggcgttgcctccgcgaggctcattacagcatgctggaagcctggcggcgccgcacaccgcgacacgaggccacgctggacgtagtgggccgcgtgctttgcgacatgaacctgcgtggctgcctggagaacatccgcgagactctagaaagccctgcccactcgtccacgacccacctcccgcgataaggccacacccccacctcaggaacgggactcgaaggaccatcctgctagatgccctgcttccctgtgaacctcctctttggtcctctagggggcaggctcgatctggcaggctcgatctggcagccacttccttggtgctaccgacttggtgtacatagcttttcccagctgccgaggacagcctgtgccagccacttgtgcatggcagggaagtgtgccatctgctcccagacagctgagggtgccaaaagccaggagaggtgattgtggagaaaaagcacaatctatctgatacccacttgggatgcaaggacccaaacaaagcttctcagggcctcctcagttgatttctgggcccttttcacagtagataaaacagtctttgtattgattatatcacactaatggatgaacggttgaactccctaaggtaggggcaagcacagaacagtggggtctccagctggagcccccgactcttgtaaatacactaaaaatctaaaagtg

SEQ ID NO: 3793 - protein, 461 aa, Rattus norvegicus
  ref <308>: DATABASE ACCESSION NUMBER: SWISS-Prot / P22934
  ref <309>: DATABASE ENTRY DATE: 2002-06-15
MGLPIVPGLLLSLVLLALLMGIHPSGVTGLVPSLGDREKRDNLCPQGKYAHPKNNSICCTKCHKGTYLVSDCPSPGQETVCEVCDKGTFTASQNHVRQCLSCKTCRKEMFQVEISPCKADMDTVCGCKKNQFQRYLSETHFQCVDCSPCFNGTVTIPCKEKQNTVCNCHAGFFLSGNECTPCSHCKKNQECMKLCLPPVANVTNPQDSGTAVLLPLVIFLGLCLLFFICISLLCRYPQWRPRVYSIICRDSAPVKEVEGEGIVTKPLTPASIPAFSPNPGFNPTLGFSTTPRFSHPVSSTPISPVFGPSNWHNFVPPVREVVPTQGADPLLYGSLNPVPIPAPVRKWEDVVAAQPQRLDTADPAMLYAVVDGVPPTRWKEFMRLLGLSEHEIERLELQNGRCLREAHYSMLEAWRRRTPRHEATLDVVGRVLCDMNLRGCLENIRETLESPAHSSTTHLPR

SEQ ID NO: 3794 - DNA, 2087 bp, Homo sapiens
  ref <308>: DATABASE ACCESSION NUMBER: EMBL / M33294
  ref <309>: DATABASE ENTRY DATE: 1999-09-02
ctttggggttcaagatcactgggaccaggccgtgatctctatgcccgagtctcaaccctcaactgtcaccccaaagcacttgggacgtcctggacagaccgagtcccgggaagccccagcactgccgctgccacactgccctgagcccaaatgggggagtgagaggccatagctgtctggcatgggcctctccaccgtgcctgacctgctgctgccgctggtgctcctggagctgttggtgggaatatacccctcaggggttattggactggtccctcacctaggggacagggagaagagagatagtgtgtgtccccaaggaaaatatatccaccctcaaaataattcgatttgctgtaccaagtgccacaaaggaacctacttgtacaatgactgtccaggcccggggcaggatacggactgcagggagtgtgagagcggctccttcaccgcttcagaaaaccacctcagacactgcctcagctgctccaaatgccgaaaggaaatgggtcaggtggagatctcttcttgcacagtggaccgggacaccgtgtgtggctgcaggaagaaccagtaccggcattattggagtgaaaaccttttccagtgcttcaattgcagcctctgcctcaatgggaccgtgcacctctcctgccaggagaaacagaacaccgtgtgcacctgccatgcaggtttctttctaagagaaaacgagtgtgtctcctgtagtaactgtaagaaaagcctggagtgcacgaagttgtgcctaccccagattgagaatgttaagggcactgaggactcaggcaccacagtgctgttgcccctggtcattttctttggtctttgccttttatccctcctcttcattggtttaatgtatcgctaccaacggtggaagtccaagctctactccattgtttgtgggaaatcgacacctgaaaaagagggggagcttgaaggaactactactaagcccctggccccaaacccaagcttcagtcccactccaggcttcacccccaccctgggcttcagtcccgtgcccagttccaccttcacctccagctccacctatacccccggtgactgtcccaactttgcggctccccgcagagaggtggcaccaccctatcagggggctgaccccatccttgcgacagccctcgcctccgaccccatccccaacccccttcagaagtgggaggacagcgcccacaagccacagagcctagacactgatgaccccgcgacgctgtacgccgtggtggagaacgtgcccccgttgcgctggaaggaattcgtgcggcgcctagggctgagcgaccacgagatcgatcggctggagctgcagaacgggcgctgcctgcgcgaggcgcaatacagcatgctggcgacctggaggcggcgcacgccgcggcgcgaggccacgctggagctgctgggacgcgtgctccgcgacatggacctgctgggctgcctggaggacatcgaggaggcgctttgcggccccgccgccctcccgcccgcgcccagtcttctcagatgaggctgcgccctgcgggcagctctaaggaccgtcctgcgagatcgccttccaaccccacttttttctggaaaggaggggtcctgcaggggcaagcaggagctagcagccgcctacttggtgctaacccctcgatgtacatagcttttctcagctgcctgcgcgccgccgacagtcagcgctgtgcgcgcggagagaggtgcgccgtgggctcaagagcctgagtgggtggtttgcgaggatgagggacgctatgcctcatgcccgttttgggtgtcctcaccagcaaggctgctcgggggcccctggttcgtccctgagcctttttcacagtgcataagcagttttttttgtttttgttttgttttgttttgtttttaaatcaatcatgttacactaatagaaacttggcactcctgtgccctctgcctggacaagcacatagcaagctgaactgtcctaaggcaggggcgagcacggaacaatggggccttcagctggagctgtggacttttgtacatacactaaaattctgaagtta

SEQ ID NO: 3795 - protein, 455 aa, Homo sapiens
  ref <308>: DATABASE ACCESSION NUMBER: SWISS-Prot / P19438
  ref <309>: DATABASE ENTRY DATE: 2002-06-15
MGLSTVPDLLLPLVLLELLVGIYPSGVIGLVPHLGDREKRDSVCPQGKYIHPQNNSICCTKCHKGTYLYNDCPGPGQDTDCRECESGSFTASENHLRHCLSCSKCRKEMGQVEISSCTVDRDTVCGCRKNQYRHYWSENLFQCFNCSLCLNGTVHLSCQEKQNTVCTCHAGFFLRENECVSCSNCKKSLECTKLCLPQIENVKGTEDSGTTVLLPLVIFFGLCLLSLLFIGLMYRYQRWKSKLYSIVCGKSTPEKEGELEGTTTKPLAPNPSFSPTPGFTPTLGFSPVPSSTFTSSSTYTPGDCPNFAAPRREVAPPYQGADPILATALASDPIPNPLQKWEDSAHKPQSLDTDDPATLYAVVENVPPLRWKEFVRRLGLSDHEIDRLELQNGRCLREAQYSMLATWRRRTPRREATLELLGRVLRDMDLLGCLEDIEEALCGPAALPPAPSLLR

SEQ ID NO: 3796 - DNA, 3761 bp, Rattus norvegicus
  misc_feature (1)..(3761): n=a, c, g or t
  ref <308>: DATABASE ACCESSION NUMBER: EMBL / M63485
  ref <309>: DATABASE ENTRY DATE: 2001-06-13
tdatdnactgagagaggtatctctccttttccctctcccttccctaagagttgtctgctggttctcagcttgaagaagattctacagtccttattgatcctttttcttggcgttaccatttttgaagcaaagttgacctagctttctagtttgagctttctttttggccgtcttttaaaacatttttttttttgatctataaaatagacaagagatagttctacaatgtccaagtcattccagcagtcatctctcggtagggattcacagggtcatgggcgtgacctgtctgcagcaggaataggccttcttgctgctgctacccagtctttaagtatgccagcatctcttggaaggatgaaccagggtactgcacgccttgctagcttaatgaatcttggaatgagttcttcattgaatcaacaaggagctcatagtgcactgtcttctgctagtacttcttcccataatttgcagtctatatttaacattggaagtagaggtccactccctttgtcttctcaacaccgtggagatacagaccaggccagtaatattttggccagctttggtctgtctgctagagacttagatgaactgagtcgttatccagaggacaagattactcctgagaacttgccccaaattcttctacagcttaaaaggaggagaactgaagaaggccctacattgagttatggtagagatggcagatctgctacacgggagccaccatacagagtacctagggatgattgggaagaaaaaaggcattttagaagagatagttttgatgatcgtggtcctagtctcaacccagtgcttgattatgaccatggaagtcgttctcaagaatctggttattatgacagaatggattatgaagatgacagattaagagatggagaaaggtgtagggatgattctttttttggtgagacctcgcataactatcataaatttgacagtgagtatgagagaatgggacgtggtcctggccccttacaagagagatctctctttgagaaaaagaggggcgctcctccaagtagcaatattgaagacttccatggactcttaccgaagggttatccccatctgtgctctatatgtgatttgccagttcattctaataaggagtggagtcaacatatcaatggagcaagtcacagtcgtcgatgccagcttcttcttgaaatctacccagaatggaatcctgacaatgatactggacacacaatgggtgatccattcatgctgcagcagtcaacaaacccagcaccgggaattctgggaccgccacctccttcatttcatcttggaggaccagcagttggaccaagaggaaatctgggtgctggtaatggaaacctacagggaccaagacacatgcaaaaaggcagagtggaaaccagccgagttgttcacattatggattttcagcgaggaaaaaacttgagataccagctattacaactggtagaaccatttggagtcatttcaaatcatctgattctaaataaaattaatgaggcatttattgaaatggcgaccacagaagatgctcaggctgctgtggattattatacaactacaccagcattagtgtttggcaagccagtgagagttcatttatcccagaagtataagagaataaagaaacctgaaggaaaaccagatgagaagtttgatcaaaagcaagaacttggacgtgtgatacatctcagcaatttacctcattctggctattctgacagtgctgtcctcaagcttgcagagccttatgggaaaataaaaaattatatattgatgaggatgaaaagtcaggcttttattgagatggaaaccagagaagatgcaatggcaatggttgaccactgtctaaagaaggcactttggtttcagggaagatgtgttaaagttgacttgtctgagaaatataaaaaactggtgctgaggattcctaacagaggcattgacttactgaaaaaagataaatctcggaaaagatcctattctccagatggaaaagaatctccaagtgataagaagtccaaaactgatggtgctcagaagactgagaatccagctgagggtaaagaacaagaagagaagtcgggtgaggatggtgagaaagacaccaaggatgaccagacagaacaggagcccagtatgcttcttgaatctgaagatgaattgcttgtcgatgaggaagaagctgcagcactaatagaaagtggaagctcagtgggtgatgagactgatcttgctaatttaggggatgtatcttctgatgggaaaaaggagccttcagataaagctgtgaaaaaagatgcaagtgcaacatccaagaaaaaacttaaaaaggtggacaagattgaggaacttgatcaagaaaatgaagctgcattggaaaatgggattaaaaatgaggaaaatacagaaccaggtgctgaatctgctgagaatgctgatgatccaaacaaagacgcaagtgataattcagatggccaaaatgatgagaacaaggaggactatacaattccagatgagtatagaattggaccatatcagcctaatgttcctggtggtatagactatgtgatacctaaaacagggttttactgtaagctgtgttcactcttttatacaaatgaagaagttgcaaagaatactcattgcagcagccttcctcattatcagaaattaaagaaatttctgaataaattggcagaagaacgcaggcagaagaaggaaagttaagatgtacaagaagcttttatttcaaagaaaacaatggttctttgattttaatgttaaccttttttaaatacaatactgatagttagaaaactactgtgactcttttgttttagtggaaaataatagatgtctgttcatgtgtttaagtgttatagcaaaaagtacacatacggttaagttaatgaaaaagtttttgtttcatcagtgacaacagacaaaagtacttcctagagatttgctgttgtaagtaagctatggaaaaacaacttgcaccactaagagaaagataacatagaaccattcagaaaactgaaatttagtagtttaaggcttcaaagaaatgtcaacattttgattccattcaataaagtacaaaaccaatgtattttttattacttttcatctgaaacagtccacattttaatctgagccttgcagacttttcatttgtgacgtttgtaagctgtttcggttgcattgcatttttagagaacttaattaacgtgagaattcaattgcaggtgcagttttcttttaatgttcatgctgtttagatgataagatatattaagtaattggctttagatttgtaatttttttcctctgagttcctgctaggttttgtattgtagtagtcaatgttatttcagtgaaatgtaaaaatattaccgttctctttgaccagtattaatttcttgagaacctattccttgtcacttgaatcctgtagctgtcaaacatctccggtataagcaacatttgatttttgaagtgtgtaaaccatctatattttcaagatgtaattttacatttctgcattttaaaagtttggccataattctagaagcacgttctaattatgtacctacacatgtgacctatgtgagcagaaatttgcatgtataatctgtgtttacttgtaactctctggttatatactgcttatatctgtggattcaagttactgaagtgaataccaataaaaaaaaaaacaagct

SEQ ID NO: 3797 - protein, 845 aa, Rattus norvegicus
  ref <308>: DATABASE ACCESSION NUMBER: SWISS-Prot / P43244
  ref <309>: DATABASE ENTRY DATE: 2001-10-16
MSKSFQQSSLGRDSQGHGRDLSAAGIGLLAAATQSLSMPASLGRMNQGTARLASLMNLGMSSSLNQQGAHSALSSASTSSHNLQSIFNIGSRGPLPLSSQHRGDTDQASNILASFGLSARDLDELSRYPEDKITPENLPQILLQLKRRRTEEGPTLSYGRDGRSATREPPYRVPRDDWEEKRHFRRDSFDDRGPSLNPVLDYDHGSRSQESGYYDRMDYEDDRLRDGERCRDDSFFGETSHNYHKFDSEYERMGRGPGPLQERSLFEKKRGAPPSSNIEDFHGLLPKGYPHLCSICDLPVHSNKEWSQHINGASHSRRCQLLLEIYPEWNPDNDTGHTMGDPFMLQQSTNPAPGILGPPPPSFHLGGPAVGPRGNLGAGNGNLQGPRHMQKGRVETSRVVHIMDFQRGKNLRYQLLQLVEPFGVISNHLILNKINEAFIEMATTEDAQAAVDYYTTTPALVFGKPVRVHLSQKYKRIKKPEGKPDEKFDQKQELGRVIHLSNLPHSGYSDSAVLKLAEPYGKIKNYILMRMKSQAFIEMETREDAMAMVDHCLKKALWFQGRCVKVDLSEKYKKLVLRIPNRGIDLLKKDKSRKRSYSPDGKESPSDKKSKTDGAQKTENPAEGKEQEEKSGEDGEKDTKDDQTEQEPSMLLESEDELLVDEEEAAALIESGSSVGDETDLANLGDVSSDGKKEPSDKAVKKDASATSKKKLKKVDKIEELDQENEAALENGIKNEENTEPGAESAENADDPNKDASDNSDGQNDENKEDYTIPDEYRIGPYQPNVPGGIDYVIPKTGFYCKLCSLFYTNEEVAKNTHCSSLPHYQKLKKFLNKLAEERRQKKES

SEQ ID NO: 3798 - DNA, 3828 bp, Homo sapiens
  ref <308>: DATABASE ACCESSION NUMBER: EMBL / BC015031
  ref <309>: DATABASE ENTRY DATE: 2002-09-02
ggtacctctccttttccctctccctttccctaagagttgtctgctggttctcagcttgaagaagattctgcagtccttattgatcctttttcttggcgttaccattttttgaagcaaagttaacctagctttctagtttgagctttctttttggccgtctttaaaaaaaattttttttttaatctataaaatagacaagagctagttctacaatgtccaagtcattccagcagtcatctctcagtagggactcacagggtcatgggcgtgacctgtctgcggcaggaataggccttcttgctgctgctacccagtctttaagtatgccagcatctcttggaaggatgaaccagggtactgcacgccttgctagtttaatgaatcttggaatgagttcttcattgaatcaacaaggagctcatagtgcactgtcttctgctagtacttcttcccataatttgcagtctatatttaacattggaagtagaggtccactccctttatcttctcaacaccgtggagatgcagaccaggccagtaacattttggccagctttggtctgtctgctagagacttagatgaactgagtcgttatccagaggacaagattactcctgagaatttgccccaaatccttctacagcttaaaaggaggagaactgaagaaggccctaccttgagttatggtagagatggcagatctgctacacgggagccaccatacagagtacctagggatgattgggaagaaaaaaggcactttagaagagatagttttgatgatcgtggtcctagtctcaacccagtgcttgattatgaccatggaagtcgttctcaagaatctggttattatgacagaatggattatgaagatgacagattaagagatggagaaaggtgtagggatgattctttttttggtgagacctcgcataactatcataaatttgacagtgagtatgagagaatgggacgtggtcctggccccttacaagagagatctctctttgagaaaaagagaggcgctcctccaagtagcaatattgaagacttccatggactcttaccgaagggttatccccatctgtgctctatatgtgatttgccagttcattctaataaggagtggagtcaacatatcaatggagcaagtcacagtcgtcgatgccagcttcttcttgaaatctacccagaatggaatcctgacaatgatacaggacacacaatgggtgatccattcatgttgcagcagtctacaaatccagcaccaggaattctgggacctccacctccctcatttcatcttgggggaccagcagttggaccaagaggaaatctgggtgctggaaatggaaacctgcaaggacctagacacatgcagaaaggcagagtggaaactagcagagttgttcacatcatggattttcaacgagggaaaaacttgagataccagctattacagctggtagaaccatttggagtcatttcaaatcatctgattctaaataaaattaatgaggcatttattgaaatggcaaccacagaggatgctcaggccgcagtggattattacacaaccacaccagcgttagtatttggcaagccagtgagagttcatttatcccagaagtataaaagaataaagaaacctgaaggaaagccagatcagaagtttgatcaaaagcaagagcttggacgtgtgatacatctcagcaatttgccgcattctggctattctgatagtgctgttctcaagcttgctgagccttatgggaaaataaagaattacatattgatgaggatgaaaagtcaggcttttattgagatggagacaagagaagatgcaatggcaatggttgaccattgtttgaaaaaagccctttggtttcaggggagatgtgtgaaggttgacctgtctgagaaatataaaaaactggttctgaggattccaaacagaggcattgatttactgaaaaaagataaatcccgaaaaagatcttactctccagatggcaaagaatctccaagtgataagaaatccaaaactgatggttcccagaagactgagagttcaaccgaaggtaaagaacaagaagagaagtccggtgaagatggtgagaaagacacaaaggatgaccagacagagcaggaacctaatatgcttcttgaatctgaagatgagctacttgtagatgaagaagaagcagcagcactgctagaaagtggcagttcagtgggagacgagaccgatcttgctaatttaggtgatgtggcttctgatgggaaaaaggaaccatcagataaagctgtgaaaaaagatggaagtgcttcagcagcagcaaagaaaaagcttaaaaaggtggacaagatcgaggaacttgatcaagaaaacgaagcagcgttggaaaatggaattaaaaatgaggaaaacacagaaccaggtgctgaatcttctgagaacgctgatgatcccaacaaagatacaagtgaaaacgcagatggtcaaagtgatgagaacaaggacgactatacaatcccagatgagtatagaattggaccatatcagcccaatgttcctgttggtatagactatgtgatacctaaaacagggttttactgtaagctgtgttcactcttttatacaaatgaagaagttgcaaagaatactcattgcagcagccttcctcattatcagaaattaaagaaatttctgaataaattggcagaagaacgcagacagaagaaggaaacttaagatgtgcaaggagatttaatgatttcaaagaaaataatggttctttgtttttaatgttaaccttttttaaatacaatactgatagttagaagaaaactattgtactcttttgttttagtggagaaataatagatgtctgttcatgtgttaagtgttatagcaaaaaaaatacacatatggttaagttaatgaatagtttttgttttatcagaatggcaacagacagaagtactttgtagagattgacttcctaagctacttaagacaacttgcaccactaagaaaaaaatgtagaaccatttggaaaaatgaaatttagtagttccaagtttcaaagaaatgtcaacattttattccattcaataaagaacaaaaccaatagtgtttttattactttcatctgaaacattccatgttttaatctgagccttgcagactttcatttggagtttgaacccgttttggttgcatttcatttttggagaacttaattaacgtgagattggcaattgaaatgcaggtgcagttttctgttaatgtcatgctgttgtttaggtaataagaaatattaagtaattggctttagattttgtaatttttttccctgagttcctgctagatttcgtattctagtagtcaatgtattttcagtgaaatgcaaaaatattcccattatctttgaccagtattaatttttgagatcttactgcttgtcacttgaatcccgtgattgtcatacatctctggtataagcaacatttgatttttgaagtgtgtagaccatctcttcatattttcaagatgtaattttacatttctgcatttttaaaacagtttggccataatcctagatgcacgcttctaattcatgtacctgcacatgtgacctttgtgaacagaaatttgcatgtataatttgtgtttacttgtaactttctggttatatactgcttatatctgtggattcaagttactgaagtgaataccaataaaaagaaaaccctaggccatgttaattggttatacatgtttggaatgttaaaaaaaaaaaaaaaaaaaaaaaaaaaaaaaa

SEQ ID NO: 3799 - protein, 847 aa, Homo sapiens
  ref <308>: DATABASE ACCESSION NUMBER: SWISS-Prot / P43243
  ref <309>: DATABASE ENTRY DATE: 2002-06-15
MSKSFQQSSLSRDSQGHGRDLSAAGIGLLAAATQSLSMPASLGRMNQGTARLASLMNLGMSSSLNQQGAHSALSSASTSSHNLQSIFNIGSRGPLPLSSQHRGDADQASNILASFGLSARDLDELSRYPEDKITPENLPQILLQLKRRRTEEGPTLSYGRDGRSATREPPYRVPRDDWEEKRHFRRDSFDDRGPSLNPVLDYDHGSRSQESGYYDRMDYEDDRLRDGERCRDDSFFGETSHNYHKFDSEYERMGRGPGPLQERSLFEKKRGAPPSSNIEDFHGLLPKGYPHLCSICDLPVHSNKEWSQHINGASHSRRCQLLLEIYPEWNPDNDTGHTMGDPFMLQQSTNPAPGILGPPPPSFHLGGPAVGPRGNLGAGNGNLQGPRHMQKGRVETSRVVHIMDFQRGKNLRYQLLQLVEPFGVISNHLILNKINEAFIEMATTEDAQAAVDYYTTTPALVFGKPVRVHLSQKYKRIKKPEGKPDQKFDQKQELGRVIHLSNLPHSGYSDSAVLKLAEPYGKIKNYILMRMKSQAFIEMETREDAMAMVDHCLKKALWFQGRCVKVDLSEKYKKLVLRIPNRGIDLLKKDKSRKRSYSPDGKESPSDKKSKTDGSQKTESSTEGKEQEEKSGEDGEKDTKDDQTEQEPNMLLESEDELLVDEEEAAALLESGSSVGDETDLANLGDVASDGKKEPSDKAVKKDGSASAAAKKKLKKVDKIEELDQENEAALENGIKNEENTEPGAESSENADDPNKDTSENADGQSDENKDDYTIPDEYRIGPYQPNVPVGIDYVIPKTGFYCKLCSLFYTNEEVAKNTHCSSLPHYQKLKKFLNKLAEERRQKKET

SEQ ID NO: 3800 - DNA, 1107 bp, Rattus norvegicus
  ref <308>: DATABASE ACCESSION NUMBER: EMBL / M63901
  ref <309>: DATABASE ENTRY DATE: 2000-03-04
attgctagacgctcgcccgcggccacacggttaaaaatgacctcaaggatggccatactatctggtcttttgttttggctgctgcttgagtggaatccagcattcgcttatagtccacggactcctgaccgggtctcagagacagacatccagaggctgctgcatggagtcatggagcagctgggcattgccaggccacgtgtggagtacccagcccaccaggccatgaatcttgttgggccgcagagcatcgaagggggagctcacgagggtcttcagcatctgggtcctttcggcaacatccccaacatcgtggcagagttgactggcgacaatattcctaaggacttcagtgaggaccaaggctacccagaccctccaaatccctgtcctcttgggaaaactgcagatgacggatgtctagaaaacgcccctgacactgcagagttcagccgagaattccagttagaccagcacctttttgatccagaacatgactacccaggtttgggcaagtggaacaagaaactcctttatgagaagatgaagggaggacagaggcggaagcggaggagtgtcaatccctatctacaaggaaagaggctggacaatgttgtggcaaagaaatctgtcccccacttctcagaagaggagaaggagccagaataaagagaagacagtaggtggaaacccatacaatgcttatgtatgtgcatgttagcagagcccgtgagtgacagcatgcattttacatatttatggatgaaaaacagctgtccttgtctccatagcaatgcctgagctttctgctaaattagaataaaagctcctttccttttggggattttttgatgtggatctgcaagaaacattacaattaaaatgtatatgtcaagtataataaaaacacggatatgaaatactctgatttcttgccgttttgggttgtgctgtttgggccaagtctgtaaaaagctagcatttgattttgattatgtagtctatctagcccttgggccttgttacacaccaataaagaagtttgtactcaaggggaggggctgacacatctcactctgctgcttcttaataaatgtatgtgcaagc

SEQ ID NO: 3801 - protein, 210 aa, Rattus norvegicus
  ref <308>: DATABASE ACCESSION NUMBER: SWISS-Prot / P27682
  ref <309>: DATABASE ENTRY DATE: 2002-06-15
MTSRMAILSGLLFWLLLEWNPAFAYSPRTPDRVSETDIQRLLHGVMEQLGIARPRVEYPAHQAMNLVGPQSIEGGAHEGLQHLGPFGNIPNIVAELTGDNIPKDFSEDQGYPDPPNPCPLGKTADDGCLENAPDTAEFSREFQLDQHLFDPEHDYPGLGKWNKKLLYEKMKGGQRRKRRSVNPYLQGKRLDNVVAKKSVPHFSEEEKEPE

SEQ ID NO: 3802 - DNA, 1210 bp, Homo sapiens
  ref <308>: DATABASE ACCESSION NUMBER: EMBL / BC005349
  ref <309>: DATABASE ENTRY DATE: 2001-07-13
gacccccaccaaggcccataccgcagtaggctcctcgggctgcccctcggttgacaatggtctccaggatggtctctaccatgctatctggcctactgttttggctggcatctggatggactccagcatttgcttacagcccccggacccctgaccgggtctcagaagcagatatccagaggctgcttcatggtgttatggagcaattgggcattgccaggccccgagtggaatatccagctcaccaggccatgaatcttgtgggcccccagagcattgaaggtggagctcatgaaggacttcagcatttgggtccttttggcaacatccccaacatcgtggcagagttgactggagacaacattcctaaggactttagtgaggatcaggggtacccagaccctccaaatccctgtcctgttggaaaaacagcagatgatggatgtctagaaaacacccctgacactgcagagttcagtcgagagttccagttgcaccagcatctctctgatccggaacatgactatccaggcttgggcaagtggaacaagaaactcctttacgagaagatgaagggaggagagagacgaaagcggaggagtgtcaatccatatctacaaggacagagactggataatgttgttgcaaagaagtctgtcccccatttttcagatgaggataaggatccagagtaaagagaagatgctagacgaaaacccacattacctgttaggcctcagcatggcttatgtgcacgtgtaaatggagtccctgtgaatgacagcatgtttcttacatagataattatggatacaaagcagctgtatgtagatagtgtattgtcttcacaccgatgattctgctttttgctaaattagaataagagcttttttgtttcttgggtttttaaaatgtgaatctgcaatgatcataaaaattaaaatgtgaatgtcaacaataaaaagcaagactatgaaaggctcagatttcttgcagtttaaaatggtgtctgaggttgtactattttggccaagtctgtagaaagctgtcatttgattttgattatgtagttcatccagcccttgggcattgttatacaccagtaaagaaggctgtactcaagaggaggagctgacacatttcacttggctgcgtcttaataaacatgaatgcaagcacaaaaaaaaaaaaaaaaaaaaaaaaaaaaaaa

SEQ ID NO: 3803 - protein, 211 aa, Homo sapiens
  ref <308>: DATABASE ACCESSION NUMBER: SWISS-Prot / P05408
  ref <309>: DATABASE ENTRY DATE: 2002-06-15
MVSRMVSTMLSGLLFWLASGWTPAFAYSPRTPDRVSEADIQRLLHGVMEQLGIARPRVEYPAHQAMNLVGPQSIEGGAHEGLQHLGPFGNIPNIVAELTGDNIPKDFSEDQGYPDPPNPCPVGKTDDGCLENTPDTAEFSREFQLHQHLFDPEHDYPGLGKWNKKLLYEKMKGGERRKRRSVNPYLQGQRLDNVVAKKSVPHFSDEDKDPE

SEQ ID NO: 3804 - DNA, 1107 bp, Rattus norvegicus; identical to SEQ ID NO: 3800
  ref <308>: DATABASE ACCESSION NUMBER: EMBL / M63901
  ref <309>: DATABASE ENTRY DATE: 2000-03-04

SEQ ID NO: 3805 - protein, 210 aa, Rattus norvegicus; identical to SEQ ID NO: 3801
  ref <308>: DATABASE ACCESSION NUMBER: SWISS-Prot / P27682
  ref <309>: DATABASE ENTRY DATE: 2002-06-15

SEQ ID NO: 3806 - DNA, 1210 bp, Homo sapiens; identical to SEQ ID NO: 3802
  ref <308>: DATABASE ACCESSION NUMBER: EMBL / BC005349
  ref <309>: DATABASE ENTRY DATE: 2001-07-13

SEQ ID NO: 3807 - protein, 211 aa, Homo sapiens; identical to SEQ ID NO: 3803
  ref <308>: DATABASE ACCESSION NUMBER: SWISS-Prot / P05408
  ref <309>: DATABASE ENTRY DATE: 2002-06-15

SEQ ID NO: 3808 - DNA, 853 bp, Rattus norvegicus
  ref <308>: DATABASE ACCESSION NUMBER: EMBL / M63983
  ref <309>: DATABASE ENTRY DATE: 2000-03-04
ggcacgagggacttacctcactgcttttcctagcggtacgacctcctccgccagcttcctcctcagaccgcttttcccgcgagccgaccggttctgtcatgtcgaccctcagtcccagcgtcgtgattagtgatgatgaaccaggttatgacctagatttattttgcatacctaatcattatgctgaagatttggaaaaggtgtttattcctcatggactgattatggacaggactgaaagacttgctcgagatgtcatgaaggagatgggaggccatcacattgtggccctctgtgtgctgaaggggggctataagttctttgctgacctgctggattacattaaagcgctgaatagaaatagtgataggtccattcctatgactgtagattttatcagactgaagagctactgtaatgaccagtcaacgggggacataaaagttattggtggagatgatctctcaactttaactggaaagaacgtcttgattgttgaagatataattgacactggtaaaacaatgcagactttgctttccttggtcaagcagtacagccccaaaatggttaaggttgcaagcttgctggtgaaaaggacctctcgaagtgttggatacaggccagactttgttggatttgaaattccagacaagtttgttgttggatatgcccttgactataatgagcacttcagggatttgaatcatgtttgtgtcatcagcgaaagtggaaaagccaagtacaaagcctaaaagacagcggcaagttgaatctacaagagtcctgttgatgtggccagtaaagaactagcagacgttctagtcctgtggccatctacttagtaaagctt

SEQ ID NO: 3809 - protein, 218 aa, Rattus norvegicus
  ref <308>: DATABASE ACCESSION NUMBER: SWISS-Prot / P27605
  ref <309>: DATABASE ENTRY DATE: 2002-06-15
MSTLSPSVVISDDEPGYDLDLFCIPNHYAEDLEKVFIPHGLIMDRTERLARDVMKEMGGHHIVALCVLKGGYKFFADLLDYIKALNRNSDRSIPMTVDFIRLKSYCNDQSTGDIKVIGGDDLSTLTGKNVLIVEDIIDTGKTMQTLLSLVKQYSPKMVKVASLLVKRTSRSVGYRPDFVGFEIPDKFVVGYALDYNEHFRDLNHVCVISESGKAKYKA

SEQ ID NO: 3810 - DNA, 654 bp, Homo sapiens
  ref <308>: DATABASE ACCESSION NUMBER: EMBL / L29382
  ref <309>: DATABASE ENTRY DATE: 1999-07-02
atggcgacccgcagccctggcgtcgtgattagtgatgatgaaccaggttatgaccttgatttattttgcatacctaatcattatgctgaggatttggaaagggtgtttattcctcatggactaattatggacaggactgaacgtcttgctcgagatgtgatgaaggagatgggaggccatcacattgtagccctctgtgtgctcaaggggggctataaattctttgctgacctgctggattacatcaaagcactgaatagaaatagtgatagatccattcctatgactgtagattttatcagactgaagagctattgtaatgaccagtcaacaggggacataaaagtaattggtggagatgatctctcaactttaactggaaagaatgtcttgattgtggaagatataattgacactggcaaaacaatgcagactttgctttccttggtcaggcagtataatccaaagatggtcaaggtcgcaagcttgctggtgaaaaggaccccacgaagtgttggatataagccagactttgttggatttgaaattccagacaagtttgttgtaggatatgcccttgagtataatgaatacttcagggatttgaatcatgtttgtgtcattagtgaaactggaaaagcaaaatacaaagcc

SEQ ID NO: 3811 - protein, 217 aa, Homo sapiens
  ref <308>: DATABASE ACCESSION NUMBER: SWISS-Prot / AAB59392
  ref <309>: DATABASE ENTRY DATE: 2002-06-15
ATRSPGVVISDDEPGYDLDLFCIPNHYAEDLERVFIPHGLIMDRTERLARDVMKEMGGHHIVALCVLKGGYKFFADLLDYIKALNRNSDRSIPMTVDFIRLKSYCNDQSTGDIKVIGGDDLSTLTGKNVLIVEDIIDTGKTMQTLLSLVRQYNPKMVKVASLLVKRTPRSVGYKPDFVGFEIPDKFVVGYALDYNEYFRDLNHVCVISETGKAKYKA

SEQ ID NO: 3812 - DNA, 853 bp, Rattus norvegicus; identical to SEQ ID NO: 3808
  ref <308>: DATABASE ACCESSION NUMBER: EMBL / M63983
  ref <309>: DATABASE ENTRY DATE: 2000-03-04

SEQ ID NO: 3813 - protein, 218 aa, Rattus norvegicus; identical to SEQ ID NO: 3809
  ref <308>: DATABASE ACCESSION NUMBER: SWISS-Prot / P27605
  ref <309>: DATABASE ENTRY DATE: 2002-06-15

SEQ ID NO: 3814 - DNA, 1331 bp, Homo sapiens
  ref <308>: DATABASE ACCESSION NUMBER: Refseq / NM_000194
  ref <309>: DATABASE ENTRY DATE: 2001-01-11
tcttgctgcgcctccgcctcctcctctgctccgccaccggcttcctcctcctgagcagtcagcccgcgcgccggccggctccgttatggcgacccgcagccctggcgtcgtgattagtgatgatgaaccaggttatgaccttgatttattttgcatacctaatcattatgctgaggatttggaaagggtgtttattcctcatggactaattatggacaggactgaacgtcttgctcgagatgtgatgaaggagatgggaggccatcacattgtagccctctgtgtgctcaaggggggctataaattctttgctgacctgctggattacatcaaagcactgaatagaaatagtgatagatccattcctatgactgtagattttatcagactgaagagctattgtaatgaccagtcaacaggggacataaaagtaattggtggagatgatctctcaactttaactggaaagaatgtcttgattgtggaagatataattgacactggcaaaacaatgcagactttgctttccttggtcaggcagtataatccaaagatggtcaaggtcgcaagcttgctggtgaaaaggaccccacgaagtgttggatataagccagactttgttggatttgaaattccagacaagtttgttgtaggatatgcccttgactataatgaatacttcagggatttgaatcatgtttgtgtcattagtgaaactggaaaagcaaaatacaaagcctaagatgagagttcaagttgagtttggaaacatctggagtcctattgacatcgccagtaaaattatcaatgttctagttctgtggccatctgcttagtagagctttttgcatgtatcttctaagaattttatctgttttgtactttagaaatgtcagttgctgcattcctaaactgtttatttgcactatgagcctatagactatcagttccctttgggcggattgttgtttaacttgtaaatgaaaaaattctcttaaaccacagcactattgagtgaaacattgaactcatatctgtaagaaataaagagaagatatattagttttttaattggtattttaatttttatatatgcaggaaagaatagaagtgattgaatattgttaattataccaccgtgtgttagaaaagtaagaagcagtcaattttcacatcaaagacagcatctaagaagttttgttctgtcctggaattattttagtagtgtttcagtaatgttgactgtattttccaacttgttcaaattattaccagtgaatctttgtcagcagttcccttttaaatgcaaatcaataaattcccaaaaattt

SEQ ID NO: 3815 - protein, 217 aa, Homo sapiens; identical to SEQ ID NO: 3811
  ref <308>: DATABASE ACCESSION NUMBER: SWISS-Prot / P00492
  ref <309>: DATABASE ENTRY DATE: 2002-06-15

SEQ ID NO: 3816 - DNA, 1350 bp, Rattus norvegicus
  ref <308>: DATABASE ACCESSION NUMBER: EMBL / M64092
  ref <309>: DATABASE ENTRY DATE: 2000-03-04
ggccggtggcaggcggcaccgcgagggacctggcccggcgccgcaagcgtctctagcgcgcagctggggtcatgatatactggaaaccacacaagattagtctggggaggcagaaaccataaagcccctgagactaggttcggagaggaaagataaaggaaagaccccctctcagcttcaccctttacctgtctcagaaacaacagcccattttaaccacagatttactctgtgatgaggacagattcatcggagatgactgatgtggaatctgtaatcagcagcttcgcgtcttcagcaagggcgggccgccgcaatgccttacccgacatccagagttcactggctacaggtggatcccctgatcttgcactgaagctggaggcattggctgtgaaggaagatgcaaaaatgaagaatgaagagaaagaccaaggccaaccgaagaagcccctagacgaagacaaataaaggcttagaatttatcaagggtgttgattttatgcacattgagagacatagctatgcattcctggggtgtttgatctggtagtaaccatggtaacccatggtaacctctgtgtgtgtgtgtgtgtgtgtgtgttttcagtaattttgttatgatgctatccttaaactgcagctatgatactgaaatagaatattaaaagttattaccttcaaattgcacccaaggaaggacacactgtttatatcccaacaatatcctatctgtctatcgagatttacttagtcagatatatgtttaattctgtcttagcaagttagaacctttttcttggtatgtataaatggatacctattaatttaatactttgtagaatttgtaggaaattatatttttggtgagatagaattagtagtaaaaaaatcactcttataaaatgtgtttatttttcattaaaattgcaccatatttcctgcaaaatattaggagagatctggaaatattgtaaaagttgtaacaacttaaacatctctatgatgtttttgtctaatgtattttgcatctagtctcgatgtattgtgatttttaatatggactcacataacataaaatttgtgacaaacttgcttaaaagaaacatgtatattgaataaatctcactatattccttaacttggttatatgtgtgcttctcattttaatatggattgtacaagatattgtgctctttttcttagactgtttgtctctaggtttttgtgtgtgtacgcaaattgttgctagagtaatttcatcaggaatgctggtcttagtttttatatttttccaaagtataatactataagttaaaatagcaaaataaatgcttttaatatatgttt

SEQ ID NO: 3817 - protein, 70 aa, Rattus norvegicus
  ref <308>: DATABASE ACCESSION NUMBER: SWISS-Prot / P27775
  ref <309>: DATABASE ENTRY DATE: 2001-10-16
TDVESVISSFASSARAGRRNALPDIQSSLATGGSPDLALKLEALAVKEDAKMKNEEKDQGQPKKPLDEDK

SEQ ID NO: 3818 - DNA, 1057 bp, Homo sapiens
  ref <308>: DATABASE ACCESSION NUMBER: EMBL / AF225513
  ref <309>: DATABASE ENTRY DATE: 2001-02-04
gggggttatttttagcaatctggctcacactgagggcttcctgctctattcagcaaatgtgcaaatggatgctgcaggaccgtaacagtagacattgatgaagatgttgctatgaggacagattcatcaaaaatgactgacgtggagtctggggtcgccaattttgcatcttcagcaagggcaggccgccggaatgccttaccagacatccagagttcagctgccacagacggaacctcagatttgcccctcaaactggaggctctctccgtgaaggaagatgcaaaagagaaagatgaaaaaacaacacaagaccaattggaaaagcctcaaaatgaagaaaaatgaaggctcataatctatcaagagtgctgaatttctgcatgttgaaagacttagtggttctgttttcttgagacatttaatctggtggtaactgtggtaacattgcagccctaagcagcatgtgtatattagataattgtgttgtgatgctactcactttgattgcaatgatgatgtccaaggtaagctattaaaaggcaggttacttccaaatcgcactgaaggaaaaggttaagaataatacatgatcacagaaatgcataccactgtctgtaaacccaacaaaattcactgttctcttttggatttatttagcctgatgtatttttaattcaatttttatggtgatgggcaaatcattcttggtaaatgtaaatcaaacatgattgatttaaaacttcatggaatttgtagaaaattatggacatttttggtgagaaagaacaatagtcaaaactcacatggatagagtgtgtttgttttttgccaaaaatgccccagaccttttcccaaacctcaaaaacgtcttggaaaaattgtaaaagtttgataacagaaacatctttaggatatttttgtctgacgtattttgcttctagtatgtgcctactgtgatttttttcatgtggaaaatgcaaaatttgtaacaaaatggttatatggaacatgcctattaaacgaattttactatcttccctaaaaaaaaaaaaaa

SEQ ID NO: 3819 - protein, 78 aa, Homo sapiens
  ref <308>: DATABASE ACCESSION NUMBER: SWISS-Prot / Q9C010
  ref <309>: DATABASE ENTRY DATE: 2002-06-15
MRTDSSKMTDVESGVANFASSARAGRRNALPDIQSSAATDGTSDLPLKLEALSVKEDAKEKDEKTTQDQLEKPQNEEK

SEQ ID NO: 3820 - DNA, 3662 bp, Rattus norvegicus
  ref <308>: DATABASE ACCESSION NUMBER: EMBL / M64301
  ref <309>: DATABASE ENTRY DATE: 2000-03-04
agacctgccgggcgcatatttattcacagttttgtcccatgttaagtcggttagcatagtgaatctgagtgcatagtatgtcatttcattccgttgagtttctcgagtgttttctttaaatgtctgcagagtcgctacccttccttgaactatgaagcactgcaatcttcttaattctcagtatgaagagagatttttgagctttaagtctgaggggaactcagcaggcctggttggcgtctgcaatgaacatcaagaaaccatcgtgctgtgggaatgtgatcgtttttctccctttttgagagatctttccttttgatgccagttttcttccttgtttacacaagttcaacaatttgaaaggaaaaggcaattgtaagggttttaaaatggcagagaaatttgaaagtctcatgaacattcatggctttgatctgggttccaggtacatggacttaaaaccattgggctgtggaggcaatggcttggttttttctgctgtagacaatgactgtgacaaaagagtagccatcaagaaaattgtcctcaccgatccccagagtgtcaaacatgccctccgtgaaatcaaaattattagaagacttgaccacgataacattgtgaaagtgtttgaaattcttggtcccagtggaagccagctgacagacgatgtgggctctctaacagagctgaatagcgtctacattgttcaggagtacatggagacagacttggcgaacgtgctggagcagggccctttactggaggagcatgccaggctcttcatgtaccagctgctgcgtgggctcaagtacatccactctgcaaacgtgctgcacagggatctcaagccggccaaccttttcattaacactgaagacttggtgctgaagattggtgactttggcctggcccggatcatggatcctcattattcccataagggtcatctttctgaaggattggttaccaaatggtacagatctccacggcttttactttctcctaataactatactaaagccattgacatgtgggctgcaggctgcatctttgctgaaatgctgactggtaaaaccctctttgcaggtgcacatgaacttgaacagatgcagctgatcttggagtctatccctgttgtgcacgaggaagatcggcaggagcttctcagcgtgattccagtttacattagaaacgacatgactgagccacacaaaccgctgactcagctgcttccggggattagtcgggaagcactggatttcctggaacagattctgacgttcagtcccatggaccggctgacagccgaggaagcactttcccatccttacatgagcatctactctttcccaacggacgagcctatttccagccatcctttccacatagaagacgaagtggacgacattttgctaatggatgaaacacacagtcacatttataactgggaaaggtaccacgattgtcagttctcggagcatgactggcctattcataacaactttgatatcgatgaggttcagcttgacccgagagctctgtctgatgtcaccgatgaagaagaagttcaagttgatcctcgaaagtacttggatggagaccgagagaagtatctggaggatcccgccttcgacaccagctactctgctgagccttgctggcagtacccagatcaccacgagaacaagtactgtgatctggagtgtagccacacctgtaactacaaaacaaggtcgccatcatacttagataacctggtgtggagggagagcgaggttaaccattactatgagcccaagcttattatagatctttccaactggaaagagcaaagtaaggacaaatccgacaagagaggcaagtccaagtgtgagaggaacgggttggtcaagcgcagattgcgcttgaggaagcgtcccagcagctggctgagagggagaggggccaaggctttgactttgatgccttcatcgcaggcaccgttcagctcagtgcccagcgtgagtctgctgacgtagttgacaagttaaacgacttgaatagctcagtgtcccagctagaaatgaaaagcctgatatccaagtcagtcagccgagaaaagcaagaaaagggaagggctaacctggcccagctgggagccttgtaccagccctcctgggagagccagtttgtgagtggcggggaggagtgcttccttatcagtcagttttgttgtgaggtcaggaaggacgaacacgtggagaaggagaacacttacaccagctatttggacaagttttttagcaggaaggaggattctgaaatgctagaaactgagccagtggaagaagggaagcgtggggagagaggccgtgaggcagggcttctgagcagcggtggggagtttctcctgagcaggcagctagagtccataggcaccccgcagttccacagtccagggggatccccactcaagtccatccaggccacgttaacaccttccgctatgaaatcttcccctcaaatccctcacaagacatacagcaacattctgaaacatctgaactaaacactcagcagacacttcttttgttcttcatgaaatgtgttgtgtcttttttatcactaatgttttaagtcattttttttttacttgaatcagaaggtgtcattaatttgcaaggatttttcttggttctcagtttgtaaaacacagagttttttctacatgtgagttagttttcatttgaactggcatgtcgtttgcacacacacaaagaatagagcaaaacaatgcagtgcaggaggagacaagatgcgctaggatggacagacattctcacagaccagtgacctgcttacaggaaacaaaaccttgccttgaaacttacacagtgagactgtacataattgcatgaaaagatctatttttttcctgaaacatttttcattcattagtattttcaagtttttcatactgtacacatttcttaagacacatgataccagcagcaactgaaaacgaatgccgaatttggtacacatgtgttatctacctcaaggtaacaaaagtatgcgggcgaaacctaacccacccatagtcgtccgcggcatatgcacttgtatctagccagcgttggccgcagtaaccaatgagactcgtccgccatttatcaatgtcctggtgttcatcctttacagtgaagtgttagatacatcacatcttatttatttttagcaaatcagtatattttctgtatttaattataaaaggtaacttagtttaagtttatttgcaactgcccttcttcccgtttggcactatggtttgttgcctgccgagctgatctgagaagtcagcttgtcccgaggctgtccatgtacgttaagtaaagtgctcactgtgtataggaatctgtattttggaggtgcttgatctatctacaaagaaaaaaattaggaatttattataaaatgctcctagaagtcttaatggtgtttattttttaaaaccttgtaatgttagacttgtgtgcatggaagtgattaaggtacatcattattgtagtttgaacattgtacatgataagccttcccccacccccgtttttactgtatgtttttattgaatgatctattccccatccctaggcaagcatgaataaaattaggttaaatgt

SEQ ID NO: 3821 - protein, 720 aa, Rattus norvegicus
  ref <308>: DATABASE ACCESSION NUMBER: SWISS-Prot / P27704
  ref <309>: DATABASE ENTRY DATE: 2001-10-16
MAEKFESLMNIHGFDLGSRYMDLKPLGCGGNGLVFSAVDNDCDKRVAIKKIVLTDPQSVKHALREIKIIRRLDHDNIVKVFEILGPSGSQLTDDVGSLTELNSVYIVQEYMETDLANVLEQGPLLEEHARLFMYQLLRGLKYIHSANVLHRDLKPANLFINTEDLVLKIGDFGLARIMDPHYSHKGHLSEGLVTKWYRSPRLLLSPNNYTKAIDMWAAGCIFAEMLTGKTLFAGAHELEQMQLILESIPVVHEEDRQELLSVIPVYIRNDMTEPHKPLTQLLPGISREALDFLEQILTFSPMDRLTAEEALSHPYMSIYSFPTDEPISSHPFHIEDEVDDILLMDETHSHIYNWERYHDCQFSEHDWPIHNNFDIDEVQLDPRALSDVTDEEEVQVDPRKYLDGDREKYLEDPAFDTSYSAEPCWQYPDHHENKYCDLECSHTCNYKTRSPSYLDNLVWRESEVNHYYEPKLIIDLSNWKEQSKDKSDKRGKSKCERNGLVKAQIALEEASQQLAERERGQGFDFDAFIAGTVQLSAQRESADVVDKLNDLNSSVSQLEMKSLISKSVSREKQEKGRANLAQLGALYQPSWESQFVSGGEECFLISQFCCEVRKDEHVEKENTYTSYLDKFFSRKEDSEMLETEPVEEGKRGERGREAGLLSSGGEFLLSRQLESIGTPQFHSPGGSPLKSIQATLTPSAMKSSPQIPHKTYSNILKHLN

SEQ ID NO: 3822 - DNA, 4193 bp, Homo sapiens
  ref <308>: DATABASE ACCESSION NUMBER: Refseq / NM_002748
  ref <309>: DATABASE ENTRY DATE: 2001-10-22
catggcggcgactgcggcaaagcgagagcctcggagacgccgctgccgccagcacagccggagatctgagccgacactgggggcagtccgcgagccccgcactctctcgatgagtcggagaagtcccgttgtatcagagtaagatggacggtagctttgattgtgattgtggtgagctggagccacctgatcactaacaaaagacatcttctgttaaccaacagccgccaggcttcctgttgaaataaatatatagcaacaaaggaaaaaaagaagcaaaacggaaatagtgcttaccagcaccttagaatgatgctgctcaggaccagtccaacactgaatgtatctgcactgtgaggagaatgttcatagaagcctgttgtgtgcatatttattcactttttgttaaatgttaaatcgtttagcacggtaatctgagtgcacagtatgtcatttcattccgtttgagtttcttgttttcgttaaatgtctgcagagttgctgcccctttcttgaactatgagtactgcaatctttttaattctcaatatgaatagagctttttgagctttaaatctaaggggaactcgacaggcctgtttggcatatgcaatgaacatcaagaaaccatcttgctgtggaagcataattatttttcttctccctttttgaaagatctttccttttgatgccagttttcttccttgtttacacaagttcaatttgaaaggaaaaggcaatagtaagggtttcaaaatggcagagaaatttgaaagtctcatgaacattcatggttttgatctgggttctaggtatatggacttaaaaccattgggttgtggaggcaatggcttggttttttctgctgtagacaatgactgtgacaaaagagtagccatcaagaaaattgtccttactgatccccagagtgtcaaacatgctctacgtgaaatcaaaattattagaagacttgaccatgataacattgtgaaagtgtttgagattcttggtcccagtggaagccaattaacagacgatgtgggctctcttacggaactgaacagtgtttacattgttcaggagtacatggagacagacttggctaatgtgctggagcagggccctttactggaagagcatgccaggcttttcatgtatcagctgctacgggggctcaagtatattcactctgcaaatgtactgcacagagatctcaaaccagctaatcttttcattaatacggaagacttggtgctgaagataggtgactttggtcttgcacggatcatggatcctcattattcccataagggtcatctttctgaaggattggttactaaatggtacagatctccacgtcttttactttctcctaataattatactaaagccattgacatgtgggctgcaggctgcatctttgctgaaatgctgactggtaaaaccctttttgcaggtgcacatgaacttgaacagatgcagctgattttagaatctattcctgttgtacatgaggaagatcgtcaggagcttctcagcgtaattccagtttacattagaaatgacatgactgagccacacaaacctttaactcagctgcttccaggaattagtcgagaagcactggatttcctggaacaaattttgacatttagccccatggatcggttaacagcagaagaagcactctcccatccttacatgagcatatattcttttccaatggatgagccaatttcaagccatccttttcatattgaagatgaagttgatgatattttgcttatggatgaaactcacagtcacatttataactgggaaaggtatcatgattgtcagttttcagagcatgattggcctgtacataacaactttgatattgatgaagttcagcttgatccaagagctctgtccgatgtcactgatgaagaagaagtacaagttgatccccgaaaatatttggatggagatcgggaaaagtatctggaggatcctgcttttgataccaattactctactgagccttgttggcaatactcagatcatcatgaaaacaaatattgtgatctggagtgtagccatacttgtaactacaaaacgaggtcatcatcatatttagataacttagtttggagagagagtgaagttaaccattactatgaacccaagcttattatagatctttccaattggaaagaacaaagcaaagaaaaatctgataagaaaggcaaatcaaaatgtgaaaggaatggattggttaaagcccagatagcgctagaggaagcatcacagcaactggctggaaaagaaagggaaaagaatcagggatttgattttgattcctttattgcaggaactattcagcttagttcccagcatgagcctactgatgttgttgataaattaaatgacttgaatagctcagtgtcccaactagaattgaaaagtttgatatcaaagtcagtaagccaagaaaaacaggaaaaaggaatggcaaatctggctcaattagaagccttgtaccagtcttcttgggacagccagtttgtgagtggtggggaggactgttttttcataaatcagttttgtgaggtaaggaaggatgaacaagttgagaaggaaaacacttacactagttacttggacaagttctttagcaggaaagaagatactgaaatgctagaaactgagccagtagaggatgggaagcttggggagagaggacatgaggaaggatttctgaacaacagtggggagttcctctttaacaagcagctcgagtccataggcatcccacagtttcacagtccagttgggtcaccacttaagtcaatacaggccacattaacaccttctgctatgaaatcttcccctcaaattcctcatcaaacatacagcagcattctgaaacatctgaactaaaacactcagcagacatttatctttgtattcttcatgaaatgtgttttgtctttttttattactagtgtttaagtcattttttacttgaatcagatggtgtcatttagtaaggattttatgagttcttgttttttaaaatccagactttctttttctacatgtgagatagttttcattttaactggcatgtcatttgcacacaaaaataaagactagagcaaaataatgcaacgcaggaggagaaaagaaatgcactaagacaagaacattctctcatagaacattgatctgttttacaggaaacaaaccttgccttgaaatttacacagtgagactgtacataattgcatgaaaatagctatttttttcctaagacatttttcattcatgaatattttcaagtttttcatactgtacacatttcttaaaacacatgataccagcagcaactgaaaatgaatgccgaatttggtacacatgtgttatctacctcaaggtaacaagagtatgtggcaaaacatataccacccatagtgcttcacaaaatgcacttctatttagccagcgtttattgtagtaaactattcttaataaaactcactcactgtttataaatgttctggtatgcattctttatagtgaagtgttaatacatcacatcttatttattttagcaaatcagtatattttctgtatttaattataaaaaattaacttagtttttaaaatttatttgcaaatatactttttccatttggcactatggtttgttgcctacctagctgcatctataatgtcagcttatcctaaggctgtccacgtacttaatttacttaagtgttcattttaagtaacgtgctcactgtgtataggaatttgtattttggaggtgcttgatctatctacaaagaaaaattaattaggaattactttattataaaatgctcctagaagtcttaattgtgtttattttttaaaaaaacaaatgttagacttgtgtgcatggaagtaattaaggtacatcattattgtagtttgaaagttgtacatgataagacattttgtttttactgtatgtttttactgaatgatctattccccatcccaaggcaagcatgaataaaattaggttaaacgtagcatgtggcatcgcagtctcttagaatttgtttcatctattttattttattgaatactgtctgtatctttggttatcctgtttgaagaaaaaggacaaataaaacatggccagcaaatacaaaaaaaaaaaa

SEQ ID NO: 3823 - protein, 721 aa, Homo sapiens
  ref <308>: DATABASE ACCESSION NUMBER: SWISS-Prot / Q16659
  ref <309>: DATABASE ENTRY DATE: 2002-06-15
MAEKFESLMNIHGFDLGSRYMDLKPLGCGGNGLVFSAVDNDCDKRVAIKKIVLTDPQSVKHALREIKIIRRLDHDNIVKVFEILGPSGSQLTDDVGSLTELNSVYIVQEYMETDLANVLEQGPLLEEHARLFMYQLLRGLKYIHSANVLHRDLKPANLFINTEDLVLKIGDFGLARIMDPHYSHKGHLSEGLVTKWYRSPRLLLSPNNYTKAIDMWAAGCIFAEMLTGKTLFAGAHELEQMQLILESIPVVHEEDRQELLSVIPVYIRNDMTEPHKPLTQLLPGISREALDFLEQILTFSPMDRLTAEEALSHPYMSIYSFPMDEPISSHPFHIEDEVDDILLMDETHSHIYNWERYHDCQFSEHDWPVHNNFDIDEVQLDPRALSDVTDEEEVQVDPRKYLDGDREKYLEDPAFDTNYSTEPCWQYSDHHENKYCDLECSHTCNYKTRSSSYLDNLVWRESEVNHYYEPKLIIDLSNWKEQSKEKSDKKGKSKCERNGLVKAQIALEEASQQLAGKEREKNQGFDFDSFIAGTIQLSSQHEPTDVVDKLNDLNSSVSQLELKSLISKSVSQEKQEKGMANLAQLEALYQSSWDSQFVSGGEDCFFINQFCEVRKDEQVEKENTYTSYLDKFFSRKEDTEMLETEPVEDGKLGERGHEEGFLNNSGEFLFNKQLESIGIPQFHSPVGSPLKSIQATLTPSAMKSSPQIPHQTYSSILKHLN

SEQ ID NO: 3824 - DNA, 3662 bp, Rattus norvegicus; identical to SEQ ID NO: 3820
  ref <308>: DATABASE ACCESSION NUMBER: EMBL / M64301
  ref <309>: DATABASE ENTRY DATE: 2000-03-04

SEQ ID NO: 3825 - protein, 720 aa, Rattus norvegicus; identical to SEQ ID NO: 3821
  ref <308>: DATABASE ACCESSION NUMBER: SWISS-Prot / P27704
  ref <309>: DATABASE ENTRY DATE: 2001-10-16

SEQ ID NO: 3826 - DNA, 4193 bp, Homo sapiens; identical to SEQ ID NO: 3822
  ref <308>: DATABASE ACCESSION NUMBER: Refseq / NM_002748
  ref <309>: DATABASE ENTRY DATE: 2001-10-22

SEQ ID NO: 3827 - protein, 721 aa, Homo sapiens; identical to SEQ ID NO: 3823
  ref <308>: DATABASE ACCESSION NUMBER: SWISS-Prot / Q16659
  ref <309>: DATABASE ENTRY DATE: 2002-06-15

SEQ ID NO: 3828 - DNA, 1002 bp, Rattus norvegicus
  ref <308>: DATABASE ACCESSION NUMBER: EMBL / M64376
  ref <309>: DATABASE ENTRY DATE: 2000-03-04
atggactcaagcaacaggacaagagtttcagaatttcttcttcttggatttgtagaaaacaaagacctacaaccccttatttatggtctttttctctctatgtacctggttactgtcattggaaacatatccattattgtggctatcatttcagatccctgtctgcacacccccatgtatttcttcctctctaacctgtcctttgtggacatctgtttcatttcaaccactgttccaaagatgttagtgaacatccagacccaaaacaatgtcatcacctatgcaggatgcattacccagatatactttttcttgctctttgtagaattggacaacttcttgctgactatcatggcctatgaccgttacgtagccatctgtcaccccatgcactacacagttatcatgaactacaagctctgtggatttctggttctggtatcttggattgtaagtgttctgcatgccttgtttcaaagcttgatgatgttggcgctgcccttctgcacacatctggaaatcccacactacttctgtgaacctaatcaggtgattcaactcacctgttctgatgcatttcttaatgatcttgtgatatattttacacttgtgctgctggctactgttcctcttgctggcatcttctattcttacttcaagatagtgtcctccatatgtgctatatcgtcagttcatgggaagtacaaagcattctccacctgtgcatctcacctttcagtcgtgtctttattttactgcacaggactaggagtgtacctcagttctgctgcaaacaacagctcacaggcaagtgccacagcctcagtcatgtacactgtagttacccctatggtgaacccttttatctatagtcttaggaataaagatgttaagagtgttctgaaaaaaactctttgtgaggaagttataaggagtccaccttccctacttcatttcttcctagtgttatgtcatctcccttgttttattttttgttattaa

SEQ ID NO: 3829 - protein, 333 aa, Rattus norvegicus
  ref <308>: DATABASE ACCESSION NUMBER: SWISS-Prot / P23265
  ref <309>: DATABASE ENTRY DATE: 1993-07-01
MDSSNRTRVSEFLLLGFVENKDLQPLIYGLFLSMYLVTVIGNISIIVAIISDPCLHTPMYFFLSNLSFVDICFISTTVPKMLVNIQTQNNVITYAGCITQIYFFLLFVELDNFLLTIMAYDRYVAICHPMHYTVIMNYKLCGFLVLVSWIVSVLHALFQSLMMLALPFCTHLEIPHYFCEPNQVIQLTCSDAFLNDLVIYFTLVLLATVPLAGIFYSYFKIVSSICAISSVHGKYKAFSTCASHLSVVSLFYCTGLGVYLSSAANNSSQASATASVMYTVVTPMVNPFIYSLRNKDVKSVLKKTLCEEVIRSPPSLLHFFLVLCHLPCFIFCY

SEQ ID NO: 3830 - DNA, 960 bp, Homo sapiens
  ref <308>: DATABASE ACCESSION NUMBER: Refseq / NM_012377
  ref <309>: DATABASE ENTRY DATE: 2001-04-14
atggaaagaggaaaccaaacagaagttggaaactttctcctcctgggattcgcagaggactctgacatgcagcttctcctccatgggctgttcctctccatgtacctggttaccatcatcggaaacctgctcatcatcctgaccatcagttcagactcccacctccacacccccatgtacttcttcctctccaacctgtcctttgctgacatctgtttcacatccacgactgtcccaaagatgctggtgaatatccaaacacaaagcaaaatgatcacttttgcaggctgcctcactcagatattttttttcattgcatttggatgcctggacaatttgctcctgaccatgacggcctatgaccgcttcgtggccatctgttaccccctgcactacacggtcatcatgaacccccggctctgtggactgctggttctggggtcctggtgcatcagtgtcatgggttccttgcttgagaccttgaccattttgaggctgtccttctgcacaaatatggaaattccgcactttttttgtgatccttccgaagtcctgaagctggcctgttctgacaccttcatcaataacatcgtgatgtattttgtgaccattgtcctgggtgtttttcctctctgtggaatcctattctcttattctcagattttctcctccgtcctaagagtatctgccagaggccagcacaaagccttttccacctgtggttcccacctctcagtggtcagcttgttctatggcactggccttggggtctatctcagttctgcagttacaccaccttctaggacaagtctggcagcctcggtgatgtacaccatggtcacccccatgctgaaccccttcatctacagcctgaggaacaaggacatgaaggggtcactggggagactcctcctcagggcaacgtctctcaaagaggggaccattgctaagctctcatga

SEQ ID NO: 3831 - DNA, 2681 bp, Rattus norvegicus
  ref <308>: DATABASE ACCESSION NUMBER: EMBL / M64488
  ref <309>: DATABASE ENTRY DATE: 2000-03-04
gggagccgatcggtgtgggctggtggagaaggcagcgggagtctgccgccccgaagtccaggtcccctcttcccactcccgcgccggccagcgctgcggctcccctctgccaccatgagaaacatcttcaagaggaaccaggagcccattgtggctccggccaccaccactgccacaatgcctctggcacccgccgcacctgccgataactctacagagagcacgggcaccggggagagccaagaagacatgttcgccaagctgaaggacaaattcttcaatgagatcaacaagatccctttgcccccctgggctctgattgccatggccgtggttgctggcctcctgctgctcacctgctgcttctgcatctgtaagaagtgctgctgcaagaagaagaaaaacaagaaggagaagggcaaaggcatgaagaacgccatgaacatgaaggacatgaaggggggccaggatgatgacgacgcggagacaggcctgactgaaggagaaggagaaggcgaggaggagaaagagccggagaacctgggcaaattgcagttttctctggactatgatttccaagccaaccagctcaccgtgggcgtcctgcaggctgctgaactcccggccctggacatgggtggcacgtcagacccttacgtcaaagtcttcctcctcccagacaagaagaagaaatatgagaccaaggtgcaccggaagacactgaacccagccttcaacgaaactttcactttcaaggtgccataccaggagttaggaggcaaaaccctggtgatggctatctatgactttgaccgcttctctaagcatgacatcatcggggaggtgaaagtgcccatgaacacggtggaccttggccagcccatcgaggaatggagagacctacaaggcggagagaaggaagagccagagaagctgggtgacatctgtacctccttgcgctacgtgcccactgctgggaagctcaccgtctgtatcctggaggccaagaacctgaagaagatggatgtggggggcctctcagacccctatgtgaagatccacttgatgcagaatggcaagagactcaagaagaagaagacgacggtgaagaagaagaccttgaacccctacttcaatgagtcattcagcttcgagatcccctttgagcagatccagaaagtccaggtggtcgtcaccgtgctagactatgacaaactgggcaagaatgaagccatcggaaagatcttcgtaggcagcaacgctacaggcacggagctgcggcactggtccgacatgctggcgaaccctcggaggcccatcgcccagtggcactctctgaagcctgaggaagaagtggatgctcttctgggcaagaacaagtaggcagcggcgcctggggccacgccccagaggacactgacgagctccagagctatcaatacctcagttatgcgaccttagaggtttcttcatttgtttgcggtgtgtcctgttttcctttcctttttctttttttgtctttttaaaaaccaacttccttttggtggctatgtgaagaggcccctaagacgtgaaagagaagcctggctctgttattgtcccaggagctgtccttgttgcatgccctatcacggttgcccctcaccccaagtggggccctctactgtcagagtggaagcacttcctgcttttcctgggttttggaccaacaaagtggcaagcacattctgtgtctcgactgtgtgtgtgtgtgtgtgtgtgtgtgtgtgtgtgtgtgtgtgtgtgtgtgtgtacacgtgtgcccatccatccccaccttgcctctgtttggaatatctcttcgtttctggaatgagtcacggacaatgatgccgtgtgagagaggaaagtcttcaggtactccgaggtgaggagagcccactgcttaagtggtcagaggccagaagctctcatagtccttgcgaaaggccatttggaagacgcaagatgtgatactggatgtattccgaactaggaccaaaggcttgatgccatcccagactccctcttgtcagtcatggcttccccaggagtggggctttgggatcattcatgaaaataaactatttactcgactggtcggattcagccagggaccgccagctccaggatgtcattcttgttgacgacatcaaactttgaagaaacagaagtcccattactcagctctggatctttgcctcgtccagtgggaggcagatgcttcctccctctgcagagtacaagcagtgcgttcatttgcattcacgcaccatctgcttttgcctctgtttccctttttgtgtaagtggaaaaataccatctgacgataagtgctttgcacagagccagagacctattagagggatgcttgggtgtttagttcccttgaggtccaggtaaggaggaggtgtcaagaaggggagcgttggtggacagtgacaagctagacattgcagagctcctcacaactcctattcctgaccctctggaccctttgaccctcagtgatggtagccggagtagcccaggcagaccttaggagaggccccgtccttcccttccttagacagttttctcagaatgccaggaaacacagcgcattcatttcagatgggtggtggagaaaatgtgctaaggtttgcaccctatgttcggaattc

SEQ ID NO: 3832 - protein, 422 aa, Rattus norvegicus
  ref <308>: DATABASE ACCESSION NUMBER: SWISS-Prot / P29101
  ref <309>: DATABASE ENTRY DATE: 2002-06-15
MRNIFKRNQEPIVAPATTTATMPLAPAAPADNSTESTGTGESQEDMFAKLKDKFFNEINKIPLPPWALIAMAVVAGLLLLTCCFCICKKCCCKKKKNKKEKGKGMKNAMNMKDMKGGQDDDDAETGLTEGEGEGEEEKEPENLGKLQFSLDYDFQANQLTVGVLQAAELPALDMGGTSDPYVKVFLLPDKKKKYETKVHRKTLNPAFNETFTFKVPYQELGGKTLVMAIYDFDRFSKHDIIGEVKVPMNTVDLGQPIEEWRDLQGGEKEEPEKLGDICTSLRYVPTAGKLTVCILEAKNLKKMDVGGLSDPYVKIHLMQNGKRLKKKKTTVKKKTLNPYFNESFSFEIPFEQIQKVQVVVTVLDYDKLGKNEAIGKIFVGSNATGTELRHWSDMLANPRRPIAQWHSLKPEEEVDALLGKNK

SEQ ID NO: 3833 - DNA, 2050 bp, Homo sapiens
cccaggcaccggtgggccccggagcgagcctgccccgccgggactccgcgtctgtgcgtcagccccgcccgttgtcctggcaacaacccgttgcccgggcaaccagctttgctctcaccccgcttgagaggagcccggctgttgctctgggcaacgcggtctgctggttcccacgtctgccttcgcccgcttccggttcagaccctgcggaggggcgaggacgaggcagaagtcagcgggatgcctgtggggccgtggaggaagagggtatccctttaggatggaactaggtcctggacaccccctctcaagtgcggggaggctgatactacaactcccagcatgactcgcggtggctgtccggtttctgcgcggctgttcgcgcaaaggcctcatgggagttggagttctttgttgtgcgtggggctcaaaggacgtctggggtgggaatgggggactagggtgcttgagtgtctctgcagaaaagactccaggaccccgccaccatgttcccggagcccccaaccccggggcctccatcgcccgacacgcctcccgactccagtcgcatcagccacggcccagtgcccccctgggccctggccaccatcgtgctggtctcaggcctcctcatcttcagctgctgtttctgtctctaccggaagagctgtcggaggcggacaggcaagaagagccaggcccaagcccaggtccaccttcaggaagtgaaggggctgggccagagttacatagacaaggtgcagccagaagtagaggagctggagccagcaccatccgggccagggcagcaggtggcagacaagcatgagctaggacgactgcagtactccctggattatgacttccagagtggccagctgctggtgggcattctgcaagcaatgggattggcagccttggatcttggtggctcctcggacccctatgtgcgggtctacctgctgccggacaaacggaggcggtacgagaccaaggtgcatcggcagacgctgaaccctcactttggggagaccttcgccttcaaggtcccctacgtggagctggggggcagggtgctggtcatggcggtgtacgacttcgaccgcttctctcgcaatgacgccatcggggaggtgcgggtccctatgagctccgtggacctggggcggccagtgcaggcctggcgggagctgcaggcggctccgcgggaggagcaggagaagcttggggacatctgcttctccctccgctatgtccccacggccgggaagctcaccgtcatcgtcctggaggctaaaaacctgaagaagatggacgtaggaggactgtcagatccatacgtcaaggtccacctgctgcagggcggcaaaaaggtgcggaagaagaaaaccaccatcaagaagaacactctgaacccctattacaacgaagctttcagcttcgaggtgccctgtgaccaagtccagaaggtgcaggtggagctgaccgtgctggactacgacaagctgggcaagaacgaggccatcgggagggtggccgtgggggcggccgccggcggggctggcctgcggcactgggcggacatgctggccaacccgcggcggcccattgcccagtggcactcgctgcggcccccggaccgagtgaggctgctgcctgcgccctgactcccaccccaagcccccggccaagcctggactctagcccctgaccccagactcccgagaccggccaaagccaagccagccccacccttaagcttcctctgacggttaccctccccccaccttccaccccaaccatctgaaccattcctgtcttctcacccccaacgatgccaatcacgacaactttccagcacactcccccgaccctcgcggacacacccagatgccccagggaccccgggaagggaaggcagcctggtttctcctgcccccgggtcctgccccctgctttgacaatcagccatcctcgtctgctctcctctctcttccaacacagcccatccctgcactgctcctggggccaaataaatattcagcagctc

SEQ ID NO: 3834 - protein, 386 aa, Homo sapiens
MFPEPPTPGPPSPDTPPDSSRISHGPVPPWALATIVLVSGLLIFSCCFCLYRKSCRRRTGKKSQAQAQVHLQEVKGLGQSYIDKVQPEVEELEPAPSGPGQQVADKHELGRLQYSLDYDFQSGQLLVGILQAMGLAALDLGGSSDPYVRVYLLPDKRRRYETKVHRQTLNPHFGETFAFKVPYVELGGRVLVMAVYDFDRFSRNDAIGEVRVPMSSVDLGRPVQAWRELQAAPREEQEKLGDICFSLRYVPTAGKLTVIVLEAKNLKKMDVGGLSDPYVKVHLLQGGKKVRKKKTTIKKNTLNPYYNEAFSFEVPCDQVQKVQVELTVLDYDKLGKNEAIGRVAVGAAAGGAGLRHWADMLANPRRPIAQWHSLRPPDRVRLLPAP

SEQ ID NO: 3835 - DNA, 19080 bp, Rattus norvegicus
  misc_feature (1)..(19080): n=a, c, g or t
  ref <308>: DATABASE ACCESSION NUMBER: EMBL / M64733
  ref <309>: DATABASE ENTRY DATE: 2000-03-04
tcaacggatctcactcttgactgtccagtgccagcaccttagcaaactcccccagcttggaggcagtggcccaccacatcatggaggtgtcgtctgagcacaggttccggaagactgtcaaagtctgccttaataggcaggggtactcaggggtagcaaactgagaagagaccacaggccaaggtgtgggaggtgaaccagtctctacccaccagccacttcatcagaggcaccaagtgagcctctaaaacggaaggtgggtgctcatgtgagatgccccacacggactttactactgtctcttccactgtggccagtgactcaagaggtggcagcagacagtgtcacatactcaggacctcccaccaaagtgtgaggctcccagctattcagccaaggccaagaggaccttggtgtcacagatggcatctgtaaggaagggcaggagctaacttctggttcattcaatgacaaaggcaaaggccatggtggagagcatcttgatacagttgagacagagctgagtgtcctcatcacacagttcatctatgagcaccatggtggggtagagcgaatcgttgccgttgacagctgctgtcttggctccttggcatttctttttaaaaagaagagaaaaaggtcagcagtctgttttacttatgtttgtttgtaaatacacacactgtactagaagcatgaaattcagaaagaagctgacagtaagatggatagggaggttggttactgactgtgtattcaccttaaatctctgagggaatgtggagccagcaatgactgtgtgtttgtgtctccaagcctagcccacaggttagcttacattggtgtgaggaacacagtattgtataacaccatacaaaagtgagcagagacagggcccatgaaatcacaagtagaaagtgtttgttactgttccacctggtcacccaaccaggtgtcctgtgtgtctaaaagccacacagaaagacaaaatggagtatgtttggggtggggcgaagagagtgaggtattggcagcccacgtgcgaaggggattgaaggaaacatgggtaagattggatacaagttgggttttcagctgtttgaagaattggcttgtagaggaaaggacactatattgtgcactgtcttaggaataagacacaggaggccgttgtatggaggaaaatgcaggggcttcacgagagtgagcaaagacctgctagaggtcttctgagtccccatgctctctgtgtgtttatatatgcatatacatagcatattaatgtattaataaattacatatataataagacaagatatattatgtatatgtggtgtttgaatatgcttggaccagggagtggcactatcaggaagtgtgaccttgttggaagaaatgtgtcactggttgtgaactttgagaccctcctcctagctgtctggaagacagtcttctcctggctaccttggatcaagatgtagagctctcagctccttctccagcaccaggtcttcctggatgctgccatgctcctcccttgatggtaatggactgaacctttgaacctgtaagccagccccaattaaatggtgtcctttgtaagagttgccttggtcatggtgtctcttcccagcaataagaccctaagtaagacagaatatattaactatttatctattcagatgctgtgacaggttaaaccattctctctgatagggagaactcagctattggtaattttagtataatttaattgaattttttagacaggatcttacatatctcaagccggcttcaaactcttatatagccaaagatgatcttgacatctggattctcttgcctttgccccctgagacctgggtttcagcatgcgccatcacaactggagtatgtggttctgggaattgtaccaagatcctcatgcagccttaggtaagcctaccaactaagctttgtccctgggcctcattggtaatatttagaattaccaagtagttcttttggttagccattgactggttctacagaaatcacagctgtgaagtaataattggggtcagggtgattgtagaagaaatcttgatttgaagccgattcttttggccaattgtcttggggctcattagcttacattcatagataaaggctgtgataaaggctgtgactgggaagtttcgaaatgaaattcagaaagcgtggcccgtctgcagcatgaggaaagctaaagatggcttaaggaacatcatctttctccaggcacgtgctaagcagtctaggactgagtagccactgtcctttctcctgggaaatcccagatgggaaggatcaacccacaaagcatttctggcctcacggatgcccaagaaaaggtgctaaggaaactttctcaacccttggcagattcaaccacttatgattttattagccatggcttcgtcatgtggttgacttgatgtacccttaaagaagtgctgcctagagactggttcttagtgtgggtcacgggactctgctcatgcccacttctactttcttttcttggtaactgaagctgcctggtcgcatgctgagctcactgagccggctaatggcagggctgtaggatgtgcaggaagggcaccaggtagacagtcagatgcaaagacatttgggcagccagagatgctgagcaaagcttaaagagaaaaaatagatcaccacaaagctctttgtctcactccagccctcttccccacgaccacagagggaagaagccaagcctgagtcctccgtcacagctgcacatgtcccgtgactcagcacctcgctcgaggctaatgtggagtctttagggtaaggaagtgggtggtcctagtctgctctgcatggtcaggtcactcactcggcattgataaactcagagctgggtttggggatttcaagagcggcaaggtcagaaggtcaaagcctggaagagtccgcagatgaagataagcaaggagcttccggttccaggtctccaggggaagccgactgaggcttcaaccataagatggacttcgggagatataactagtatttctttgtgtggttctgaggacagaattgagctcagggtcagcccttacagagcagggagctccatcaaaaatggctttcctaaagaatgaattgcttgcaagggaggtagccagttctcaggttgggagcatccaaaaataaaagcaggaaaacctggcggggaccctgagagacaagtaggaagaggatcttgggtgaagggcagagtggtggccttctgcagtttccctagaatactgaaatcctagggcttgagagatgaggtagttggtaagacagaagcatgaggatctgaattggatccctggtacctgtgtacaacatggcccatactcataaaccagagctgggagggtagagttgggatcctacagattgttgggcagctggtgagttccataccagtaagcgagcctgcctaaggtacaaacagttggatggtgtaacatctgaggtcatcctgtggtctcacacatgcacgtgtatgcatttgcgcgcgcgcgcgcgcacgcacgcacacacacacacacaaatcaagaagtgcattcaagatttgtgtcagtttgcttaaagctgaattcccaagcttacaaggtttgggaacaggagaaaagtgaccacttgtaattgtgtcggggacatccttatctccctctccccagatctccctctgctaaggcatatctccctgcctgattaccaaaggacgacttttatagacactgctattgtaccctgtccctactacacacaacgggagggagctgctgatcaaaaaaagttacaaggacatcagtgtccatggaaaatgtagctgttactgataattctttctttttatttttctttataaagaaaacaaagagaagtttcggggggaggggcattcctccaagtttctgttgactctgcttttctggttagttatcttcccaaacttggcactgaaccagattaggctaaagaaagtcttagagagggctcatttcagattcatctgccccagactgaagaaactaaggccagagggcagagtggtttgtctaaaggcactggatgcctcggggcacagctgggactgaagccagccttagcccacttctgaccaagcctagacatttccagtaggctgccttttgggaaaggaccaaatcaccatagcctctgggccttggacaaatggaaatctggcctcatggctgttcctttaaagatgtgagagggaagctcggccctcgaccacacgtttctccttcaagccagttttcttttatttacatcgttttcaaggtctgccgcccaaactgcgcgctgcctacatgggttcctcgctattgcctgactcttgatacacaaatgttccagggtccagagtgggaagcttggcttctcccccaagaagtagcatggtggggggcttctaggttgtttctcctttccagagatgcctgtaacagatgtttctgctcttagccaaaagcagctaggaatcctcttagcacctctggacacagctacttaatcagcagggctccatggagaacttccactatagcttcttgttcaggaaccaatgtgaaggccaagtgtgagacaagtagtttttgtctaaaaatttgtattattatatattaattatacacaatgagtatatatatatatatgtgtgtgtgtgtgtatatatattcagcctccccccccatttccctttctcctcccataatctcttctctctgttcctctcatgaatttctttagggttgctcacaggagcatggagaggagggttattcacaggaacatggacacttaccagggactatactactgaagacagttgggtagtgtacttgaaaataggtgtgaggttcctaggtccagtgccagtgaagcccaccctgcctgactgggttccaagtgggtaagaaccatgtttaggttttatgcatctcagagacaggggaggccttctacgttatctcattcttttttttttttttttttttttttggttctttttttcggagctggggaccgaacccagggccttgtgcttcctaggtaagcgctctaccactgaactaaatccccagccccggttatctcattcttaacccgtttctgattccttcatctgtctgccaagggaccggcagcccagtgcagcatttagggagccaggtacttcatgtatgctcttccctagcaagatgcctgtaccatcttcagtttcttttactcttccattaaaataggaacaaagaaaaggagtgcagtaatgggttaatgtgaaagatgaacgtgggcgtcgggcggtgaaatcctgaacctgtttggggctaggagcggtccagagtagagtgtggattcctcttcccttaaggctcttctgttggggcctgctgagcccttaggtacctagcagagaatagaacagccatcaatctagctaggggccctcaggcaaccagcgcggtcatttgtgatgcccctgcgccccctggtgcccccgctgggctgtgcgcctctcgtcccctcccgacccccccaccaggcttccagaaagctcctagtgcattccccggcattctctggcgtgagtcacgcaggtttgcagccagccaaagggggtgtacttgagcagagcgctataaatagggcgcttccccggtgctcaccacccgcgtcaccaggaggagcgcactggagccaagccgcagacgggtgagacagctgcaccttttctaccccaacaccgaaggcacaccggcagggatgggagggcaagggtaggagccaggtagagagctgccgtgggtaagtgggaggtgctagagccccatcaccaggcagtcgagcttggggtagggggtgcacgctggctcagattcaggagccacccccccgcccctgttctttaacccgcatcacaattccaaggctgttcaataggccacatgcaaagatcttccttttgcaaaaatggggaaactgagacgtgaagcctgcagtgagatgcggatcgcgagggcgctagtnntgaacgccgcgagtaggtgcggatctctgtagtggctgttgtcttaccggcatgagtcattgcatttggaccttccctccagctcctgggacagcgcataataaataagatgttgtgtatttaaaaggacgtgctgcagccatcgagacctgctttactgaacagaatgcatgcattcagttctttagagaaatgcttccccaggcctgagatgtcnnnnctaccggatcattttatagatggtaatctgaggactggagacgataagaggttcagcctccaaacgttctatgaatgagaaactgaagccctttggctttccagaatttctagacccagttttaaaaaacggtgctggtgctgtttttaaaggacaaagttaggaattcaagagttcatacaagttctctaacaggaaggtcttgggacaataccatttagtgcctgaccttgtgagaataagaaaacaaaccacaaatggtagttggtggaatattaggcagcagcaaatgtgtgactttaaaaatatttgaaaacaggacctatgatggcattgtttataaaaatgcattgaaagaaaaggagaaaatatgccacaatggaagagactgtgttttcttactagataaggtggtccttgcgctggtggggctgttgtaccagggtagttggcagccaggcagtaggccagcctccaaatgatgacaggaagtgagtcagtgtagaggaanaggcangcnngntgagctgtgttgtcctcggaccaacagcaccacagcacctagaagcttgggagacaaacagattctgaccagagacagtattactggcagacctcaggggagtctattcttagatttacagaatagaggatcgcttctttgagatatcaggcccattttacagataaagaaacagaagctgtgagacttttgttgtcaaggaaataacctgggaggcgaatgacttttgttgtcaaagaaagaatattaaaatgaggttttggagggctgcattctttcctggggtgaccactggcttgcagtgtgtcttgagaagcccaacaggtgtcttagaagtgctgaggctgtctctctagaccccaggctccttacagctcatcttgctactgcttcccctcccattcagtgaccttccttgctgcctgcttcctcttctgggcattgtactgtcctcacatcagaagttatttccaaggcagttaaatggtttttccaaaaatggtcacacttaaggcctctcccacctacagatatctctgtggctttgtctctgatgtggcaaggggtctgtccctgcctggggcatttcaggcctcagtgagcacctgggaggtctatgagatcagggccatcctggtggatcatgaaccagggcgccagccacccaccatctctgggaaagtgcttgtctcttctcccacaccactcctctgctctgtgtgcataattatgcctcaggaaagccttgcctattaatgatctgcccagtgtcctgatgggcctgcctagctgggagcaggttttaagagcaaggcatttcaggaagacagatcgctcccctttccctgttcttgtggctgtaggaagctggtgagcccagataagccattctgggcagggttagagatgcaagatgggtgtgtgtgtgtgbtgtgtgtgtgtgtgtgtgtctctttatgcaaccaatccagcttctgggaaaggatccattgtgtaatactgggcttcggcctgtgtccctggctcaggcagccggcccagtggtggctggggcaccttggcagagcatgctagttcaggcttagagggagcaggcatgtgaaagggatttgctggagccaatgggcttgtcctcctgaaggggctttcctgggggctcactgctaatctctggctttgtccttcccttttctagtgctgccttctctacagtcctaaacagtccctcccttccctttttgattttacccaactcccctccccagtccatactcagcctggcacaagcttcacccagagatggtgcattgggttgaatttcctgtgctgatggaagggcgtgcatattaccacggactcctgaaaagcacacttagacagcctcgggaggctgtaccgtaaggggagcccaggactgtgttgtgagtgaggttcagtcccatggaagggattggcgccagccacccaccatctctgggaaagtgcttgtctcttctcccacaccactcctctgctctgtgtgcataattatgcctcaggaaagccttgcctattctgcctcggggatttatgggaagaaaggactctgcttggagcttgtcccttccaactccagatagcctgggtcctctgtgcggctgaaccatggttcttcccagggccccactgcttccattgtcttttgaaggcatgaatttaatcttgtttttgtccccacgttcttcagaagtaaactgcagtgatgccagatggggaaacagatgagggccatgagttccaatcccatcccacctcccctctcaggagcagaaaacccctaagctgcccagaggttaccatgacattctgctgttctttgcaggactccagactccaaagaggccacaccatgaagattctcctgctgtgtgtggcactgctgctgacctgggacaatggcatggtcctgggagagcaggagttctctgacaatgagctccaaggtagactaaactgctgtccctctggtgggtctggcagagccacccctcaaagttcagtccctaagtgctgagggctgtttgcatactgcacctgggactgtccatgtcctctgcactctcagagtctctaagctctagctcttgccttggtgtttttgtggtcagatgccttctagacattggcctctgtctcaagcttctctgttggctgcatgccatacctttgtttcctctaggtccccttacctggctctcctattcttctctcaaagctgtgtccggaccctttgaaagtttgtcagtctcccctttgtgtgacaaccagagttcttaccaatgtgtctccaagctgatttccccctggaaaccttgctctaccagtttccttctctggaaaagggcagcacagttcaacatgaagtagtcaactgagagcgttctctcccttcctccccatcttctaatgcttttctggaaacccgcctttccttccctccttctctcctaatctccgctcatagctgaccagttctgtgagaatttcattaaaaataatatgatctgactctctgatatggatatgcttggtgaaatgactgctgtggtcaagcgcttagctgcccatcacctcaacttattgttgggttcagacacgtgagatgcattattcacttagtgcacgtttttttttttttttttttggagctgggaccgaacccagggccttgctgtgctaggcaaggttctaccactgagctaaatccccaacccgacttagcgcacttcaagggtagaacacattgatcaaccacgagctctgcttggaccgtggaccttcaggcttagtcatgcattgagactcttgcccttgctcggcagccccccccgcccccatgcccttctgtttggaagtgtttggcagtggcatcaggtagaacacagcagaggtgtgggaaatggcacttgacacaggataagtaagtggtaccccgtgacataatgtgtcactgccttgtcaccagggctgagtcttggttacggtctctatggtgaatgcagctcttcatttatctccccgtctccatggtgtttggtgccaagtcactcatcttccggtcaccatcacctgacactgtgcattgcagcaaagaagtgccaagactgggttaacctgaatgtcacaaagatcgtgtccaaaatggcacttttattatattttgatgcttaggttaactatcttttttttctgtatttccttgaaatatcctctgtggctgttggctccccagggtggcatggtggggtcagtcatacatagtatggctgccctctttgcaccactcctgtgcttctgagctgtgacgcagggtctaccatggaccctttgatgagaccaagggacaggactgaggccacaggactgccacaggctgggggtagtagtgacagcatctcacgttgacagcctccagcactcccatcagagcatggctttctcaccgtcccgccggcttccaggctatttctccagccatttcttcccttctcaactcactgtaccttcctgtctctcacagaactgtccactcaaggaagtaggtatgttaataaggagattcagaacgccgtccagggggtgaagcacataaagaccctcatagaaaaaaccaacgcagagcgcaagtccctgctcaacagtttagaggaagccaagaagaagaaagaggtaggcccagccttgactgagccctggctctccctgctggaacacggtggcaggtgccttgctgggttgccatgtgtcctggtgcagtctttgcagggctttgctaatactgggccagactaaggagccaggaaaagcacattcgcttgtggagcctcagggctgaggtcttggatctggtttccttgcaagtctgcccaggcctgaagccaagattcatttcaataggtttttctaacccttgctgtgtgcagggcatggtgcaggactcgggagaggggtcatggcagcacctggccacttcccaccactcttttcttctgtattcaaagtggctcttaacatgaatgtgcttatttttaacatgaatggcaatattttaaagttaacgtaaaatcctcatgatctatccttagacatccattcatccccactcagcttcgggtgtggggttggggaccgttttcaaagcccttagcagaggctgaggttatgggtagaaccaggccctctatagattgtccctacctgtgataatgcttactttataaattacagacagtagggtaggagcagcaacgatgacgtagaatagttacaatgttacaccaaacaaaaggttatgcagatgcaatttctcccactctcagaatatctcagttcctcagcctcagcaacactatttttagactgtggttgaccatgggtagctgagaactgataacaggggactgccctgttaccatttgtttaacttgccttttctacatgtggacgtctatgttgaccctggtacacacacacacacacacacacacacacacacacacacacacacacacgaacacacatactagaacttatacacagatccatccactcatttattttccatatctttatgtagacgtacacatttgctgtaaactaatatctcttcaggtggagaatttaaattttttattttggtgatccctggagccaataattgggtcagggggcatggtaatgaggttgtggtcgatttgacttcaggttggatagctttgatttgcacatcaggggccacggttctaatagaaagagaagactggcctctttggggagatgagaagagacagtgaggtggcataagggagagatgggtcctgaagaagagacagtcagagcagcaaatcagagcggacagggaaaacttagagaacagctgggccttgaaggatgagaggcccctgtgagcggtgtggggacgccatgacggatgggctagagcaaagctgtgggctgagtagcaccttgtacacagatgggagagatcggctgggtctctgtgtgggtcacctcaccttgtcatctccatgaagggtgctctagatgacaccagggattctgaaatgaagctgaaggctttcccggaagtgtgtaacgagaccatgatggccctctgggaagagtgtaagccctgcctgaagcacacctgcatgaagttctacgcacgcgtctgcaggagcggctcggggctggttggtcgccaggtgagaaggagacatgtccatggcctgggttctggatggggagtgtggagaatccacgaaataggcctcactccatatactgggtacagttgattagcgttgcttgactgcatgcctttctagtgtcgtggtcgattggtgatgtctgacacgagtacacatgtagccaatcatcatgggtatgcatgacagtcttacaagacctttaaccagctgggtaaaatggcctcatggtatggtagaaccccatgctcatataggaaaggggggctaagaatatttagtatatttgcatcaattctatccctacctgtgagcttcactggttgggactcagtgaaactcactgtttcctgaaggctgagcagccaagtgggagccgctgtccttcatgaccaaagatgagccctctgagtttcaccgtgagaggtggctgcagggcctgacagggtattcaggaggcagaacagcgggaacttgggtgagctgctgtgtggtcacagggtgaggcaggctggggtgcacaaggccttactgtacttctctgggtcccagctagaggagtttctgaaccagagctcacccttctacttctggatgaacggggaccgcatcgactccctgctggagagtgaccggcagcagagccaagtcctagatgctatgcaggacagcttcactcgggcgtctggcatcatagatacgcttttccaggaccggttcttcacccatgagccccaggacatccaccatttctcccccatgggcttcccacacaagcggcctcatttcttgtaccccaagtcccgcttggtccgcagcctcatgcctctctcccactacgggcctctgagcttccacaacatgttccagcctttctttgatatgatacaccaggctcaacaggccatggacgtccagctccatagcccagctttacagttcccggatgtggatttcttaaaaggtcagaaagcattcgttgtctttccaagacggaatgggagtctccaagatgtttaggctctgctagggcttgacatgtgttttatgttcccagcagcccctgaggctggtattttcccccatttgcagggtaaaggagcatggatgggggtaaagcaatgcagaaggcaaactgggacccagttcaatctcacacttgtagagcttggagcctgtgttctttacagccagctcagggtgtgatccagctgtacctcctctaggaccctggcttttctttcttgggaacttttgaggatgtggtgttggaggcctgcctttccaggcaacaggtctgcgtcatcttaaagaagatggtcatgactgcggcctaagcatgtaacacctgtaagatgaaatgtgatgtggacacgagaaacccgtgtctgaggagtgattttcttcatcagtgtgtgtcctaatgccgtgtccttcacgtatggtttgcacgagaaacataggaaggcctggcacccaattcacgtctcttgtagctctgttatctaaggatggtgtatgttgtcaggacacacttgtgctttctggggcttgatggccagttagggagtaccgccagccaaggagaatgaagaacagccacgatgccagaaggcacacagctgagggaatgtgtgagatctctcagagggagatggtgagaaggcaggcagtacctcgtaagagccatgggaatatggctagggagccccagggaaatcgcatgtctgcaagcgaacgactaagcttcgtcttgcctgaccacagcgctgagcagaggtgtggggactcgggggtgggtgtctttccaatgtgacacgtgcctcattctgcgcccctttctcctcatgtgtccagaaggtgaagatgacccgacagtgtgcaaggagatccgccataactccacaggatgcctgaagatgaagggccagtgtgagaagtgccaagagatcttgtctgtgggtgagtcgggaaccagtctataatctgggcatctgactaagggtcaccagtgactaactggtactgtccttcagagactagttctctgcctgtgatctgtagtccctgggagactcctccctggtgcatagcttactatgctcatacctacagcttcgttatttgggagctggggtagaacccgtgcctcatgcatgctgggtgagtgctctaccgttgagccacgccaattttacttagaatcaaatccaggggcagatttttctcaagtagatgaggtctgtctaaagcacccacacaccctggtggctcatggcaaacctgcaacccgcggtggatatctccatagaatttaaccgtagccaccagcaatctgcagctcattcccctggttgctttgttccacagtgccaagtacagtagaccctgctttttaactttagattatgaaatctttgacagcatgcattttgtttaatcagtgttccacatgcctggcactgttgcgaacatgtcacaggtgtttgttctcagaatgatcttgtgagcctggttcagctttctttacattttgcagaatggctacatgacttatctaagattacatgacatgagacatctcacttaggctgtgctcaggaacagcctgctggggtttctccctgggaaccctgagctatgtccttgcgatggtggtccttgatatcctggccacattccttttggttgattagtccctcagaaaggaactgttttccttcatcggcttcccaggcagtctgggtatggcggcggcacatccctatagtaccaacatctgggaggctgaggaaggagggtggtgaatctgaggccagtcttggctgcatagcaaggttctgtctcagtgaaaacaaagtacagcaaacccagaaccgttccccacagatttgtcaggtctggcggtcaatcaaatgtttctgctttcagtccggtcttcacagtggctcacggtatacagcgcttcctgctcagatcacaaggagttaatcgtcctctttgttgttttgtcatatgtgtagttggcagggacagacgttcagagtctggttaaatattcccagcctcactcctgcaatgttaggagcccaggaaagatacattactgctttcaaaggttatagtgtgaaattataaacaaatatgtacccacaccagcaggccgacccccaggaaaccgtcagggatctcttccatcaggcttagtgaccctctcaacagtcaccgtttctgtcacctgctagctcctgtgtacggtgcttacaatgacagggaggctccacagggacctctcatctgggacaacttgactcagcctgcgggtggacccgaacatggctgagcatttaacgtttttggcttctacctgccatgtgccaagtgacaatcagaaatatcttcagaacgtgtggaatgtccctggtgggtagtgtggtcccaggttgagaaccacagttctacaccactggtcccctccaggactcttccttgtttgggctaagagtaagggtactcaggctattcctcaaagatttcttctcatctgtgctgcttgtctttaatcctctttcttgccccatgcaacattttatcttatttagtatgaatgattgcagctgtcacgtggggcacagaggctcccttgtcttgcttagttttgatacacagactctcctagatgttttaaaaatagtagaggagggggttttcagaaaaaatggttttcagaaaacatgggcattttgtaggacccagatgcctgatacctgcaatgtactcatggaccagagggaagacaccagttttcctgttttctgtaggagccttcctggccagctgtgggtggacaagggcaggcaaggaccgaccctcagcaccggatgcctgtgttttgtagcctaggaacctggctgtctcttctgcagcttgggttctgggaaaatggtattgtggaaatttctcaaatatgttccaaaataagcttggagaatgttctagaaccatggtctcaggggaggaagagctcaggttgaggagctgaagatgcgggttcagtcctggttccagagattgcttcccctctagatctgggcaagttccttacttccaaaaccctgtttcatgactggtaaatcaggagtgttgatgcttgtgtcaagcccagcatactttgaggcacacagtaggtccacctaagggaataatgctcctcttctctgtggagtgtccagtgcaacagtagcttccttctacttggaaatgagctaagtggggagctaagggaatgagaataactccaggtctgagaacatggagtagttggtgtcagtactctccagaacatggtcagtggcattgtgacaggtcatcgagattggtcatgcctaccacccagagaggattcaaccacactgctccaacacagcctagcatgggcactattgcctcccaaagcgtgaagggagcagccccttgatttccatgtcagggggactgttctgtgggaactgtaagaactggtttgtagacttccattgaagagctcctctgcttcagatcccagagctggagccatcccccttaacatctctctcatgcttctgccttctgcttctttcttccctggccagactgttcgaccaacaatcctgcccaggctaacctgcgccaggagctaaacgactcgctccaggtggctgagaggctgacccagcagtacaacgagctgcttcattccctccagtccaagatgctcaacacctcatccctgctggaacagctgaacgaccagttcacgtgggtgtcccagctggctaacctcacacagggcgatgaccagtaccttcgggtctccacagtgagtagtatcccagttatttgatgagctaaggcccacgtgtgatccagaggtgatggatgcctcttagaggtgccgtgggacaaaggtttacaccatcaggaactgggaaaaccatactcgcgttgtagcattgaaatgccttcacccctcgaggtcagatatccaagtcttatttccaagatgaggaaagagagaggttctgtggcttgctaagtagacggaactttgggcagcttccctgagtcagcctgtcagctgctgctttctgcccagggccatgctgagtgccgcatgaattagtgttagccagtgagatcggcttcctttagtgctcacagcccccctcgtcctctttccaccatagactggctagcatttgtacaaagcaaatgttggggtcaggtgttgtggtgagtgtctgtaagccggcaccaaagaaactgaggcaggaaagtggagatcttgagcccgggctggactatacagtgaaggcctctctcaaacaaggcaaaacaagaagaaaacatttgacaatcatttcaagtttctggggtgcctacttggctagtcagttttcaaataacatctgtcccttcaaatcgagatagttttgctcagaattctctgaacatcttgagtagcaacaggtaacctggagctccatactcggttgcaggggcaaagagaagggcacgctctgtagacattgtgcagagacacttctcctgccttcttctaggtgacaacccattcttctgactcagaagtcccctctcgtgtcactgaggtggtggtgaagctgtttgactctgaccccatcacagtggtgttaccagaagaagtctccaaggataaccctaagtttatggacacagtggcagagaaagcgctacaggaataccgcaggaaaagccggtaagcgggcagcctttctgtgaccctgagggctgataaacaagtctttctaaacaagaccctggaggactggaaagtccgaaggagcccagagaaggagcaaaatatgcattctggatgcagggcctatccctgaggccagaccccacgggtgagctaggaaaacccctggggattttattttctttgctctgggaaatatttttcctcagtggcaaggatgtgggtgttggtggctgcttcttggggggatattgattctcttctctactctccttttttttccagcatggaatgagacagaagcatcagttttctatatgtaggagtctcaaggagggaatctcccagctttccgaggttgctgcagacccctagagaactccacatgtctccagcgcctaggcctccaccccagcagcctctccttcctctgggttctgtactctaatgcctgcacttgatgctctcgggaagaactgcttcccccacgcaactaatccaataaagccaccttgcgtatagtgtgccttgggcccgctttcatattttcatacttgattctcctgcaggccgcacatcttcatttgatatggagagaaaacaaggaagtagctgggtcagttcgtaaagcacttgccacatagacatgagtttggtaaagtcaggcatggtggcaccctcttgtaacttaatctcggcacctcagcgctctcagagcagagggtccctggagctggtgggtggtcggtgagcgtcaggccccagtgagagatcttgtctcagaacacaggtatgaggagaccaaagaatgacacaaggccacacatgtagaagaaatctcgaagttaacagctgagactgtgtaagagtctccatatactggagagtaaagagtactcatgacaactggggggacctctggctttgggggagaggtttgttccaataagctgctgaggcaagttcctgaagccagaaacttttccctcccaccacaacactgtccacgagttctgacaaagtggggcagtctcccagagaatgcactgaaattaaggcaggaagagctgctagtgggacacatgggttaatgtgtaactgacaatttcctgtggaaactgctcagcagaagccaaatgaagaggcagttttcttgttgtttgtaagaacatgggaacctgggaccacttccggaccatggcgtctccc

SEQ ID NO: 3836 - protein, 447 aa, Rattus norvegicus
  ref <308>: DATABASE ACCESSION NUMBER: SWISS-Prot / AAA42299
  ref <309>: DATABASE ENTRY DATE: 2002-06-15
MKILLLCVALLLTWDNGMVLGEQEFSDNELQELSTQGSRYVNKEIQNAVQGVKHIKTLIEKTNAERKSLLNSLEEAKKKKEGALDDTRDSEMKLKAFPEVCNETMMALWEECKPCLKHTCMKFYARVCRSGSGLVGRQLEEFLNQSSPFYFWMNGDRIDSLLESDRQQSQVLDAMQDSFTRASGIIDTLFQDRFFTHEPQDIHHFSPMGFPHKRPHFLYPKSRLVRSLMPLSHYGPLSFHNMFQPFFDMIHQAQQAMDVQLHSPALQFPDVDFLKEGEDDPTVCKEIRHNSTGCLKMKGQCEKCQEILSVDCSTNNPAQANLRQELNDSLQVAERLTQQYNELLHSLQSKMLNTSSLLEQLNDQFTWVSQLANLTQGDDQYLRVSTVTTHSSDSEVPSRVTEVVVKLFDSDPITVVLPEEVSKDNPKFMDTVAEKALQEYRRKSRME

SEQ ID NO: 3837 - DNA, 2060 bp, Rattus norvegicus
  ref <308>: DATABASE ACCESSION NUMBER: EMBL / M64755
  ref <309>: DATABASE ENTRY DATE: 2000-03-04
ctgtaccttgtcaccagcgcgtctgaaccctctctgaaccttcctgaagctggaagatttcaccctgatggctgactcaaaaccactcagaaccctggatggggaccctgtggctgtggaggctttgctccgggacgtgtttgggattgtcgtagatgaggccattcggaaggggaccaatgcctctgagaaggtctgcgaatggaaggagcctgaagagctcaagcagctgctggacttggagctgcagagccagggcgagtctagggagcggatcctggagcgctgccgggctgtgattcattacagtgtcaagactggtcacccccggttcttcaaccagctcttctcaggattagatccccatgctctggccgggcgcatcattacggagagcctcaataccagccagtacacatatgagattgcccccgtgtttgtgctcatggaagaggaggtgctgaagaaactccgtgcccttgtgggctggaacactggggatggggtcttctgtcctggtggttccatctctaacatgtacgccataaacctggcccgctttcagcgctacccagactgcaagcagaggggcctccgggtcctgccacccttggccctcttcacttcaaaggagtgccactactccatcaccaagggagctgcttttctgggacttggcaccgacagtgtccgagtggtcaaggctgatgagagagggaagatgatccctgaggatctggagaggcagatcagtctggcagaggctgagggctcggtgccatttctggtcagtgccacctctggtaccaccgtgctaggggcctttgaccccctggatgcaattgccgatgtttgccagcgtcacgggctgtggttacacgtggatgccgcctggggtgggagcgtcctgctgtcccggacacacaggcatctcctggatgggatccagagggctgactccgtggcctggaaccctcacaagcttctcgccgcggggctgcagtgctctgctcttcttctccgggacacctcgaacctgctcaagcgctgccacgggtcccaggccagctacctcttccagcaagacaagttctacaacgtggctctggacaccggagacaaggtggtgcagtgtggccgccgcgtggactgtctgaagctgtggctcatgtggaaggcgcagggtgggcaagggctggagtggcgcatcgaccaggcctttgctctcactcggtacttggtggaggagataaaaaagcgggaaggatttgagttggtcatggagcccgagttcgtcaacgtgtgcttctggtttgtgcctcccagcctgcgggggaagaaggagagcccagattacagccagaggctgtctcaggtggcccctgtgctcaaggagcgcatggtgaagaagggaaccatgatgatcggctaccagcccatgggacccgggccaacttcttccgaatggtggtggccaaccccatactggtccaggccgatatagacttccttctgggcgagctggagcgtctgggccaggacctgtgagctgcttcctctctctgccccacccaagctctgcataagctcctgggttcccaaaagcgacctttctaggaaacagtggccttgactgtgtgagcccccacacactaactctcctagctaagtattggctgccaggacggtgtctaagcacactacagtctgttcttacgaaatgtgcttcttttaagtcggtcatagtggtacacaccgttaataccagcactggggaggcagaggcagacacaagcagatctcttgagtttgaggccagcctggtctacagagctggcctacacagaaaaaaaaacctgtctcaaaaaaaaagaaaggaaggaagaaagaaaggaaaagaaagaaatatttttcattaagattatgtctataaaaaattgttattaatatgagagatatggtacgatgtattaagaaagctagatatgggggttggggatttagctcagtggtagagcccttgcctaggaagcgcaaggccctgggttcagtccccagct

SEQ ID NO: 3838 - protein, 493 aa, Rattus norvegicus
  ref <308>: DATABASE ACCESSION NUMBER: SWISS-Prot / Q64611
  ref <309>: DATABASE ENTRY DATE: 2002-06-15
MADSKPLRTLDGDPVAVEALLRDVFGIVVDEAIRKGTNASEKVCEWKEPEELKQLLDLELQSQGESRERILERCRAVIHYSVKTGHPRFFNQLFSGLDPHALAGRIITESLNTSQYTYEIAPVFVLMEEEVLKKLRALVGWNTGDGVFCPGGSISNMYAINLARFQRYPDCKQRGLRALPPLALFTSKECHYSITKGAAFLGLGTDSVRVVKADERGKMIPEDLERQISLAEAEGSVPFLVSATSGTTVLGAFDPLDAIADVCQRHGLWLHVDAAWGGSVLLSRTHRHLLDGIQRADSVAWNPHKLLAAGLQCSALLLRDTSNLLKRCHGSQASYLFQQDKFYNVALDTGDKVVQCGRRVDCLKLWLMWKAQGGQGLEWRIDQAFALTRYLVEEIKKREGFELVMEPEFVNVCFWFVPPSLRGKKESPDYSQRLSQVAPVLKERMVKKGTMMIGYQPHGTRANFFRMVVANPILVQADIDFLLGELERLGQDL

SEQ ID NO: 3839 - DNA, 2152 bp, Homo sapiens
  ref <308>: DATABASE ACCESSION NUMBER: EMBL / AF116545
  ref <309>: DATABASE ENTRY DATE: 2000-03-03
gcttggggacgcacggagaggtgcagctggggtggctcacacctgtagtcccagcacgttgggaggccgaggagctacctgtgcaccctgcctccggctctcctgagcagagagatcctgatggctgactcagaagcactcccctcccttgctggggacccagtggctgtggaagccttgctccgggccgtgtttggggttgttgtggatgaggccattcagaaaggaaccagtgtctcccagaaggtctgtgagtggaaggagcctgaggagctgaagcagctgctggatttggagctgcggagccagggcgagtcacagaagcagatcctggagcggtgtcgggctgtgattcgctacagtgtcaagactggtcaccctcggttcttcaaccagctcttctctgggttggatccccatgctctggccgggcgcattatcactgagagcctcaacaccagccagtacacatatgaaatcgcccccgtgtttgtgctcatggaagaggaggtgctgaggaaactgcgggccctggtgggctggagctctggggacggaatcttctgccctggtggctccatctccaacatgtatgctgtaaatctggcccgctatcagcgctacccggattgcaagcagaggggcctccgcacactgccgcccctggccctattcacatcgaaggaggtggggaagaggcacaggcccaaccctgggctcctgattctaatctccagccatgtcactactccatccagaagggagctgcgtttctgggacttggcaccgacagtgtccgagtggtcaaggctgatgagagagggaaaatggtccccgaggatctggagaggcagattggtatggccgaggctgagggtgctgtgccgttcctggtcagtgccacctctggcaccactgtgctaggggcctttgaccccctggaggcaattgctgatgtgtgccagcgtcatgggctatggctgcatgtggatggctgactctgtggcctggaatccccacaagctcctcgcagcaggcctgcaatgctctgcacttcttctccaggatacctcgaacctgctcaagcgctgccatgggtcccaggccagctaccttttccagcaggacaagttctacgatgtggctctggacacgggagacaaggtggtgcagtgtggccgccgtgcggactgtctgaagctgtggctcatgtggaaggcacagggcgatcaagggctggagcggcgcatcgaccaggcctttgtccttgcccggtacctggtggaggaaatgaagaagcgggaagggtttgagctagtcatggagcctgagtttgtcaatgtgtgtttctggttcgtaccccccagcctgcgagggaagcaggagagtccagattaccacgaaaggctgtcaaaggtggctcacgcctgtaatcccagcactttgggaggccgaggcggatggatcacttgaggtcaggagttcgagaccagcctggccaataaggtgaaaccctgtctctactaaaaatacaaaaattagccgagcatggtggcctgtgcctgtaaacccagctactcaggaggttggggcagaattgcttgaacccagggggcagaggttgcagtgagccgagattgcacccctgcactccaggctgggcaacagtacgagactctgttccaaaaaaaataaaaaagaacagcctttttaggccacagtgacctgcgcaatgtttatatgctttgacctactaactttctcctaactaaatatttgattttaggagagtgtttaaataaattacagtatgtctatatgatgaaatgttattttgccattaaaattttgtttacaaagataatttttattgacataaaaataactttaatgtaatttatgttgaaaaagctgaatacaagtctttatatagagtaatatttgagctgtgttcaaaaatacataggaaaagactgataaaatgaaatatggcaaaatgttaatagttttccctggaataggataataggcaattttaaaacagactcctttaaaaaaacaaacaaacaaaaaaaacatagacttctttatatcttttgagctccctcccttttattatgtaatgaatatgtgttgcttttgtaataggaaa

SEQ ID NO: 3840 - protein, 493 aa, Homo sapiens [sequence omitted]

SEQ ID NO: 3841 - DNA, 1739 bp, Rattus norvegicus
  ref <308>: DATABASE ACCESSION NUMBER: EMBL / M64797
  ref <309>: DATABASE ENTRY DATE: 2000-03-04
caaataagagaaatctggttgagtgagcctggggatggcgtccccacgggaactgacccagaatcccctgaagaagatctggatgccatacagcaatgggaggcccgccctgcacgccagccaacgtggtgtctgcatgaccaactgcccgacactcatcgtcatggtgggcctgccagccaggggcaagacctacatttctaagaagctgacccggtacctcaactggattggcgtgcctactcgggaattcaacgtgggtcagtatcgccgggacatggtcaagacatacaaatcttttgagttcttcctcccagacaatgaagagggcctgaaaatcaggaagcagtgtgccttggcagccctcaatgacgtccggaagttcctcagtgaggaggggggacacgtggcggtttttgatgctaccaataccacccgagaacggagagcgatgatctttaactttggagaacagaatggctataagaccttctttgttgaatctatctgtgtggatcctgaggtcattgctgccaacatcgtgcaagtgaagctgggcagccctgactatgtgaaccgggacagcgacgaagccactgaggacttcatgaggcgcattgaatgctatgaaaactcctatgagtctctggatgaagaacaggacagggatctgtcctacatcaagatcatggacgtggggcagagttatgtggtgaaccgtgttgccgaccacatccagagtcgcatcgtttattacctcatgaacatccatgtgacaccccgctccatctacctctgccggcacggggagagtgagctcaacctcaagggccggattggtggggaccctggactctccccccggggccgggagttttccaagcacctagctcagttcatcagtgaccagaacatcaaggacctgaaggtctggacgagccagatgaagaggacgatccagacagccgaggcgctgagtgtcccttatgagcagtggaaggtcctcaacgagattgacgcgggtgtctgtgaggaaatgacctacgaagaaatccaggaccactacccgctggagtttgctctgagggaccaggacaagtaccggtaccgctacccgaagggcgagtcctatgaagacctggtgcagcggctggagcctgtcatcatggagctggagaggcaggagaacgtgctagtcatttgccaccaggctgtgatgcgttgcctcctggcctacttccttgacaaggcagcagaagagctgccctacctcaaatgccccttgcacacagtcctgaagctcacacctgtggcttacggttgtaaagtggagtccatattcctgaatgtggcagctgtgaacacacaccgagacagacctcagaatgtagacatatccaggccttcagaggaagcccttgtcacagttcctgctcaccaatgacccatggcaggccctgacctctgcggaggggtcactccaggccacttcttcctgtttgctgtatgaacggtcaccatgcaggaacactcatgggtggctggtaacactcagaaccctcagcctaacccacctgcctccttggtgacaaccagtgacggggttgagtgtggctgctgacctgctgctgagaatctctgggctacgtgctctgctgctggcccctttgctacagctctcaagcagtccgccccccgggctggctgctttgtgacatttgcaacattaaatgagacac

SEQ ID NO: 3842 - protein, 468 aa, Rattus norvegicus
  ref <308>: DATABASE ACCESSION NUMBER: SWISS-Prot / P25114
  ref <309>: DATABASE ENTRY DATE: 2002-06-15
ASPRELTQNPLKKIWMPYSNGRPALHASQRGVCMTNCPTLIVMVGLPARGKTYISKKLTRYLNWIGVPTREFNVGQYRRDMVKTYKSFEFFLPDNEEGLKIRKQCALAALNDVRKFLSEEGGHVAVFDATNTTRERRAMIFNFGEQNGYKTFFVESICVDPEVIAANIVQVKLGSPDYVNRDSDEATEDFMRRIECYENSYESLDEEQDRDLSYIKIMDVGQSYVVNRVADHIQSRIVYYLMNIHVTPRSIYLCRHGESELNLKGRIGGDPGLSPRGREFSKHLAQFISDQNIKDLKVWTSQMKRTIQTAEALSVPYEQWKVLNEIDAGVCEEMTYEEIQDHYPLEFALRDQDKYRYRYPKGESYEDLVQRLEPVIMELERQENVLVICHQAVMRCLLAYFLDKAAEELPYLKCPLHTVLKLTPVAYGCKVESIFLNVAAVNTHRDRPQNVDISRPSEEALVTVPAHQ

SEQ ID NO: 3843 - DNA, 2436 bp, Homo sapiens
  ref <308>: DATABASE ACCESSION NUMBER: EMBL / AF108765
  ref <309>: DATABASE ENTRY DATE: 2000-03-03
tccgactcatcccggccccgggatggcgtccccacgggaattgacacagaaccccctgaagaagatctggatgccatacagcaatgggcggcccgctctgcacgcttgccagcgcggtgtgtgcatgaccaactgcccaactctcattgtcatggtgggcctgcccgccaggggcaagacctacatctccaagaagctgactcgatacctgaactggattggtgtgcccactcgggagttcaatgttggccagtatcgccgggacgtggtcaagacctacaaatcttttgaattttttctccccgacaatgaagagggcctgaaaatcaggaagcagtgtgccctggcagccctccgtgacgtccggcggttccttagtgaggaggggggacatgtggcggtttttgatgccacaaacaccacccgagaacggagagcgaccatctttaattttggagaacagaatggctacaagaccttttttgtcgagtccatctgtgtggatcctgaggtcatagctgccaacatcgtgcaagtgaaactgggcagccctgactatgtcaaccgcgacagtgatgaggctacggaggacttcatgaggcgcattgagtgctatgagaactcctacgagtcgctagatgaggacctggatagggacctgtcctatatcaagatcatggatgtgggccagagctacgtggtgaaccgtgtggctgaccacatccagagccgcatcgtatattacctcatgaacatccacgtgaccccccgctccatctacctctgccggcacggggagagcgagctcaacctcaagggccggattggcggggacccaggactgtcccctcggggcagggagtttgccaagagtctagcccagttcatcagtgaccaaaatatcaaggatctgaaggtctggacaagccagatgaagaggacaatccagacggctgaggcactgggtgtgccctatgaacagtggaaggtcctcaacgagatcgatgcgggcgtctgtgaggaaatgacctacgaggaaattcaggataattatccactggagttcgccctgcgggaccaggacaagtaccggtaccggtaccctaaaggggagtcctacgaggacctggtccagagactggagcctgtcatcatggagctggagaggcaagagaatgtgctggtcatctgccaccaggctgtgatgcgctgcctgctggcctacttcctcgacaaggcagcagaacagctgccctacctcaagtgtccgctgcacacagtcctgaagctgactcctgtggcatatggttgtaaagtggagtccatattcctgaacgtggctgctgtgaacacgcaccgggacaggcctcagaacgtggacatctcaagacctccagaggaagcccttgtcacggtgcctgctcaccagtgaccatgttcatccactgtgaccactaggcaggcactgctctctgcagagggggtcattccaggccctccagtgtgtgtgatagtcaccatgccatgcagggatattcttgaagccacacatggctggcggaacccagagcccccaccccagcccacctggctctttgttgacagtcggcgacaaggttgtgcgtggctcctgacctgctgctaagagtcacttgaccagactgcatctgcatgggctgcgcggaggttgcccagccccagtttcttccggcgcagctcttaggtgttcactctcgccagctcagttggctttgtgaagtgtgaaaccctacaatgtgaaaggaaagtgcttgctgtgatgttcctactgtggcccagctgcccagcatggacctggtgactctccacagggcctctaccatcctctctgtggccacttcctgagccagaggccaggtcttcatggggccctgagcttctgctgcctctggtgagagggagagcccttcccatccttacccaccaggaactagagccccaaccacagcagatgcttcctgggcagccactggccaggccgttgtatccatgtcacccttagttgtgggcattcatgaaagcaatgcgcttgcttcagcacattggatgcacagaaacgtgagggcagggggcagttgtggtcgcccctccccagttgtgcatgtacccggctacttaggtatgcttaggggagctggtggccaggggtgccccttcaggcctgctctcacagtgaaaccacttcaagacagggcaggaagttaccttccctggtgcacacaccgaagtgctcgagggagagctgccgccccctctccccttccctggctgtggacactggcagccaatggggaggcggcctctcccctgttgctgcccgtgtccacacaggaatgtacactggtggcagaaacatgcatttgccataaataattcagaaacaaaaaaaaaaaaaaa

SEQ ID NO: 3844 - protein, 468 aa, Homo sapiens
  ref <308>: DATABASE ACCESSION NUMBER: SWISS-Prot / Q16877
  ref <309>: DATABASE ENTRY DATE: 2001-10-16
ASPRELTQNPLKKIWMPYSNGRPALHACQRGVCMTNCPTLIVMVGLPARGKTYISKKLTRYLNWIGVPTREFNVGQYRRDVVKTYKSFEFFLPDNEEGLKIRKQCALAALRDVRRFLSEEGGHVAVFDATNTTRERRATIFNFGEQNGYKTFFVESICVDPEVIAANIVQVKLGSPDYVNRDSDEATEDFMRRIECYENSYESLDEDLDRDLSYIKIMDVGQSYVVNRVADHIQSRIVYYLMNIHVTPRSIYLCRHGESELNLKGRIGGDPGLSPRGREFAKSLAQFISDQNIKDLKVWTSQMKRTIQTAEALGVPYEQWKVLNEIDAGVCEEMTYEEIQDNYPLEFALRDQDKYRYRYPKGESYEDLVQRLEPVIMELERQENVLVICHQAVMRCLLAYFLDKAAEQLPYLKCPLHTVLKLTPVAYGCKVESIFLNVAAVNTHRDRPQNVDISRPPEEALVTVPAHQ

SEQ ID NO: 3845 - DNA, 1225 bp, Rattus norvegicus
  ref <308>: DATABASE ACCESSION NUMBER: EMBL / M64986
  ref <309>: DATABASE ENTRY DATE: 2000-03-04
gtctggctcccgctctcacagccattgcagtacattgagctccatagagacagcgccggggcaagcgagagccggacgggcactgggcgactctgtgcctcgcggaggaaaatcaactaaacatgggcaaaggagatcctaagaagccgagaggcaaaatgtcctcatatgcattctttgtgcaaacctgccgggaggagcacaagaagaagcacccggatgcttctgtcaacttctcagagttctccaagaagtgctcagagaggtggaagaccatgtctgctaaagaaaaggggaaatttgaagatatggcaaaggctgacaaggctcgttatgaaagagaaatgaaaacctacatcccccccaaaggggagaccaaaaagaagttcaaggaccccaatgcccccaagaggcctccttcggccttcttcttgttctgttctgagtaccgcccaaaaatcaaaggcgagcatcctggcttatccattggtgatgttgcgaagaaactaggagagatgtggaacaacactgctgcggatgacaagcagccctatgaaaagaaggccgccaagctgaaggagaagtatgagaaggatattgctgcctacagagctaaaggaaaacctgatgcagcgaaaaagggggtggtcaaggctgagaagagcaagaaaaagaaggaagaggaagacgacgaggaggatgaagaggatgaggaagaggaggaagaagaggaagacgaagatgaagaagaagatgatgatgatgaataagttggttctacgcatgtttttttttcttgtctataaagcatttaacccccctgtacacaactcactccttttaaagaaaaaaattgaaatgtaaggctgtgtaagatttgtttttaaactgtacagtgtctttttttgtatagttaacacactaccgaatgtgtctttagctagccctgtcctggtggtattttcaatagccactaaccttgcctggtacagtctgggggttgtaaattggcatggaaattaaagcaggttcttgttggtgcacagcacaaattagttatatatggggacagtagttttggttttttggttttctttttttttttgtgtttttgttttttttcctttttgtttttttttccatcttcagttgtctctgatgcagattatacgaaggtaattgttgttctgttaactgaataccactctgtaattgcaaaaaaatg

SEQ ID NO: 3846 - protein, 214 aa, Rattus norvegicus
  ref <308>: DATABASE ACCESSION NUMBER: SWISS-Prot / P07155
  ref <309>: DATABASE ENTRY DATE: 2002-06-15
GKGDPKKPRGKMSSYAFFVQTCREEHKKKHPDASVNFSEFSKKCSERWKTMSAKEKGKFEDMAKADKARYEREMKTYIPPKGETKKKFKDPNAPKRPPSAFFLFCSEYRPKIKGEHPGLSIGDVAKKLGEMWNNTAADDKQPYEKKAAKLKEKYEKDIAAYRAKGKPDAAKKGVVKAEKSKKKKEEEDDEEDEEDEEEEEEEEDEDEEEDDDDE

SEQ ID NO: 3847 - DNA, 578 bp, Homo sapiens
  ref <308>: DATABASE ACCESSION NUMBER: EMBL / AV701053
  ref <309>: DATABASE ENTRY DATE: 2000-10-03
cgcagccttatgaaaagaagcctgcgaagctgaaggaaaaatacgaaaaggatattgctgcatatcgagctaaaggaaagcctgatgcagcaaaaaaagggagttgtcaaggctgaaaaaagcaagaaaaagaaggaagaggaggaagatgaggaagatgaagaggatgaggaggaggaggaggatgaagaagatttttttcttgtctataaagcatttaacccccctgtacacaactcactccttttaaagaaaaaaattgaaatgtaaggctgtgtaagatttgtttttaaactgtacagtgtctttttttgtatagttaacacactaccgaatgtgtctttagatagccctgtcctggtggtattttcaatagccactaaccttgcctggtacagtatgggggttgtaaattggcatggaaatttaaagcaggttcttgttggtgcacagcacaaattagttatatatggggatggtagttttttcatcttcagttgtctctgatgcagcttatacgaaataattgttgttctgttaactgaataccactctgtaattgcaaaaaaaaaaaaaaa

SEQ ID NO: 3848 - protein, 214 aa, Homo sapiens
  ref <308>: DATABASE ACCESSION NUMBER: SWISS-Prot / P09429
  ref <309>: DATABASE ENTRY DATE: 2002-06-15
GKGDPKKPRGKMSSYAFFVQTCREEHKKKHPDASVNFSEFSKKCSERWKTMSAKEKGKFEDMAKADKARYEREMKTYIPPKGETKKKFKDPNAPKRPPSAFFLFCSEYRPKIKGEHPGLSIGDVAKKLGEMWNNTAADDKQPYEKKAAKLKEKYEKDIAAYRAKGKPDAAKKGVVKAEKSKKKKEEEEDEEDEEDEEEEEDEEDEDEEEDDDDE

SEQ ID NO: 3849 - DNA, 1225 bp, Rattus norvegicus; identical to SEQ ID NO: 3845
  ref <308>: DATABASE ACCESSION NUMBER: EMBL / M64986
  ref <309>: DATABASE ENTRY DATE: 2000-03-04

SEQ ID NO: 3850 - protein, 214 aa, Rattus norvegicus; identical to SEQ ID NO: 3846
  ref <308>: DATABASE ACCESSION NUMBER: SWISS-Prot / P07155
  ref <309>: DATABASE ENTRY DATE: 2002-06-15

SEQ ID NO: 3851 - DNA, 578 bp, Homo sapiens; identical to SEQ ID NO: 3847
  ref <308>: DATABASE ACCESSION NUMBER: EMBL / AV701053
  ref <309>: DATABASE ENTRY DATE: 2000-10-03

SEQ ID NO: 3852 - protein, 214 aa, Homo sapiens; identical to SEQ ID NO: 3848
  ref <308>: DATABASE ACCESSION NUMBER: SWISS-Prot / P09429
  ref <309>: DATABASE ENTRY DATE: 2002-06-15

SEQ ID NO: 3853 - DNA, 3774 bp, Rattus norvegicus
  misc_feature (1)..(3774): n=a, c, g or t
  ref <308>: DATABASE ACCESSION NUMBER: EMBL / M65251
  ref <309>: DATABASE ENTRY DATE: 2000-03-04
gaattccggctgccagcgggcctttccctcccaacagggagatactttcaggttccagggcgccgccgcgacggaagttcagtgggccctcagaaagcagagagtcctccgatgagctggacatcgatgagacctcgtcagacatgagcatgagcccccagagctcttcgctgcccacaggaggcagtcagcaggaagacgaagggaaggcccgcaagctgccagtcagcatgctagtccacatggcctctggtccgggaggaaatgtggcaaattccactcttcttttcacagacgtggcagatttccagcagatccttcagttccccagtctgcggacaacaactactgtgagttggtgcttcttaaattatacaaaacccaattttgtgcaacaggccaccttcaaatcctccgtttatgcttcatggtgcattagttcctgtaacccaaacccatcaggattgaacaccaagaccacgctggccctcctgagatccaaacaaaaaattaccgccgaaatttacactctggctgctatgcacaggcccggaactggcaagctcacatcatccagtgcctggaagcagtttgcacagatgaaacctgatgcacccttcttgtttggcaacaaactagaaaggaaattagggggaaatgtcttaaaggaaagagggaaaggagagattcacggagataaagatcttggatccaaacaaaccgagccaatccgaattaagatctttgaaggggggtacaaatccaatgaagattatgtgtatgtcagaggacgtggacggggaaagtacatttgtgaagagtgtggaattcgctgtaagaagccaagcatgctgaaaaaacatatacgcactcatactgatgttcggccttatgtatgcaagttatgtaattttgccttcaagacgaaaggaaacctaacgaaacacatgaaatctaaggcccacatgaaaaagtgtctggagctgggcgtctcgatgacatcagtagatgagacagaaacagaagaagcagaaaatatggaagatttgcacaaaacatctgagaagcacagcatgtccggcatttcaactgaccaccagttctcagatgctgaggaatctgacggagaggatggagacgataatgatgaagatgatgaagacgatgatgactttgatgaccaaggagatttgacacccaaaacaaggtcaagaagcaccagtcctcagcctcctcggttctcctccttgcctgtcaatgttggcgctgtagcccacggcgtcccctcagatagctctctgggacattcgtcattgatcagctatttggttactctacccagtattcaggtcactcagctcatgacacccagtgactcttgtgaagacacccagatgacagaatatcagaggctgttccagagcaaaagcacagactccgaacccgacaaagacaggttagacatcccaagctccatggacgaagaggccatgttgtcttcagagccaagctcctccccaagggacttctccccctcaagctaccggtcctcaccaggatatgattcttcaccctgtcgagataattcgccaaagaggtatctgatacccaaaggagatttgtcacccagaagacatttatcacctagaagagatctatcacccatgaggcatctgtcaccaagaaaagaagctgcattgaggagagagatgtcccaaggggatgcttcaccaaggaggcatttgtccccacggagaccattgtctcctggaaaagacattacaacaagaagggacctctctcccagaagagagagaagatatatgactaccattagagcaccatctcccagaagggctttataccataacccaccattaccaatggggcagtatctgcaaacagagccaattgtattggggcctcctaatctaagaagaggattacctcaggttccttacttcagtctctatggagaccaagaaggtgcttatgaacatcacggctccagccttttccctgagggtcctactgactatgtcttcagtcatcttcccctccattctcagcagcaagtgcgagctcctatccccatggtgccagttggtgggatccaaatggttcactccttgccgccagccatttccggtttacatcctccacccacattgcctctgcccacagagggctctgaggagaagaaaggagcacccggggaggccctcaccaaggatccctacaccctttccaggcggcatgagaaacaagcccctcacgttttgcagtcatctggtctacctagttctccctcctccccacggctattgatgaaacagagtacttcagaagacagcctaaattccacagagagagaacaggaggaaaacatacagacttgtacaaaagccatcgcctcactccggattgcaacagaagaggcagctctgcttggggctgatcagcccacatgggtgcaggagtccccgcagaaacccttggagagtgcacacatcagcattagacactttagcgggcctgagccaggtcagctctgtacctcagccgcccaccctgacttacacgatggtgaaaaggacacttttggtacatcacagactgcagtagcccaccccacgttttacagcaagggcagtgtggatgagaagcaggtggactttcagagcagcaaggaattatctttaagcacagaggaaggcaatgagccctcatcggaaaagaatcgactccattgatctgcaatgcatggacacattcatttccacatttccccctccccccttttgtttttgtttttctagggatagaaataaacgagttgatagcatgcctgtcctaagttacagtagttggctattataaatacttttgttattttgaagacaattagggaaattaaccaagtcgatcttgagcctgaccaaaacaaaatttgaaattaacctattgggtctggtaactttgaaaaaaattgtacagatgtttgtgcctcttctttactttgtttatattcttataagcatttttttagcggtaatttgtatatattttagaatttgtgtatctgctttgtaataaatgtaatctctttcctcttttgacacttggatcttaacgacgtaaagcaaagcagcatctatatatattgtgaggttgcactaaaacatatttttatatgataaaactgaacagcttttatgtacagctctcattctgtaatactaatatttattttgtttcataaactgtacatttttttcttaatgttgtggattgcttttctatgtgaagcatggttccctgttgcgtaactagaacagaaatgtccatgtaagcaanatatttaaactagnatatcttattctgcacttatgcataagttacaaaaaaagataaagaagtatcagtcggttcttaacctgtaaattctttttgtctcttgtttgccggattgacaataacttaagagctgattgtgatttttaaatggatagtacgtaaagcattaaagtaaacaatgtgctattgtgagtttttttcaaagctttataaatcagttataaataatattaaagtatttggtcttatgtgaacatgttgatctatatactcaccttaaaaaatatgggaaaaacattccgcccccatgtaaatatgtacaagtgcatcactggtacagttttgtgttactcggttggacacgaggttgccacagacctatgctagagtgtctttaaaattaaagtgagaaagcac

SEQ ID NO: 3854 - protein, 916 aa, Rattus norvegicus
  ref <308>: DATABASE ACCESSION NUMBER: SWISS-Prot / Q00900
  ref <309>: DATABASE ENTRY DATE: 1994-10-01
IPAASGPFPPNREILSGSRAPPRRKFSGPSESRESSDELDIDETSSDMSMSPQSSSLPTGGSQQEDEGKARKLPVSMLVHMASGPGGNVANSTLLFTDVADFQQILQFPSLRTTTTVSWCFLNYTKPNFVQQATFKSSVYASWCISSCNPNPSGLNTKTTLALLRSKQKITAEIYTLAAMHRPGTGKLTSSSAWKQFAQMKPDAPFLFGNKLERKLGGNVLKERGKGEIHGDKDLGSKQTEPIRIKIFEGGYKSNEDYVYVRGRGRGKYICEECGIRCKKPSMLKKHIRTHTDVRPYVCKLCNFAFKTKGNLTKHMKSKAHMKKCLELGVSMTSVDETETEEAENMEDLHKTSEKHSMSGISTDHQFSDAEESDGEDGDDNDEDDEDDDDFDDQGDLTPKTRSRSTSPQPPRFSSLPVNVGAVAHGVPSDSSLGHSSLISYLVTLPSIQVTQLMTPSDSCEDTQMTEYQRLFQSKSTDSEPDKDRLDIPSSMDEEAMLSSEPSSSPRDFSPSSYRSSPGYDSSPCRDNSPKRYLIPKGDLSPRRHLSPRRDLSPMRHLSPRKEAALRREMSQGDASPRRHLSPRRPLSPGKDITTRRDLSPRRERRYMTTIRAPSPRRALYHNPPLPMGQYLQTEPIVLGPPNLRRGLPQVPYFSLYGDQEGAYEHHGSSLFPEGPTDYVFSHLPLHSQQQVRAPIPMVPVGGIQMVHSLPPAISGLHPPPTLPLPTEGSEEKKGAPGEALTKDPYTLSRRHEKQAPHVLQSSGLPSSPSSPRLLMKQSTSEDSLNSTEREQEENIQTCTKAIASLRIATEEAALLGADQPTWVQESPQKPLESAHISIRHFSGPEPGQLCTSAAHPDLHDGEKDTFGTSQTAVAHPTFYSKGSVDEKQVDFQSSKELSLSTEEGNEPSSEKNRLH

SEQ ID NO: 3855 - DNA, 9175 bp, Homo sapiens
  ref <308>: DATABASE ACCESSION NUMBER: EMBL / X65644
  ref <309>: DATABASE ENTRY DATE: 1992-11-13
tatgtttagtcccatatgctcttcctgaatcttgccactgcccatcaagagatagaatacatttcccctccccttgaacatggaagcaaccaagctttaagaagcacagctttggagacactccatgagtctgcactgctttcaggggaactagcacttaagaccttgtgtaacaaaatggacactggggacacagctctaggacaaaaagctacctcaaggtctggagaaactgataaagcatcaggtagatggagacaggaacaatcagctgttattaagatgagcacttttggcagtcatgaaggacagcggcaaccacaaatagagcctgagcaaatcggaaacacagcatcagcacaactgtttggttctgggaaactggcctcccctagtgaagtggtgcagcaagtcgcagagaagcaatatccaccgcatcgtccgagtccttactcatgccaacactcactctctttccctcagcactcattgccacagggggtcatgcacagcaccaagccacatcagagcctcgaaggtcctccgtggcttttccctggccctttgccatccgttgcctctgaggacttatttccttttcctatacatggccacagtggtggttatcctagaaaaaagatttcaagtctgaaccctgcttatagccaatactcccagaaaagtattgaacaggcagaagaggctcacaagaaagagcacaaacccaaaaagcctggcaagtacatttgcccttactgcagcagagcgtgtgccaaacctagtgtactgaaaaaacacatcaggtcccatactggggagcggccatatccatgtataccttgtggtttctctttcaagacaaagagcaatttgtacaagcacaggaagtcacatgcccatgcaattaaggcaggattagtacctttcacagagtcagctgtatctaaattggacctagaggctggttttattgatgtagaagcagaaatacattcagatggtgaacagagtacagacacagatgaggagagttctttatttgccgaggcttctgacaaaatgagtcctggtccacccatcccactggacattgccagcagaggcggctatcatgggtcattggaagaatcattgggaggtccaatgaaggtgccgattttgattatccctaaaagtgggattcctctccctaatgaaagctctcagtatattggccctgatatgctaccaaatccatctttaaatactaaggctgatgattcgcacacagtcaaacagaaacttgcactaagactgtcagagaaaaaaggacaagattctgagccatcgctcaaccttctgagcccgcacagtaaaggaagcactgattctggttacttttctcgctcagaaagtgctgagcagcaaataagccctcccaacacaaatgcaaagtcttatgaagaaatcatctttggaaaatactgtcggcttagtccgagaaatgcactcagtgttacaaccacaagtcaggagcgtgccgcaatgggtaggaagggcataatggaaccattacctcacgttaacaccaggttagatgtcaagatgtttgaagatcctgtttcacagctgatcccaagcaagggagatgtcgaccccagtcaaacgagcatgctgaaatccactaagttcaacagtgagtccagacaaccccagattattccatcatctatcaggaacgaaggaaaactttatccagcaaacttccaaggcagcaacccggttctcttagaagctcctgtagactcttcaccccttattagaagcaactcagtgccaacttcttcagcaactaatctaactattcctccttctttgagaggaagtcactcatttgatgaaaggatgactggttccgacgatgtattctatccagggaccgtgggcataccccctcagcgcatgctaagaagacaagcggcatttgagctgccttcggtacaggagggccacgtggaagtcgagcaccatggcaggatgttgaagggtatcagcagttcatccctgaaggaaaagaaattgtctcctggggacagggttgggtatgactatgatgtctgtcggaaaccctataagaagtgggaggactctgaaacaccaaagcaaaactacagggacatttcctgcttgagttctttaaagcatggtggagaatatttcatggatcccgtggtgccattgcagggagtaccaagcatgtttggaactacctgtgaaaacaggaaacgccggaaagagaagagcgtaggggatgaagaggacacgcccatgatctgcagcagcattgtaagcactcctgtgggcatcatggcttccgattatgaccccaaactgcagatgcaggaaggagtcaggagtggatttgccatggctggacacgaaaacctttctcatggtcacacggaacgctttgacccatgtcggccccaactgcagcctggaagtccatctcttgtgtcagaggagtcaccttcagccattgattcagacaagatgtcagacctagggggcaggaaacctcctggaaatgtgatttctgtgattcagcacaccaactcactgagccgacccaattcatttgaaaggtctgagtcagccgaacttgtggcttgcacacaggataaagccccttccccttcagagacttgtgacagtgagatttcagaagccccagtgagtcctgagtgggctccacctggggatggtgcagaaagtggggggaaaccctctccatctcagcaggtgcagcagcagtcctatcacacacagcccaggctagttcggcaacacaacatccaggttcctgagattcgagtgaccgaggagcctgataaacctgagaaggagaaggaagcccagagcaaagagccagagaagcctgtggaagaatttcagtggccccagagaagtgagaccctttcccagctccccgcggagaagttgcctcccaaaaagaagcgtctgcgacttgcagatatggagcactcctcaggggagtccagctttgaatccacaggcacaggcctctcccgcagccccagccaagaaagcaacttgtcccacagctccagtttctccatgtcttttgaaagagaagaaaccagtaagctttctgcacttcctaagcaggatgagtttgggaagcattcagagtttctgactgtccctgctggttcatactcattgtctgtcccaggccatcaccaccagaaagagatgcgacgctgctcatcagagcagatgccttgtcctcacccagcggaagtcccagaagttcggagcaaatcatttgattatgggaatctgtcccatgctcctgtgtcgggagcagcagcctccacggtatcaccgtccagggagaggaagaaatgctttctggtgcggcaagcttccttcagtggctccccagaaatctcccagggcgaggttggcatggatcagagcgtgaagcaagagcagctggagcacctgcatgctggcctccggtccgggtggcaccatggcccgcctgctgtgctgcctcctcttcagcaagaggacccagggaagcaggtggcgggtccttgtcccccgctgagctcggggccactgcacctggcccagccacagatcatgcacatggacagtcaggaatctttgagaaatcccttgatccaaccaacatcctatatgacaagcaagcacttacctgaacagccacacttatttccacatcaagagacaattccattttctccaatccagaatgccttgtttcagtttcagtatcctacagtttgtatggttcatttaccagctcagcagcctccctggtggcaggcacatttcccacatccctttgctcagcaccctcagaagagctatggcaagccctcttttcagacagaaatccattcgagctatcccttagagcatgtggcagagcacactggaaagaaacctgctgagtatgcacacacgaaagagcagacctacccatgttattcaggagcatcagggctacacccaaagaaccttcttccaaagtttccatcagaccagagcagtaagtcaactgaaacgccctctgagcaggttcttcaagaagattttgcctcggcaaatgctgggtctttgcagtccctcccaggaacagtggttcctgttcggatccagacgcacgtaccatcctatggaagtgtcatgtacacaagcatttctcagatacttgggcagaatagccctgccattgtcatatgcaaagtcgatgagaatatgacccaaaggacactggtcaccaacgcagccatgcaagggataggattcaacattgcccaggtgctggggcagcatgcgggcttggagaagtaccccatttggaaagcacctcagactttgcccctcggcttagaatcctccatccccttgtgtttaccttccacctctgacagcgtggccaccctgggaggtagcaagcgaatgctttctccagccagtagcttggagctcttcatggaaaccaagcagcagaaaagggtcaaagaagaaaagatgtacggacagattgtggaggagcttagtgctgtggagctgaccaactcagacatcaaaaaggacctctcccgcccccagaaaccccagctggttcgacaaggatgtgcttctgagccaaaagatggcttgcagtcagggtcatcttccttctcctcgctgtcgccctcctcatctcaagactatccttctgttagcccgtcttccagggagccattcccgcccagcaaggagatgctttccggttcccgggcaccacttccggggcagaagtccagtgggccttctgaaagcaaagaatcttcagatgaattagatatcgatgagacggcatcggacatgagcatgagcccacagagttcttcattaccagcaggagatggtcagctggaagaggaagggaagggccacaagcggcctgttggcatgctggtccgcatggcctctgcccccagcgggaacgtggcagactcaactcttcttctcacggacatggcagatttccagcagattcttcagttccccagtctgcggacaacaactactgtgagttggtgcttcttgaattatacaaaacccaattatgtgcaacaggccaccttcaaatcctcggtttatgcttcatggtgcattagttcctgtaatccaaacccatcaggattgaacaccaagaccacgctggctcttctgaggtccaagcaaaaaatcactgcagaaatttatactctggctgctatgcataggcctggaaccggcaagcttacatcatcaagtgcttggaagcagtttactcagatgaaacctgatgcgtcctttttatttggcagcaaactagaaaggaaactagtgggaaatatcttaaaggaaagagggaaaggagatattcatggagataaagatattggatccaaacaaactgagccaatccgaattaaaatatttgaaggagggtacaaatcgaatgaagattatgtatatgtcagaggacgtggccggggaaagtacatttgtgaagaatgtgggattcgctgtaagaagccaagcatgctcaaaaaacacatccgtacccatactgatgttcggccttatgtatgcaagttatgtaactttgccttcaaaacgaaaggaaacctaacgaagcatatgaaatctaaagcacacatgaaaaaatgcctggaattgggagtctcaatgacatcggtggatgatacagaaactgaggaagcagaaaatttggaagatttgcacaaagcagcagagaagcatagcatgtccagcatttcaactgatcatcagttctccgatgctgaggaatcagatggtgaggatggagatgataatgatgatgatgatgaagatgaagatgactttgacgaccagggagatttaacaccaaaaacaagatcaagaagcaccagtcctcagcctcctagattctcctccttgcctgtgaatgttggcgccgtaccccacggggttccttcagatagttccctgggacattcttcgttgatcagctatttggttactttgccaagtattcgagttactcagcttatgacacccagtgattcatgtgaagatacccagatgacagaataccagaggctattccagagcaaaagtacggactcagaaccagacaaagacagattggacatacctagttgtatggatgaggagtgcatgctaccttcagagccaagctcctctcccagggacttctcaccctcaagccaccattcctctccaggatatgattcttcaccctgtcgagataattcaccaaagaggtatctgatacccaaaggagatttatctcccaggagacatttatcacctaggagagatctgtcacccatgagacatctttcaccaacaaaggaagctgcattgagaagagagatgtcccaaagagatgtttcaccaagaaggcatttgtctccaaggaggccagtgtctcctgggaaagatatcacagcaagaagagacctctcccctagaagagagagaagatacatgaccacaataagagcgccatctcccagaagggctttataccataacccaccattgtccatgggacagtatttgcaagcagagccaattgtattggggcctcctaatttaagaagaggattacctcaggttccttacttcagtctctatggagaccaagaaggtgcttatgaacatccaggctccagccttttccctgagggtcctaatgactatgtcttcagtcatcttccactccactctcagcaacaagtgcgagcccctatccccatggtgcccgttggtgggatccagatggttcactccatgccgccagccctttccagtttacatccttcacccacattgcccctgccaatggagggctttgaggagaagaaaggcgcgtcaggggagtccttctccaaggacccctatgtgctttctaagcagcatgagaagcgaggtcctcacgctttgcagtcatctggtccgcctagcactccctcctctcctcggctgttgatgaaacagagcacttcggaagacagcctaaacgcaacagagcgggaacaggaggaaaatatacagacttgtacaaaagccattgcctctctccggattgccacggaagaggcagctctgctcgggccagatcagccagcgcgggtgcaggagccccaccagaaccccctgggaagtgcacatgttagcattagacactttagtagacctgagccaggtcagccctgtacctcagccacccaccctgacttgcatgatggtgaaaaggacaattttggtacatcacagactccattagctcactccacgttttacagcaagagttgtgtggatgacaagcagttggactttcacagcagcaaggaattatcttcaagcacagaggaaagcaaagatccttcatcagaaaagagtcagctacattgatctatgatgcatggagactttcatttccacattttcccatttttttgtttttgtttttctagaaatggaggtaatccagtttatagcatgcctgtcctaagttacagtagtttgctattatatatacttttgttatatcaaaagaattaggtaaattaacaagtcatcatgagcctgaccaaaacaaaatttgaaattaacctattgggtctggtacttttaaaattgtacagatgtttgtgccttttctttactttgcttatattcttataagcattttttagcagtaatttgtacatattttagaatttgtgtatctgctttgtaataaatgtaatttctttccttttttggacacttggatctaaatgatgtaaagcaaaacagcatcaatatatatgtgaggttgcactaaaacatatttttatatgattaaaactgaacagcttttatgtacagctctgattctgtaatactaatatttatttactttgtttcataaattgtacattttttcttaatgttgtggattgcttttctatgtgaagcatgggatttactgttgcgtaactagaacaaaaatgtacattgtaaacaagatatttaaactagagtatcttattctgcacttatgcattagttaaaaaaagataaaggatgtatcagtcagttcttaactcttgtatatttttttgtctcttgtttgctggattgactataacttaagtgctgattgtgattttaaaatgatagtaccgtaaagcattaaagtaaacaatgtgctattgtgagttttttcaaagctttataaatcagttataaataatattaaaagtatttggtcttatgtgaacatgttgatctatatactcatctaaaaatatgggaaaacattccaccccatgtaaatatgtacaagtgcatcactggtacaattttatgtaactcagttggacactaggttgccacagacctatgctaggtgtctttaaaaaattaaggtgacaaagcacatgggactgtgtagagcttggttatcggccggcccggtggcttggcaggcagtctgtcgctgctcatggagaagacctgggcttagcaatctccttagttcttgctacacaggatggtgactggaactaaggctacacagagggtcgcacttggactctgagggttgggtgtggaagggggaaaaggggatggagacctgctccccagctcttcctgtcagccggtttacatgggaacagggttaacatctgtgttaggggaggtcaccttaccctttttcataggggaagagtgtcacactcctggctatctcagggggaatggggaaaagaatctttcaagggcaaagaactcgtgggaggatgtctgttgtatgtaatactcacaatggcttttggttagtgttgaaggtgggaagagcatttgtaggtccagaagagtgaaagagagggaggggtgcagcaacatgtgcacaggcacgcacatgtgtgcacgcacacatacaatctgggttatctttgtgctatatagtggattataattctgtgaaaccaagtttgtatattgaattacattaaggagtgttctttaaaaagagaaataaatatacaattacatgcttaaaaaaaaaaaaaaaaaaaaa

SEQ ID NO: 3856 - protein, 1833 aa, Homo sapiens
  ref <308>: DATABASE ACCESSION NUMBER: SWISS-Prot / P31629
  ref <309>: DATABASE ENTRY DATE: 1998-07-15
MLKGISSSSLKEKKLSPGDRVGYDYDVCRKPYKKWEDSETPKQNYRDISCLSSLKHGGEYFMDPVVPLQGVPSMFGTTCENRKRRKEKSVGDEEDTPMICSSIVSTPVGIMASDYDPKLQMQEGVRSGFAMAGHENLSHGHTERFDPCRPQLQPGSPSLVSEESPSAIDSDKMSDLGGRKPPGNVISVIQHTNSLSRPNSFERSESAELVACTQDKAPSPSETCDSEISEAPVSPEWAPPGDGAESGGKPSPSQQVQQQSYHTQPRLVRQHNIQVPEIRVTEEPDKPEKEKEAQSKEPEKPVEEFQWPQRSETLSQLPAEKLPPKKKRLRLADMEHSSGESSFESTGTGLSRSPSQESNLSHSSSFSMSFEREETSKLSALPKQDEFGKHSEFLTVPAGSYSLSVPGHHHQKEMRRCSSEQMPCPHPAEVPEVRSKSFDYGNLSHAPVSGAAASTVSPSRERKKCFLVRQASFSGSPEISQGEVGMDQSVKQEQLEHLHAGLRSGWHHGPPAVLPPLQQEDPGKQVAGPCPPLSSGPLHLAQPQIMHMDSQESLRNPLIQPTSYMTSKHLPEQPHLFPHQETIPFSPIQNALFQFQYPTVCMVHLPAQQPPWWQAHFPHPFAQHPQKSYGKPSFQTEIHSSYPLEHVAEHTGKKPAEYAHTKEQTYPCYSGASGLHPKNLLPKFPSDQSSKSTETPSEQVLQEDFASANAGSLQSLPGTVVPVRIQTHVPSYGSVMYTSISQILGQNSPAIVICKVDENMTQRTLVTNAAMQGIGFNIAQVLGQHAGLEKYPIWKAPQTLPLGLESSIPLCLPSTSDSVATLGGSKRMLSPASSLELFMETKQQKRVKEEKMYGQIVEELSAVELTNSDIKKDLSRPQKPQLVRQGCASEPKDGLQSGSSSFSSLSPSSSQDYPSVSPSSREPFPPSKEMLSGSRAPLPGQKSSGPSESKESSDELDIDETASDMSMSPQSSSLPAGDGQLEEEGKGHKRPVGMLVRMASAPSGNVADSTLLLTDMADFQQILQFPSLRTTTTVSWCFLNYTKPNYVQQATFKSSVYASWCISSCNPNPSGLNTKTTLALLRSKQKITAEIYTLAAMHRPGTGKLTSSSAWKQFTQMKPDASFLFGSKLERKLVGNILKERGKGDIHGDKDIGSKQTEPIRIKIFEGGYKSNEDYVYVRGRGRGKYICEECGIRCKKPSMLKKHIRTHTDVRPYVCKLCNFAFKTKGNLTKHMKSKAHMKKCLELGVSMTSVDDTETEEAENLEDLHKAAEKHSMSSISTDHQFSDAEESDGEDGDDNDDDDEDEDDFDDQGDLTPKTRSRSTSPQPPRFSSLPVNVGAVPHGVPSDSSLGHSSLISYLVTLPSIRVTQLMTPSDSCEDTQMTEYQRLFQSKSTDSEPDKDRLDIPSCMDEECMLPSEPSSSPRDFSPSSHHSSPGYDSSPCRDNSPKRYLIPKGDLSPRRHLSPRRDLSPMRHLSPRKEAALRREMSQRDVSPRRHLSPRRPVSPGKDITARRDLSPRRERRYMTTIRAPSPRRALYHNPPLSMGQYLQAEPIVLGPPNLRRGLPQVPYFSLYGDQEGAYEHPGSSLFPEGPNDYVFSHLPLHSQQQVRAPIPMVPVGGIQMVHSMPPALSSLHPSPTLPLPMEGFEEKKGASGESFSKDPYVLSKQHEKRGPHALQSSGPPSTPSSPRLLMKQSTSEDSLNATEREQEENIQTCTKAIASLRIATEEAALLGPDQPARVQEPHQNPLGSAHVSIRHFSRPEPGQPCTSATHPDLHDGEKDNFGTSQTPLAHSTFYSKSCVDDKQLDFHSSKELSSSTEESKDPSSEKSQLH

SEQ ID NO: 3857 - DNA, 3774 bp, Rattus norvegicus; identical to SEQ ID NO: 3853
  misc_feature (1)..(3774): n=a, c, g or t
  ref <308>: DATABASE ACCESSION NUMBER: EMBL / M65251
  ref <309>: DATABASE ENTRY DATE: 2000-03-04

SEQ ID NO: 3858 - protein, 916 aa, Rattus norvegicus; identical to SEQ ID NO: 3854
  ref <308>: DATABASE ACCESSION NUMBER: SWISS-Prot / Q00900
  ref <309>: DATABASE ENTRY DATE: 1994-10-01

SEQ ID NO: 3859 - DNA, 9175 bp, Homo sapiens; identical to SEQ ID NO: 3855
  ref <308>: DATABASE ACCESSION NUMBER: EMBL / X65644
  ref <309>: DATABASE ENTRY DATE: 1992-11-13

SEQ ID NO: 3860 - protein, 1833 aa, Homo sapiens; identical to SEQ ID NO: 3856
  ref <308>: DATABASE ACCESSION NUMBER: SWISS-Prot / P31629
  ref <309>: DATABASE ENTRY DATE: 1998-07-15

SEQ ID NO: 3861 - DNA, 3635 bp, Rattus norvegicus
  ref <308>: DATABASE ACCESSION NUMBER: EMBL / M68971
  ref <309>: DATABASE ENTRY DATE: 2000-03-04
cggaaaacctgtttctggaaacgcgaggccctcagctggtgagccatcgtggttaagcttctttgtgtggctcctggagtctccgatcccagccggacacccgggcctggtttcaaagcggtcgaactgctctgcccgctccaccggtagcgctcgagcctcggtttctctactcgaccccgactcgccgcagcaggatgatcgcctcgcatatgatcgcctgcttattcacggagctcaaccaaaaccaagtgcagaaggttgaccaatttctctaccacatgcgtctctcagatgagacccttctggagatttctaggcggttccggaaggagatggagaaagggctaggagctaccacgcaccctacagcagctgtgaaaatgttgcctacctttgtgaggtcaactccggatgggacagaacatggggagttcctggctctggatcttggaggaaccaacttccgtgtgctccgagtaagggtgacggacaatggcctccagagagtggagatggagaaccagatctacgccatccctgaggacatcatgcggggcagtggaacccagctgtttgaccacatcgccgaatgcctggccaacttcatggacaagctacaaatcaaagagaagaagctccctctgggtttcaccttctcgttcccctgccaccagacaaaactggatgagagttttttggtctcgtggactaaggggttcaagtccagtggcgtggaaggcagagatgtggtggacctgatccggaaggctatccagcgcagaggggactttgacattgacattgtggccgtggtgaatgacacagttgggaccatgatgacttgtggctatgatgatcagaactgcgagattggtctcattgtgggcactggcagcaacgcctgctacatggaggaaatgcgtcatattgacatggtggagggagatgaggggcgcatgtgcatcaacatggagtggggagcctttggggacgacggtacactcaatgacatccgaaccgagtttgaccgagagatcgacatgggctcgctgaaccctgggaagcagctgtttgagaagatgattagcgggatgtacatgggggagctggtcaggctcatcctggtgaagatggccaaggcagagctgttgttccaagggaaactcagcccagaactccttaccactggctccttcgagaccaaagatgtctcggatattgaagaggataaggatggaatcgagaaggcctaccaaatcctgatgcgcctgggtctgaatccattgcaggaggattgtgtggccacgcaccgaatctgccagattgtgtccacgcgctcggccagtctgtgcgcagccaccctggccgcggtgctgtggcgaatcaaagagaacaagggcgaggagcgacttcgctccaccatcggtgtcgatggctccgtctacaagaaacatccccattttgccaagcgtctccataaggcagtgaggaggctggtgcccgactgtgatgtccgcttcctccgctctgaggatggcagcggcaagggggctgctatggtgacggcggtggcttaccgtctggctgaccaacaccgggcccgccagaagaccctggagtctctgaagctgagccacgagcagcttctggaggttaagagaagaatgaaggtggaaatggagcagggtctgagcaaggagacgcatgcggtcgcccctgtgaagatgctgcccacttacgtgtgtgccactccagatggcacagagaaaggagacttcttggccttggatcttggaggaacaaacttccgggtcctgctggtgcgtgtgcgtaatggcaagcggaggggcgtggagatgcataacaagatctactccatcccacaggaggttatgcatggcactggggaagagctcttcgaccacattgtccagtgcattgcggacttcctggagtacatgggcatgaagggcgtgtccctgcctttgggtttcacattctccttcccttgccagcagaacagcctagaccagagcatcctcctcaagtggacaaagggattcaaggcatctggctgcgagggtgaggatgtggtcaccttgctgaaggaagcgattcaccggcgagaggagtttgacctggatgtggttgccgtggtgaatgacacagttgggactatgatgacttgtggctacgaagaccctcactgtgaagttggcctcattgttggcaccggaagcaacgcctgctacatggaagagatgcgtaatgtggagctggtggacggagaggagggacggatgtgtgtcaacatggagtggggagcatttggggacaatggctgcctggatgacttgcggaccgtgtttgatgttgctgtggatgagctttctctcaaccctggcaaacagaggttcgagaagatgatcagcggcatgtacttgggagagattgtgcgcaacattctcatcgatttcacgaagcgggggctgctcttccgaggccgcatctcagagcgcctcaagacaaggggaatctttgaaactaagttcctgtctcagatagagagcgactgcctagccctgctacaggttcgtgccatcctgcgccacctagggctggagagcacgtgcgatgacagcatcatcgtgaaggaggtgtgcactgtggttgcccggcgcgctgcacagctctgtggcgcaggcatggccgccgtagtggacaagataagagagaaccgtgggctggacaacctcaaagtgacagtgggcgtggacgggactctgtataagcttcatcctcactttgccaaggtcatgcatgagacggtgagagatctggctccgaaatgtgacgtgtccttcctggaatccgaggacggcagtgggaagggagcagctctcatcactgccgtggcctgccgcatccgggaggctgggcagagatagaagcttggggaccagacggggcttctctgcttcctcacttccccgttttaaattatgagaagatggaccccttggcagagaggaccctgtgagactgggacttttgtctctgtatattcactgtagagtttggtacccaatccttggccttcctgagaatctgaagtaaggagttgttcgcagttcctgctggtcacctcctgggatggtcctcccccactctacttcctgtacaatcctatgggatggggacagtcttgagaaaatggttgcctcagcttggagctgaacctgacatttgtaggtggagaacatcttgaaatgtcgatgcttctctcatcagaggtagatgttgggtgggagggaggaggagagataggacgtcccctgccctacgtggctgtccctcttcaactcaacccataagcatcaccctgccggttctaaaacatttgctgtcctgggatagaggaatctgaaccaaagctagagtggacgtcttcttcaagtgtttgtggctttacctcacatggctgaatgtgtcatccacgagctacagaccttggggacaggagtggctttggtcgctttttagttttttgttttgttttgtttttttcttttttaatttatgtttgaaatttacttagtttaaagcaggtcctctccattgtgtaatggttg

SEQ ID NO: 3862 - protein, 917 aa, Rattus norvegicus
  ref <308>: DATABASE ACCESSION NUMBER: SWISS-Prot / P27881
  ref <309>: DATABASE ENTRY DATE: 2002-06-15
MIASHMIACLFTELNQNQVQKVDQFLYHMRLSDETLLEISRRFRKEMEKGLGATTHPTAAVKMLPTFVRSTPDGTEHGEFLALDLGGTNFRVLRVRVTDNGLQRVEMENQIYAIPEDIMRGSGTQLFDHIAECLANFMDKLQIKEKKLPLGFTFSFPCHQTKLDESFLVSWTKGFKSSGVEGRDVVDLIRKAIQRRGDFDIDIVAVVNDTVGTMMTCGYDDQNCEIGLIVGTGSNACYMEEMRHIDMVEGDEGRMCINMEWGAFGDDGTLNDIRTEFDREIDMGSLNPGKQLFEKMISGMYMGELVRLILVKMAKAELLFQGKLSPELLTTGSFETKDVSDIEEDKDGIEKAYQILMRLGLNPLQEDCVATHRICQIVSTRSASLCAATLAAVLWRIKENKGEERLRSTIGVDGSVYKKHPHFAKRLHKAVRRLVPDCDVRFLRSEDGSGKGAAMVTAVAYRLADQHRARQKTLESLKLSHEQLLEVKRRMKVEMEQGLSKETHAVAPVKMLPTYVCATPDGTEKGDFLALDLGGTNFRVLLVRVRNGKRRGVEMHNKIYSIPQEVMHGTGEELFDHIVQCIADFLEYMGMKGVSLPLGFTFSFPCQQNSLDQSILLKWTKGFKASGCEGEDVVTLLKEAIHRREEFDLDVVAVVNDTVGTMMTCGYEDPHCEVGLIVGTGSNACYMEEMRNVELVDGEEGRMCVNMEWGAFGDNGCLDDLRTVFDVAVDELSLNPGKQRFEKMISGMYLGEIVRNILIDFTKRGLLFRGRISERLKTRGIFETKFLSQIESDCLALLQVRAILRHLGLESTCDDSIIVKEVCTVVARRAAQLCGAGMAAVVDKIRENRGLDNLKVTVGVDGTLYKLHPHFAKVMHETVRDLAPKCDVSFLESEDGSGKGAALITAVACRIREAGQR

SEQ ID NO: 3863 - DNA, 3476 bp, Homo sapiens
  ref <308>: DATABASE ACCESSION NUMBER: EMBL / AF148513
  ref <309>: DATABASE ENTRY DATE: 2000-03-03
gttgcatgaaactccggcgcaggagtcccgggctgccgctggcaacatcgtgtcacccagctaagaaaatccgcgggcccgagccacgcgcctgtgaatcggagaggtcccactgcccgagtggagccgggctgagattcttctcaagttgagcctcagtgatcctgtggccgaagttagcgccttgacgtgggacaaccggacacgtcgccaggagagaactgaggcgccttctagcagttgtgacgccaaaatcacgtctccggagacccgcgccctccgccagccgggcgcaccctcgccggtagccttctttgtgcgccgtccggactcccagctcccggcccggcagccgagccccagcacaaagcagtcggaccgcgccgcccgcctcccctctcgcgtctccgcctcggtttcccaactctgcgccgtcgggccgcggcaggatgattgcctcgcatctgcttgcctacttcttcacggagctcaaccatgaccaagtgcagaaggttgaccagtatctctaccacatgcgcctctctgatgagaccctcttggagatctctaagcggttccgcaaggagatggagaaagggcttggagccaccactcaccctactgcagcagtgaagatgctgcccacctttgtgaggtccactccagatgggacagaacacggagagttcctggctctggatcttggagggaccaacttccgtgtgctttgggtgaaagtaacggacaatgggctccagaaggtggagatggagaatcagatctatgccatccctgaggacatcatgcgaggcagtggcacccagctgtttgaccacattgccgaatgcctggctaacttcatggataagctacaaatcaaagacaagaagctcccactgggttttaccttctcgttcccctgccaccagactaaactagacgagagtttcctggtctcatggaccaagggattcaagtccagtggagtggaaggcagagacgttgtggctctgatccggaaggccatccagaggagaggggactttgatatcgacattgtggctgtggtgaatgacacagttgggaccatgatgacctgtggttatgatgaccacaactgtgagattggtctcattgtgggcacgggcagcaacgcctgctacatggaagagatgcgccacatcgacatggtggaaggcgatgaggggcggatgtgtatcaatatggagtggggggccttcggggacgatggctcgctcaacgacattcgcactgagtttgaccaggagattgacatgggctcactgaacccgggaaagcaactgtttgagaagatgatcagtgggatgtacatgggggagctggtgaggcttatcctggtgaagatggccaaggaggagctgctctttggggggaagctcagcccagagcttctcaacaccggtcgctttgagaccaaagacatctcagacattgaaggggagaaggatggcatccggaaggcccgtgaggtcctgatgcggttgggcctggacccgactcaggaggactgcgtggccactcaccggatctgccagatcgtgtccacacgctccgccagcctgtgcgcagccaccctggccgccgtgctgcagcgcatcaaggagaacaaaggcgaggagcggctgcgctctactattggggtcgacggttccgtctacaagaaacacccccattttgccaagcgtctacataagaccgtgcggcggctggtgcccggctgcgatgtccgcttcctccgctccgaggatggcagtggcaaaggtgcagccatggtgacagcagtggcttaccggctggccgatcaacaccgtgcccgccagaagacattagagcatctgcagctgagccatgaccagctgctggaggtcaagaggaggatgaaggtagaaatggagcgaggtctgagcaaggagactcatgccagtgcccccgtcaagatgctgcccacctacgtgtgtgctaccccggacggcacagagaaaggggacttcttggccttggaccttggaggaacaaatttccgggtcctgctggtccgtgttcggaatgggaagtggggtggagtggagatgcacaacaagatctacgccatcccgcaggaggtcatgcacggcaccggggacgagctctttgaccacattgtccagtgcatcgcggacttcctcgagtacatgggcatgaagggcgtgtccctgcctctgggttttaccttctccttcccctgccagcagaacagcctggacgagagcatcctcctcaagtggacaaaaggcttcaaggcatctggctgcgagggcgaggacgtggtgaccctgctgaaggaagcgatccaccggcgagaggagtttgacctggatgtggttgctgtggtgaacgacacagtcggaactatgatgacctgtggctttgaagaccctcactgtgaagttggcctcattgttggcacgggcagcaatgcctgctacatggaggagatgcgcaacgtggaactggtggaaggagaagaggggcggatgtgtgtgaacatggaatggggggcattcggggacaatggatgcctagatgacttccgcacagaatttgatgtggctgtggatgagctttcactcaaccccggcaagcagaggttcgagaaaatgatcagtggaatgtacctgggtgagattgtccgtaacattctcatcgatttcaccaagcgtggactgctcttccgaggccgcatctcagagcggctcaagacaaggggcatctttgaaaccaagttcttgtctcagattgagagtgactgcctggccctgctgcaagtccgagccatcctgcaacacttagggcttgagagcacctgtgacgacagcatcattgttaaggaggtgtgcactgtggtggcccggcgggcagcccagctctgtggcgcaggcatggccgctgtggtggacaggatacgagaaaaccgtgggctggacgctctcaaagtgacagtgggtgtggatgggaccctctacaagctacatcctcactttgccaaagtcatgcatgagacagtgaaggacctggctccgaaatgtgatgtgtctttcctgcagtcagaggatggcagcgggaagggggcggcgctcatcactgctgtggcctgccgcatccgtgaggctggacagcgatagaacccctgaaatcggaagggacttcctctttctctccttcttccctgttttaaattataagatgtcatccccttgtgtcagagacagaccccttggcttttgcttggcagagaggaccccactggactgggttttgtctctgcatctcattgtagagcttggtggctgagcttggccctattaagataaatagagttccaaataaggatttgttcacatgcatcataaccattcccattggttctcctaaaacatgaaaattatctcccttag

SEQ ID NO: 3864 - protein, 917 aa, Homo sapiens
  ref <308>: DATABASE ACCESSION NUMBER: SWISS-Prot / P52789
  ref <309>: DATABASE ENTRY DATE: 2002-06-15
MIASHLLAYFFTELNHDQVQKVDQYLYHMRLSDETLLEISKRFRKEMEKGLGATTHPTAAVKMLPTFVRSTPDGTEHGEFLALDLGGTNFRVLWVKVTDNGLQKVEMENQIYAIPEDIMRGSGTQLFDHIAECLANFMDKLQIKDKKLPLGFTFSFPCHQTKLDESFLVSWTKGFKSSGVEGRDVVALIRKAIQRRGDFDIDIVAVVNDTVGTMMTCGYDDHNCEIGLIVGTGSNACYMEEMRHIDMVEGDEGRMCINMEWGAFGDDGSLNDIRTEFDQEIDMGSLNPGKQLFEKMISGMYMGELVRLILVKMAKEELLFGGKLSPELLNTGRFETKDISDIEGEKDGIRKAREVLMRLGLDPTQEDCVATHRICQIVSTRSASLCAATLAAVLQRIKENKGEERLRSTIGVDGSVYKKHPHFAKRLHKTVRRLVPGCDVRFLRSEDGSGKGAAMVTAVAYRLADQHRARQKTLEHLQLSHDQLLEVKRRMKVEMERGLSKETHASAPVKMLPTYVCATPDGTEKGDFLALDLGGTNFRVLLVRVRNGKWGGVEMHNKIYAIPQEVMHGTGDELFDHIVQCIADFLEYMGMKGVSLPLGFTFSFPCQQNSLDESILLKWTKGFKASGCEGEDVVTLLKEAIHRREEFDLDVVAVVNDTVGTMMTCGFEDPHCEVGLIVGTGSNACYMEEMRNVELVEGEEGRMCVNMEWGAFGDNGCLDDFRTEFDVAVDELSLNPGKQRFEKMISGMYLGEIVRNILIDFTKRGLLFRGRISERLKTRGIFETKFLSQIESDCLALLQVRATLQHLGLESTCDDSIIVKEVCTVVARRAAQLCGAGMAAVVDRIRENRGLDALKVTVGVDGTLYKLHPHFAKVMHETVKDLAPKCDVSFLQSEDGSGKGAALITAVACRIREAGQR

SEQ ID NO: 3865 - DNA, 2977 bp, Rattus norvegicus
  ref <308>: DATABASE ACCESSION NUMBER: EMBL / M73714
  ref <309>: DATABASE ENTRY DATE: 2000-03-04
gaattcggcggatggaagccagctgtcccgagaagcagtgaactgtggcgtcatcccgagcagtgccttaccggtattgtgctgcttcacctgcctcgctcggcgttctcctcaggccccgccatggagcgacaggtccaacgacttcgccagacgttccggtccggccgatcgcggccgctgcgtttccgactgcagcagctcgaggccctccggaggatggtgcaagagcgagagaaggacatcttggcagccatcgcagcagacctgagcaaaagtgaactcaatgcatacagtcatgaagtcattaccatccttggggagattgacttcatgctggggaatcttcctgaattggcctctgctcggccagcgaagaagaacctgcttaccatgatggacgaggcctatgttcagccagagcctctgggagtcgtgctgattattggagcttggaactatccttttgttctgaccctgcagccactggtgggagccattgctgcaggaaatgctgccattgttaagccctcggaactcagtgaaaacacggctaagatcttggctgaactcctccctcagtatttagaccaggacctgtacatgattgttaatggcggcgttgaagaaaccacagagcttctgaggcagcggtttgatcacattctctacacaggaaacaccgcagttggaaaaattgtcatggaggctgctgccaagcacctgacccctgtgaccctggagctcgggggcaaaagcccatgctacattgacagagactgtgacctggacgttgcttgcagacggataacctggggaaagtacatgaattgtggtcagacctgtattgctcctgactatatcctgtgtgaagcctcctcccaggatcaaatcgtacagaagattaaggatacggtgaaggacttttatggggaaaatgtaaaagcttctcctgattatgaaaggatcatcaaccttcgtcactttaagaggataaaaagtttgcttgaaggacagaaaatagcttttggtggggagactgatgaagctacacgctacatagccccaaccatactcactgatgttgaccctaactccaaggtgatgcaagaagaaatttttggaccaattctcccaatagtgtctgtgaaaaatgtggaggaagccataaatttcataaatgatcgcgaaaagcccctggcactctacatattttctcacaacaataagctcatcaaacgggtgattgatgagacatccagtggtggagtcacaggcaatgatgtcatcatgcacttcactgttaattctttgccctttggaggtgtgggtgccagtggaatgggggcttatcatggcaaatacagtttcgataccttttctcatcagcgcccctgcttgttaaaagggttaaagggagagagtgttaacaaactcaggtaccctcccaacagcgagtccaaggtcagctggtcgaaattcttcctgctgaaacagttcaacaaaggaaggctgcagctgctgcttctcgtgtgcttggttgcggttgcagctgtgatcgtcaaggatcagctgtgatgacttccttgtagcctctactgaagtacccctcggccaaatggttaacacaccaatgcttttaaaattgtacccaaaccaggaaatgaaattcacaggtgaactgcagtcaaacctaagttgttgccacaaaccactgatgaaactcagtgcttcagccaaatcccagcatttgtcagccgtgcaggtgctgagagggtggagactgggaggggcgacacctagtccatggcagcgggatgtcagggagactcgacaactgctcccgcactctttgctccaggacatagctctcccacccggtgtcaacaccctccaggctttccagctgtcctctgattgctgaggttcctgttagggacccaggtactaaacctgggcgggtggatttgtcggcctcatccattgtggctcgagaccggccttcgggagtcggctctcagtctaaacatcctttctcattcatagtgtgtcacccgaagatgcttgtttgtgacattgtgacagtctgtcatgactgtcccggtgcctttgtgatgacttaaactacactgaggagcttgccaacttgtgaatgcccttcagagggtctggcagtcacagctgttccagagcccgagggacgaagattccggagcccggagtttgaggccaacctaggcaacataatgggaccctctcattattattcctccataacaatcccctcgagaccctcgatttgaatgttatataggtcttcaggataaatctgcttattttcacagcacaacacaaaaaaaatttacttttgaaatcttagagagattcctacagatcttagcatggagctgttcctgtagtgaaaggggggttattagacatgaggcttcagaactcatggggcagggttgttggagactaccgtgagctgagggggcacactgaagcgatgggatggccagaagcgcacctgagcaagcggggcagcattctctgtcagaccctaacatggctacacggggatgtggcagagagatctgtgccgttggctgccagcgctggttaggcctgaagctccaagctgcagaggtctcattgccttcccaggatccaaattaagactgcccactcaatgagaatgtcacttgcgtatgtacaaccatgtttgctgagtaacctgttccaccgttgaggctgtctgaagtgtattgtatgaggtatcaagaacgagtcattggcccatttggcaaatagttgcttatgtagcaattgtcatggactaatcataaaatattttgcacaaaatttcaatgttgaacttgcactcactgttgttaaattataaatcacagcttctagttaggccaaaatatttacatactctactaatcttcaaaataaatgtatcccggaattc

SEQ ID NO: 3866 - protein, 484 aa, Rattus norvegicus
  ref <308>: DATABASE ACCESSION NUMBER: SWISS-Prot / P30839
  ref <309>: DATABASE ENTRY DATE: 2002-06-15
MERQVQRLRQTFRSGRSRPLRFRLQQLEALRRMVQEREKDILAAIAADLSKSELNAYSHEVITILGEIDFMLGNLPELASARPAKKNLLTMMDEAYVQPEPLGVVLIIGAWNYPFVLTLQPLVGAIAAGNAAIVKPSELSENTAKILAELLPQYLDQDLYMIVNGGVEETTELLRQRFDHILYTGNTAVGKIVMEAAAKHLTPVTLELGGKSPCYIDRDCDLDVACRRITWGKYMNCGQTCIAPDYILCEASSQDQIVQKIKDTVKDFYGENVKASPDYERIINLRHFKRIKSLLEGQKIAFGGETDEATRYIAPTILTDVDPNSKVMQEEIFGPILPIVSVKNVEEAINFINDREKPLALYIFSHNNKLIKRVIDETSSGGVTGNDVIMHFTVNSLPFGGVGASGMGAYHGKYSFDTFSHQRPCLLKGLKGESVNKLRYPPNSESKVSWSKFFLLKQFNKGRLQLLLLVCLVAVAAVIVKDQL

SEQ ID NO: 3867 - DNA, 1836 bp, Rattus norvegicus
  ref <308>: DATABASE ACCESSION NUMBER: EMBL / M73808
  ref <309>: DATABASE ENTRY DATE: 2000-03-04
ctcgagaccccgtccccctcccagtggacgccaagtgcgcttgcgcggtaacagccgcccgcacttgtgccatttcccccttcttccgagccacctttcccccctccctcccttccctatccccttccctgccctgcttccctcccttccccctagactcttcgttgtggtcttcccgttcctgatccttcccctaccccacccccaatccccaggaccctggcgccccagccgcaggtgctgcgcccacgggagccacgatgtgcgtcctctcagaacctgtgggcctccttgccctcactgccctccgtttcctcctcgcaggcccccacatccttcagaatgacgttggacgtggggccagaggatgaactcccagactgggctgcggccaaagagttttaccagaagtatgaccccaaggacatcattggcagaggagtgagctctgtggtccgccgctgtgtccatcgagctactggtgatgagtttgcagtgaagatcatggaggtgtcagctgaacggctgagtcttgagcagctggaggaggtgcgggatgccacacggcgagagatgcacatccttcgccaggtcgctggccacccccacatcatcactctcatcgattcctacgagtcttctagcttcatgttcctggtgtttgacctgatgcggaaaggagagctgtttgactatctcacagagaaagtggccctctcagaaaaggaaaccaggtccattatgaggtctctgctggaggcggtgaactttcttcatgtcaacaacattgtacatcgagacctgaagcctgagaatatcctcctagatgacaatatgcagatccgcctttcagattttgggttctcctgccatttggaacctggcgagaagcttcgagagctgtgtgggactccgggatatctagcaccagagatccttaaatgctccatggatgaaacccacccaggctacggcaaggaagtcgacctctgggcttgtggggtaatcctgttcacacttctggctggctcgccaccattctggcatcgacgccaaatcctgatgctacgcatgatcatggaaggccaatatcagtttagttcacccgagtgggatgatcgttcaaacaccgtcaaagacctgatcgcaaagctgctgcaggtggatcctaacgcacgcttgaccgctgagcaagccctacagcaccccttctttgagcgctgtaaaggcagccagccctggaacctcacacctcgccagcggttccgggtggcagtgtggacaatactggctgctggacgagtagccttaagcagtcaccgtttacggccactaactaagaatgcactcttgagagacccctatgcactgcggccagtacggcgcctcattgacaactgtgccttccggctctatggacactgggtgaagaagggggagcagcagaaccgggcggccctcttccagcaccagcctcctaggcctttccccatcattgccactgacctggaaggagactccagtgctatcacagaggatgaagttaccttggtacggagctaggaccttctccctgggcaagccacgaagtaggactccccaggaggagattttctttttctatcattccaaccacttgggactcagatcttagccctgccttgccaagtctacaactgagaatgctgcttgtcacagaaaccagccctttacccctacctacctactctggacttggagatcggggcggagatggaagggaacctcttcccagcattgtgcctggccttgccatcaccgcctgtgctgcatctgaaataaaacctgctacaagcc

SEQ ID NO: 3868 - protein, 406 aa, Rattus norvegicus
  ref <308>: DATABASE ACCESSION NUMBER: SWISS-Prot / P31325
  ref <309>: DATABASE ENTRY DATE: 2002-06-15
MTLDVGPEDELPDWAAAKEFYQKYDPKDIIGRGVSSVVRRCVHRATGDEFAVKIMEVSAERLSLEQLEEVRDATRREMHILRQVAGHPHIITLIDSYESSSFMFLVFDLMRKGELFDYLTEKVALSEKETRSIMRSLLEAVNFLHVNNIVHRDLKPENILLDDNMQIRLSDFGFSCHLEPGEKLRELCGTPGYLAPEILKCSMDETHPGYGKEVDLWACGVILFTLLAGSPPFWHRRQILMLRMIMEGQYQFSSPEWDDRSNTVKDLIAKLLQVDPNARLTAEQALQHPFFERCKGSQPWNLTPRQRFRVAVWTILAAGRVALSSHRLRPLTKNALLRDPYALRPVRRLIDNCAFRLYGHWVKKGEQQNRAALFQHQPPRPFPIIATDLEGDSSAITEDEVTLVRS

SEQ ID NO: 3869 - DNA, 1377 bp, Homo sapiens
  ref <308>: DATABASE ACCESSION NUMBER: Refseq / NM_006213
  ref <309>: DATABASE ENTRY DATE: 2000-11-01
ggccttcagccctctgtggtcccctctccccggggggctttgggattcttgtcaagctccttcaagagcctgcaagcacttaaccagccacccagagttccctcactgaagatctgagcatgacccgggacgaggcactgccggactctcattctgcacaggacttctatgagaattatgagcccaaagagatcctgggcaggggcgttagcagtgtggtcaggcgatgcatccacaagcccacgagccaggagtacgccgtgaaggtcatcgacgtcaccggtggaggcagcttcagcccggaggaggtgcgggagctgcgagaagccacgctgaaggaggtggacatcctgcgcaaggtctcagggcaccccaacatcatacagctgaaggacacttatgagaccaacactttcttcttcttggtgtttgacctgatgaagagaggggagctctttgactacctcactgagaaggtcaccttgagtgagaaggaaaccagaaagatcatgcgagctctgctggaggtgatctgcaccttgcacaaactcaacatcgtgcaccgggacctgaagcccgagaacattctcttggatgacaacatgaacatcaagctcacagactttggcttttcctgccagctggagccgggagagaggctgcgagaggtctgcgggacccccagttacctggcccctgagattatcgagtgctccatgaatgaggaccacccgggctacgggaaagaggtggacatgtggagcactggcgtcatcatgtacacgctgctggccggctccccgcccttctggcaccggaagcagatgctgatgctgaggatgatcatgagcggcaactaccagtttggctcgcccgagtgggatgattactcggacaccgtgaaggacctggtctcccgattcctggtggtgcaaccccagaaccgctacacagcggaagaggccttggcacaccccttcttccagcagtacttggtggaggaagtgcggcacttcagcccccgggggaagttcaaggtgatcgctctgaccgtgctggcttcagtgcggatctactaccagtaccgccgggtgaagcctgtgacccgggagatcgtcatccgagacccctatgccctccggcctctgcgccggctcatcgacgcctacgctttccgaatctatggccactgggtgaagaaggggcagcagcagaaccgggcagcccttttcgagaacacacccaaggccgtgctcctctccctggccgaggaggactactgaggggctggccagtcagggagggctagggggcaggtggggaggggaagccatggaaatacaagtcaaaggggtaaaaaaaaaaaaaaaaaaaaaa

SEQ ID NO: 3870 - protein, 386 aa, Homo sapiens
  ref <308>: DATABASE ACCESSION NUMBER: SWISS-Prot / Q16816
  ref <309>: DATABASE ENTRY DATE: 2002-06-15
TRDEALPDSHSAQDFYENYEPKEILGRGVSSVVRRCIHKPTSQEYAVKVIDVTGGGSFSPEEVRELREATLKEVDILRKVSGHPNIIQLKDTYETNTFFFLVFDLMKRGELFDYLTEKVTLSEKETRKIMRALLEVICTLHKLNIVHRDLKPENILLDDNMNIKLTDFGFSCQLEPGERLREVCGTPSYLAPEIIECSMNEDHPGYGKEVDMWSTGVIMYTLLAGSPPFWHRKQMLMLRMIMSGNYQFGSPEWDDYSDTVKDLVSRFLVVQPQNRYTAEEALAHPFFQQYLVEEVRHFSPRGKFKVIALTVLASVRIYYQYRRVKPVTREIVIRDPYALRPLRRLIDAYAFRIYGHWVKKGQQQNRAALFENTPKAVLLSLAEEDY

SEQ ID NO: 3871 - DNA, 2507 bp, Rattus norvegicus
  ref <308>: DATABASE ACCESSION NUMBER: EMBL / M74223
  ref <309>: DATABASE ENTRY DATE: 2000-03-04
gagcgagagcgctgttgctgacccagctgagcccagctcctaggacgccagccctcgaccatctttcatactccagccacggaacggagccagggcagacgggtccggattttccccctgccccgaccctcctctccacctcccgccgtcgtgacaccggctgtctctggcagcccgttggtcatgaaaaccttcacgttgccagcatccgtcctcttctgcttccttctactcatccgggggttgggagcagcaccccccgggcgctccgatgtttatcctcctcccctcggctctgagcataatgggcaggtagctgaggacgcagtgtcccggccaaaggatgacagcgtcccagaggtccgagcggctcggaattccgagcctcaggaccagggagagctcttccagggcgtggatccccgggcgctggccgcggtactgttgcaggcactggaccgtccggcctcgcccccggctgtcccggcaggttcccagcagggaacacccgaagaagcagcagaagctctgctgaccgagtccgtgcgcagtcagacccatagcctcccggcatcagaaatccaagcgtccgctgtggcgccccctcgccctcagactcaggacaacgatcccgaggcagacgaccgctcagaagagctggaggcactagcatccttgctccaagaacttcgagatttcagtccgagtaatgctaagcgccagcaagagacggcggcagcagagactgaaacccgcacgcacacgctgacccgagtcaatctggagagccccgggccagagcgcgtatggcgcgcttcctggggagagttccaggcgcgcgtcccggagcgtgctcctctgccgccctcggtcccttctcaattccaggctcgaatgtccgaaaacgttccccttcccgaaacccatcagttcggggaaggagtgtcctcccctaaaacacatcttggtgagactttgacacccttatccaaggcgtaccaaagtctaagtgcccccttccccaaggtgcgtcggctcgagggctcattcctgggcggttccgaggcaggagagcgcctgcttcaacaagggttagctcaggtagaggcagggaggaggcaggcggaggccacccggcaggccgcagcgcaagaagagcggctggccgatctcgcctccgacctgctgctccagtatttgctgcagggcggcgcccggcagcgcgatctcgggggtcgcgggctgcaggagacgcagcaagagcgggagaacgagagggaggaggaggcggagcaggagagacgcggtggtggggaggacgaggtgggggaagaggatgaggaggcggcagaggcggaggcggaggcagaggaggcggagagggcgcggcagaacgcgctcctgttcgccgaggaggaggacggggaagccggagccgaggacaagcgctcccaggaggaggcgccaggccatcggcggaaggatgctgaggggacagaggagggcggggaggaggatgacgacgacgaagagatggatccgcagacgatcgatagtctcattgaactgtccaccaaactccacctgccagcagacgatgtggtcagcatcatcgaagaggtggaggagaaacggaagcggaagaagaacgcccctcccgagccggtgccaccccccagggctgccccagccccgacccatgtccgctccccgcagcccccacctcccgccccggcccgggatgagttgccggactggaacgaagtactcccaccctgggatcgggaggaggatgaggtgtttcccccggggccctatcaccccttcccaaactacattcggccgcggacactgcagccgcccgcatcctcccgccgccgtcacttccatcacgcgttgccacctgcgcgccaccatcccgatctggaggcccaggccaggcgcgcgcaggaggaagcggacgcggaggagcgccggctgcaggagcaggaggagctggagaattacattgagcacgtgctgctgcaccgcccgtgacccgcccctgcgcgcccgctcccaactgcgcgcgccgccacgcccccctccgtgtcgctcctcctccctctcggtgtttgcatgcgccccggctccgcccctcggctgccgcccggccccgccccacaaggccccgccccgggttctgtcaggaccagacctgtcagacttctttggggtctgatcctggggccagcccaggcgggtgtgtggtttgtgcgagtccccttacacccccacttcctccaggggcctcgtccccatctagtttctctagcgacttcctggtcccaaacggggaaaagctgttctatttaatcgtgtgaagtgtctgtctcccagccttggggcccccggagcctcccttctccaaattgctgtgaacttacccacatcttgcccttctgttgtaaatacccctcacggaggaaatagttttgctaagaaataaaagtgactattttattagg

SEQ ID NO: 3872 - protein, 617 aa, Rattus norvegicus
  ref <308>: DATABASE ACCESSION NUMBER: SWISS-Prot / P20156
  ref <309>: DATABASE ENTRY DATE: 2002-06-15
MKTFTLPASVLFCFLLLIRGLGAAPPGRSDVYPPPLGSEHNGQVAEDAVSRPKDDSVPEVRAARNSEPQDQGELFQGVDPRALAAVLLQALDRPASPPAVPAGSQQGTPEEAAEALLTESVRSQTHSLPASEIQASAVAPPRPQTQDNDPEADDRSEELEALASLLQELRDFSPSNAKRQQETAAAETETRTHTLTRVNLESPGPERVWRASWGEFQARVPERAPLPPSVPSQFQARMSENVPLPETHQFGEGVSSPKTHLGETLTPLSKAYQSLSAPFPKVRRLEGSFLGGSEAGERLLQQGLAQVEAGRRQAEATRQAAAQEERLADLASDLLLQYLLQAGARQRDLGGRGLQETQQERENEREEEAEQERRGGGEDEVGEEDEEAAEAEAEAEEAERARQNALLFAEEEDGEAGAEDKRSQEEAPGHRRKDAEGTEEGGEEDDDDEEMDPQTIDSLIELSTKLHLPADDVVSIIEEVEEKRKRKKNAPPEPVPPPRAAPAPTHVRSPQPPPPAPARDELPDWNEVLPPWDREEDEVFPPGPYHPFPNYIRPRTLQPPASSRRRHFHHALPPARHHPDLEAQARRAQEEADAEERRLQEQEELENYIEHVLLHRP

SEQ ID NO: 3873 - DNA, 265 bp, Homo sapiens
  ref <308>: DATABASE ACCESSION NUMBER: EMBL / BF223121
  ref <309>: DATABASE ENTRY DATE: 2001-04-02
gctaagaaataaaagtgactattttattaggactttgttctcggttattcacccgtccccttgggcctgtgtggtccttcccaaggggcggtgagggaagcgccagccacagtccccgtctcctcctgcttcctgcccccaaactaaggcgaggggtaagtggggaaagtcctcaaactgtttttagaggagaagaatgtggctcgcacccattaagaaacccgaaattccacttccagcttgggggctggtggtaaagtcatct

SEQ ID NO: 3874 - DNA, 11728 bp, Rattus norvegicus
  ref <308>: DATABASE ACCESSION NUMBER: EMBL / M74439
  ref <309>: DATABASE ENTRY DATE: 2002-06-12
ggggaggggaacacacatatagaagaggagagggaggagttagggggatgttggcctggaaaccgggaaagggaataaccattgtatataagaaatacccaaattaataaagatggagaaaaaagtcattatttctttttcctatcaccatggtatctgttacttaccagctttgaagcaatgcaagttatattttaacctcttgtataaatcttttcggataaaagatcaagcagtgatagaagggaacactgtgaccagaaggactttgatgttcaaaatgcccagaaagtggatttctgctctgttcctgctacagataagttactgtttcaaatctgggcactgtgggaaggtgttggtgtggccgatggactttagtcactggatgaatataaaaataatccttgatgaacttgtacagaggggccatgaggtcactgttctgaaaccttcggcttacttttttcttgatccgaaaaaatcgtctgaccttaagtttgaaattttttctacatctatcagtaaagatgagctgcaaaatcatttcataaaacttttggatgtgtggacttatgagttgccaagagatacatgtttgtcatattctcctatccttcaaaatctagtttatgaattttcttatttttatctaagtatttgtaaagacgctgtttcaaacaagcagctcatgacaaaactacaggaatccaagtttgatgttcttttcgcagatcctgtggcttcctgtggggatctgatagctgaactgctccacattccttttctgtacagtcttagcttctctccaggccacaaacttgaaaagtccattggaaaatttatactccctccatcttatgtgcctgtaattttgtcgggactggctggcaaaatgacattcatagacagggtaaaaaatatgatatgtatgctttatttcgacttttggttcgagagacttagacacaaggaatgggacacgttttacagtgagattttgggtaagttacattttgctcagtagactgaaacctaagtttcacatgtgtgtaagacttatgtccatgaaatacaaagtgaagtaatcttttataggtgatcaaatgtataatgatagcagccatccaagtcacaacctcttgtaaaagctcatgtaattcatcaaatggaagaaggtaactcttctcatacaagacattttggttagctatacctgtgcatagagatgaactagatggtctctgggtgattctttactcatcctgtattttagtaagtttctaagcagttagcaaatcttgtttcatgaaggttcaagaatgatatatttcacagtatcaatatgtatataaacattgaagaaattattttcttttgcctaggccagtgtcttcatttaaaatgaaaatgtagggtccgaaaacatggacaaagggttgagattgtttctatacagtttagtacctgagctctcttcccagtatcactcatttccaatggcagaaacctgcctataacttcagtttcaagagaaatgctgccctttgatgatccacaggcactggtttaaacttaacctatgctcttgcagatatgcatacaaataaatgaaaagatagatcataaaatattttctttatttatttttttaaaatttccctaatcttggaagctattttggtatttcccaagtttagaagtgccactgatgtttctaccagtcccacattttttttttgagtcccttccaaaattcgattgcaaatggctaaattcaacagaagcatggacacacgtgctgaagtttttgaagtcatgtccttatttctcttgaaaatatctgacagctaaactagcccaaaattcctattattttttttttattattaaattgagtatttcttatattcattttgagtgttattccctttcccggtatccggcaaacggggcccccccctcttcttccttatgggtgttcccctcccgaccctccccccattgccgccctccccccaccagtctagttcattgggggtacagtcttagcaggacccagggcttctccttccactggtgctcttactaggatattcattgctacctatgaggtcagagtccagggtcagtccatttatagtctttaggtagcggcttagtccctggaagctctggttgctttagcattgttgtacatatggggtctcgagccccttcaaatatgatctataaatcagtttttgatataagttatattatacattaaaatattacattttacatgcacatgttctacataaaacataaattcttccaacattttaaggaaatagatttatactcagcagacagttctgtcaaattttctctgtctctcatttgctcattttccctatataggaaggcccaccaccgtagatgagacaatgagcaaagtagaaatatggcttattagatcctattgggatttgaaatttccccacccaacattaccaaatgttgactatattggaggactccattgcaaacctgctaaacccttgcctaaggtaaatacattctttttgtgtttttcatttcatatcatttcggatgaaatgttctacatctttcattacattcttctcccactaatagagatatgtgggaagtggaattaaaagtcctgctaaatgggagctaaataaacccagaaaagaggatgacagacataaaaaaatatatcagtgagttaagtcatgtaggctattggagtgattagcaattgggtaaagttctttaccaagcaaccataagaaaatgagtttgaattcaattctgttagatgaaaaatgtaattctgttacaaatttaccaatagttcacacaatatatttgcattcgttagctttcaattcaccagaggaaaacattgagaacatttgttgaacaagtatgagtatactacatactgctgcctgtgtttttccatgccagttctgtcttttgtatgttttgtatgattctatacattcctaagaatacttcaatttttattttcctagagttcttttgtaaagctttcataagtgattgttctacaattgctattgtgtgaccgagaaatgatttattcacaggatatggaagaatttgtccagagctctggagagcacggtgtggtggtgttttctctggggtcaatggtcagcaacatgacagaagaaaaggccaacgcaattgcatgggcccttgcccagattccacaaaaggtgagataaagtgcccatgggaggtgactgtaaactgagactgtaaaagtactcagaaagtctgattctaacagtgattgtgtgaaacctaaaggtttagctaatgtctaatttaccaagccaaattacaaacagaaacacacaagagatgtcacaatacagaggatatttttgactacaagtgccttgaatatcaatcttgtgatttctgtaggtacattctgaaatggtggcattctgatgacaagggtcatgactgtgaagggcataggttgatatagaaaaattcttcttgatttctcataaaatgataatagttgcagccaattgttagttcttgtgaaccaaaaccaacatgtacagaacttgtgcaactgaaaacacaacaaatctaagacaacccttcactagtggatgaccacacatgggaaaatatttggaaaggacaaatggctccttaaaatttattgtttgattttaattttgatgataaaagcatacatagttaatactgcacaggtcaaattaatacattgggctttcacaatgcactggcaatttattggagtatttaacacaaacccgttgtggagctgcttcccagagactgtgacttgacacaatttcatactgtaactcaggttagtggcttcaatagccagaaactctccattcctcagactcctgaggtaggaagatagatgatttttaagaacttaaatagtagggtgggtaaggaagagggtgatttagtgaagattggggtaaggagggatgaataagaaaaaaacattatatgaaactcttagggaaatgaaaaaagagatatcaatgtaaatgtgtggtcctagtaattatttggagttcaggtatgcagatgatgccaacatgctctgaacctttggtccacagcaactgctcttcaaagggttgcatgtctatgttgttgtaaaaatataaaataaatggtccaattgtcttttaccctgcttggtccgcaccacggtccccaagatatcttctagatatcttggtggaaacacatcccagccacactttcctaaactcaaacccccacataaaagaacatacaacacaataatcttagatccaattgtaagatataattcccacttaaacatacaaagcccagtaccatccatcccttgagaacattaataacaacctgtaaatacacagagcagaatcataacatcacctgccatggcttctcccctctctccatctcctcttctcctcctctctcccttagtctcctcctcttccttcaaacatctctcccgcccatccatccttctcctccaatgacaggcctccttctatcctgtagctgcctcacctgtgtcatcatcctatatttcacccttttgtctaattaaaaaaaacttttctctcaaatataagctgagcacaactactatcattttgtaattaagagcataaaatatatctaacaccagtccaacactatatcagttaaacagaacatttagttatccattccagcttgagaaaagcttaaaatctgtattatatcttggctagcttgtatactacctgataactatccaataaaatatgtatatttagcgttaaacagcctgataggctatgagactatgtcttcaaccctgtcagaaatctgggaatgaccaaatatctatacacataggaagcctaacacggcttccagaactgagaggttgtagagacaaatctccactagcacagtcccctgttagcaacatgtgagcacaagccttctggcccaaaatcaactgacagactctagaaatgcagattttaaagggctgatcaccctgtcttggcagagtttatcagtcaactatttgcataatttgtccatttctggacagtattagtctgcagatgaaacaggcagttttgtgtagtggctgcctagccacaaagtattgcatcacctggaggtagagatgttcacattcttcattaaatccaccaaaggggaactgttaggagcagacatgtctcagcaaaagataaataactttaaatctcaattttgtggatttctgacgttttttaaaaccatctacttatataagacaatatgtactcttgtctttatatcttaataatatcttgaaagttctctcacaaagtcagtaatatgtttgctatttggcccttaactcacatgtgtaatcaactcagatgtttgtaatgacatcaatagaaggactggctctaaaccttgtacttttaaactcttttgacaaataaattctataccaaagcaaagatatgatttcggcttagttaccaaatgagattatgactgtagctactcacacaactccattcctggaccattccaacactacaatatggaagggttcttccagatgagttagatgactccatagtcctatgatccaacacgttggctattaattccaagtactcatgggcaaagagatttctgaatgggaaacaaaaatcaatgacacacaatcaatgacaaaaaaattgaaattcaagtaagattacataaaataagtgaacaaatataaaactccacagtgtttaaaatgtagttttattacaatattaagactggaatattagagatgtcaaaatcatttagatgaaataaattattaaaaatttgccaatactctttgcagatgaattatgtcaccatggcaacgtactaatattttcctgtatcattaactgtctcatttgtctaaacatttcttcctcaaaagtggagattatggttacctgtgcgagtgtaacacaaaaaatgctgacactattgtgtgagtcttctgagttctcagtacttactgcttctgaccctctcatctatccatgggaggtattcagagcagttttctctatccttaaaaaaatgctacattttaaaattgtttctcttttagaaattataattatatcatttctgcctttccattcctcctttcaaacactcccataaacgtgcccccttggtctttttcaaatacaccgagctctgttttccattacttgttacatacacatatttatgtctctacacttatattcctaaatatatcctgctctgtctttataatgttaaatatgactgcagtcaacaaaattgtctaacatttaacaggttctttggaaatttgatggcaaaaccccagcaacattaggacccaataccagagtctacaagtggctcccgcagaatgacctcctgggtaagtctctggaaatcaaatgcaacatcatgactgagtaactgattactgtagctatttcttttaacttcaaactcttcgtatcacacatacttcatggattatttatttaagataacaagttctgacatggatttggtctttttatccctcatttctttcttccttttcttattcctatctttctctttttttaagtcaaggggattttattctaattaattattgttaactagaaacaaatatcaaactctgatttctgcacacaacttatatgaatatgttggccatacacatagtttctaagaggtatagtcccataccttatttactgttaaaagactcaatcctaacaccacttcctttttctttctccttctgactttacattttaatcattttgcataaacatgtgtttaccagtgcctaactctcaacatgcagattgttaaggttaaataactccctcggtttacaacagaatgattcttaatccactcagagcaaccaaggtcaactttaaaacattgttaaattggttattttatttatttacatttaaagtgttattccccttcccatgttcccttccacaaagccactattacctgatttttttttcatacctctatgtgggtgctcccacagtctcctcaaatactactggctcagcggcctagttttcccctatcttgagtcatcaagcctccacagactcaatgggattccctcaactgatgccagataagggcatcctttctcaaatattcagctggagccatggaacactctgtttgtatctttggttggtggtttagtccctgagaatttacgaaggtctggttggtagatattgttgttcttcctatggggatgtaaaccccttcagctccctcactctttgccctaacttttccataggggtcatcaagctcactctgatagttgactgcaagtatccatatccgtattggtcaggctctggaaaagccttctaggggacagctatatcaggttcttgtcatatcaatggtacctgggtttgttgtctgctgaggggatggatcccttggtggagcagactctggatgccctttctttcagtttctgctctactcattgtccctgcttttccttttgacaggaggaattctggtttaagatttttgaggtgggtggttgggcccatccctcaaacagaggccttggctatccattgaatatggtctctgcagactttctctcccctttgttggttatttcagctaatgtcctcctgtttgttcctagaaacttcttgagtccctggaacctggtgctttctaatgtctttcactagttgcatctacacacctcaattcaaatcctggccctctgtacatctcccttatatcctcctatatctgaaatgccatagaatctttcccttcctctcctttcctgctccaagatcctcctaccctctacttattttgattattttctactccatttgagtatgactgaaacatccacatttgtcttcttgaacttcacatggtctgtgagatgtgtcattagaattttgagctttctatgtcttataaccactaatcagtgagtacatacaatgtgtgttcttttgtgcctgggttacctcactcaggatgagattttctagttccttccacttcccttcaaatttcaagaagtcatttttttaacagctgagtaatattccattgtgtaaatgtgccacattttctgtatgcactcgtctgttcagggacatctgggttgttatcatcttctggctattttaaataaagctgctatgaacatagtggagcacagttttttgttatatgttgagacatattttgggtatatgcccaggagtggtatagctgtatgctcaggtagcactatgtcatattttctgaggaaccacgaaattgacttccagaatggttgtaccagttggcagtcccaccagcattggaggactgttcctctttctccatatccttaccagaaactgctgtcacccgagtttttgatcttaatcactgggactggtgtgaggtggaatctcagggtcattttgatttgcattttcctgacgactgaggatgttgaacatttctttaagggcttctcacccactcaatcttccttagataataattctgcttagttttataccccatttttaaatggggttattttgttctctggagccaagcttttttagttctttgtatattttgcatgttacccctctattggataggtttggtaaagatcttttgacaatctgtgggatttccattttttcactcactatttttatctactaggacttcatatgttcaaccaaaaaagggtttttcatacctcaagtctcaaggccacattcaaatttgcaaaaatacttctccagaaatttagtttcttcttgctctgagaaagaaaaatattttagagatcttatgattttatgaatctttatgtaaaaacatctcctttcagttcctcttagtatacatatctctttccaagtccaaaactgctaatcaatgttaatctgaatttatcttcttgtaggtcacccaaaaaccaaagcctttgtaactcatggtggagccaatggcctctatgaggcaatctatcatggaatccctatgattggcattcctctgtttggagatcaacctgataatattgcccacatggtggccaaaggagcagctgtttcattgaatatcaggacaatgtcaaagttagattttctcagtgcactggtggaagtcatagacaatccgttgtgagtataactttctataatcattcatttattcattcaatcaatcagtcaatcacttgcttattcatatatatatacgttcattgttttcttaccaaagacaaacaaacgagaattatactgatatgaaccgacatatattagggcacgattcagtacaaacattatactctcctttactcattgtttttaaattccttgtaaggccttatgttattttgctatttaaatcatggtagtcttaagtgtgcaacccttctgctttaccttccacactacttggccaagaagtatttttgacacccctggacaataccccaaaagaaatctttcatttcttgtgtgggtttttttttattaagaattccatggttattgaaggagaatccatccggttagatgagcaaagttcattaaaattatatatgtacatagacctggaatagaatgtaaggtataagtagctaatagtttaattctttttttgtcatacattcctgttgttattgtctctatttctctcctcttctcctcttcccaattccctaattagatccctcaaaatctgctatctcccttaaccctattcacacagtcttctctatttacacccttcccagtctctgaggactttctactcttcatattcttctaagagataagttgaatcttaaattgtaaatgactgtaatatgaatactaatgaatgaggatgttttaatgagaagaaagacacagttttgctcttgtgctttgaaattaaaaccattgtaattcttacctgtttttctacatcaaactgatatttaggagtggtaactcaggcctctatgtcaccctctacttgtgtacccatcaataattatttcaacagtagagtcaaatgcacttgcatcatgcttctttgtgaaattccatcaacttttctagagtcagaatgttaacaaaaaatgaaggtcagcaataatatcaaaaattaggctcaatgggtaagagcagggttttttgtagtattcattccatccactgatgacaattttatcacttatagctataaaaaaaatgttatgttgttgtcaaccattcaccatgaccagcctatgaagcccctggacagagctgtcttctggattgagtttatcatgcgccacaaaggggccaagcacctgagaccacttggacataaccttccctggtaccagtaccactctctggatgtgattggattcctgctcacctgttttgcagtcattgcagctcttactgtaaaatgtctcttgttcatgtaccgattctttgtaaagaaggaaaagaaaatgaagaatgagtagagctcattgacaatgcactacagaaatgaaatttcagcgtcattctaatttatgaaccaccttctaaaaattactaattttttatcaaggtagataacctttgtaggaagacatataactccgtgaatactgatatgtactcaaaaatccatcatttttaaattttaaaaccacttaatgtaaaagttacattgtagaaaaatgtgcagaataaaattattcttgatagagtccaaataatcaaagtattaaccttaaaatatttgaatagtgtccattagcttctttgtctaatactgaatctgtagctttcatacaataaaatgtagataacttgtacacgataaatactggcatataattttttttctgtaatagacctaattacttgttgtctgggataaagtgtggttagtttggatatcagttttaaaggaatctgttggctcttttgttcctctaacataatatgctaacatagagcatctcaagggaaaagcagaacagtttatttggagttgtgaccacagttccttaaaatgtagagtagcggagaaggcagggcagcagtcatccagaggaggaagctcacttgtcacatctcaaccatatatggaaagcagagagtgagcaagaagtagggctaagctatgaactttcaaagcttagtcgagtgacgtacttcatccaaaaagctttaaccactttaattaagattccataacctcaatctgcactacaaattttggaaaatgtgctcaagttcataaacctatctgaaacattttacattcaaaccaataacaggaaatcattctgtttcttaacttttttagcacaccttatgctgttaacattctagtcctccaagttctaacacaccaccatagaacacctgtacttcttcagtatactttaactatgatcatgaggaataatgttcattggaaatgaaacttatgaacagggaacaaattgaagccctaaataaagtaaacttagtattgagattggatatttgtgacactggttgtcattcatatatacatatacagcacagatttagactctggagaacca

SEQ ID NO: 3875 - protein, 530 aa, Rattus norvegicus
  ref <308>: DATABASE ACCESSION NUMBER: SWISS-Prot / AAA42314
  ref <309>: DATABASE ENTRY DATE: 2001-10-16
MPRKWISALFLLQISYCFKSGHCGKVLVWPMDFSHWMNIKIILDELVQRGHEVTVLKPSAYFFLDPKKSSDLKFEIFSTSISKDELQNHFIKLLDVWTYELPRDTCLSYSPILQNLVYEFSYFYLSICKDAVSNKQLMTKLQESKFDVLFADPVASCGDLIAELLHIPFLYSLSFSPGHKLEKSIGKFILPPSYVPVILSGLAGKMTFIDRVKNMICMLYFDFWFERLRHKEWDTFYSEILGRPTTVDETMSKVEIWLIRSYWDLKFPHPTLPNVDYIGGLHCKPAKPLPKDMEEFVQSSGEHGVVVFSLGSMVSNMTEEKANAIAWALAQIPQKVLWKFDGKTPATLGPNTRVYKWLPQNDLLGHPKTKAFVTHGGANGLYEAIYHGIPMIGIPLFGDQPDNIAHMVAKGAAVSLNIRTMSKLDFLSALEEVIDNPFYKKNVMLLSTIHHDQPMKPLDRAVFWIEFIMRHKGAKHLRPLGHNLPWYQYHSLDVIGFLLTCFAVIAALTVKCLLFMYRFFVKKEKKMKNE

SEQ ID NO: 3876 - DNA, 2107 bp, Homo sapiens
  ref <308>: DATABASE ACCESSION NUMBER: Refseq / NM_001077
  ref <309>: DATABASE ENTRY DATE: 2000-10-31
ggcacgaggaaagaaacaacaactggaaaagaagcattgcataagaccaggatgtctctgaaatggatgtcagtctttctgctgatgcagctcagttgttactttagctctgggagttgtggaaaggtgctggtgtggcccacagaatacagccattggataaatatgaagacaatcctggaagagcttgttcagaggggtcatgaggtgattgtgttgacatcttcggcttctattcttgtcaatgccagtaaatcatctgctattaaattagaagtttatcctacatctttaactaaaaatgatttggaagatttttttatgaaaatgttcgatagatggacatatagtatttcaaaaaatacattttggtcatatttttcacaactacaagaattgtgttgggaatattctgactataatataaagctctgtgaagatgcagttttgaacaagaaacttatgagaaaactacaagagtcaaaatttgatgtccttctggcagatgccgttaatccctgtggtgagctgctggctgaactacttaacataccctttctgtacagtctccgcttctctgttggctacacagttgagaagaatggtggaggatttctgttccctccttcctatgtacctgttgttatgtcagaattaagtgatcaaatgattttcatggagaggataaaaaatatgatatatatgctttattttgacttttggtttcaagcatatgatctgaagaagtgggaccagttttatagtgaagttctaggaagacccactacattatttgagacaatggggaaagctgaaatgtggctcattcgaacctattgggattttgaatttcctcgcccattcttaccaaatgttgattttgttggaggacttcactgtaaaccagccaaacccttgcctaaggaaatggaagagtttgtgcagagctctggagaaaatggtattgtggtgttttctctggggtcgatgatcagtaacatgtcagaagaaagtgccaacatgattgcatcagcccttgcccagatcccacaaaaggttctatggagatttgatggcaagaagccaaatactttaggttccaatactcgactgtataagtggttaccccagaatgaccttcttggtcatcccaaaaccaaagcttttataactcatggtggaaccaatggcatctatgaggcgatctaccatgggatccctatggtgggcattcccttgtttgcggatcaacatgataacattgctcacatgaaagccaagggagcagccctcagtgtggacatcaggaccatgtcaagtagagatttgctcaatgcattgaagtcagtcattaatgaccctatctataaagagaatatcatgaaattatcaagaattcatcatgatcaaccggtgaagcccctggatcgagcagtcttctggattgagtttgtcatgcgccataaaggagccaagcaccttcgggtcgcagcccacaacctcacctggatccagtaccactctttggatgtgatagcattcctgctggcctgcgtggcaactatgatatttatgatcacaaaatgttgcctgttttgtttccgaaagcttgccaaaacaggaaagaagaagaaaagggattagttatatcaaaagcctgaagtggaatgaccaaaagatgggactcctcctttattccagcatggagggttttaaatggaggatttcctttttcctgcgacaaaacgtcttttcacaacttaccctgttaagtcaaaatttattttccaggaatttaatatgtactttagttggaattattctatgtcaatgatttttaagctatgaaaaataataatataaaaccttatgggcttatattgaaatttattattctaatccaaaagttaccccacacaaaagttactgagcttccttatgtttcacacattgtatttgaacacaaaacattaacaactccactcatagtatcaacattgttttgcaaatactcagaatattttggcttcattttgagcagaatttttgtttttaattttgccaatgaaatcttcaataattaaaaaaaaaaaaaaaaaaaaaaaaa

SEQ ID NO: 3877 - protein, 530 aa, Homo sapiens
  ref <308>: DATABASE ACCESSION NUMBER: SWISS-Prot / O75795
  ref <309>: DATABASE ENTRY DATE: 2001-10-16
MSLKWMSVFLLMQLSCYFSSGSCGKVLVWPTEYSHWINMKTILEELVQRGHEVIVLTSSASILVNASKSSAIKLEVYPTSLTKNDLEDFFMKMFDRWTYSISKNTFWSYFSQLQELCWEYSDYNIKLCEDAVLNKKLMRKLQESKFDVLLADAVNPCGELLAELLNIPFLYSLRFSVGYTVEKNGGGFLFPPSYVPVVMSELSDQMIFMERIKNMIYMLYFDFWFQAYDLKKWDQFYSEVLGRPTTLFETMGKAEMWLIRTYWDFEFPRPFLPNVDFVGGLHCKPAKPLPKEMEEFVQSSGENGIVVFSLGSMISNMSEESANMIASALAQIPQKVLWRFDGKKPNTLGSNTRLYKWLPQNDLLGHPKTKAFITHGGTNGIYEAIYHGIPMVGIPLFADQHDNIAHMKAKGAALSVDIRTMSSRDLLNALKSVINDPIYKENIMKLSRIHHDQPVKPLDRAVFWIEFVMRHKGAKHLRVAAHNLTWIQYHSLDVIAFLLACVATMIFMITKCCLFCFRKLAKTGKKKKRD

SEQ ID NO: 3878 - DNA, 936 bp, Rattus norvegicus
  ref <308>: DATABASE ACCESSION NUMBER: EMBL / M74494
  ref <309>: DATABASE ENTRY DATE: 2000-03-04
accgtcacggtatgtctgacgctcactgccaagcgcatggcgaggaagaactgcctggtgaagaacctggaagctgtggagaccttggggtccacatccaccatctgctccgacaagactggaactctgactcagaaccggatgacagtggctcacatgtggtttgacaatcaaatccatgaagctgacaccacagagaatcagagtggggtctcctttgacaagacgtcagccacctggttcgctctgtccagaattgctggtctctgtaacagggcagtgtttcaggctaaccaagaaaacctgcctatccttaagcgtgcagtagcgggagatgcttccgagtcggcgctcttaaagtgcatcgaggtctgctgtggctccgtgatggagatgagggagaagtacaccaagatagtggagattcctttcaactccaccaacaagtaccagctctccattcacaagaacccaaacgcatcggagcctaagcacctgctagtgatgaagggcgccccagaaaggatcctggaccgatgcagttctatcctcctccacggcaaggagcagcccctggacgaagagctgaaggacgcctttcagaatgcctacctagagctggggggccttggagagcgtgtgctaggtatgcaggtgaccgccatggctcctgagcacagctgtgtcaagcacagcgatctccgtgttctcggggtgttcctcttaacgtaggggagccacgctgctgattacattgtttaaagcagaggtgtggagaaataatggttatattggcaaacagtgttgttgcttggctgacctgtggcttcacgatatcagttctatatggcaggaggtgggggtgggcaatttattgtctaacctcattgttatggccatggtctgtaagcttaattaaaatctgtttgtttctgg

SEQ ID NO: 3879 - protein, 1023 aa, Rattus norvegicus
  ref <308>: DATABASE ACCESSION NUMBER: SWISS-Prot / P06685
  ref <309>: DATABASE ENTRY DATE: 2002-06-15
MGKGVGRDKYEPAAVSEHGDKKSKKAKKERDMDELKKEVSMDDHKLSLDELHRKYGTDLSRGLTPARAAEILARDGPNALTPPPTTPEWVKFCRQLFGGFSMLLWIGAILCFLAYGIRSATEEEPPNDDLYLGVVLSAVVIITGCFSYYQEAKSSKIMESFKNMVPQQALVIRNGEKMSINAEDVVVGDLVEVKGGDRIPADLRIISANGCKVDNSSLTGESEPQTRSPDFTNENPLETRNIAFFSTNCVEGTARGIVVYTGDRTVMGRIATLASGLEGGQTPIAEEIEHFIHLITGVAVFLGVSFFILSLILEYTWLEAVIFLIGIIVANVPEGLLATVTVCLTLTAKRMARKNCLVKNLEAVETLGSTSTICSDKTGTLTQNRMTVAHMWFDNQIHEADTTENQSGVSFDKTSATWFALSRIAGLCNRAVFQANQENLPILKRAVAGDASESALLKCIEVCCGSVMEMREKYTKIVEIPFNSTNKYQLSIHKNPNASEPKHLLVMKGAPERILDRCSSILLHGKEQPLDEELKDAFQNAYLELGGLGERVLGFCHLLLPDEQFPEGFQFDTDEVNFPVDNLCFVGLISMIDPPRAAVPDAVGKCRSAGIKVIMVTGDHPITAKAIAKGVGIISEGNETVEDIAARLNIPVNQVNPRDAKACVVHGSDLKDMTSEELDDILRYHTEIVFARTSPQQKLIIVEGCQRQGAIVAVTGDGVNDSPALKKADIGVAMGIVGSDVSKQAADMILLDDNFASIVTGVEEGRLIFDNLKKSIAYTLTSNIPEITPFLIFIIANIPLPLGTVTILCIDLGTDMVPAISLAYEQAESDIMKRQPRNPKTDKLVNERLISMAYGQIGMIQALGGFFTYFVILAENGFLPFHLLGIRETWDDRWINDVEDSYGQQWTYEQRKIVEFTCHTAFFVSIVVVQWADLVICKTRRNSVFQQGMKNKILIFGLFEETALAAFLSYCPGMGAALRMYPLKPTWWFCAFPYSLLIFVYDEVRKLIIRRRPGGWVEKETYY

SEQ ID NO: 3880 - DNA, 4108 bp, Homo sapiens
  ref <308>: DATABASE ACCESSION NUMBER: EMBL / D00099
  ref <309>: DATABASE ENTRY DATE: 1998-03-11
gaattcttaagtctaagggacttgctcctgatcttcctgaagatctctaccatttaattaagaaagcagttgctgttcgaaagcatcttgagaggaacggacacgtggcaacagcggtacgagcccgggcggcggcagcaacagcggcggcggcatcggcccgagccgcggcccgctcccaccctcccgccccgcggcagccctagctccctccacttggctcccctggtcccgctcgctcggccgggagctgctctgtgcttttctctctgattctccagcgacaggacccggcgccgggcactgagcaccgccaccatggggaagggggttggacgtgataagtatgagcctgcagctgtttcagaacaaggtgataaaaagggcaaaaagggcaaaaaagacagggacatggatgaactgaagaaagaagtttctatggatgatcataaacttagccttgatgaacttcatcgtaaatatggaacagacttgagccggggattaacatctgctcgtgcagctgagatcctggcgcgagatggtcccaacgccctcactccccctcccactactcctgaatggatcaagttttgtcggcagctctttggggggttctcaatgttactgtggattggagcgattctttgtttcttggcttatagcatccaagctgctacagaagaggaacctcaaaacgataatctgtacctgggtgtggtgctatcagccgttgtaatcataactggttgcttctcctactatcaagaagctaaaagttcaaagatcatggaatccttcaaaaacatggtccctcagcaagcccttgtgattcgaaatggtgagaaaatgagcataaatgcggaggaagttgtggttggggatctggtggaagtaaaaggaggagaccgaattcctgctgacctcagaatcatatctgcaaatggctgcaaggtggataactcctcgctcactggtgaatcagaaccccagactaggtctccagatttcacaaatgaaaaccccctggagacgaggaacattgccttcttttcaacaaattgtgttgaaggcaccgcacgtggtattgttgtctacactggggatcgcactgtgatgggaagaattgccacacttgcttctgggctggaaggaggccagacccccattgctgcagaaattgaacattttatccacatcatcacgggtgtggctgtgttcctgggtgtgtctttcttcatcctttctctcatccttgagtacacctggcttgaggctgtcatcttcctcatcggtatcatcgtagccaatgtgccggaaggtttgctggccactgtcacggtctgtctgacacttactgccaaacgcatggcaaggaaaaactgcttagtgaagaacttagaagctgtggagaccttggggtccacgtccaccatctgctctgataaaactggaactctgactcagaaccggatgacagtggcccacatgtggtttgacaatcaaatccatgaagctgatacgacagagaatcagagtggtgtctcttttgacaagacttcagctacctggcttgctctgtccagaattgcaggtctttgtaacagggcagtgtttcaggctaaccaggaaaacctacctattcttaagcgggcagttgcaggagatgcctctgagtcagcactcttaaagtgcatagagctgtgctgtggttccgtgaaggagatgagagaaagatacgccaaaatcgtcgagatacccttcaactccaccaacaagtaccagttgtctattcataagaaccccaacacatcggagccccaacacctgttggtgatgaagggcgccccagaaaggatcctagaccgttgcagctctatcctcctccacggcaaggagcagcccctggatgaggagctgaaagacgcctttcagaacgcctatttggagctggggggcctcggagaacgagtcctaggtttctgccacctctttctgccagatgaacagtttcctgaagggttccagtttgacactgacgatgtgaatttccctatcgataatctgtgctttgttgggctcatctccatgattgaccctccacgggcggccgttcctgatgccgtgggcaaatgtcgaagtgctggaattaaggtcatcatggtcacaggagaccatccaatcacagctaaagctattgccaaaggtgtgggcatcatctcagaaggcaatgagaccgtggaagacattgctgcccgcctcaacatcccagtcagccaggtgaaccccagggatgccaaggcctgcgtagtacacggcagtgatctaaaggacatgacctccgagcagctggatgacattttgaagtaccacactgagatagtgtttgccaggacctcccctcagcagaagctcatcattgtggaaggctgccaaagacagggtgctatcgtggctgtgactggtgacggtgtgaatgactctccagctttgaagaaagcagacattggggttgctatggggattgctggctcagatgtgtccaagcaagctgctgacatgattcttctggatgacaactttgcctcaattgtgactggagtagaggaaggtcgtctgatctttgataacttgaagaaatccattgcttataccttaaccagtaacattcccgagatcaccccgttcctgatatttattattgcaaacattccactaccactggggactgtcaccatcctctgcattgacttgggcactgacatggttcctgccatctccctggcttatgagcaggctgagagtgacatcatgaagagacagcccagaaatcccaaaacagacaaacttgtgaatgagcggctgatcagcatggcctatgggcagattggaatgatccaggccctgggaggcttctttacttactttgtgattctggctgagaacggcttcctcccaattcacctgttgggcctccgagtggactgggatgaccgctggatcaacgatgtggaagacagctacgggcagcagtggacctatgagcagaggaaaatcgtggagttcacctgccacacagccttcttcgtcagtatcgtggtggtgcagtgggccgacttggtcatctgtaagaccaggaggaattcggtcttccagcaggggatgaagaacaagatcttgatatttggcctctttgaagagacagccctggctgctttcctttcctactgccctggaatgggtgttgctcttaggatgtatcccctcaaacctacctggtggttctgtgccttcccctactctcttctcatcttcgtatatgacgaagtcagaaaactcatcatcaggcgacgccctggcggctgggtggagaaggaaacctactattagccccccgtcctgcacgccgtggagcatcaggccacacactctgcatccgacacccaccccctctttgtgtacttcagtcttggagtttggaactctaccctggtaggaaagcaccgcagcatgtggggaagcaagacgtcctggaatgaagcatgtagctctatggggggaggggggagggctgcctgaaaaccatccatctgtggaaatgacagcggggaaggtttttatgtgcctttttgtttttgtaaaaaaggaacacccggaaagactgaaagaatacattttatatctggatttttacaaataaagatggcagaaactgactttattttaagggttccagcatcccagagccaaaaacaaatagtgccatctgccccagtagaagatagatatctctttgagccactgcacaatggtgagaactgtagtgatgtaatagatgcactatggccctgaagaacagccaaaggtgcacaggttcgaagacaccagactcggatcattttatcacaacttccagctgctatcatggtattctcatagtttacagccatgtctgatatttcagcagcatgtcctcttaaggtagctaacaacctcccatcatctgttgcccatattttcacaagacagtcatcagaaccagtaaatatccgtctgccagttcgatcaaaagttacacagtacacagatgacaagtgtccaagaattc

SEQ ID NO: 3881 - protein, 1023 aa, Homo sapiens
  ref <308>: DATABASE ACCESSION NUMBER: SWISS-Prot / P05023
  ref <309>: DATABASE ENTRY DATE: 2002-06-15
MGKGVGRDKYEPAAVSEQGDKKGKKGKKDRDMDELKKEVSMDDHKLSLDELHRKYGTDLSRGLTSARAAEILARDGPNALTPPPTTPEWIKFCRQLFGGFSMLLWIGAILCFLAYSIQAATEEEPQNDNLYLGVVLSAVVIITGCFSYYQEAKSSKIMESFKNMVPQQALVIRNGEKMSINAEEVVVGDLVEVKGGDRIPADLRIISANGCKVDNSSLTGESEPQTRSPDFTNENPLETRNIAFFSTNCVEGTARGIVVYTGDRTVMGRIATLASGLEGGQTPIAAEIEHFIHIITGVAVFLGVSFFILSLILEYTWLEAVIFLIGIIVANVPEGLLATVTVCLTLTAKRMARKNCLVKNLEAVETLGSTSTICSDKTGTLTQNRMTVAHMWFDNQIHEADTTENQSGVSFDKTSATWLALSRIAGLCNRAVFQANQENLPILKRAVAGDASESALLKCIELCCGSVKEMRERYAKIVEIPFNSTNKYQLSIHKNPNTSEPQHLLVMKGAPERILDRCSSILLHGKEQPLDEELKDAFQNAYLELGGLGERVLGFCHLFLPDEQFPEGFQFDTDDVNFPIDNLCFVGLISMIDPPRAAVPDAVGKCRSAGIKVIMVTGDHPITAKAIAKGVGIISEGNETVEDIAARLNIPVSQVNPRDAKACVVHGSDLKDMTSEQLDDILKYHTEIVFARTSPQQKLIIVEGCQRQGAIVAVTGDGVNDSPALKKADIGVAMGIAGSDVSKQAADMILLDDNFASIVTGVEEGRLIFDNLKKSIAYTLTSNIPEITPFLIFIIANIPLPLGTVTILCIDLGTDMVPAISLAYEQAESDIMKRQPRNPKTDKLVNERLISMAYGQIGMIQALGGFFTYFVILAENGFLPIHLLGLRVDWDDRWINDVEDSYGQQWTYEQRKIVEFTCHTAFFVSIVVVQWADLVICKTRRNSVFQQGMKNKILIFGLFEETALAAFLSYCPGMGVALRMYPLKPTWWFCAFPYSLLIFVYDEVRKLIIRRRPGGWVEKETYY

SEQ ID NO: 3882 - DNA, 936 bp, Rattus norvegicus; identical to SEQ ID NO: 3878
  ref <308>: DATABASE ACCESSION NUMBER: EMBL / M74494
  ref <309>: DATABASE ENTRY DATE: 2000-03-04

SEQ ID NO: 3883 - protein, 1023 aa, Rattus norvegicus; identical to SEQ ID NO: 3879
  ref <308>: DATABASE ACCESSION NUMBER: SWISS-Prot / P06685
  ref <309>: DATABASE ENTRY DATE: 2002-06-15

SEQ ID NO: 3884 - DNA, 4108 bp, Homo sapiens; identical to SEQ ID NO: 3880
  ref <308>: DATABASE ACCESSION NUMBER: EMBL / D00099
  ref <309>: DATABASE ENTRY DATE: 1998-03-11

SEQ ID NO: 3885 - protein, 1023 aa, Homo sapiens; identical to SEQ ID NO: 3881
  ref <308>: DATABASE ACCESSION NUMBER: SWISS-Prot / P05023
  ref <309>: DATABASE ENTRY DATE: 2002-06-15

SEQ ID NO: 3886 - DNA, 895 bp, Rattus norvegicus
  ref <308>: DATABASE ACCESSION NUMBER: EMBL / M75153
  ref <309>: DATABASE ENTRY DATE: 2000-03-04
atgggcacccgcgacgacgagtacgactacctctttaaagttgtccttattggagattctggtgttgggaagagtaacctcctgtctcgatttactcggaatgagtttaatctggaaagcaagagtaccattggagtagaatttgcaacaagaagcatccaggttgatgggaaaacaataaaggcacagatatgggacacagcagggcaggagcggtacagggctataacgtctgcatactatcgtggagcagtaggtgccttattggtttatgacattgctaagcatctcacatatgaaaatgtagaacgatggctgaaagaactgagagatcatgctgatagtaacattgttatcatgcttgtgggcaataagagtgatttacgtcatctcagggcagttcctacagatgaagcaagagcatttgcagagaagaatggtttgtcgttcattgagacatctgctctagattctacaaatgttgaagctgcttttcagacaattctaacagagatataccgcattgtttctcagaagcaaatgtcagacagacgtgaaaatgacatgtctccaagcaacaatgtggttcctattcatgtcccacccaccactgagaacaagccaaaggtgcagtgctgtcagaacatctaaggcgcctctctcccctagacggctgtgtatagtccatttcccaggtctgagatttaaatatatttgtaattcttgtggtcactttctgtgttttattacttccttacacttaagaatcttcccatgtcttaagtctttgatttggctttataaaatcctcaactttgtcctgaatgactcgagttctttttcatgctatggcttctctagccttagtttaataaactgaatgtttgaagtcctc

SEQ ID NO: 3887 - protein, 216 aa, Rattus norvegicus
  ref <308>: DATABASE ACCESSION NUMBER: SWISS-Prot / P24410
  ref <309>: DATABASE ENTRY DATE: 2002-06-15
MGTRDDEYDYLFKVVLIGDSGVGKSNLLSRFTRNEFNLESKSTIGVEFATRSIQVDGKTIKAQIWDTAGQERYRAITSAYYRGAVGALLVYDIAKHLTYENVERWLKELRDHADSNIVIMLVGNKSDLRHLRAVPTDEARAFAEKNGLSFIETSALDSTNVEAAFQTILTEIYRIVSQKQMSDRRENDMSPSNNVVPIHVPPTTENKPKVQCCQNI

SEQ ID NO: 3888 - DNA, 651 bp, Homo sapiens
  ref <308>: DATABASE ACCESSION NUMBER: EMBL / X53143
  ref <309>: DATABASE ENTRY DATE: 1993-09-12
atgggcacccgcgacgacgagtacgactacctctttaaagttgtccttattggagattctggtgttggaaagagtaatctcctgtctcgatttactcgaaatgagtttaatctggaaagcaagagcaccattggagtagagtttgcaacaagaagcatccaggttgatggaaaaacaataaaggcacagatatgggacacagcagggcaagagcgatatcgagctataacatcagcatattatcgtggagctgtaggtgccttattggtttatgacattgctaaacatctcacatatgaaaatgtagagcgatggctgaaagaactgagagatcatgctgatagtaacattgttatcatgcttgtgggcaataagagtgatctacgtcatctcagggcagttcctacagatgaagcaagagcttttgcagaaaagaatggtttgtcattcattgaaacttcggccctagactctacaaatgtagaagctgcttttcagacaattttaacagagatttaccgcattgtttctcagaagcaaatgtcagacagacgcgaaaatgacatgtctccaagcaacaatgtggttcctattcatgttccaccaaccactgaaaacaagccaaaggtgcagtgctgtcagaacatctaa

SEQ ID NO: 3889 - protein, 216 aa, Homo sapiens; identical to SEQ ID NO: 3887

SEQ ID NO: 3890 - DNA, 895 bp, Rattus norvegicus; identical to SEQ ID NO: 3886
  ref <308>: DATABASE ACCESSION NUMBER: EMBL / M75153
  ref <309>: DATABASE ENTRY DATE: 2000-03-04

SEQ ID NO: 3891 - protein, 216 aa, Rattus norvegicus; identical to SEQ ID NO: 3887
  ref <308>: DATABASE ACCESSION NUMBER: SWISS-Prot / P24410
  ref <309>: DATABASE ENTRY DATE: 2002-06-15

SEQ ID NO: 3892 - DNA, 651 bp, Homo sapiens; identical to SEQ ID NO: 3888
  ref <308>: DATABASE ACCESSION NUMBER: EMBL / X53143
  ref <309>: DATABASE ENTRY DATE: 1993-09-12

SEQ ID NO: 3893 - protein, 216 aa, Homo sapiens; identical to SEQ ID NO: 3887

SEQ ID NO: 3894 - DNA, 1643 bp, Rattus norvegicus
  ref <308>: DATABASE ACCESSION NUMBER: EMBL / M75168
  ref <309>: DATABASE ENTRY DATE: 2000-03-04
ccttgctgttctccaacccctctctttccccttgcttcctctcacctgctctgggactcctaactcagagacctcccttctccccccgccggctggattatggcagagaacgatgtggacaatgagctcttggactatgaagacgatgaggtggagacggccgctggggcagatgggaccgaagctcccgccaagaaagacgtcaagggctcctatgtctccatccacagctccggctttcgagatttcctacttaagccagagttgctccgggccattgttgactgtggctttgagcatccatcagaggtccagcatgaatgcatcccccaggccattctggggatggatgtcctgtgccaggccaagtcaggcatgggaaaaacagcagtgtttgtcctggccacactgcagcagctggagccagttactgggcaggtgtcagtgctggtgatgtgtcacaccagggagctggctttccagatcagcaaggaatatgagcgcttctcaaagtacatgccgaatgtcaaggtggcagtgttttttggcggactgtctatcaagaaggatgaagaggtgctgaagaagaactgcccacacattgttgtggggactcctggccgaattctagccctggcccgaaataagagcctgaacctcaaacacattaaacactttatcttggacgaatgtgacaagatgcttgaacagctcgacatgcgtcgggatgtccaggaaatttttcgcatgaccccccatgagaagcaggtcatgatgttcagtgctaccttgagcaaagagatccgcccagtgtgccgcaagttcatgcaagatcctatggagatcttcgtggatgacgagaccaagttgacactgcacgggttgcagcaatactacgtgaaactgaaggacaacgagaagaaccggaagctctttgaccttctcgatgtcctcgagttcaaccaggttgtgatctttgtgaagtccgtgcagcgctgcatcgccttggcccagcttctagtggagcagaacttgccagccattgctatccaccgcgggatgccccaggaggagaggctctctcggtatcagcagttcaaggattttcagcggaggatacttgtggctaccaacctgtttggccgtggcatggacattgtgcgcgtgaacatcgcttttaactatgacatgccagaggactccgacacctacctgcacagggtggccagagcgggccggtttggcaccaagggcttggcatcacatttgtgtcagacgagaacgatgccaagatcctgaatgacgtgcaggaccgtttcgaggtcaacatcagtgagctgcctgatgagatcgacatttcctcctacattgaacagacacggtagaggaatcacccattctggactgtggcagtctgtgtagaagaggacgaaggggtcagggaggaaacactactgccccacccctgacacctcagcccaccctctccatgcctctctctgcgtcaccaccactcctaaacctagtcctgatttatcagagttgtttgtttgtttgtttgtttttgttttttaacaaaactaagaatgaaaaaaaaaaaaaaaaaaaaaaaaaaaagtaccttctgaggcgaaaagaaccag

SEQ ID NO: 3895 - protein, 428 aa, Rattus norvegicus
  ref <308>: DATABASE ACCESSION NUMBER: SWISS-Prot / Q63413
  ref <309>: DATABASE ENTRY DATE: 2001-10-16
MAENDVDNELLDYEDDEVETAAGADGTEAPAKKDVKGSYVSIHSSGFRDFLLKPELLRAIVDCGFEHPSEVQHECIPQAILGMDVLCQAKSGMGKTAVFVLATLQQLEPVTGQVSVLVMCHTRELAFQISKEYERFSKYMPNVKVAVFFGGLSIKKDEEVLKKNCPHIVVGTPGRILALARNKSLNLKHIKHFILDECDKMLEQLDMRRDVQEIFRMTPHEKQVMMFSATLSKEIRPVCRKFMQDPMEIFVDDETKLTLHGLQQYYVKLKDNEKNRKLFDLLDVLEFNQVVIFVKSVQRCIALAQLLVEQNLPAIAIHRGMPQEERLSRYQQFKDFQRRILVATNLFGRGMDIVRVNIAFNYDMPEDSDTYLHRVARAGRFGTKGLAITFVSDENDAKILNDVQDRFEVNISELPDEIDISSYIEQTR

SEQ ID NO: 3896 - DNA, 1978 bp, Homo sapiens
  ref <308>: DATABASE ACCESSION NUMBER: EMBL / AK026762
  ref <309>: DATABASE ENTRY DATE: 2000-09-29
cactgtgctctgcgagccgaatcatggatcacactgacaatgagttacaaggcactaatagttctggatccttgggtggtcttgatgttcgcagacgaattcctataaagctcatctccaaacaagcaaacaaagcgaaacctgcaccgcgaactcaaagaactataaacaggatgcctgcaaaggctccacctggtgatgaagaaggatttgattataatgaagaagaacggtatgactgtaaagggggtgagctgtttgcaaatcagcgaagatttcctggacaccttttttgggactttcagataaacatcttaggtgaaaaggatgatacaccagttcatttctgtgacaagtgtggattgcctattaaaatctatgggagaatgattccatgcaagcatgttttttgctatgactgtgctattttacatgaaaaaaagggagataagatgtgtccaggctgtagtgatcctgtgcagcgaattgagcagtgtacacgaggttctctcttcatgtgtagcattgttcaagggtgcaagagaacatatttgtctcagagagacttacaggctcatatcaaccatcgccatatgagagctggaaaacctgttacccgtgcttcacttgaaaatgttcatcctcctattgccccaccaccaactgaaatccctgagcgttttataatgccaccagacaagcaccatatgagccatattccgccaaagcagcatatcatgatgccaccacctcctttgcaacatgtgccacatgagcactataatcagccacatgaggatattcgtgctcctccagcagaattgtccatggctccacctccacctcgatcggtcagtcaggaaacctttcgtatttcaacaagaaaacacagcaatttaataaccgtccctattcaggatgactcaaattcaggtgctagagaaccaccacctcctgccccagcacctgctcaccatcatcctgaatatcagggtcaaccagtggtatcgcaccctcatcatattatgcctccacagcaacattatgcaccacccccacctcctccaccaccaataagccatccaatgccacatcctccccaggctgcaggtactcctcacttggtatatagccaagctccacctccaccaatgacctctgctccaccaccaataacccctccccctggacatattattgcccagatgccaccttatatgaatcatcctcctccaggacctcccccgcctcaacatggtggtccacctgtaactgcaccccctcctcaccattataatcctaactcattaccccagttcactgaagatcaaggaactccgagccctccatttacacaaccagggggaatgagtcctggtatatggcctgcaccaagagggccaccaccacctccacgattgcagggtccgccttctcaaaccccacttcctggaccacatcatccagatcagacaagatatagaccgtattaccaatgataatagtattttgaatggaagatatgagggggaaaaaaacttatgtgtagtcaatcttttaagctttgactgttttgggaaggaagagtacctcttatcgaggtagtataaaacacatagggtcttgtttcttaaaatggttttaaatcttgaccttaagattgatttcaagtaccatactgtagtacagataagtggctcagttgagcacagctatattttaacatctctttgttcccctagtttagtaaattgacccagaggtgaccatttgtaaaaaatttgaaaaaatttttcattgttttacttcagaagtattgttttgttaaacccaacgtttagtttttcttgtgatacattttgttaacctgtgtaaaaggattaaatttcaatatggttgtaaaaaaaaaaaaaaaaaaaaaaaaaaaaaaaaaaaaaaaaaaaaaaaaaaaaaaaaaaaaaaaaaaaaaaaaaaaaaa

SEQ ID NO: 3897 - protein, 428 aa, Homo sapiens
  ref <308>: DATABASE ACCESSION NUMBER: Refseq / NP_004631
  ref <309>: DATABASE ENTRY DATE: 2002-04-03
MAENDVDNELLDYEDDEVETAAGGDGAEAPAKKDVKGSYVSIHSSGFRDFLLKPELLRAIVDCGFEHPSEVQHECIPQAILGMDVLCQAKSGMGKTAVFVLATLQQLEPVTGQVSVLVMCHTRELAFQISKEYERFSKYMPNVKVAVFFGGLSIKKDEEVLKKNCPHIVVGTPGRILALARNKSLNLKHIKHFILDECDKMLEQLDMRRDVQEIFRMTPHEKQVMMFSATLSKEIRPVCRKFMQDPMEIFVDDETKLTLHGLQQYYVKLKDNEKNRKLFDLLDVLEFNQVVIFVKSVQRCIALAQLLVEQNFPAIAIHRGMPQEERLSRYQQFKDFQRRILVATNLFGRGMDIERVNIAFNYDMPEDSDTYLHRVARAGRFGTKGLAITFVSDENDAKILNDVQDRFEVNISELPDEIDISSYIEQTR

SEQ ID NO: 3898 - DNA, 1643 bp, Rattus norvegicus; identical to SEQ ID NO: 3894
  ref <308>: DATABASE ACCESSION NUMBER: EMBL / M75168
  ref <309>: DATABASE ENTRY DATE: 2000-03-04

SEQ ID NO: 3899 - protein, 428 aa, Rattus norvegicus; identical to SEQ ID NO: 3895
  ref <308>: DATABASE ACCESSION NUMBER: SWISS-Prot / Q63413
  ref <309>: DATABASE ENTRY DATE: 2001-10-16

SEQ ID NO: 3900 - DNA, 1978 bp, Homo sapiens; identical to SEQ ID NO: 3896
  ref <308>: DATABASE ACCESSION NUMBER: EMBL / AK026762
  ref <309>: DATABASE ENTRY DATE: 2000-09-29

SEQ ID NO: 3901 - protein, 428 aa, Homo sapiens; identical to SEQ ID NO: 3897
  ref <308>: DATABASE ACCESSION NUMBER: Refseq / NP_004631
  ref <309>: DATABASE ENTRY DATE: 2002-04-03

SEQ ID NO: 3902 - DNA, 2819 bp, Rattus norvegicus
  ref <308>: DATABASE ACCESSION NUMBER: EMBL / M76426
  ref <309>: DATABASE ENTRY DATE: 2000-03-04
gctcagcacccaggcgactcgactcgcgagtggcgcggagcggcagggctcgtcttttttctttctccaccgcctccttttccccccttctcccttttctgttggagggggtggggagaggaaagagagacagagagaaaggaaattttttttttccgaagcatcctaaccagtgagctagcgcagagcggcggcccatggcttcgctgtaccaaaggttcaccggcaagatcaacacctcgcgctccttcccggcgcccccggaggccagtcaccttctgggtggccaggggccggaggaggacgccggctcgaagcccctcgggccgcaggcgcaggcggtggcacctcgggagcgcggcggtgctggtggccggccccggttccagtaccaggcgcggagcgactgtgacgaggaggacgagctggtggggagtaatcctccacagagaaactggaaaggaatcgccattgcactgcttgtcatccttgtcatctgctccctgattgtcacctcagtcatcctgctgaccccagcggaagataccagtctgtctcagaagaagaaggtgactgtggaagatcttttcagtgaagacttcaaaatccatgacccagaggcaaagtggataagcgataaggaattcatctacagagaacggaaagggagcgtcatactgcggaacgttgagacaaataattccacggtgttaatagaaggcaaaaaaattgaatcgttaagagccatcagatatgaaatatccccagataaagagtatgcgttgttttcctataatgtggaaccggtataccaacactcccacactggatattatgttctgagcaaaattcctcacggggaccctcagagtctggacccaccagaagtcagcaacgcgaagcttcagtatgcagggtggggcccgaaaggccagcagctgatatttatctttgagaacaacatctactactgtgcccatgttggaaagcaggcgattcgagtggtctctacggggaaggagggtgtgatctacaatggcctcagcgactggctgtatgaagaggagattctgaagagccacatcgcacattggtggtcgccagatggtacaaggctcgcctatgccaccatcaatgattcccgagttccacttatggagctgccaacctacacgggctctgtctaccccactgtgaagccctaccactatcctaaggctggcagtgaaaaccccagcatctccctccacgtcatcggcttgaatggacccacccacgacctggagatgatgccacctgacgacccccgcatgagagagtattacatcaccatggtgaagtgggccaccagcaccaaggttgctgtgacctggctgaaccgggcccagaatgtgtccatcctgaccctctgtgatgccaccacaggtgtctgcactaagaaacacgaggatgaaagtgaagcttggctccacagacagaatgaagagcccgtgttctccaaggatggccggaagtttttctttgtcagagcgatcccacagggaggccggggtaaattctaccacatcactgtatcctcatcccagcccaacagcagcaatgacaacatccagtccattacctctggggactgggatgtgaccgagatcctgacctacgatgagaagcggaataagctctatttcctaagcacagaggacctgccacgaagacgacacctctacagcgccaacacggtagacgacttcaacaggcagtgtctgtcatgtgacctggtggagaactgcacctatgtcagtgcttccttcagtcataacatggacttcttcctgctcaagtgtgaaggccctggcgtacccactgttactgtgcacaataccacggataagagaagaatgtttgacttggaagcaaatgagcaagtgcagaaagccatctacgatcggcagatgcctaaaattgaataccggaaaattgaagtggaagattacagcttgccaatgcaaatcttgaagccggccaccttcactgacacagcccactaccctttattgctcgtggtggatggtactccagggagtcagagcgtgtcagagaggtttgaagtgacctgggagacagtgttggtgagcagccatggagcagtggtggtcaagtgtgacggccgaggcagcggctttcagggaaccaagctcttgcacgaagtacggaggcggctaggcttcctggaggagaaggaccagatggaagctgtgagaaccatgctgaaggagcagtacattgacaagactcgggtagctgtgtttgggaaggattatggtgggtacctgagtacttacatcctcccagccaagggagaaaaccaaggccagactttcacctgcggctctgcactctctccgataacggacttcaaactctatgcctcagcattttccgagaggtaccttggcctccatggactcgacaacagagcgtatgagatgaccaagctggcacacagagtgtcagcactggaggaccagcagttcctgatcatccatgctacggctgacgaaaaaatccatttccagcacacagcagagctcatcacgcagctaatcaagggaaaggccaattacagcttacagatatacccagatgaaagtcactactttcacagcgtggcgctcaaacagcacctgtacaggtccatcatcggattctttgtggaatgtttcaggatccaggacaagctacctacagccacagcgaaagaggacgaggaggaggactaaccacgcttgagacctaaacacagacatggctctttctacaac

SEQ ID NO: 3903 - protein, 859 aa, Rattus norvegicus
  ref <308>: DATABASE ACCESSION NUMBER: SWISS-Prot / P46101
  ref <309>: DATABASE ENTRY DATE: 2002-06-15
MASLYQRFTGKINTSRSFPAPPEASHLLGGQGPEEDAGSKPLGPQAQAVAPRERGGAGGRPRFQYQARSDCDEEDELVGSNPPQRNWKGIAIALLVILVICSLIVTSVILLTPAEDTSLSQKKKVTVEDLFSEDFKIHDPEAKWISDKEFIYRERKGSVILRNVETNNSTVLIEGKKIESLRAIRYEISPDKEYALFSYNVEPVYQHSHTGYYVLSKIPHGDPQSLDPPEVSNAKLQYAGWGPKGQQLIFIFENNIYYCAHVGKQAIRVVSTGKEGVIYNGLSDWLYEEEILKSHIAHWWSPDGTRLAYATINDSRVPLMELPTYTGSVYPTVKPYHYPKAGSENPSISLHVIGLNGPTHDLEMMPPDDPRMREYYITMVKWATSTKVAVTWLNRAQNVSILTLCDATTGVCTKKHEDESEAWLHRQNEEPVFSKDGRKFFFVRAIPQGGRGKFYHITVSSSQPNSSNDNIQSITSGDWDVTEILTYDEKRNKLYFLSTEDLPRRRHLYSANTVDDFNRQCLSCDLVENCTYVSASFSHNMDFFLLKCEGPGVPTVTVHNTTDKRRMFDLEANEQVQKAIYDRQMPKIEYRKIEVEDYSLPMQILKPATFTDTAHYPLLLVVDGTPGSQSVSERFEVTWETVLVSSHGAVVVKCDGRGSGFQGTKLLHEVRRRLGFLEEKDQMEAVRTMLKEQYIDKTRVAVFGKDYGGYLSTYILPAKGENQGQTFTCGSALSPITDFKLYASAFSERYLGLHGLDNRAYEMTKLAHRVSALEDQQFLIIHATADEKIHFQHTAELITQLIKGKANYSLQIYPDESHYFHSVALKQHLYRSIIGFFVECFRIQDKLPTATAKEDEEED

SEQ ID NO: 3904 - DNA, 3556 bp, Homo sapiens
  ref <308>: DATABASE ACCESSION NUMBER: EMBL / M96860
  ref <309>: DATABASE ENTRY DATE: 2000-03-04
agcaaactcgtcttgtctacccaccctccctcccccatcctccccaaaatagccttgtgatttcggaagtatggactaaaatcacactcctccttaccttaccgcttggactctggtggctcccaactcgccgtcagaccccacctgccccggtggtgggaagcgcctggacagaccatgaccacagccaaggagccaagcgcttcggggaaatccgtgcagcagcaggaacaggagctggtggggagtaaccctccgcagaggaattggaaaggaatagcaattgcactgcttgtcattctggtcatctgctccttgatcgtcacctcggtcatacttctgacaccagcggaagataatagtctgtctcaaaagaagaaggtcactgtagaagatctcttcagtgaagacttcaaaattcatgaccccgaggctaagtggataagtgatacagaattcatctacagagaacagaaaggaacagtgagactgtggaatgttgaaacaaatacttctactgtcttaatagaaggcaaaaaaattgaatcattaagagccatcagatatgaaatatctccagatagagagtatgcacttttttcatacaatgtggaacccatatatcaacactcgtatactggatattatgtcctgagcaaaattcctcatggggatcctcaaagtctggacccaccagaagtcagcaatgcaaagcttcagtatgcaggatggggccctaaaggccaacagctgatatttatttttgaaaacaatatctactactgtgcacatgtcgggaaacaggccatccgtgtggtctccactggcaaggaaggtgtgatttacaatggcctcagtgactggctgtatgaagaggagattttgaagacacacatcgcacactggtggtctccggatggcacgagactcgcctacgccgccatcaatgattcccgtgtccccatcatggagctcccaacttacaccggctccatctaccccaccgtgaagccctaccactatcccaaggctggaagtgagaaccccagcatttccctacacgttattggcttaaatggacccacccatgatctggagatgatgccgcctgatgatccacggatgagggagtactacatcaccatggtgaagtgggccaccagcaccaaggtcgccgtgacctggctgaaccgggcgcagaacgtgtccatcctcaccctctgcgacgccaccacgggggtctgcacgaagaaacacgaggatgaaagtgaggcctggctccacagacagaatgaagaacctgtgttctccaaggatggccgaaagtttttcttcatcagagccatcccccagggaggacgagggaaattctatcacatcacggtgtcctcgtcccagcccaacagcagcaacgacaacatccagtccatcacctccggggactgggacgtgaccaagatcctagcctacgatgagaaggggaataagatctacttcctgagcacggaggacctgcctcggagacgacaactctacagtgccaacacggagggcaacttcaacaggcagtgcctctcctgtgacctggttgagaactgcacctacttcagcgcttccttcagccatagcatggacttcttcctgctcaagtgcgaaggtcctggtgttcctatggtgacggtgcacaacacaacagataagaaaaaaatgtttgacctagaaacaaatgaacatgtcaagaaggccataaatgaccgacagatgcctaaagtggaatacagggacattgagattgatgattacaacctgcccatgcagatactgaagccagcaaccttcaccgacaccacccactaccctctgctcctggtggtggatggcaccccgggcagccagagtgtagctgagaagttcgaggtgagctgggagacggtgatggtgagcagccacggcgcggtggtggtaaagtgtgacggccgtggcagcggcttccaagggaccaagctcctgcacgaagtgaggcggcggctgggcttgctggaggagaaggaccagatggaggccgtgcggacgatgctgaaggagcagtacattgacaggacgcgcgtggccgtgttcgggaaggattacggtggctacctgagcacctacatcctcccagcaaagggagaaaatcaaggccagacattcacctgcggctctgctctctctccaataacagacttcaaactctatgcctctgcgttttccgagaggtacttgggcctccatggacttgacaacagagcatacgagatgaccaaggtagcccatcgagtctccgcgctggaagaacagcagttcctgatcattcatcccactgccgatgaaaaaattcatttccagcacacagcagaactcattacacaactaattaggggaaaggctaattacagcttacagatttacccggacgaaagccattactttaccagctccagcctcaaacagcatctgtaccggtccatcatcaacttcttcgtggaatgcttcaggatccaggacaaactgccgacagtcacagcgaaagaggacgaggaggaggactaagctcaggtcgctctaagcacaaacgtggctctttctacaaccagatgcaaccgagggatttccctgccctccctcttccctcggaggggcggggcggggcggggccgggcgtaccatagcatgtgtgtctcggatgcggaaggcagttttgcttgggaaacaagctccttcccggggtcatcactcacggcctccatggcaccagggacaacgctgtccccgcagcagcgcctcctcccggcgcccgagagaccggcacgccacggcccctcccccaaggaacagagcaaaggatggtgccgcaggccccagcccacaggacaccggcccctagattccagccaccaatgcgaagatgagactcgcccacactagcctctgtgttaccgttagcatcacaccctgtctcacgtcgcagtgccatggacgcagcagttacagcaccattgttttagcagtgcgtgttcatatatgggcttgctacttcctgtaatgaggacgttcaacatggtgaggggctacaagaaaacgcttttctgtacagagtcttactgtagctacgctaatggttaacctgatagaattaactcgtatttttctatggttttaacctgatgctccactgtctccgtcaggggttgttttgctgtttggggttgggccttgtttcccttggctttctccagtccacgtgtagactttgcgcttgtttggatgaagaagcagatcggaagtaactgctccctcctcaaggttgtcttcagacgtcttggagacgttcctaaacactgaggggggaagacagccaatagcacccattaaaagaaatacctaaataaaacctctctcccactcagctatgctagggcttggctgtaggtgtgcactgtctatttacatccgtccttacaaccatccttgtcctccttggtaccgtattcaagctctttcccatgacatttggttg

SEQ ID NO: 3905 - protein, 865 aa, Homo sapiens [sequence omitted]

SEQ ID NO: 3906 - DNA, 2819 bp, Rattus norvegicus; identical to SEQ ID NO: 3902
  ref <308>: DATABASE ACCESSION NUMBER: EMBL / M76426
  ref <309>: DATABASE ENTRY DATE: 2000-03-04

SEQ ID NO: 3907 - protein, 859 aa, Rattus norvegicus; identical to SEQ ID NO: 3903
  ref <308>: DATABASE ACCESSION NUMBER: SWISS-Prot / P46101
  ref <309>: DATABASE ENTRY DATE: 2002-06-15

SEQ ID NO: 3908 - DNA, 3556 bp, Homo sapiens; identical to SEQ ID NO: 3904
  ref <308>: DATABASE ACCESSION NUMBER: EMBL / M96860
  ref <309>: DATABASE ENTRY DATE: 2000-03-04

SEQ ID NO: 3909 - protein, 865 aa, Homo sapiens [sequence omitted]

SEQ ID NO: 3910 - DNA, 1341 bp, Rattus norvegicus
  ref <308>: DATABASE ACCESSION NUMBER: EMBL / M76740
  ref <309>: DATABASE ENTRY DATE: 2000-03-04
ggcaccaccactgttgatttcacgaccactgctgagttcaccaccactcctgatgtcaccaccactcctgatgtgaccaccacccctggtgtcaccaccactgctggtgtcaccaccactcctgatgtcaccaccactgctggtgtcaccaccactcctgacgtcaccaccactgctgatgtcaccaccactcctgatgtgaccaccactgctgatgtcaccaccactgctggtatcaccaccactcctgatgtgaccaccactgctggtgtcaccaccactcctgatgtcaccaccactcctgatgtcaccaccactcctgatgtcaccaccactcctgatgtcaccaccactcctgacgtcaccaccactcctgatacaaccaccactcctgatacaaccaccactcctcaggtcaccaccactgttgatgtcacgaccactgttgatgtcaccaccactgctgaggtcaccaccactactgaggtcaccacctctcctgatgcaaccaccactactgacgtcaccaccactcctgaggcaaccaccactgatggtgtcaccaccactcctgatgtcaccaccacttctgatgtgaccaccactgctgatgtcaccaccactgctagtgtcaccaccactcctgatgtcaccaccactcctgatgtcaccaccactcctgatgtgaccaccactgctggtgtcaccaccactcctgatgccaccaccactcctgatgcaaccaccactcctcaggtcaccaccactgctgatgtcaccaccactgctggtgtcaccaccactgctggtgtcaccaccactccagatgtcaccacgactcctgatgtgaccaccactcctgacgtcaccaccactgctagtgtcaccaccactgctgatgtcaccaccactcctgaagtcaccaccactcctgaggtcaccaccactcctgctgtcaccaccacgcctcgtgtcactaccactcctgctgtcactacgacacgtgtcatcaccaccatgcctgtcatcactactacgcctgtcatgaccaccactccagtgaattgcctgaacggagggtactggtcaggtgcgatgtgcgtctgccccaatggcttctcaggggatcgctgtcagaacagagtccctgtggtcgactgccagaacggaggcacgtgggatgggctcaaatgtcagtgtaccggcctcttctatggcccaaggtgtgaggaagtgatggagagcgtagagataaagccgacggtctctgcatctgtggaagtgagtgtgacagtaaccagtcaagaatatagtaatgagctacaggaccgaaactccaca

SEQ ID NO: 3911 - protein, 447 aa, Rattus norvegicus
  ref <308>: DATABASE ACCESSION NUMBER: SWISS-Prot / AAA41642
  ref <309>: DATABASE ENTRY DATE: 2003-02-01
GTTTVDFTTTAEFTTTPDVTTTPDVTTTPGVTTTAGVTTTPDVTTTAGVTTTPDVTTTADVTTTPDVTTTADVTTTAGITTTPDVTTTAGVTTTPDVTTTPDVTTTPDVTTTPDVTTTPDVTTTPDTTTTPDTTTTPQVTTTVDVTTTVDVTTTAEVTTTTEVTTSPDATTTTDVTTTPEATTTDGVTTTPDVTTTSDVTTTADVTTTASVTTTPDVTTTPDVTTTPDVTTTAGVTTTPDATTTPDATTTPQVTTTADVTTTAGVTTTAGVTTTPDVTTTPDVTTTPDVTTTASVTTTADVTTTPEVTTTPEVTTTPAVTTTPRVTTTPAVTTTRVITTMPVITTTPVMTTTPVNCLNGGYWSGAMCVCPNGFSGDRCQNRVPVVDCQNGGTWDGLKCQCTGLFYGPRCEEVMESVEIKPTVSASVEVSVTVTSQEYSNELQDRNST

SEQ ID NO: 3912 - DNA, 4707 bp, Homo sapiens
  ref <308>: DATABASE ACCESSION NUMBER: EMBL / AF007194
  ref <309>: DATABASE ENTRY DATE: 2000-03-03
gatcaccatcaccgagaccacctcacacagtactcccagctacactacctcaatcaccaccaccgagaccccctcacacagtactcccagctacactacctcaatcaccaccaccgagaccccatcacacagtactcccagcttcacttcttcaatcaccaccaccgagaccacatcccacagtactcccagcttcacttcttcaatcaggaccaccgagaccacatcctacagtactcccagcttcacttcttcaaataccatcactgagaccacctcacacagtactcccagctacattacctcaatcaccaccaccgagaccccctcaagcagtactcccagcttcagttcttcgatcaccaccactgagaccacatcccacagtactcccggcttcacttcttcaatcaccaccactgagactacatcccacagtactcccagcttcacttcttcgatcaccaccactgagaccacctcacatgatactcccagcttcacttcttcaatcaccaccagtgagaccccctcacacagtactcccagctccacttctttaatcaccaccaccaagaccacctcacacagtactcccagcttcacttcttcgatcaccaccaccgagaccacctcacacagtgctcgcagcttcacttcttcgatcaccaccaccgagaccacctcacacaatactcggagcttcacttcttcgatcaccaccaccgagaccaactctcacagtactaccagcttcacttcttcgatcaccaccaccgagaccacctcacacagtactcccagcttcagttcttcaatcaccaccactgagacccccttacacagtactcctggcctaccttcgtgggtcaccaccaccaagaccacctcacacattactcctggcctcacttcttcaatcaccaccactgagactacctcacacagtactcccggcttcacttcttcaatcaccaccactgagaccacctcagagagtactcccagcctcagttcttcaaccatctactccacagtcagcacatccacaactgccatcacctcacattttactacctcagagactgcggtgactcccacacctgtaaccccatcttctctgagtacagacatcccgaccacaagcctacgaactctcaccccttcgtctgtgggcaccagcacttcattgactacaaccacagactttccctctatacccactgatatcagtaccttaccaactcgaacacacatcatttcatcttctccctccatccaaagtacagaaacctcatcccttgtgggcaccacctctcccaccatgtccactgtgagaatgaccctcagaattactgagaacaccccaatcagttcctttagcacaagtattgttgttatacctgaaaccccaacacagacccctcctgtactgacgtcagccactgggacccaaacatctcctgcacctactactgtcacctttggaagtacggattcctccacgtccactcttcatactcttactccatcaacagccttgagcacgatcgtgtcaacatcacaggttcctattcctagcacacattcctccacccttcaaacaactccttctactccctcattgcaaacttcactcacatctacaagtgagttcactacagaatctttcactaggggaagtacgtctacaaatgcaatcttgacttcttttagtaccatcatctggtcctcaacacccactattatcatgtcctcttctccatcttctgccagcataactccagtgttctccactaccattcattctgttccttcttcaccatacattttcagtacagaaaatgtgggctccgcttctatcacaggctttcctagtctctcttcctctgcaactaccagcacttcttcaaccagctcctctctgaccacagctctcactgaaataacccccttttcttatatttcccttccctccaccacaccctgtccaggaactataacaattaccatagtccctgcctctcccactgatccatgtgttgaaatggatcccagcactgaagctacttctcctcccaccaccccattaacagtctttccctttactaccgaaatggtcacctgtcctacctccatcagtatccaaactactcttactacatatatggacacttcttccatgatgccagaaagtgagtccagcatctcacccaatgcttccagttccactggcactgggactgtacccacaaacacagttttcacaagtactcgactgcccaccagtgagacctggctgagcaacagttctgtgatccccctacctcttcctggcgtctctaccatcccgctcaccatgaaaccaagcagtagcctcccgaccatcctgaggacttcaagcaagtcaacacacccatccccacccaccactaggacttcagagacaccagtggccactacccagactcctaccacccttacatcacgcaggacaactcgcatcacttctcagatgaccacacagtccacgttgaccaccactgcaggcacctgtgacaatggtggcacctgggaacagggccagtgtgcttgccttccggggttttctggggaccgctgtcagctccagaccagatgccagaatgggggtcagtgggatggcctcaaatgccagtgccccagcaccttctatggttccagttgtgagtttgctgtggaacaggtggatctagatgcagaagatttttgcagacatgcagggcttcaccttcaagggtgtggagatcctgtccctgaggaatggcagcatcgtggtggactacctggtcctgctggagatgcccttcagcccccagctggagagcgagtatgagcaggtgaagaccacgctgaaggaggggctgcagaacgccagccaggatgtgaacagctgccaggactcccagaccctgtgttttaagcctgactccatcaaggtgaacaacaacagcaagacagagctgaccccggcagccatctgccgcgcgccgctcccacgggctatgaagagttctacttccccttggtggaggccacccggctccgctgtgtcaccaaatgcacgtctggggtggacaacgccatcgactgtcaccagggccagtgcgttctggagacgagcggtcccacgtgtcgctgctactccaccgacacgcactggttctctggcccgcgctgcgaggtggccgtccactggagggcgctggtcggggcctgacggccggcgcgcgctgctggtgctgctgctcgtggcgctgggcgtccgggcggtgcgctccggatggtggggcggccagcgccgaggccggtcctgggaccaggacaggaaatggttcgagacctgggatgaggaagtcgtgggcactttttcaaactggggtttcgaggacgacggaacagacaaggatacaaatttctatgtggccttggagaacgtgacaccactatgaaggtgcacatcaagagacccgagatgacctcgtcctcagtgtgagcctgcggggccccttcaccaccccctccgccctgccccggacacaagggtctgcattgcgtccatttcaagaggtgaccccaggacgcgggcagcccaggctcctgctgttcttgggcaagatgagactgttcccccaaatcccatccttctccttccaacttggctgaaacccacctggagacgcagttcacgtccaggctcttccactgtggaatcttgggcaagtcagtaacgagcctcagtttcctcacctgcaaaacgggtacagcattcctgtatgatacgtcacgccgttgttgtgaaaaccacatagacttggtcaattctcggtcctactctgccctcccgtctcagccctcgtgttgccattgcctctctcggatcctccaatcctcacgtccttcacctggtctctggccctggttcttattttctctcaattccctactgcctgtttcttactttgaacctggaggcagcctgcagccccatcccatctcctgccctctcctgatctaactccctgctgcatctcttgctcccattccttagacgtcctccccttttgaccccgttccttcatccatcctgcaccccagtcccccagccctaaatcctccctcctctcctcacatcctggcccctagcaaggtatagatagcctctgtgtcttaggataccccgggtgctgttccctcggtcatcctgttgcccagttccccgtttctcttgctctcattcctgtatcctttccccttttgagcccgtccattcatcggttctgcccccgactcccccagccctaaataccccagctgctgttccccccatcaccctgctgcccaattctttattctccacccctttctctcacccctggagccctgcgggtgggggcagggcatgagttccccagtccccaaggaaaggcagccccctcagtctccctcctcctcattcccttccatctccctcccctctgccttttaaacccatcccctccgattcccctcctcccccctctctccctggtgtcacctggattcctgcagtaattctgagcccttgaaatcctcagtcgccttggcggggaagattggctttggggacaggaggtcggcacatctccaggtcttcatgtgcgcaatatagagtttattgtaaaaagc

SEQ ID NO: 3913 - protein, 957 aa, Homo sapiens
  ref <308>: DATABASE ACCESSION NUMBER: SWISS-Prot / AAC02272
  ref <309>: DATABASE ENTRY DATE: 2003-02-01
ITITETTSHSTPSYTTSITTTETPSHSTPSYTTSITTTETPSHSTPSFTSSITTTETTSHSTPSFTSSIRTTETTSYSTPSFTSSNTITETTSHSTPSYITSITTTETPSSSTPSFSSSITTTETTSHSTPGFTSSITTTETTSHSTPSFTSSITTTETTSHDTPSFTSSITTSETPSHSTPSSTSLITTTKTTSHSTPSFTSSITTTETTSHSARSFTSSITTTETTSHNTRSFTSSITTTETNSHSTTSFTSSITTTETTSHSTPSFSSSITTTETPLHSTPGLPSWVTTTKTTSHITPGLTSSITTTETTSHSTPGFTSSITTTETTSESTPSLSSSTIYSTVSTSTTAITSHFTTSETAVTPTPVTPSSLSTDIPTTSLRTLTPSSVGTSTSLTTTTDFPSIPTDISTLPTRTHIISSSPSIQSTETSSLVGTTSPTMSTVRMTLRITENTPISSFSTSIVVIPETPTQTPPVLTSATGTQTSPAPTTVTFGSTDSSTSTLHTLTPSTALSTIVSTSQVPIPSTHSSTLQTTPSTPSLQTSLTSTSEFTTESFTRGSTSTNAILTSFSTIIWSSTPTIIMSSSPSSASITPVFSTTIHSVPSSPYIFSTENVGSASITGFPSLSSSATTSTSSTSSSLTTALTEITPFSYISLPSTTPCPGTITITIVPASPTDPCVEMDPSTEATSPPTTPLTVFPFTTEMVTCPTSISIQTTLTTYMDTSSMMPESESSISPNASSSTGTGTVPTNTVFTSTRLPTSETWLSNSSVIPLPLPGVSTIPLTMKPSSSLPTILRTSSKSTHPSPPTTRTSETPVATTQTPTTLTSRRTTRITSQMTTQSTLTTTAGTCDNGGTWEQGQCACLPGFSGDRCQLQTRCQNGGQWDGLKCQCPSTFYGSSCEFAVEQVDLDAEDFCRHAGLHLQGCGDPVPEEWQHRGGLPGPAGDALQPPAGERV

SEQ ID NO: 3914 - DNA, 1341 bp, Rattus norvegicus; identical to SEQ ID NO: 3910
  ref <308>: DATABASE ACCESSION NUMBER: EMBL / M76740
  ref <309>: DATABASE ENTRY DATE: 2000-03-04

SEQ ID NO: 3915 - protein, 447 aa, Rattus norvegicus; identical to SEQ ID NO: 3911
  ref <308>: DATABASE ACCESSION NUMBER: SWISS-Prot / AAA41642
  ref <309>: DATABASE ENTRY DATE: 2003-02-01

SEQ ID NO: 3916 - DNA, 4707 bp, Homo sapiens; identical to SEQ ID NO: 3912
  ref <308>: DATABASE ACCESSION NUMBER: EMBL / AF007194
  ref <309>: DATABASE ENTRY DATE: 2000-03-03

SEQ ID NO: 3917 - protein, 957 aa, Homo sapiens; identical to SEQ ID NO: 3913
  ref <308>: DATABASE ACCESSION NUMBER: SWISS-Prot / AAC02272
  ref <309>: DATABASE ENTRY DATE: 2003-02-01

SEQ ID NO: 3918 - DNA, 3679 bp, Rattus norvegicus
  ref <308>: DATABASE ACCESSION NUMBER: EMBL / M77245
  ref <309>: DATABASE ENTRY DATE: 2000-03-04
tgacatggtaaagagtctggccacagataaaggaccgaaatgactgactcaaaatacttcacaacaaccaagaaaggggagatcttcgagttgaaggcagagcttaacagtgacaagaaggagaagaagaaggaggcagtaaagaaagtgattgcatcaatgaccgtgggcaaagatgtcagtgctctcttccctgatgtggtgaactgcatgcagacagacaacctggagctaaagaagctggtgtacctgtacttgatgaactatgccaagagtcagcctgacatggccattatggctgtcaacaccttcgtgaaggactgtgaggaccccaacccccttatccgggccctggctgtgaggactatgggctgcatccgagttgacaagatcacagagtacttgtgtgaaccactccggaaatgcctgaaggatgaagacccatatgtgcgcaagacagcagctgtgtgtgtagccaagctccacgacatcaacgcccagctggtagaggaccagggtttcctggacacactcaaagacctcatctctgactctaaccccatggtggtagcaaatcgagtggctgccctgtcagagatcgctgagtctcaccccagtagcaacctgcttgacttgaaggcacagtctatcaacaagctgctgacggcccttaatgagtgcaccgagtgggcccagatcttcattctggactgtctgggcaactacatgcccaaggatgaccgtgaggcccagagcatctgcgagcgggtcactcctaggctttcccatgccaactctgctgtggtgctgtccgcagtgaaggtcctgatgaagttcatggagatgctgtctaaggacctggactactatgccacactactcaagaagctggcccctcccctggtcaccctgctgtcagcagagccagagccgcagtatgtgcctctgcgcaatattaacctcattgtacagaaaaggccagagattttgaagcatgaaatgaaggttttctttgtgaagtacaatgaccccatctatgtgaagctggagaaactggacattatgatccgcctggcctcccaggccaacattgcccaggttttggcagaactcaaagagtacgcgacagaagtagatgtggattttgtacggaaggcagtgcgtgccattggccgctgtgccatcaaggtggagcaatctgcagagcgctgtgtgagcacattgcttgatctcatccagaccaaggtcaactatgtggtccaggaagccattgtggtcattaaagacatcttccgcaagtaccccaacaagtacgagagtgtgatagccacactgtgtgagaatctggactcgctggatgagcctgaggctcgcgctgctatgatctggatagtgggcgagtatgctgagcggattgacaatgcggacgagctgcttgagagcttcctcgacggcttccatgacgagagcacccaggtccagctacagctgctgacagccattgtgaagctcttcctgaagaagccaacagagacgcaggagctggtgcagcaggtcctcagtttggccactcaggactcggacaatccagaccttcgggaccgtggctacatctactggcgcctgctctccacggaccctgtagctgccaaagaggtggtactggctgagaagcccctcatctcagaagagacagaccttattgagcccacactgctggatgaactcatctgctacattggcacactggcctctgtctaccacaagccacccaatgcctttgtggagggcggccggggagtggtgcacaagagtctgccacctcgcactgcctcgagcgaaagcacagagagccctgaggcagcccctgccggagcacctgctagtgaccagcctgatgtcattcctgcccagggtgacctgttaggtgacctcctcaacctggaccttgggcccccagtgagtggcccacccttggctgcctcctcagtgcagatgggagctgtggatcttcttggtggtggcctcgacagcctgatgggggatgagcctgaagggattggagacagcaactttggggcacctccagcatcagtggcggcggcagcaccagccagacttggagcacccgtcagcagtggcttaagtgacctctttgacctgaccagtggagtgggcaccctctcagggtcctatgtcgctcccaaagcagtttggctccctgccatgaaggccaaggggctggaaatctctggcaccttcacccggcaggttggctccatctccatggatctgcagctgactaacaaggccctgcaggtcatgacagatttcgctatccagtttaatcggaacagctttggcttggcccccgctgcgccactccaagtgcacgccccactgagccccaaccagacggtggagatctccctgcctcttaacacggtgggctcagtcatgaagatggagcctctgaacaatcttcaggtggctgtgaagaacaacattgacgtcttctacttcagcactttgtacccactgcatgtcctcttcgtggaggacgggaagatggaccggcagatgttcctggccacatggaaggacattcccaacgagaatgaagcccagttccagatcagagactgcccgctgaacacagaggctgcaagcagcaagctgcaaagcagtaacattttcactgtcgccaagaggactgtggagggccaggacatgctctaccaatctctgaagttgaccaatggcatctgggtgctggcagagctgcggatccagccaggcaaccccagtttcacgctgtccctgaagtgtcgagccccagaggtgtcccagcatgatatccaggcctacgagaccatcctcaagaactgaagtccctctcgctccaccccagccttctccttctgccagcccagccatggaaccctgtggtggcagcacctcctcctttctttggggagaagccagtgggctcctgacccacccaggaggcctcccctgatcctaactgagggcctggagcagggccaggtctcctagagtgaaatctccgtgcatctccagtggctgcttttttctattgctgttgatgtgggatcaaaggaagtggatccagcacagcatcagaagctggacgggggccacagggtgctcttccttccttctgctctcctggggtgaacatggaaccctcctggggtcccagcccataatccctgccctgtctcctcagtgagcctgtctgggtagagtcctctgggtgccaatattactgtttgggactctgagagctggaggtggtgatggacagacatgagcccaggggagcaacctgggctggcactgtctgccccatataacaccagttggtgctctgtgaccacctgcatggcccagagcccgatctaggattctgttcccttaggccctggaggatggtcactgcctaccaaacattcctcggtgtcctctctgtgagtccagggctctcagaccagaagtggggtgaaaggtggggcaaggggcagtgggaccgcttctagtgtgagctcctgacccactggctgccctggctccccagtctgtgtgtgacagtgacaggttgatcgtcgctactgtttgataataaagagttctgcttttggcaaaaaaaaaaaaaaaa

SEQ ID NO: 3919 - protein, 949 aa, Rattus norvegicus
  ref <308>: DATABASE ACCESSION NUMBER: SWISS-Prot / P52303
  ref <309>: DATABASE ENTRY DATE: 2002-06-15
MTDSKYFTTTKKGEIFELKAELNSDKKEKKKEAVKKVIASMTVGKDVSALFPDVVNCMQTDNLELKKLVYLYLMNYAKSQPDMAIMAVNTFVKDCEDPNPLIRALAVRTMGCIRVDKITEYLCEPLRKCLKDEDPYVRKTAAVCVAKLHDINAQLVEDQGFLDTLKDLISDSNPMVVANRVAALSEIAESHPSSNLLDLKAQSINKLLTALNECTEWAQIFILDCLGNYMPKDDREAQSICERVTPRLSHANSAVVLSAVKVLMKFMEMLSKDLDYYATLLKKLAPPLVTLLSAEPEPQYVPLRNINLIVQKRPEILKHEMKVFFVKYNDPIYVKLEKLDIMIRLASQANIAQVLAELKEYATEVDVDFVRKAVRAIGRCAIKVEQSAERCVSTLLDLIQTKVNYVVQEAIVVIKDIFRKYPNKYESVIATLCENLDSLDEPEARAAMIWIVGEYAERIDNADELLESFLDGFHDESTQVQLQLLTAIVKLFLKKPTETQELVQQVLSLATQDSDNPDLRDRGYIYWRLLSTDPVAAKEVVLAEKPLISEETDLIEPTLLDELICYIGTLASVYHKPPNAFVEGGRGVVHKSLPPRTASSESTESPEAAPAGAPASDQPDVIPAQGDLLGDLLNLDLGPPVSGPPLAASSVQMGAVDLLGGGLDSLMGDEPEGIGDSNFGAPPASVAAAAPARLGAPVSSGLSDLFDLTSGVGTLSGSYVAPKAVWLPAMKAKGLEISGTFTRQVGSISMDLQLTNKALQVMTDFAIQFNRNSFGLAPAAPLQVHAPLSPNQTVEISLPLNTVGSVMKMEPLNNLQVAVKNNIDVFYFSTLYPLHVLFVEDGKMDRQMFLATWKDIPNENEAQFQIRDCPLNTEAASSKLQSSNIFTVAKRTVEGQDMLYQSLKLTNGIWVLAELRIQPGNPSFTLSLKCRAPEVSQHDIQAYETILKN

SEQ ID NO: 3920 - DNA, 3859 bp, Homo sapiens
  ref <308>: DATABASE ACCESSION NUMBER: EMBL / L13939
  ref <309>: DATABASE ENTRY DATE: 2001-05-16
gagctattgggacctgcggaagcctggctacagataagggaccaaaatgactgactcaaaatatttcaccacgaccaagaaaggggagatcttcgagctgaaggcagagctcaacagtgacaagaaggagaagaagaaggaggcagtgaagaaagtgattgcatcgatgaccgtgggcaaagatgtcagtgccctcttccccgatgtggtcaactgcatgcagacggacaacctggagctgaagaagctggtatacctctacttgatgaattacgccaagagtcagcctgacatggccattatggccgtcaacacctttgtgaaggactgtgaggaccccaaccccctcatccgagccctggcagtgcggaccatgggctgcatccgcgttgacaagatcacagagtacctgtgcgagccactccggaagtgcctgaaggacgaggatccatatgtgcgcaagacagcagctgtgtgcgtggccaagctccacgacatcaacgcccagctggtggaggaccagggcttcctggacacccttaaagacctcatctccgactctaaccccatggtggtggccaatgcagtggcagcgctctcagaaattgccgagtctcaccccagcagcaacctgctcgatctgaacccacagtccatcaacaagctgctgacagccctcaatgagtgcaccgagtggggccagatcttcatcctggactgcctcgccaactatatgcccaaggacgaccgcgaggcccagagcatctgtgagcgggtcacccccaggctctcccatgccaactccgctgtggtgctctctgctgtgaaggtgctgatgaagttcatggagatgttgtctaaggacttggactactacggcacactgctcaagaagctggccccacccctggtcacactgctgtcagccgagccagagctgcagtatgtggccctgcgcaacatcaatctcatcgtgcagaaaaggcctgagatcctgaagcatgagatgaaggtgttcttcgtgaagtacaacgaccctatctacgtgaagctggagaagctggacatcatgatccgcctggcctctcaggccaacatcgcccaggtgttggcagagctgaaagagtacgcaacagaagtggatgtggactttgtacggaaggctgtgcgtgctattggccgctgcgccatcaaggtggagcaatctgcggagcgctgtgtgagcacgctgctcgacctcatccagaccaaggtcaactatgtggtccaggaggccatcgtggtcatcaaggacatcttccgcaagtaccccaacaagtatgagagtgtgattgccacactgtgtgagaatctggactccctggatgagcctgaggcccgggctgccatgatctggattgtgggcgagtacgcggaacggatcgacaacgcagatgagctgctggagagcttcctcgagggcttccatgacgagagcacacaggtccagctgcagctgctgacagccattgtgaaactctttctaaagaagccaacagagacccaggagctggtgcagcaggtcctcagtttggccactcaggactcagataacccagacctgcgggaccgtggctacatctactggcgcctgctgtccacggacccggtggcagccaaggaggtggtgttggctgagaagccactcatctctgaagagacggacctcatcgagcccacactgttagacgagcttatctgctacatcggcacgctggcttccgtctaccataagcctcccagtgcctttgtggaggggggccggggcgtcgtgcacaagagcctgccacctcgcacggcctcgagtgagagcgcagagagccctgagacagcccctactggagcacctcctggggagcagccagatgtcatccccgcccagggcgacctgctgggtgacctcctcaacctggacctcggccccccagtgagcggcccacccctggccacctcctcggtgcagatgggagctgtggaccttcttggcggtggccttgacagcctgatgggggatgagcctgaagggattgggggcaccaacttcgtggcacctccaacagcagcagtaccagccaatcttggagcacccatcggcagtggcctgagtgacctctttgacctgaccagtggcgtgggcaccctgtcaggatcatatgtggcccccaaagcagtctggctcccagccatgaaggctaaggggctggagatctcaggcaccttcacccgccaggtgggctccatctccatggacctgcagctgaccaacaaggccttgcaggtcatgaccgactttgccatccagttcaaccgcaacagctttggcctggcccccgccgcccccctccaggtccacgcgccactcagccccaaccagacagtggagatctccctgcctctcagcacggtgggctcggtcatgaagatggagcctctgaacaacctccaggtggccgtgaagaacaacatcgatgtcttctacttcagcaccttgtacccactgcacatcctctttgtggaggacgggaagatggaccggcagatgttcctggccacatggaaggatattcccaatgagaatgaggcccagttccagatcagagactgccccctcaatgcagaggctgcgagcagcaagctgcagagcagcaacatcttcactgtcgccaagaggaacgtggagggccaggacatgctctaccagtccctgaagctgaccaacggcatctgggtgctggcggagctgcggatccagccgggcaaccccagctgcacggacttagagctgtccctgaagtgtcgagcaccagaggtgtcccagcacgtgtaccaggcctacgagaccatcctcaagaactgagaccccggccagcgcccaccccagccttctgcccgccccatcgaggaggcccctcgggggcagcacatcttcctcctcgcaggagggaccaggcggggctccaggccactcagtgggctccctggtcctgatggcagaacccacccgatccctggggtagggcaccaccccctcctggggtgagagcgcagtgcactcccgtgctctgggacacccctgctcctgtggctgtgatgtggggttaagtgaggtggggaccaaaggaaacagagccagagcagccacagaagctgtgcctgaagggtgagtgtggagcttgcccctccggctcacagccccggcagcccctggctccttggtctctccggttggtgttaaagggccctccactgccacctctcatgggatggaccctgccaacctggcctgggtgtgcagggaggggttccccttggtaccaggagagctgctcacttagggcctggggctcaaggagctgtaggtgccggcagaggggcagagctaggctgggaggagcccagggcctgcaccacccacttgcaaccaccaggctggtgccctgcagctgtgccagttgggccacagcctcccgagtgctgacccacatggtcaagaccaggcagaagctcccagagcccctgtctcgggctccccaccgactggcagctgcactatccccaactccccacttctgccccaagggtggtcactgcctgtgatacattcctcagtgtcgcctctgagcccaggcctcctgccacaaagactgggccgagagatggggctgggtaagcgggtgcgcctcctgtttgggtttcttcggggtttctctgtagtgtctgctgccctcctcctggcctcccaggtttcagttgtgtctgacagagcattaggttttcctgttactgctgtgtaataataaagaaagattcggcttttggc

SEQ ID NO: 3921 - protein, 949 aa, Homo sapiens
  ref <308>: DATABASE ACCESSION NUMBER: SWISS-Prot / Q10567
  ref <309>: DATABASE ENTRY DATE: 2002-06-15
MTDSKYFTTTKKGEIFELKAELNSDKKEKKKEAVKKVIASMTVGKDVSALFPDVVNCMQTDNLELKKLVYLYLMNYAKSQPDMAIMAVNTFVKDCEDPNPLIRALAVRTMGCIRVDKITEYLCEPLRKCLKDEDPYVRKTAAVCVAKLHDINAQLVEDQGFLDTLKDLISDSNPMVVANAVAALSEIAESHPSSNLLDLNPQSINKLLTALNECTEWGQIFILDCLANYMPKDDREAQSICERVTPRLSHANSAVVLSAVKVLMKFMEMLSKDLDYYGTLLKKLAPPLVTLLSAEPELQYVALRNINLIVQKRPEILKHEMKVFFVKYNDPIYVKLEKLDIMIRLASQANIAQVLAELKEYATEVDVDFVRKAVRAIGRCAIKVEQSAERCVSTLLDLIQTKVNYVVQEAIVVIKDIFRKYPNKYESVIATLCENLDSLDEPEARAAMIWIVGEYAERIDNADELLESFLEGFHDESTQVQLQLLTAIVKLFLKKPTETQELVQQVLSLATQDSDNPDLRDRGYIYWRLLSTDPVAAKEVVLAEKPLISEETDLIEPTLLDELICYIGTLASVYHKPPSAFVEGGRGVVHKSLPPRTASSESAESPETAPTGAPPGEQPDVIPAQGDLLGDLLNLDLGPPVSGPPLATSSVQMGAVDLLGGGLDSLMGDEPEGIGGTNFVAPPTAAVPANLGAPIGSGLSDLFDLTSGVGTLSGSYVAPKAVWLPAMKAKGLEISGTFTRQVGSISMDLQLTNKALQVMTDFAIQFNRNSFGLAPAAPLQVHAPLSPNQTVEISLPLSTVGSVMKMEPLNNLQVAVKNNIDVFYFSTLYPLHILFVEDGKMDRQMFLATWKDIPNENEAQFQIRDCPLNAEAASSKLQSSNIFTVAKRNVEGQDMLYQSLKLTNGIWVLAELRIQPGNPSCTDLELSLKCRAPEVSQHVYQAYETILKN

SEQ ID NO: 3922 - DNA, 1386 bp, Rattus norvegicus
  ref <308>: DATABASE ACCESSION NUMBER: EMBL / M77694
  ref <309>: DATABASE ENTRY DATE: 2000-03-04
ctgctgcccagtgctcttcagcatgtcctttattccggtggccgaggactccgactttcccatccaaaacctgccctatggcgttttctccactcaaagcaacccaaagccacggattggtgtggccatcggtgaccagatcttggacctgagtgtcattaaacacctctttaccggacctgtcctctccaaacatcagcatgtcttcgatgagacaactctcaatagctttatgggcctcggccaagcggcatggaaggaggcaagagcatctttacagaacttactgtctgccagccaagcccagctcagagatgacaaggagcttcggcagcgtgcattcacctcccaggcttctgccacgatgcaccttcctgctaccataggagactacacggacttctactcctctctgcagcatgccactaacgttggcattatgttcaggggcaaggagaatgcgctgttgcccaattggctccacttacctgtgggataccatggccgagcttcctccgttgtggtgtctggtaccccaattcgaagacccatgggacagatgagacctgataactcaaagcctcctgtgtacggtgccagcaaacgcttagacatggagttggaaatggctttctttgtaggccctgggaacagattcggcgagccaatccccatttccaaggcccaggagcacattttcgggatggtcctcatgaacgactggagtgctcgagacatccagcaatgggagtacgtcccccttgggccattcctggggaaaagttttggaaccaccatctccccatgggtggtgcccatggatgctctcatgccctttgtggtgccaaacccaaagcaggaccctaagcccctgccatatctctgccacagccagccctacacatttgatatcaacctgtccgttgctttgaaaggagaaggaatgagccaggcagctaccatctgcaggtccaactttaagcacatgtactggaccattctgcagcaactgacacaccactctgttaatggatgcaatctgagacctggggacctcttggcttctggaaccatcagtggatcagaccctgaaagctttggctccatgctggaactgtcctggaagggaacaaaggctatcgatgtggggcaggggcaaaccaggacctttcttctggacggagatgaagtcatcataacaggtcactgccagggggatggctaccgtgttggttttggccaatgtgctgggaaagtgctgcctgccctctcgccagcctgaagctccagaatccacagaacacagccttgccttgtgaggatcatactgcaactgcatgagtcaggaatgaataaagctattttgattggggaaaaaaaaaaaaa

SEQ ID NO: 3923 - protein, 419 aa, Rattus norvegicus
  ref <308>: DATABASE ACCESSION NUMBER: SWISS-Prot / P25093
  ref <309>: DATABASE ENTRY DATE: 2001-10-16
MSFIPVAEDSDFPIQNLPYGVFSTQSNPKPRIGVAIGDQILDLSVIKHLFTGPVLSKHQHVFDETTLNSFMGLGQAAWKEARASLQNLLSASQAQLRDDKELRQRAFTSQASATMHLPATIGDYTDFYSSLQHATNVGIMFRGKENALLPNWLHLPVGYHGRASSVVVSGTPIRRPMGQMRPDNSKPPVYGASKRLDMELEMAFFVGPGNRFGEPIPISKAQEHIFGMVLMNDWSARDIQQWEYVPLGPFLGKSFGTTISPWVVPMDALMPFVVPNPKQDPKPLPYLCHSQPYTFDINLSVALKGEGMSQAATICRSNFKHMYWTILQQLTHHSVNGCNLRPGDLLASGTISGSDPESFGSMLELSWKGTKAIDVGQGQTRTFLLDGDEVIITGHCQGDGYRVGFGQCAGKVLPALSPA

SEQ ID NO: 3924 - DNA, 1310 bp, Homo sapiens
  ref <308>: DATABASE ACCESSION NUMBER: EMBL / X51728
  ref <309>: DATABASE ENTRY DATE: 1993-09-12
cctcctagccaagaccgaggataggtgtggccattggcgaccagatcctggacctcagcatcatcaagcacctctttactggtcctgtcctctccaaacaccaggatgtcttcaatcagcctacactcaacagcttcatgggcctgggtcaggctgcctggaaggaggcgagagtgttcttgcagaacttgctgtctgtgagccaagccaggctcagagatgacaccgaacttcggaagtgtgcattcatctcccaggcttctgccacgatgcaccttccagccaccataggagactacacagacttctattcctctcggcagcatgctaccaacgtcggaatcatgttcagggacaaggagaatgcgttgatgccaaattggctgcacttaccagtgggctaccatggccgtgcctcctctgtcgtggtgtctggcaccccaatccgaaggcccatgggacagatgaaacctgatgactctaagcctcccgtatatggtgcctgcaagctcttggacatggagctggaaatggctttttttgtaggccctggaaacagattgggagagccgatccccatttccaaggcccatgagcacatttttggaatggtccttatgaacgactggagtgcacgagacattcagaagtgggagtatgtccctctcgggccattccttgggaagagttttgggaccactgtctctccgtgggtggtgcccatggatgctctcatgccctttgctgtgcccaacccgaagcaggaccccaggcccctgccgtatctgtgccatgacgagccctacacatttgacatcaacctctctgttaacctgaaaggagaaggaatgagccaggcggctaccatatgcaagtccaattttaagtacatgtactggacgatgctgcagcagctcactcaccactctgtcaacggctgcaacctgcggccgggggacctcctggcttctgggaccatcagcgggccggagccagaaaacttcggctccatgttggaactgtcgtggaagggaacgaagcccatagacctggggaatggtcagaccaggaagtttctgctggacggggatgaagtcatcataacagggtactgccagggggatggttaccgcatcggctttggccagtgtgctggaaaagtgctgcctgctctcctgccatcatgagattttctctgctcttctggaaacaaagggctcaagcacccctttcaaccctgtgactggggtcctccctcgggctgtaggcctggtccgctattcagtgacaaataaagccattgtgctctg

SEQ ID NO: 3925 - protein, 419 aa, Homo sapiens
  ref <308>: DATABASE ACCESSION NUMBER: SWISS-Prot / P16930
  ref <309>: DATABASE ENTRY DATE: 2002-06-15
MSFIPVAEDSDFPIHNLPYGVFSTRGDPRPRIGVAIGDQILDLSIIKHLFTGPVLSKHQDVFNQPTLNSFMGLGQAAWKEARVFLQNLLSVSQARLRDDTELRKCAFISQASATMHLPATIGDYTDFYSSRQHATNVGIMFRDKENALMPNWLHLPVGYHGRASSVVVSGTPIRRPMGQMKPDDSKPPVYGACKLLDMELEMAFFVGPGNRLGEPIPISKAHEHIFGMVLMNDWSARDIQKWEYVPLGPFLGKSFGTTVSPWVVPMDALMPFAVPNPKQDPRPLPYLCHDEPYTFDINLSVNLKGEGMSQAATICKSNFKYMYWTMLQQLTHHSVNGCNLRPGDLLASGTISGPEPENFGSMLELSWKGTKPIDLGNGQTRKFLLDGDEVIITGYCQGDGYRIGFGQCAGKVLPALLPS

SEQ ID NO: 3926 - DNA, 2396 bp, Rattus norvegicus
  ref <308>: DATABASE ACCESSION NUMBER: EMBL / M80367
  ref <309>: DATABASE ENTRY DATE: 2000-03-04
ttaaaagatctaactcttcacaagttctctggagacaatttggaacttcctaggttatgacagggtctttgccacagagcccgtgaaaaaggacagagtgatcagcagcctgaccctgaacctgtcaggcattcttctctaaagaatttcgtttaagagacaaaagagcaccatggacatggcctcggagatccacatgttacaacccatgtgcctcattgagaacactgaggctcacctagtgatcaaccaggaggctctgaggattttgtctgccatcaaccagcctgtggtggtggtggcaatcgtgggcctctaccgcacaggcaaatcctacctgatgaacaaattggctgggaagagaacaggcttctccctgggctccactgtgcagtctcacaccaagggcatctggatgtggtgtgtgcctcaccccaagaaggcagggcaaaccctagttctgcttgacaccgagggccttgaagatgttgagaagggagacaaccagaacgactgctggatctttgccttggcagtcctcctcagcagcaccttcgtctacaacagcatgggaaccatcaaccagcaggccatggaccagctgcattatgtgacagagctgactgatcttatcaagtcaaagtcatcacctgatcagagtgggatagacgactctgctaactttgtgggcttctttccaacctttgtgtgggctctgagagatttctccctggagttggaagtcaatggaaaacttgtcactcctgatgagtacctggagcattcgctgaccctgaagaaaggagctgataagaaaactaaaagctttaatgagcctcgactgtgcatcaggaaattctttccgaagaggaagtgtttcatctttgacagacctgctctgaggaagcaactctgcaaactggagactctgggggaggaggagctgtgtagtgagtttgtagaacaagttgcagaattcacctcgtatatcttcagttactctgctgtcaaaactctgtctggtggcatcatagtcaatgggccacgtctaaagagcctggtgcagacctatgttggtgccatcagcagtgggtctctcccctgcatggagagtgcagtcctgactttggcccagatagagaactcagctgcagtacaaaaggccatcacccactatgaagaacagatgaatcagaaaatccagatgcccacagaaaccctccaggagctgctagacctgcacaggctgattgagagggaggccattgagatcttcctaaagaattctttcaaggatgtagaccagaagttccagacagaattagggaacctgctgatatcaaagcgagatgcctttattaagaagaactcggatgtatcatcagctcattgttcagatctgatagaggatatttttggacctctggaagaagaagtaaaacaagggacattttccaaaccaggaggttacttcctcttccttcagatgagacaagagctagagaagaagtataaccaggctcctgggaaggggctcgaggcagaagcggtgctgaaaaagtactttgagtccaaggaagacattgttgaaacacttctaaagacggatcagtcactcacggaggcagcaaaggagattgaagtggaacggattaaggctgaaactgctgaagctgcaaacagagagttagcagagaagcaggagaagtttgagctgatgatgcagcagaaggaagagagttaccaggagcacgtgagacagctgactgagaagatgaaggaggaacagaaaaagttaatagaagaacaggacaacatcatagctcttaaacttcgggaacaggaaaaatttctcagggaaggatacgagaacgagagcaagaaacttcttcgagagattgagaacatgaagagacgacaatcacctgggaaatgcaccatactctaaaggtccgaggcccaaacctctctgccaaactcttcatcacagaatatgtggactgacacctttaggctttgaaacagctgttatgatactacgttcattttagctcaaaaatcaatcacatgcaaatccagtttggggtcaccgtctgaccactgggcagcatcagaagaagttcgcccagccacatatgttcctcctctataatcttaagttttcctctttcctacagtacaacttctgcaattacagagcaggcaacttttaattaacttacaaaacaaactccctttctctgaggaccttgacattttgctacagtccttcaaaacctaaatcccatctccattttccctgtgatctttctccctactatggcagtgtgtcttgaactttctcaggacaaatgtcttgcaagagcacgagttaataaaattgattagcctaccat

SEQ ID NO: 3927 - protein, 591 aa, Rattus norvegicus
  ref <308>: DATABASE ACCESSION NUMBER: SWISS-Prot / AAA19909
  ref <309>: DATABASE ENTRY DATE: 2003-02-01
MDMASEIHMLQPMCLIENTEAHLVINQEALRILSAINQPVVVVAIVGLYRTGKSYLMNKLAGKRTGFSLGSTVQSHTKGIWMWCVPHPKKAGQTLVLLDTEGLEDVEKGDNQNDCWIFALAVLLSSTFVYNSMGTINQQAMDQLHYVTELTDLIKSKSSPDQSGIDDSANFVGFFPTFVWALRDFSLELEVNGKLVTPDEYLEHSLTLKKGADKKTKSFNEPRLCIRKFFPKRKCFIFDRPALRKQLCKLETLGEEELCSEFVEQVAEFTSYIFSYSAVKTLSGGIIVNGPRLKSLVQTYVGAISSGSLPCMESAVLTLAQIENSAAVQKAITHYEEQMNQKIQMPTETLQELLDLHRLIEREAIEIFLKNSFKDVDQKFQTELGNLLISKRDAFIKKNSDVSSAHCSDLIEDIFGPLEEEVKQGTFSKPGGYFLFLQMRQELEKKYNQAPGKGLEAEAVLKKYFESKEDIVETLLKTDQSLTEAAKEIEVERIKAETAEAANRELAEKQEKFELMMQQKEESYQEHVRQLTEKMKEEQKKLIEEQDNIIALKLREQEKFLREGYENESKKLLREIENMKRRQSPGKCTIL

SEQ ID NO: 3928 - DNA, 2881 bp, Homo sapiens
  ref <308>: DATABASE ACCESSION NUMBER: EMBL / M55542
  ref <309>: DATABASE ENTRY DATE: 2000-03-04
acagaagtgctagaagccagtgctcgtgaactaaggagaaaaagaacagacaagggaacagcctggacatggcatcagagatccacatgacaggcccaatgtgcctcattgagaacactaatgggcgactgatggcgaatccagaagctctgaagatcctttctgccattacacagcctatggtggtggtggcaattgtgggcctctaccgcacaggcaaatcctacctgatgaacaagctggctggaaagaaaaagggcttctctctgggctccacggtgcagtctcacactaaaggaatctggatgtggtgtgtgccccaccccaagaagccaggccacatcctagttctgctggacaccgagggtctgggagatgtagagaagggtgacaaccagaatgactcctggatcttcgccctggccgtcctcctgagcagcaccttcgtgtacaatagcataggaaccatcaaccagcaggctatggaccaactgtactatgtgacagagctgacacatagaatccgatcaaaatcctcacctgatgagaatgagaatgaggttgaggattcagctgactttgtgagcttcttcccagactttgtgtggacactgagagatttctccctggacttggaagcagatggacaacccctcacaccagatgagtacctgacatactccctgaagctgaagaaaggtaccagtcaaaaagatgaaacttttaacctgcccagactctgtatccggaaattcttcccaaagaaaaaatgctttgtctttgatcggcccgttcaccgcaggaagcttgcccagctcgagaaactacaagatgaagagctggaccccgaatttgtgcaacaagtagcagacttctgttcctacatctttagtaattccaaaactaaaactctttcaggaggcatccaggtcaacgggcctcgtctagagagcctggtgctgacctacgtcaatgccatcagcagtggggatctgccgtgcatggagaacgcagtcctggccttggcccagatagagaactcagctgcagtgcaaaaggctattgcccactatgaacagcagatgggccagaaggtgcagctgcccacagaaagcctccaggagctgctggacctgcacagggacagtgagagagaggccattgaagtcttcatcaggagttccttcaaagatgtggaccatctatttcaaaaggagttagcggcccagctagaaaaaaagcgggatgacttttgtaaacagaatcaggaagcatcatcagatcgttgctcaggtttacttcaggtcattttcagtcctctagaagaagaagtgaaggcgggaatttattcgaaaccagggggctatcgtctctttgttcagaagctacaagacctgaagaaaaagtactatgaggaaccgaggaaggggatacaggctgaagagattctgcagacatacttgaaatccaaggagtctatgactgatgcaattctccagacagaccagactctcacagaaaaagaaaaggagattgaagtggaacgtgtgaaagctgagtctgcacaggcttcagcaaaaatgttgcaggaaatgcaaagaaagaatgagcagatgatggaacagaaggagaggagttatcaggaacacttgaaacaactgactgagaagatggagaacgacagggtccagttgctgaaagagcaagagaggaccctcgctcttaaacttcaggaacaggagcaactactaaaagagggatttcaaaaagaaagcagaataatgaaaaatgagatacaggatctccagacgaaaatgagacgacgaaaggcatgtaccataagctaaagaccagagccttcctgtcacccctaaccaaggcataattgaaacaattttagaatttggaacaagcgtcactacatttgataataattagatcttgcatcataacaccaaaagtttataaaggcatgtggtacaatgatcaaaatcatgttttttcttaaaaaaaaaaaaaagactgtaaattgtgcaacaaagatgcatttacctctgtatcaactcaggaaatctcataagctggtaccactcaggagaagtttattcttccagatgaccagcagtagacaaatggatactgagcagagtcttaggtaaaagtcttgggaaatatttgggcattggtctggccaagtctacaatgtcccaatatcaaggacaaccaccctagcttcttagtgaagacaatgtacagttatccattagatcaagactacacggtctatgagcaataatgtgatttctggacattgcccatgtataatcctcactgatgatttcaagctaaagcaaaccaccttatacagagatctagaatctctttatgttctccagaggaaggtggaagaaaccatgggcaggagtaggaattgagtgataaacaattgggctaatgaagaaaacttctcttattgttcagttcatccagattataacttcaatgggacactttagaccattagacaattgacactggattaaacaaattcacataatgccaaatacacaatgtatttatagcaacgtataatttgcaaagatggactttaaaagatgctgtgtaactaaactgaaataattcaattacttattatttagaatgttaaagcttatgatagtcttttctaattcttaacactcatacttgaaatctttccgagtttccccagaagagaatatgggattttttttgacatttttgacccatttaataatgctcttgtgtttacctagtatatgtagactttgtcttatgtgtcaaaagtcctaggaaagtggttgatgtttcttatagcaattaaaaattatttttgaactga

SEQ ID NO: 3929 - protein, 592 aa, Homo sapiens
  ref <308>: DATABASE ACCESSION NUMBER: SWISS-Prot / P32455
  ref <309>: DATABASE ENTRY DATE: 2002-06-15
MASEIHMTGPMCLIENTNGRLMANPEALKILSAITQPMVVVAIVGLYRTGKSYLMNKLAGKKKGFSLGSTVQSHTKGIWMWCVPHPKKPGHILVLLDTEGLGDVEKGDNQNDSWIFALAVLLSSTFVYNSIGTINQQAMDQLYYVTELTHRIRSKSSPDENENEVEDSADFVSFFPDFVWTLRDFSLDLEADGQPLTPDEYLTYSLKLKKGTSQKDETFNLPRLCIRKFFPKKKCFVFDRPVHRRKLAQLEKLQDEELDPEFVQQVADFCSYIFSNSKTKTLSGGIQVNGPRLESLVLTYVNAISSGDLPCMENAVLALAQIENSAAVQKAIAHYEQQMGQKVQLPTESLQELLDLHRDSEREAIEVFIRSSFKDVDHLFQKELAAQLEKKRDDFCKQNQEASSDRCSGLLQVIFSPLEEEVKAGIYSKPGGYRLFVQKLQDLKKKYYEEPRKGIQAEEILQTYLKSKESMTDAILQTDQTLTEKEKEIEVERVKAESAQASAKMLQEMQRKNEQMMEQKERSYQEHLKQLTEKMENDRVQLLKEQERTLALKLQEQEQLLKEGFQKESRIMKNEIQDLQTKMRRRKACTIS

SEQ ID NO: 3930 - DNA, 912 bp, Rattus norvegicus
  ref <308>: DATABASE ACCESSION NUMBER: EMBL / M80601
  ref <309>: DATABASE ENTRY DATE: 2000-03-04
ccgctcgccttcctgctgcaagtgtacgcaccgcttccgggtcgggacgacgccttccaccgtagcctctttctcttctgctgtcgagagccgctgtgttgcgccggcctgcgagtttttcgtaatcagctaccaaggaaaaatgcattttactcatatgagcccccttctgaaacgggagcttcggatacagaatgtgtgtgcctccaacttaagtctggagctcatctctgcagggtttgtggttgcttggcccctatgacatgctctaggtgcaaacaggcacattactgcagcaaggaacatcagacattagactggcagctcggccacaagcaggcttgtacacagtcagaccatttagaccatatggttccagaccataacttgctgtttccagaatttgaaattgtaacagaaacagaagacgagattgggcctgaggtggtggaaatggaggattactctgaagttataggaagcatggagggagtacctgaggaagaactagattccatggcaaagcatgaatccaaggaagatcacatattccaaaagtttaaatccaaaatagcccttgaaccagagcagattctcaggtatggaagaggtattaaacccatctggatttctggtgaaaatattcctcaagaaaaagatattccagattgctcatgtggtgttaagagaatatttgaattccaggtcatgcctcagctgttgaaccacctaaaggcagacagactgggtacaagtgtggactggggcatcttggctgtcttcacctgtgctgagagctgcagcctgggcatcgggttcacagaagaatttgtgtggaaacaggatgtgacagagacaccatgaaaggtgttaaattcttaaaaataaatgttccttatgcctcactacctc

SEQ ID NO: 3931 - protein, 287 aa, Rattus norvegicus
  ref <308>: DATABASE ACCESSION NUMBER: SWISS-Prot / P47816
  ref <309>: DATABASE ENTRY DATE: 2002-06-15
PLAFLLQVYAPLPGRDDAFHRSLFLFCCREPLCCAGLRVFRNQLPRKNAFYSYEPPSETGASDTECVCLQLKSGAHLCRVCGCLAPMTCSRCKQAHYCSKEHQTLDWQLGHKQACTQSDHLDHMVPDHNLLFPEFEIVTETEDEIGPEVVEMEDYSEVIGSMEGVPEEELDSMAKHESKEDHIFQKFKSKIALEPEQILRYGRGIKPIWISGENIPQEKDIPDCSCGVKRIFEFQVMPQLLNHLKADRLGTSVDWGILAVFTCAESCSLGIGFTEEFVWKQDVTETP

SEQ ID NO: 3932 - DNA, 3254 bp, Homo sapiens
  ref <308>: DATABASE ACCESSION NUMBER: EMBL / AK055180
  ref <309>: DATABASE ENTRY DATE: 2002-08-06
gagatgttgcctaaggtacatgaggtttaggcaccattggccccccgccagaaagaaaaaaggttatttttgcccatttccaacaggtaactttggcttgtaaaatgtgacatgttaacatttttctccttaacctcccctaccataaacgtaaatcacgaaagaaaactaaactcccataaaccagtcactggttcaaataaatacacaggaagaatagatctaggtcttaaacactaaggcagtttttagcaatgcatatgcttttagacaaaatacagaaaaccactcagttgctgtaggaagcttattacagtgaaatttacttatgtttgtagtagttttcaaaacactatgtttcacttggtatttgtccctcctaaaattttttaactatgaaggtaggcacagactctgggcagaattctgcaattagagcagaggctcattcttagtcccttcacaatatattcataggattaagttgccaacattaggtagtaaaagcatcatctgggagatatattttgatgccctctgagtcagataaactgaaataatcactttgaggtgattgagaaggcattagtggcacactggtacagccaggtctgatgggggaactgtgacatgccttttgggtcagtgctacatcaagagtaggtacattcatggagtagatagcatgttaccattggcaacttataggtaaggtattgattatttgaacatgatcttcattgattttagattcttagatatggcagaggtattgcccccatctggatttctggtgaaaatattcctcaagaaaaggatattccagattgcccctgtggtgccaagagaatattggaattccaggtcatgcctcagctcctaaactacctgaaggctgacagactgggcaagagcattgactggggcatcctggctgtcttcacctgtgctgagagctgcagcttgggtactggctatacagaagaatttgtgtggaagcaggatgtaacagatacaccgtaaaggcatcttaaagccttgaaaaatgttaataatcttttataccttgcaattccatttctgggattttatcctaaggaaatacttataccaaaaatagaggtgcagagatgttgacagattgcttacacagtgtctacttattagtgaaacaaaagtgtccagtgacagggaattaaataaattttggtacatccacagaggaaggctacacagtcttaattataacacctatattgacaacagacataccattataggtggtattcatggtatgatcctattcttgtaaaaatatttgtatgtatgcacagaaatctgcaaagatgtacacttagtgaactggttaccaacgaatggtgggactaactaaaatggtctttttacttatatgtgcatttctttttataataaaaatgggttatatgcctaatgaagtcaaaccatctcactctgagcatttcccaccctaggtttttaaaacacaaaaatacttaggtaaaactcccaacaaacttgtctgatcattagctgattatcacaggctctagtatgtactggaagcccagaatatttgagaaataccaaacctcaggttggtgagtatgatgaacaggaaacccagtaattctgaagcagcagtatcacagttggcaggatgaggaacaacagtggctttgtgatcacagaactggaatttaaagaggctggaccttcagaactgatcttggtcagccagcggccctgcttacagatgagacactgaaaggcaaaaggcgatggtcttccctttccgtgtcagcattgtatacaggttccctatcgcacatacaagggttatggaatgtaagccaaaataagggtctggcctaggaggcagcagcctgaggaaaggaaggccctgaagtcagttttcaaagggctgacccttggcctattatgtttctgatacatctgtttaagcaagcggctcctaagactacactaaggtttcttccatcccctagcagctcacagttgacaattcccagttctctcagcaccagtgatgcctgcccttaagacacattgctgttgatcagtgcttgaatactgacggctaattctgataaatttctcaggcttatttccttaatctacattggctcacattgtcccctaacacatccctgttaactgaaatgcattgccaccataaatcctcacgttttcataggtaacatcacttgctaatgtaattgtctacttggctattttatttgtaatttaaaaagttctgtcctagtagtccatattatataagtatacatatgcaatttgtattaattgtataagatagttatacatagcaccatatgggaaactgcagtatggagtttctcccatggggaggttatcagctacttaagagctagaggatactagtttcgaacctgggatggctaaatctatgaaaatcacctataactatggtgtcacagccctgtggctactggagtaagttgtcatcaactagtgacaagagctggtcgcaacacttagtaggaagcacagtggcataaggaaacctggactagtggggcctttatatctaaaattatgtattattccttataggcagaatctgtaagtacgttatgactgctaatgacttttaaagcaaacatgttaacgatctttctatggtaaaaactgttatttggggacatcaccagatgatgtggacattcttgcaggtattttggcatacccaggcaagctgtcattggtgtatattccagttaacctctggagatgatcgtaacagtttacagggcctttccatttgggatggatatatcaagagggagacaaactggtccaaatcaccagaaagaaaatctcacagcaccgacttggcatctgtgttaaaaaatagcaactatatttaaaataaactgtacaacataaaaaatttaaattaaaaaatgcattaagcaagttgcctttagaaatgtgaagacattttaaaacactacatgataatgagcaagtctcacctacataatcatggctccacagacggtgccagtccatgcatccaccatttctcaacacctacaaagttttaagatctgcttggttcagatactgtccagccacagcagctccctctgctgtagagagcagcatattcagctttgcctttttatttcagatactgaatatcctttggcaatttcagatatcacagc

SEQ ID NO: 3933 - DNA, 2280 bp, Rattus norvegicus
  ref <308>: DATABASE ACCESSION NUMBER: EMBL / M80804
  ref <309>: DATABASE ENTRY DATE: 2000-06-24
cagcaagccaccttttcactctgtccctactggaaagcactgggaagagctgcaccggatagacatgaatgaggacaaagacaagagagactctatccagatgagtatgaagggatgccggacgaataacgggtttgtccaaaatgaagacatccaggagcaggacccagactccagggacactccacagtccaacgctgttagtatccctgctccagaggagcctcaactaaaggtggtgcggccctatgcagggatgcccaaggaggtgctgttccagttctctggccaggctcgctaccgggtgcctcgggagatcctcttctggctcaccgtggtctccgtgttcctgctcatcggagccaccatagccatcatcatcatctctccaaaatgccttgactggtggcaggcaggtcccatgtaccagatctacccgaggtcttttaaggacagtgacaaggatgggaatggagacctgaaaggtatccaagagaagctggactacatcactgctttaaatataaagaccatttggatcacttccttttataaatcacctttgaaagattttagatatgctgttgaagatttcaaagaaattgaccctattttcggaacaatgaaagattttgagaatttggttgctgcggtccatgacaaaggtttaaaattaataattgacttcataccaaaccacaccagtgacaaacatccttggttccaatcgagtaggacacggagcgggaaatacactgattattacatctggcacaactgtacccacgccaacggtgtaaccacccctcccaacaactggctgagcgtgtatggaaactccagctggcagtttgatgaagaacgaaagcaatgttattttcaccagtttttgaaagagcagccggatcttaatttccgaaatcctgctgttcaagaagaaataaaggaaataataaagttctggctctcaaagggtgttgatgggtttagtttcgatgcagttaaatttcttctggaagcaaaggacctgagaaatgaaatccaagtaaatacatcccaaattccggacacagtgacccgctactcagaactgtaccacgacttcaccactacccaggtgggaatgcatgaccttgtccgggacttccggcagaccatgaaccagttcagccgggagcctggcagataccggttcatggggacggaggtgtcagctgagagcaccgagaggaccatggtgtactatggcctgtcatttatccaggaagctgacttccctttcaacaagtacttagccacactagacactctttccgggcatactgtgtacgaagctatcacatcctggatggaaaacatgccggaaggaaaatggcccaactggatgattggcggaccagagacttctcggctgacttctcgagtagggagcgagtatgtcaatgccatgaacatgcttctgttcacactcccaggaacccccataacttactatggggaagaaatagggatgggagatatttccattacaaacctcaacgagcgctatgacactaacgcccttctctccaagtcaccgatgcagtgggacaatagttcaaatgcggggtttactgaggccaaccacacctggctccccacaaactctgactaccacacagtgaatgtggatgtccaaaaaacccagccgagctcagcactgaggctatatcaggatctgagtctactccatgccagagagctgcttctcagcagaggctggttttgccttttgagggacgacaatcactctgttgtgtacaccagggagctggatggcatagataaagtcttccttgtggttctgaattttggagaatcatcaactgtgctaaatctacaggaaactatttcagatgttcctacaaaactgagaataagattaagtaccaatccagcctccaaaggcagtgatgttgatacccatgccgtttctctggagaagggagaggggctcatcttggaacacagcatgaagactctcctccatcaccagaaagctttcagagacaaatgttttatttccaaccgtgcatgctactccagcgtgctggaccttctgtatagctcgtgctaggcagctctgtaagaggtggccaccctgcgtctggtatgcttgccatcacacatgcaagggcctcaggaatggcatcagttcttagatatttctgtagcacgaatgcattgttttaggtaagattctcaaatgtttggaaggacaataaaatgtttaaaagatta

SEQ ID NO: 3934 - protein, 683 aa, Rattus norvegicus
  ref <308>: DATABASE ACCESSION NUMBER: SWISS-Prot / Q64319
  ref <309>: DATABASE ENTRY DATE: 2001-10-16
MNEDKDKRDSIQMSMKGCRTNNGFVQNEDIQEQDPDSRDTPQSNAVSIPAPEEPQLKVVRPYAGMPKEVLFQFSGQARYRVPREILFWLTVVSVFLLIGATIAIIIISPKCLDWWQAGPMYQIYPRSFKDSDKDGNGDLKGIQEKLDYITALNIKTIWITSFYKSPLKDFRYAVEDFKEIDPIFGTMKDFENLVAAVHDKGLKLIIDFIPNHTSDKHPWFQSSRTRSGKYTDYYIWHNCTHANGVTTPPNNWLSVYGNSSWQFDEERKQCYFHQFLKEQPDLNFRNPAVQEEIKEIIKFWLSKGVDGFSFDAVKFLLEAKDLRNEIQVNTSQIPDTVTRYSELYHDFTTTQVGMHDLVRDFRQTMNQFSREPGRYRFMGTEVSAESTERTMVYYGLSFIQEADFPFNKYLATLDTLSGHTVYEAITSWMENMPEGKWPNWMIGGPETSRLTSRVGSEYVNAMNMLLFTLPGTPITYYGEEIGMGDISITNLNERYDTNALLSKSPMQWDNSSNAGFTEANHTWLPTNSDYHTVNVDVQKTQPSSALRLYQDLSLLHARELLLSRGWFCLLRDDNHSVVYTRELDGIDKVFLVVLNFGESSTVLNLQETISDVPTKLRIRLSTNPASKGSDVDTHAVSLEKGEGLILEHSMKTLLHHQKAFRDKCFISNRACYSSVLDLLYSSC

SEQ ID NO: 3935 - DNA, 2283 bp, Homo sapiens
  ref <308>: DATABASE ACCESSION NUMBER: EMBL / L11696
  ref <309>: DATABASE ENTRY DATE: 1999-07-02
ccttactgcaggaaggcactccgaagacataagtcggtgagacatggctgaagataaaagcaagagagactccatcgagatgagtatgaagggatgccagacaaacaacgggtttgtccataatgaagacattctggagcagaccccggatccaggcagctcaacagacaacctgaagcacagcaccaggggcatccttggctcccaggagcccgacttcaagggcgtccagccctatgcggggatgcccaaggaggtgctgttccagttctctggccaggcccgctaccgcatacctcgggagatcctcttctggctcacagtggcttctgtgctggtgctcatcgcggccaccatagccatcattgccctctctccaaagtgcctagactggtggcaggaggggcccatgtaccagatctacccaaggtctttcaaggacagtaacaaggatgggaacggagatctgaaaggtattcaagataaactggactacatcacagctttaaatataaaaactgtttggattacttcattttataaatcgtcccttaaagatttcagatatggtgttgaagatttccgggaagttgatcccatttttggaacgatggaagattttgagaatctggttgcagccatacatgataaaggtttaaaattaatcatcgatttcataccaaaccacacgagtgataaacatatttggtttcaattgagtcggacacggacaggaaaatatactgattattatatctggcatgactgtacccatgaaaatggcaaaaccattccacccaacaactggttaagtgtgtatggaaactccagttggcactttgacgaagtgcgaaaccaatgttattttcatcagtttatgaaagagcaacctgatttaaatttccgcaatcctgatgttcaagaagaaataaaagaaattttacggttctggctcacaaagggtgttgatggttttagtttggatgctgttaaattcctcctagaagcaaagcacctgagagatgagatccaagtaaataagacccaaatcccggacacggtcacacaatactcggagctgtaccatgacttcaccaccacgcaggtgggaatgcacgacattgtccgcagcttccggcagaccatggaccaatacagcacggagcccggcagatacaggttcatggggactgaagcctatgcagagagtattgacaggaccgtgatgtactatggattgccatttatccaagaagctgattttcccttcaacaattacctcagcatgctagacactgtttctgggaacagcgtgtatgaggttatcacatcctggatggaaaacatgccagaaggaaaatggcctaactggatgattggtggaccagacagttcacggctgacttcgcgtttggggaatcagtatgtcaacgtgatgaacatgcttcttttcacactccctggaactcctataacttactatggagaagaaattggaatgggaaatattgtagccgcaaatctcaatgaaagctatgatattaatacccttcgctcaaagtcaccaatgcagtgggacaatagttcaaatgctggtttttctgaagctagtaacacctggttacctaccaattcagattaccacactgtgaatgttgatgtccaaaagactcagcccagatcggctttgaagttatatcaagatttaagtctacttcatgccaatgagctactcctcaacaggggctggttttgccatttgaggaatgacagccactatgttgtgtacacaagagagctggatggcatcgacagaatctttatcgtggttctgaattttggagaatcaacactgttaaatctacataatatgatttcgggccttcccgctaaaatgagaataaggttaagtaccaattctgccgacaaaggcagtaaagttgatacaagtggcatttttctggacaagggagagggactcatctttgaacacaacacgaagaatctccttcatcgccaaacagctttcagagatagatgctttgtttccaatcgagcatgctattccagtgtactgaacatactgtatacctcgtgttaggcacctttatgaagagatgaagacactggcatttcagtgggattgtaagcatttgtaatagcttcatgtacagcatgctgcttggtgaacaatcattaattcttcgatatttctgtagcttgaatgtaactgctttaagaaaggttctcaaatgttttgaaaaaaataaaatgtttaaaagt

SEQ ID NO: 3936 - protein, 685 aa, Homo sapiens
  ref <308>: DATABASE ACCESSION NUMBER: SWISS-Prot / Q07837
  ref <309>: DATABASE ENTRY DATE: 2002-06-15
MAEDKSKRDSIEMSMKGCQTNNGFVHNEDILEQTPDPGSSTDNLKHSTRGILGSQEPDFKGVQPYAGMPKEVLFQFSGQARYRIPREILFWLTVASVLVLIAATIAIIALSPKCLDWWQEGPMYQIYPRSFKDSNKDGNGDLKGIQDKLDYITALNIKTVWITSFYKSSLKDFRYGVEDFREVDPIFGTMEDFENLVAAIHDKGLKLIIDFIPNHTSDKHIWFQLSRTRTGKYTDYYIWHDCTHENGKTIPPNNWLSVYGNSSWHFDEVRNQCYFHQFMKEQPDLNFRNPDVQEEIKEILRFWLTKGVDGFSLDAVKFLLEAKHLRDEIQVNKTQIPDTVTQYSELYHDFTTTQVGMHDIVRSFRQTMDQYSTEPGRYRFMGTEAYAESIDRTVMYYGLPFIQEADFPFNNYLSMLDTVSGNSVYEVITSWMENMPEGKWPNWMIGGPDSSRLTSRLGNQYVNVMNMLLFTLPGTPITYYGEEIGMGNIVAANLNESYDINTLRSKSPMQWDNSSNAGFSEASNTWLPTNSDYHTVNVDVQKTQPRSALKLYQDLSLLHANELLLNRGWFCHLRNDSHYVVYTRELDGIDRIFIVVLNFGESTLLNLHNMISGLPAKIRIRLSTNSADKGSKVDTSGIFLDKGEGLIFEHNTKNLLHRQTAFRDRCFVSNRACYSSVLNILYTSC

SEQ ID NO: 3937 - DNA, 3418 bp, Rattus norvegicus
  ref <308>: DATABASE ACCESSION NUMBER: EMBL / M81642
  ref <309>: DATABASE ENTRY DATE: 2000-03-04
cccacgcgtccggtgagctgctcctaagaaagtaggcgaccgcgcgctcggccgcgcgggcagcctcgggacaatggggccccggcgcttgctgctcgtcgcggtcggcctcagcctgtgcggtcctttgctgtcttcccgcgttcctatgagacagccagaatctgagaggatgtatgctacgccgtatgctacgccaaacccccgctcattttttctcaggaatcccagtgaagatacatttgaacagttccccctaggggatgaggaggagaaaaatgaaagcataccgctcgagggcagggcagtctacttaaataaaagccgttttcctcccatgccgcctcctcccttcatctccgaggacgcctccggatatctgaccagcccctggctgacgctcttcataccctccgtgtacacgtttgtgttcatagtcagccttcccctgaacatcctggccatcgctgtgtttgtctttcggatgaaggtcaagaagccggccgtggtgtacatgctgcacctggccatggccgatgtcctcttcgtgtccgtgctccccttcaagatcagctactacttctccggcaccgattggcagttcgggtccggaatgtgtcgcttcgccaccgcagcgtgttattgtaacatgtacgcctccatcatgctcatgacagtcataagcattgaccggttcctggcagtggtgtaccccatccagtccctgtcctggcgcactctgggccgagccaacttcacctgcgtggtcatctgggtgatggccatcatgggggtggtgcccctcctcctcaaagagcagaccacccaggttccggggctcaacatcaccacctgccacgacgtcctcaacgagaccctgctgcatggcttttactcgtactatttctccgccttctccgccatcttctttcttgtgccgttgatcatttccacagtctgctacacgtccatcatccgatgcctcagctcctccgcggtggcgaaccggagcaagaagtcgcgggctttgttcctgtccgccgccgtgttctgcatcttcatcgtctgctttgggcccaccaacgtcctcctgattgtgcactacctgctcctctccgacagtcctggcacagagacggcctattttgcttacctcctctgcgtctgcgtgacgagcgtggctagctgcatcgaccccttgatttactactatgcctcctccgagtgccagaagcacctttacagcattttgtgctgcagagaaagctctgattccaacagttgcaacagcaccggccagctgatgcccagtaagatggatacctgctctagccacctgaataatagcatatacaaaaagctactagcttagggaaagggtggctggaaggttccatgaagaaaaggttggaaagtgaacagctggggaacccccatcagtccctggcaagaactgtattgacttcaacgccttaagaaaaccgccaacgtctgatttgcatgcatacttcttacaagtgctatcaagtgtatagattggataatcaccagcaaggtgatgggaacggagtcaaggtttccagtgttgcttagtgctgggatagtagttgagcgtcacctcttctatatctaggtgactttaacatacaggtggtgtgcacacacacagtggcagtgcagggtggattctgcgctttgacgctttcttgtttattccctggacagttgctatagaaataatctgattctctgacttaataaagtctgggttggtggatgctatgccctgggcagctgaagaccccagtgatagggaagaagcccatagtttagacttaagacagcttttgcctatgtgtctatatttatatattttcaaatatttgataggtaatgtttagtgatggaaggatgagacagtattacctgtgtaggggaaggtcttgaacaaccacagtttaagaattatcaaagcagttgaaaagccccgttttgatacgcaatttacttacaaaatacgtggaccaagactgagcataagactcgccaggaatgtaagaaacctttcaaagcagccaagcctgataactagacacagccatctgcatggaggcctctgagcatgaggtatatcataccccttcagctatgcctcccagagagcagagatgaggaccaccaggcccactccaccctgctaggggtctcatttgctgtgaactgattatgtcaattagaaattggcaagggaggggatgccatcttgggaggcagtaacacctgcacatctgacaatcggagaaaggtgtgtttacatccagcagctgtcccgcaagctggcccttgcacagacagacacacccatgtgccctggtcacactgttggatagtgggccgtagactgactgactgtcggagaatagctgagtcctgcccttactcaggcagcgcagagagctggcacgcggtcagctgtgacgtatgcgctgcaaaccatcgcacatagaagttgtcattagctggatgtcaccaagcatatgtcacacaagcacggcctatcagctaaaccgctttggatatctgagtctctgcttccggtaactatagattgggataaagacacaatacaagatgtatatttttaatacataagcccttcagtctacaataattagatgctattattacaaatgttttgttaaaaattactcagatcagcctggcattttgtcgcatgcctttaagcccagtaggtgggaggcagaggcagtcagatggtaaacaactttttttttttttgttctttttttcagagctggggaccgaacccaggaccttgtgcttgctcggcaagtgctctaccactgagctaaatccccaaccccggtaaacaacttttttaagaagcaagcaaacacactgaagtccagttttaagaaatatataggtcagtttggttaaaaataataataatgaaaggaaatttcattgattgaaattgattgcaatgtaggaaaattagcctgtatttctctcaagagttactgaagttgtttttaaagtcttttaatgccacagtgactaacaagcatataaaaatcttcatgcctttgacaaattaatttagaagttaatttaaaacatatccttttcctggttaaaaaaatatgttggcattttaagcagataagactagaaagtatttaagaaaacaaagtatttcccaatactgtagaatagcttccatgaaactcccctagttgtctggttaactcggttcctgtgttgatttatctaaatcattgactccctgtcctgtgctctgtgacttaacgtaactgttaccactgcacttgtgaactttcgtgtcattgttttgtgttcaccctctttttttaaaaaatatattaataaacta

SEQ ID NO: 3938 - protein, 432 aa, Rattus norvegicus
  ref <308>: DATABASE ACCESSION NUMBER: SWISS-Prot / P26824
  ref <309>: DATABASE ENTRY DATE: 2002-06-15
MGPRRLLLVAVGLSLCGPLLSSRVPMRQPESERMYATPYATPNPRSFFLRNPSEDTFEQFPLGDEEEKNESIPLEGRAVYLNKSRFPPMPPPPFISEDASGYLTSPWLTLFIPSVYTFVFIVSLPLNILAIAVFVFRMKVKKPAVVYMLHLAMADVLFVSVLPFKISYYFSGTDWQFGSGMCRFATAACYCNMYASIMLMTVISIDRFLAVVYPIQSLSWRTLGRANFTCVVIWVMAIMGVVPLLLKEQTTQVPGLNITTCHDVLNETLLHGFYSYYFSAFSAIFFLVPLIISTVCYTSIIRCLSSSAVANRSKKSRALFLSAAVFCIFIVCFGPTNVLLIVHYLLLSDSPGTETAYFAYLLCVCVTSVASCIDPLIYYYASSECQKHLYSILCCRESSDSNSCNSTGQLMPSKMDTCSSHLNNSIYKKLLA

SEQ ID NO: 3939 - DNA, 3472 bp, Homo sapiens
  ref <308>: DATABASE ACCESSION NUMBER: EMBL / M62424
  ref <309>: DATABASE ENTRY DATE: 2000-03-04
gcgcccgcgcgaccgcgcgccccagtcccgccccgccccgctaaccgccccagacacagcgctcgccgagggtcgcttggaccctgatcttacccgtgggcaccctgcgctctgcctgccgcgaagaccggctccccgacccgcagaagtcaggagagagggtgaagcggagcagcccgaggcggggcagcctcccggagcagcgccgcgcagagcccgggacaatggggccgcggcggctgctgctggtggccgcctgcttcagtctgtgcggcccgctgttgtctgcccgcacccgggcccgcaggccagaatcaaaagcaacaaatgccaccttagatccccggtcatttcttctcaggaaccccaatgataaatatgaaccattttgggaggatgaggagaaaaatgaaagtgggttaactgaatacagattagtctccatcaataaaagcagtcctcttcaaaaacaacttcctgcattcatctcagaagatgcctccggatatttgaccagctcctggctgacactctttgtcccatctgtgtacaccggagtgtttgtagtcagcctcccactaaacatcatggccatcgttgtgttcatcctgaaaatgaaggtcaagaagccggcggtggtgtacatgctgcacctggccacggcagatgtgctgtttgtgtctgtgctcccctttaagatcagctattacttttccggcagtgattggcagtttgggtctgaattgtgtcgcttcgtcactgcagcattttactgtaacatgtacgcctctatcttgctcatgacagtcataagcattgaccggtttctggctgtggtgtatcccatgcagtccctctcctggcgtactctgggaagggcttccttcacttgtctggccatctgggctttggccatcgcaggggtagtgcctctcgtcctcaaggagcaaaccatccaggtgcccgggctcaacatcactacctgtcatgatgtgctcaatgaaaccctgctcgaaggctactatgcctactacttctcagccttctctgctgtcttcttttttgtgccgctgatcatttccacggtctgttatgtgtctatcattcgatgtcttagctcttccgcagttgccaaccgcagcaagaagtcccgggctttgttcctgtcagctgctgttttctgcatcttcatcatttgcttcggacccacaaacgtcctcctgattgcgcattactcattcctttctcacacttccaccacagaggctgcctactttgcctacctcctctgtgtctgtgtcagcagcataagctcgtgcatcgaccccctaatttactattacgcttcctctgagtgccagaggtacgtctacagtatcttatgctgcaaagaaagttccgatcccagcagttataacagcagtgggcagttgatggcaagtaaaatggatacctgctctagtaacctgaataacagcatatacaaaaagctgttaacttaggaaaagggactgctgggaggttaaaaagaaaagtttataaaagtgaataacctgaggattctattagtccccacccaaactttattgattcacctcctaaaacaacagatgtacgacttgcatacctgctttttatgggagctgtcaagcatgtatttttgtcaattaccagaaagataacaggacgagatgacggtgttattccaagggaatattgccaatgctacagtaataaatgaatgtcacttctggatatagctaggtgacatatacatacttacatgtgtgtatatgtagatgtatgcacacacatatattatttgcagtgcagtatagaataggcactttaaaacactctttccccgcaccccagcaattatgaaaataatctctgattccctgatttaatatgcaaagtctaggttggtagagtttagccctgaacatttcatggtgttcatcaacagtgagagactccatagtttgggcttgtaccacttttgcaaataagtgtattttgaaattgtttgacggcaaggtttaagttattaagaggtaagacttagtactatctgtgcgtagaagttctagtgttttcaattttaaacatatccaagtttgaattcctaaaattatggaaacagatgaaaagcctctgttttgatatgggtagtattttttacattttacacactgtacacataagccaaaactgagcataagtcctctagtgaatgtaggctggctttcagagtaggctattcctgagagctgcatgtgtccgcccccgatggaggactccaggcagcagacacatgccagggccatgtcagacacagattggccagaaaccttcctgctgagcctcacagcagtgagactggggccactacatttgctccatcctcctgggattggctgtgaactgatcatgtttatgagaaactggcaaagcagaatgtgatatcctaggaggtaatgaccatgaaagacttctctacccatcttaaaaacaacgaaagaaggcatggacttctggatgcccatccactgggtgtaaacacatctagtagttgttctgaaatgtcagttctgatatggaagcacccattatgcgctgtggccactccaataggtgctgagtgtacagagtggaataagacagagacctgccctcaagagcaaagtagatcatgcatagagtgtgatgtatgtgtaataaatatgtttcacacaaacaaggcctgtcagctaaagaagtttgaacatttgggttactatttcttgtggttataacttaatgaaaacaatgcagtacaggacatatattttttaaaataagtctgatttaattgggcactatttatttacaaatgttttgctcaatagattgctcaaatcaggttttcttttaagaatcaatcatgtcagtctgcttagaaataacagaagaaaatagaattgacattgaaatctaggaaaattattctataatttccatttacttaagacttaatgagactttaaaagcattttttaacctcctaagtatcaagtatagaaaatcttcatggaattcacaaagtaatttggaaattaggttgaaacatatctcttatcttacgaaaaaatggtagcattttaaacaaaatagaaagttgcaaggcaaatgtttatttaaaagagcaggccaggcgcggtggctcacgcctgtaatcccagcactttgggaggctgaggcgggtggatcacgaggtcaggagatcgagaccatcctggctaacacggtgaaacccgtctctactaaaaatgcaaaaaaaattagccgggcgtggtggcaggcacctgtagtcccagctactcgggaggctgaggcaggagactggcgtgaacccaggaggcggaccttgtagtgagccgagatcgcgccactgtgctccagcctgggcaacagagcaagactccatctc

SEQ ID NO: 3940 - protein, 425 aa, Homo sapiens
  ref <308>: DATABASE ACCESSION NUMBER: SWISS-Prot / P25116
  ref <309>: DATABASE ENTRY DATE: 2002-06-15
MGPRRLLLVAACFSLCGPLLSARTRARRPESKATNATLDPRSFLLRNPNDKYEPFWEDEEKNESGLTEYRLVSINKSSPLQKQLPAFISEDASGYLTSSWLTLFVPSVYTGVFVVSLPLNIMAIVVFILKMKVKKPAVVYMLHLATADVLFVSVLPFKISYYFSGSDWQFGSELCRFVTAAFYCNMYASILLMTVISIDRFLAVVYPMQSLSWRTLGRASFTCLAIWALAIAGVVPLLLKEQTIQVPGLNITTCHDVLNETLLEGYYAYYFSAFSAVFFFVPLIISTVCYVSIIRCLSSSAVANRSKKSRALFLSAAVFCIFIICFGPTNVLLIAHYSFLSHTSTTEAAYFAYLLCVCVSSISCCIDPLIYYYASSECQRYVYSILCCKESSDPSSYNSSGQLMASKMDTCSSNLNNSIYKKLLT

SEQ ID NO: 3941 - DNA, 3418 bp, Rattus norvegicus; identical to SEQ ID NO: 3937
  ref <308>: DATABASE ACCESSION NUMBER: EMBL / M81642
  ref <309>: DATABASE ENTRY DATE: 2000-03-04

SEQ ID NO: 3942 - protein, 432 aa, Rattus norvegicus; identical to SEQ ID NO: 3938
  ref <308>: DATABASE ACCESSION NUMBER: SWISS-Prot / P26824
  ref <309>: DATABASE ENTRY DATE: 2002-06-15

SEQ ID NO: 3943 - DNA, 3472 bp, Homo sapiens; identical to SEQ ID NO: 3939
  ref <308>: DATABASE ACCESSION NUMBER: EMBL / M62424
  ref <309>: DATABASE ENTRY DATE: 2000-03-04

SEQ ID NO: 3944 - protein, 425 aa, Homo sapiens; identical to SEQ ID NO: 3940
  ref <308>: DATABASE ACCESSION NUMBER: SWISS-Prot / P25116
  ref <309>: DATABASE ENTRY DATE: 2002-06-15

SEQ ID NO: 3945 - DNA, 2153 bp, Rattus norvegicus
  ref <308>: DATABASE ACCESSION NUMBER: EMBL / M81687
  ref <309>: DATABASE ENTRY DATE: 2000-03-04
cgtcccctccgttctgcatccccaaacttcagccgcagctctgtttcaacccatcggctgcttgcttcaaatcagacagcaccgcgacccagacacccgagtccgcggagtgaaagcacaacgccgagtaggaccagaccaggaaaatagactcgtgaagcagcaactctggattgggagggcagaagccaacaagtgagaaggcgcggcgtttccggggcgctgtgcgaaagctagagcaggcgccagagaagacagctcgagctcagaacccgagaccaagcctctctcccggaggcagctcagctcctatcttctctaggcccgctgcagcgtgcgctgggcttcgttttatgcgggtacgagccacgtccccggggaatatgcagcgtgcgtggatcctgctcaccttgggcttgatggcctgtgtgtcggcagagacgagagcagagctgacatctgataaggacatgtaccttgacagcagctccattgaggaagcttcaggattatatcctattgatgatgatgactattcttctgcctctggctcaggagcttatgaagacaaagggagtccagatctgacaacatcccaactgattccaaggatctccctcactagtgctgctcccgaagtggaaaccatgacgttgaagacacaaagcatcacacccactcagaccgagtcacccgaagaaactgacaagaaggagtttgaaatctctgaggcagaagaaaagcaggaccctgctgtaaaaagcacagacgtgtacaccgagaaacattcagacaatctgttcaagcggacggaagttctagcagctgtcattgctggcggtgtgattggctttctctttgccattttcctcatcctgttgttggtgtaccgcatgcggaagaaagacgaaggaagctacgaccttggagaacgcaaaccgtccagcgcagcttaccagaaggcacccactaaggagttttatgcataaaactcccacttagtgtctctatttaagagatcactgaacttttcaaaataaagctttagcatagaataatgaatatctttgttatctgttttgttcattacagagccatgctggccctttaatgatgaagatcccattgtatttaaaatttttcatatatttctttagaatgacttaaaagtaaaaatttaacatctgcagtgttctgtgaatagcagtggcaaaatattttgttacaaaaacccttgacattcatggaattgatttgaacatctatgtgcaaatacaaaatgattgtgtttgtcctctggttcaaagatgactgctgttcccctcatcagcagatctccagttgaccttaccgagttgatctttgttaatttatctcttgttcctcttctctgccctcccttcttgtctcctcccttaaaaacaaaaccttatgccttttgtagctgtcatggtgcaatttgtctttgaatgattacaataatggtaatttagtgtatatgtgatttttttcaattatgtaaactttaacctcctctttatgtaatttttttaaatgtcagactacccattttacacttgctttaatttccattccctgtagcttcaggcagatttgcaaaggcaaattataaaattggattattactacgaaactgttagtcctagttatctaagcagtcttctcttggaggatttgacatcactgacaagcctcagcaaacccaaagatgctaacagtatttgagaagttgctacagactcctttggccactgtacttgctagtttacaatttgaaggtacaaggaagagtttaaaggaaaaaaaagatcagtttttgttcttaaaaatgcatttaagttgtaaacatctttttaagcctttgaagtgcctatgattctatgtaacttgttgcagactggtgttaatgagtatatataacagtttttaaaaagttggtattttataagcacagacaattctaatggtaacttttgtagtcttatgaatagacataaattgtaatttgggaacaagcaaactactgaataaatcacatggcctaatattgaaaatgtcactgttataaatttgtacatttcttatcaaatgtacagcttccctttgctatgactgactgtctgttctcagtg

SEQ ID NO: 3946 - protein, 201 aa, Rattus norvegicus
  ref <308>: DATABASE ACCESSION NUMBER: SWISS-Prot / P34900
  ref <309>: DATABASE ENTRY DATE: 1996-02-01
MQRAWILLTLGLMACVSAETRAELTSDKDMYLDSSSIEEASGLYPIDDDDYSSASGSGAYEDKGSPDLTTSQLIPRISLTSAAPEVETMTLKTQSITPTQTESPEETDKKEFEISEAEEKQDPAVKSTDVYTEKHSDNLFKRTEVLAAVIAGGVIGFLFAIFLILLLVYRMRKKDEGSYDLGERKPSSAAYQKAPTKEFYA

SEQ ID NO: 3947 - DNA, 463 bp, Homo sapiens
  misc_feature (1)..(463): n=a, c, g or t
  ref <308>: DATABASE ACCESSION NUMBER: EMBL / AI373958
  ref <309>: DATABASE ENTRY DATE: 2000-03-03
ttttttttttttttttttttacttttggcatgacagactttattttggcactttcacaaatattttgctttacagcagggacaaaatatttgccagaaatttttcttttcctggcacggatattcccagcagttgttattctatgaattgaatttcactctgctttgcacagttagaggtatacccattcctaccctctgtaattgagggacacagcgtggctttagaaagctaggctatcgtttccttttagtcactctaaagtgaattggttctgtaagtgatggggcaggaatctgagaattaattaaggccattaaggatttaaagtaaacactgttccaagtgttgcttaaaaaaatgtttttaatgaattatgtggcaattccagggaatgttctcaaaatgaaatattcatactttattaaaagtaaatnggatgtgggaaaagnngctttttttg

SEQ ID NO: 3948 - protein, 201 aa, Homo sapiens [sequence omitted]

SEQ ID NO: 3949 - DNA, 1163 bp, Rattus norvegicus
  ref <308>: DATABASE ACCESSION NUMBER: EMBL / M82826
  ref <309>: DATABASE ENTRY DATE: 2000-03-04
tttatggaagttctgacaaaaatccttcaacaaggaacagaatttgatacacttgctgaaaccgtgttggcagatcggttcgagagacttgtggaactggtcacaatgatgggagaccagggagagctccctatagctatggctctggccaatgtggtcccttgttctcagtgggatgagctggctcgagttctggtcacgctgtttgattctcggcatttgctctaccagctgctctggaacatgttttctaaggaggtagagttggcagactccatgcagactctctttcgaggcaacagcttggccagtaagataatgacgttctgcttcaaggtgtacggtgctacttacctacaaaagctcttggaccccttgttacgaatcattatcacatcctccgattggcagcatgttagctttgaagtggatcctaccaggttagagccctctgagagccttgaggagaaccagaggaacctccttcagatgacagagaagttcttccatgccatcatcagttcttcctcagagttcccctcgcagcttcgaagtgtctgccattgtttgtaccaggcaacttgccactccctactgaataaagctacagtaaaagaaaaaaaggaaaacaaaaaatcagttcctgagagttcctgtttctcctgtggtttaaataataggtggttagccagcgcttccctcagaacagcatcggtgccgtcggaagtgccatgttcctgaggttcatcaaccctgccattgtctcaccgtatgaagcagggattttagataaaaagccaccacctagaattgaaaggggcttgaagttaatgtcaaaggtccttcagagcattgccaatcatgtactgttcacaaaggaagagcacatgaggccttttaatgattttgtgaaaagcaactccgacttggcacggaggtttttcttagatatagcatcagattgtcccacaagtgacgcagtaaaccatagtctttccttcatcagtgatggcaatgtgcttgctttacatcggctgctttggaataatcaggagaaaattggccagtatctttccagcaacagggatcataaagctgttggaagacgacctttcgataagatggccacacttcttgcatatctgggtcctccggagcacaag

SEQ ID NO: 3950 - protein, 246 aa, Rattus norvegicus
  ref <308>: DATABASE ACCESSION NUMBER: SWISS-Prot / AAA41691
  ref <309>: DATABASE ENTRY DATE: 2001-12-01
FMEVLTKILQQGTEFDTLAETVLADRFERLVELVTMMGDQGELPIAMALANVVPCSQWDELARVLVTLFDSRHLLYQLLWNMFSKEVELADSMQTLFRGNSLASKIMTFCFKVYGATYLQKLLDPLLRIIITSSDWQHVSFEVDPTRLEPSESLEENQRNLLQMTEKFFHAIISSSSEFPSQLRSVCHCLYQATCHSLLNKATVKEKKENKKSVPESSCFSCGLNNRWLASASLRTASVPSEVPCS

SEQ ID NO: 3951 - DNA, 1163 bp, Rattus norvegicus; identical to SEQ ID NO: 3949
  ref <308>: DATABASE ACCESSION NUMBER: EMBL / M82826
  ref <309>: DATABASE ENTRY DATE: 2000-03-04

SEQ ID NO: 3952 - protein, 246 aa, Rattus norvegicus; identical to SEQ ID NO: 3950
  ref <308>: DATABASE ACCESSION NUMBER: SWISS-Prot / AAA41691
  ref <309>: DATABASE ENTRY DATE: 2001-12-01

SEQ ID NO: 3953 - DNA, 1186 bp, Rattus norvegicus
  ref <308>: DATABASE ACCESSION NUMBER: EMBL / M83107
  ref <309>: DATABASE ENTRY DATE: 2000-03-04
agggcgggttctcaggcaccttcactggcttggatccctcggggtacaggctgttcaccaacttgctcagaatcacgccattcttcagccacacctggaagcccagacagcaacgctactctccttccagcccacaaacgaccaagccttttctgcctcaacatggccaacaagggtccatcctatggcatgagccgtgaagtgcagtccaagattgagaagaagtatgatgaggagctggaggagcggctagtggagtggattgtaatgcagtgtggccctgatgtgggccgtccagatcgtgggcgcctgggcttccaggtgtggctgaagaatggcgtgattctgagcaagttggtgaacagcctgtaccccgagggatccaagccagtgaaggtgcctgagaacccgccctccatggtcttcaagcagatggaacaggtggctcaattcttgaaggcagctgaggattatggagtcacgaagactgacatgttccagactgttgacctctttgaaggaaaagatatggcagcagtgcagaggactgtaatggctttgggcagtttggccgtgaccaagaacgatggacactaccgtggagatcccaactggtttatgaagaaagcccaggagcataagagggagttcacagacagtcaactgcaggaggggaagcacgtcattggccttcaaatgggcagcaacagaggggcctcacaggctggcatgacaggctatgggcgaccccggcagatcatcagttagaaagggaaggccagctctgagctgcagcatcctgcttagcctgcctcacccacgcctatataggttcttagcccggacagctttgaggtatcactgggcaaagatgactgcacatgggcagctcccacctatcctcagcctcagccccgcttcttaccccagagccaccactgtcctggcccctgttcccagctgtccccccacctctaccgtttcccccatcctggagtaagcagggagaagtgggctgaggtagcctgactgtaggccagcccactgtccttggaagccaatgtcctttgaaagagaccctgcctctacatctttttctggaatattttttgggttgaaattcaaaaaggaaaaaaatatatacatatacatatatctccaaaaaaaataaaaaaaaaaaaaaaaa

SEQ ID NO: 3954 - protein, 200 aa, Rattus norvegicus
  ref <308>: DATABASE ACCESSION NUMBER: SWISS-Prot / P31232
  ref <309>: DATABASE ENTRY DATE: 2001-10-16
ANKGPSYGMSREVQSKIEKKYDEELEERLVEWIVMQCGPDVGRPDRGRLGFQVWLKNGVILSKLVNSLYPEGSKPVKVPENPPSMVFKQMEQVAQFLKAAEDYGVTKTDMFQTVDLFEGKDMAAVQRTVMALGSLAVTKNDGHYRGDPNWFMKKAQEHKREFTDSQLQEGKHVIGLQMGSNRGASQAGMTGYGRPRQIIS

SEQ ID NO: 3955 - DNA, 1082 bp, Homo sapiens
  ref <308>: DATABASE ACCESSION NUMBER: Refseq / XM_006432
  ref <309>: DATABASE ENTRY DATE: 2002-08-01
atcctgtctgtccgaacccagacacaagtcttcactccttcctgcgagccctgaggaagccttctttccccagacatggccaacaagggtccttcctatggcatgagccgcgaagtgcagtccaaaatcgagaagaagtatgacgaggagctggaggagcggctggtggagtggatcatagtgcagtgtggccctgatgtgggccgcccagaccgtgggcgcttgggcttccaggtctggctgaagaatggcgtgattctgagcaagctggtgaacagcctgtaccctgatggctccaagccggtgaaggtgcccgagaacccaccctccatggtcttcaagcagatggagcaggtggctcagttcctgaaggcggctgaggactatggggtcatcaagactgacatgttccagactgttgacctctttgaaggcaaagacatggcagcagtgcagaggaccctgatggctttgggcagcttggcagtgaccaagaatgatgggcactaccgtggagatcccaactggtttatgaagaaagcgcaggagcataagagggaattcacagagagccagctgcaggagggaaagcatgtcattggccttcagatgggcagcaacagaggggcctcccaggccggcatgacaggctacggacgacctcggcagatcatcagttagagcggagagggctagccctgagcccggccctcccccagctccttggctgcagccatcccgcttagcctgcctcacccacacccgtgtggtaccttcagccctggccaagctttgaggctctgtcactgagcaatggtaactgcacctgggcagctcctccctgtgcccccagcctcagcccaacttcttacccgaaagcatcactgccttggcccctccctcccggctgcccccatcacctctactgtctcctccctgggctaagcaggggagaagcgggctgggggtagcctggatgtgggccaagtccactgtcctccttggcggcaaaagcccattgaagaagaaccagcccagcctgccccctatcttgtcctggaatatttttggggttggaactc

SEQ ID NO: 3956 - protein, 201 aa, Homo sapiens
  ref <308>: DATABASE ACCESSION NUMBER: Refseq / XP_006432
  ref <309>: DATABASE ENTRY DATE: 2002-08-01
MANKGPSYGMSREVQSKIEKKYDEELEERLVEWIIVQCGPDVGRPDRGRLGFQVWLKNGVILSKLVNSLYPDGSKPVKVPENPPSMVFKQMEQVAQFLKAAEDYGVIKTDMFQTVDLFEGKDMAAVQRTLMALGSLAVTKNDGHYRGDPNWFMKKAQEHKREFTESQLQEGKHVIGLQMGSNRGASQAGMTGYGRPRQIIS

SEQ ID NO: 3957 - DNA, 2142 bp, Rattus norvegicus
  ref <308>: DATABASE ACCESSION NUMBER: EMBL / M83298
  ref <309>: DATABASE ENTRY DATE: 2000-03-04
ggggccgccgtcgctgtcctagccgccgccgctgccgccgccgccgctgccgtcttcaccgcgggagaaggagcacgagacaggacgcccctgagtgaacgccaccatcctgccgacagctccgcccgggctgcttcctttccgcccaggtccccgtcccctcccccctcaggtgccatccgcctccatccgcgccctcgatccccccatccccaggtgagggggctgagccccggtcgcggaggcccggacgagcccggcagggtcaccatttgcagcgcgacatggcaggagctggaggagggaatgatattcaatggtgtttttctcaggtgaaaggagcagttgatgatgacgtagcagaagcagatataatttctacagtagagtttaatcattctggagaattactagccacaggagataaaggtgggagagtcgtcatctttcaacaagagcaggagaacaaaatccagtctcatagcagaggagaatacaatgtttacagcaccttccagagccatgagccagaatttgactacttgaaaagcttagaaatagaagagaagatcaacaaaattaggtggttaccccagaaaaatgctgcccagtttttattgtctaccaatgataaaacaataaaattatggaaaatcagtgaaagagacaaaagaccagaaggctataacttgaaagaggaagatggaaggtatagagaccctactacagtcactacactacgagtgccggtgtttaggcccatggatctaatggtggaggccagtccgcggagaatatttgccaacgcccatacctaccacatcaactccatttctatcaatagtgattatgaaacctacttatcagcagatgatttgcgaattaatctctggcatctggaaattacagacaggagttttaatattgtggacattaagcctgccaatatggaggagctcacggaggtgatcacagccgcagagttccatcccaacagctgtaacacgtttgtgtacagcagcagtaaagggaccattcgcttatgtgacatgagggcatctgcactctgtgacaggcattctaaactgtttgaagaacccgaagatcccagcaacaggtcgtttttttctgaaatcatctcctcaatttctgatgtaaaattcagccacagtggtcgctatatgatgactagagactatttgtcagtcaaagtttgggacttgaatatggaaaacaggcccgtggagacataccaggtacacgaatacctcagaagtaaactttgctcactgtatgaaaacgactgcatatttgacaaatttgaatgttgttggaatgggtctgacagtgttgtcatgactggatcctacaataatttcttcagaatgttcgacaggaacacaaagcgggatataactctagaagcatcgcgagaaaacaataagcctcgtacagttttgaaaccacgcaaagtctgtgcaagtggcaagcgaaagaaagatgaaataagtgttgacagtctagacttcaacaagaaaatccttcatacagcctggcatcccaaggaaaacatcattgctgtagcgactacaaacaatctgtatatatttcaagacaaagtgaattaggctggcattctctgcagaggagccacttcctgcttagtgagatagttgaatctagcattcgtacctataagagagcggtccattgtggcgtccctttccagtgtttgacagtgtgccattcaacaacacatttgatagccacatggagaaagctgtgcggatgcatcccgggctgtttccatgtctgctagccatttagggaagggaagggcacttttaatttaatgacttcttgcaccatcttgcctggtggactggactggactgtgtcagcattgatgtactccactttttatgccttccattgtgatgacgtcaaacacagtgaacgccttcagtcatgctatggaatttgtgtatcctcattactgtatcatttgtgggagtgcaagggtaatcatttattgaactgcaagagcaagatatttgtgcggaatgatcatgggtggggccaagagaaatttaagaaagcttttaattctcgatgtgttgtcctgggtaactagggaagatg

SEQ ID NO: 3958 - protein, 447 aa, Rattus norvegicus; identical to SEQ ID NO: 1748
  ref <308>: DATABASE ACCESSION NUMBER: SWISS-Prot / P36876
  ref <309>: DATABASE ENTRY DATE: 2001-10-16

SEQ ID NO: 3959 - DNA, 796 bp, Homo sapiens
  ref <308>: DATABASE ACCESSION NUMBER: EMBL / BM014893
  ref <309>: DATABASE ENTRY DATE: 2001-10-31
gttgtcatgactggatcttacaataatttcttcagaatgttgacagaaacacaaagcgagacataaccctagaagcatcgcgggaaaacaataagcctcgcacagttctgaagcctcgcaaagtctgtgcaagtggcaagcgaaagaaagatgaaataagtgttgacagcctagacttcaataagaaaatccttcacacagcctggcactcgttgtgacttacacagagcaaaattgtgctaaaggcttttctactctgagatctcaatgcgaaatgaaaactcaggcagtttagtccatagtggtactatttgatgatattttccattaataaaatgtaatttcagattattcgtttacaagctttataattttatgattttttaatcgtgtttgtcacagacttccctagtgttgtactacacgtagtcagaagcgagtgtccttttctttgcttcaggctaagagctgcctcgctcttgtccccccattaggattctattacatatgcaatgtaggttcaacctgtccctttccctgccagcaaaccccacgcacctaagagaaattttagcttatatatgacggtatatttacaaaaagagaaagagaaaatctggtattgcaatgatctgtgccttctttttaccaccctctgattggagctttgtgatgcagctaccatgattcaaaaaaattaaaattacaaaaaaaatctgccacttatccaagtccactagaggccactgtcttcaaagcttctctcaccctagcccaaggtcctaagaggagacgc

SEQ ID NO: 3960 - protein, 447 aa, Homo sapiens; identical to SEQ ID NO: 1750
  ref <308>: DATABASE ACCESSION NUMBER: Refseq / NP_002708
  ref <309>: DATABASE ENTRY DATE: 2001-12-10

SEQ ID NO: 3961 - DNA, 2142 bp, Rattus norvegicus; identical to SEQ ID NO: 3957
  ref <308>: DATABASE ACCESSION NUMBER: EMBL / M83298
  ref <309>: DATABASE ENTRY DATE: 2000-03-04

SEQ ID NO: 3962 - protein, 447 aa, Rattus norvegicus; identical to SEQ ID NO: 1748
  ref <308>: DATABASE ACCESSION NUMBER: SWISS-Prot / P36876
  ref <309>: DATABASE ENTRY DATE: 2001-10-16

SEQ ID NO: 3963 - DNA, 796 bp, Homo sapiens; identical to SEQ ID NO: 3959
  ref <308>: DATABASE ACCESSION NUMBER: EMBL / BM014893
  ref <309>: DATABASE ENTRY DATE: 2001-10-31

SEQ ID NO: 3964 - protein, 447 aa, Homo sapiens; identical to SEQ ID NO: 1750
  ref <308>: DATABASE ACCESSION NUMBER: Refseq / NP_002708
  ref <309>: DATABASE ENTRY DATE: 2001-12-10

SEQ ID NO: 3965 - DNA, 2142 bp, Rattus norvegicus; identical to SEQ ID NO: 3957
  ref <308>: DATABASE ACCESSION NUMBER: EMBL / M83298
  ref <309>: DATABASE ENTRY DATE: 2000-03-04

SEQ ID NO: 3966 - protein, 447 aa, Rattus norvegicus; identical to SEQ ID NO: 1748
  ref <308>: DATABASE ACCESSION NUMBER: SWISS-Prot / P36876
  ref <309>: DATABASE ENTRY DATE: 2001-10-16

SEQ ID NO: 3967 - DNA, 796 bp, Homo sapiens; identical to SEQ ID NO: 3959
  ref <308>: DATABASE ACCESSION NUMBER: EMBL / BM014893
  ref <309>: DATABASE ENTRY DATE: 2001-10-31

SEQ ID NO: 3968 - protein, 447 aa, Homo sapiens; identical to SEQ ID NO: 1750
  ref <308>: DATABASE ACCESSION NUMBER: Refseq / NP_002708
  ref <309>: DATABASE ENTRY DATE: 2001-12-10

SEQ ID NO: 3969 - DNA, 2142 bp, Rattus norvegicus; identical to SEQ ID NO: 3957
  ref <308>: DATABASE ACCESSION NUMBER: EMBL / M83298
  ref <309>: DATABASE ENTRY DATE: 2000-03-04

SEQ ID NO: 3970 - protein, 447 aa, Rattus norvegicus; identical to SEQ ID NO: 1748
  ref <308>: DATABASE ACCESSION NUMBER: SWISS-Prot / P36876
  ref <309>: DATABASE ENTRY DATE: 2001-10-16

SEQ ID NO: 3971 - DNA, 796 bp, Homo sapiens; identical to SEQ ID NO: 3959
  ref <308>: DATABASE ACCESSION NUMBER: EMBL / BM014893
  ref <309>: DATABASE ENTRY DATE: 2001-10-31

SEQ ID NO: 3972 - protein, 447 aa, Homo sapiens; identical to SEQ ID NO: 1750
  ref <308>: DATABASE ACCESSION NUMBER: Refseq / NP_002708
  ref <309>: DATABASE ENTRY DATE: 2001-12-10

SEQ ID NO: 3973 - DNA, 2142 bp, Rattus norvegicus; identical to SEQ ID NO: 3957
  ref <308>: DATABASE ACCESSION NUMBER: EMBL / M83298
  ref <309>: DATABASE ENTRY DATE: 2000-03-04

SEQ ID NO: 3974 - protein, 447 aa, Rattus norvegicus; identical to SEQ ID NO: 1748
  ref <308>: DATABASE ACCESSION NUMBER: SWISS-Prot / P36876
  ref <309>: DATABASE ENTRY DATE: 2001-10-16

SEQ ID NO: 3975 - DNA, 796 bp, Homo sapiens; identical to SEQ ID NO: 3959
  ref <308>: DATABASE ACCESSION NUMBER: EMBL / BM014893
  ref <309>: DATABASE ENTRY DATE: 2001-10-31

SEQ ID NO: 3976 - protein, 447 aa, Homo sapiens; identical to SEQ ID NO: 1750
  ref <308>: DATABASE ACCESSION NUMBER: Refseq / NP_002708
  ref <309>: DATABASE ENTRY DATE: 2001-12-10

SEQ ID NO: 3977 - DNA, 2142 bp, Rattus norvegicus; identical to SEQ ID NO: 3957
  ref <308>: DATABASE ACCESSION NUMBER: EMBL / M83298
  ref <309>: DATABASE ENTRY DATE: 2000-03-04

SEQ ID NO: 3978 - protein, 447 aa, Rattus norvegicus; identical to SEQ ID NO: 1748
  ref <308>: DATABASE ACCESSION NUMBER: SWISS-Prot / P36876
  ref <309>: DATABASE ENTRY DATE: 2001-10-16

SEQ ID NO: 3979 - DNA, 796 bp, Homo sapiens; identical to SEQ ID NO: 3959
  ref <308>: DATABASE ACCESSION NUMBER: EMBL / BM014893
  ref <309>: DATABASE ENTRY DATE: 2001-10-31

SEQ ID NO: 3980 - protein, 447 aa, Homo sapiens; identical to SEQ ID NO: 1750
  ref <308>: DATABASE ACCESSION NUMBER: Refseq / NP_002708
  ref <309>: DATABASE ENTRY DATE: 2001-12-10

SEQ ID NO: 3981 - DNA, 3185 bp, Rattus norvegicus
  ref <308>: DATABASE ACCESSION NUMBER: EMBL / M83561
  ref <309>: DATABASE ENTRY DATE: 2000-03-04
ggctaggaagcccgcttcacgtccccacgcttgttccctccacctcgctctcctgagagcagagagcgcgcggtgtgcagactcggagcattccgggaggatgaggcggggacccagcccaagttgggtgcatcttgcgggcgtgaggccacaactgggtttcggcatgaattaagaagcttgaaagatggagcgcagcacagtccttatccaacccgggctctggaccagggacaccagctggacactcctctatttcctgtgctacatcctccctcagacctcccctcaagtgctcaggatcggagggatttttgaaactgtggaaaatgaacctgttaatgttgaagaattagctttcaagtttgcagtcaccagtattaaccgaaaccgaaccttgatgcccaataccacattaacctatgacatccagagaattaatctttttgatagttttgaagcctcccgaagagcatgcgaccagctggctctcggggtggccgcactcttcggcccttcccacagctcctccgtcagtgctgtacagtctatttgcaatgctctggaagttccacacattcagactcgctggaaacacccttccgtggacagcagagacctattttatatcaacctctacccggactatgcggctatcagcagggcggtcctggatttggtcctctattacaactggaaaacagtgacggtggtgtatgaagatagcacaggtctaattcgtctgcaagagctcatcaaagctccctccagatacaacattaaaatcaaaatccgccagcttccccctgcgaataaagacgccaaacctctgctcaaggagatgaagaaaagcaaagagttctatgtgatatttgattgttcgcacgaaacagctgcggaaattcttaagcagattttgttcatgggcatgatgactgaatattatcactacttcttcacaaccctggacttgtttgctttagatctggaactctataggtacagcggtgtaaatatgactggatttcggttgctgaatattgacaaccctcacgtgtcatccatcattgagaagtggtccatggagaggttgcaggccccgcccagacccgagactggtcttctggatggcatgatgacaactgaagcagcgctgatgtacgatgctgtgtacatggtagccattgcgtcccaccgtgcctctcagctgaccgtcagctccctgcagtgccatcgacataagccatggcgccttggacccagatttatgaacctcatcaaagaggctcggtgggacggcttgactgggcggatcaccttcaataagaccgatggcttgagaaaggattttgacctggacattatcagtctcaaagaggaaggaactgaaaagattgggatttggaactccaacagtgggctgaacatgacggatggcaacagagacaggtccaacaatatcacggactcgctggctaaccgcacactcattgtcaccactattctggaagagccctacgtgatgtacaggaaatccgataagcccttgtatggaaacgacaggtttgaaggatattgcctggatctgctgaaagaactgtccaatatcctgggttttctttacgatgttaaactggttcctgatggcaaatatggagcacagaatgacaaaggggaatggaatgggatggtaaaagaactcatcgaccacagagctgacctggcagtggcccctctcaccatcacatacgtacgggagaaagtcattgacttctccaagcccttcatgaccctgggcattagcatcctttaccggaagcccaatggaaccaacccgggtgtcttctccttcctcaaccccctatctccggacatttggatgtacgtgctgctcgcctgcctaggagtcagttgtgtactgtttgtgattgcgaggttcacaccctacgagtggtataacccccacccatgcaaccccgactcagacgtggtggaaaacaatttcactttgctaaatagtttctggtttggagttggagctctcatgcagcaaggatcagagctgatgcccaaggctctatcgaccagaatagttggaggaatatggtggtttttcaccctaatcatcatttcatcctacacggccaacctggctgccttcttgacggtagaaagaatggaatcccccatcgattccgcagacgatctggccaaacaaaccaagatagaatatggggcagtcagagatggctcgacgatgaccttcttcaagaaatcaaagatctccacctatgagaaaatgtgggctttcatgagcagtagacagcagagcgcactggttaaaaacagtgacgaggggatccaaagggtgctcaccaccgactacgcactgctgatggagtccaccagcattgagtatgtgacgcagaggaactgcaacctcactcagatcgggggcctcatagactccaaaggctatggagtggggacgcctatcggctccccttaccgggataaaattacgattgccattcttcaactgcaagaagaagggaagcttcatatgatgaaagagaagtggtggagggggaatggctgccctgaagaagacagtaaggaagccagtgctctgggagtggaaaatatcggcggcatcttcattgttctggctgcaggactcgtgctttctgtgtttgtagccattggagaatttttatacaaatcacggaagaacaatgacgttgagcagtgtctctctttcaatgccatcatggaagagctgggaatatccctcaagaatcagaaaaaattaaagaaaaagtcaagaactaagggcaaatcttctttcacaagtatccttacttgtcaccagagacgaactcagagaaaagagacagtggcgtgatcaaagaacacacctgtaagaagaaaaagcccacacgtccgctgcacatatttggaggacagatttcagaggactatgtctttatccataaccccagtcgtggacagagggggaagaaatgcacaatttttaaagctcacatagatattacttgagaagtgaaactgattcttttcagatgaatttgtatgcacacttattttgaatttttccatttcctccgataaattgctatgtgtgctttctaaataataataaacaagcggactttgtttttcat

SEQ ID NO: 3982 - protein, 949 aa, Rattus norvegicus
  ref <308>: DATABASE ACCESSION NUMBER: SWISS-Prot / P22756
  ref <309>: DATABASE ENTRY DATE: 2002-06-15
MERSTVLIQPGLWTRDTSWTLLYFLCYILPQTSPQVLRIGGIFETVENEPVNVEELAFKFAVTSINRNRTLMPNTTLTYDIQRINLFDSFEASRRACDQLALGVAALFGPSHSSSVSAVQSICNALEVPHIQTRWKHPSVDSRDLFYINLYPDYAAISRAVLDLVLYYNWKTVTVVYEDSTGLIRLQELIKAPSRYNIKIKIRQLPPANKDAKPLLKEMKKSKEFYVIFDCSHETAAEILKQILFMGMMTEYYHYFFTTLDLFALDLELYRYSGVNMTGFRKLNIDNPHVSSIIEKWSMERLQAPPRPETGLLDGMMTTEAALMYDAVYMVAIASHRASQLTVSSLQCHRHKPCALGPRFMNLIKEARWDGLTGRITFNKTDGLRKDFDLDIISLKEEGTEKASGEVSKHLYKVWKKIGIWNSNSGLNMTDGNRDRSNNITDSLANRTLIVTTILEEPYVMYRKSDKPLYGNDRFEAYCLDLLKELSNILGFLYDVKLVPDGKYGAQNDKGEWNGMVKELIDHRADLAVAPLTITYVREKVIDFSKPFMTLGISILYRKPNGTNPGVFSFLNPLSPDIWMYVLLACLGVSCVLFVIARFTPYEWYNPHPCNPDSDVVENNFTLLNSFWFGVGALMQQGSELMPKALSTRIVGGIWWFFTLIIISSYTANLAAFLTVERMESPIDSADDLAKQTKIEYGAVRDGSTMTFFKKSKISTYEKMWAFMSSRQQSALVKNSDEGIQRVLTTDYALLMESTSIEYVTQRNCNLTQIGGLIDSKGYGVGTPIGSPYRDKITIAILQLQEEGKLHMMKEKWWRGNGCPEEDSKEASALGVENIGGIFIVLAAGLVLSVFVAIGEFLYKSRKNNDVEQKGKSSRLRFYFRNKVRFHGSKKESLGVEKCLSFNAIMEELGISLKNQKKLKKKSRTKGKSSFTSILTCHQRRTQRKETVA

SEQ ID NO: 3983 - DNA, 2718 bp, Homo sapiens
  ref <308>: DATABASE ACCESSION NUMBER: EMBL / U16125
  ref <309>: DATABASE ENTRY DATE: 2000-03-04
atggagcacggcacactcctcgcccagcccgggctctggaccagggacaccagctgggcactcctctatttcctctgctatatcctccctcagaccgccccgcaagtactcaggatcggagggatttttgaaacagtggaaaatgagcctgttaatgttgaagaattagctttcaagtttgcagtcaccagcattaacagaaaccgaaccctgatgcctaacaccacattaacctatgacatccagagaattaacctttttgatagttttgaagcctcgcggagagcatgtgaccagctggctcttggtgtggctgctctctttggcccttcccatagctcctccgtcagtgctgtgcagtctatttgcaatgctctcgaagttccacacatacagacccgctggaaacacccctcggtggacaacaaagatttgttttacatcaacctttacccagattatgcagctatcagcagggcgatcctggatctggtcctctattacaactggaaaacagtgacagtggtgtatgaagacagcacaggtctaattcgtctacaagagctcatcaaagctccctccagatataatattaaaatcaaaatccgccagctgccctctgggaataaagatgccaagcctttactcaaggagatgaagaaaggcaaggagttctatgtgatatttgattgttcacatgaaacagccgctgaaatccttaagcagattctgttcatgggcatgatgaccgaatactatcactactttttcacaaccctggacttatttgctttggatctggaactctataggtacagtggcgtaaacatgaccgggtttgggctgcttaacattgacaaccctcacgtgtcatccatcattgagaagtggtccatggagagactgcaggccccacccaggcccgagactggccttttggatggcatgatgacaactgaagcggctctgatgtacgatgctgtgtacatggtggccattgcctcgcaccgggcatcccagctgaccgtcagctccctgcagtgccatagacataagccatggcgcctcggacccagatttatgaacctgatcaaagaggcccggtgggatggcttgactgggcatatcacctttaataaaaccaatggcttgaggaaggattttgatctggacattattagtctcaaagaggaaggaactgaaaagattgggatttggaattccaacagtgggcttaacatgacggacagcaacaaagacaagtccagcaatatcactgattcattggccaacagaacactcattgtcaccaccattctggaagaaccctatgttatgtacaggaaatctgataagcctctatatggaaatgacagatttgaaggatattgcctagacctgttgaaagaattgtcaaacatcctgggtttcatttatgatgttaaactagttcccgatggcaaatatggggcccagaatgacaaaggggagtggaacgggatggttaaagaactcatagatcacagggctgacctggcagtggctcctcttaccatcacctacgtgcgggagaaagtcattgacttctccaaacccttcatgaccctaggcatcagcattctctaccggaagcccaatggtaccaatccaggcgttttctccttcctcaaccccctgtctccagatatttggatgtatgtgctcttagcctgcttgggagtcagctgtgtactctttgtgattgcaaggtttacaccctacgagtggtataacccccacccatgcaaccctgactcagacgtggtggaaaacaattttactttactaaatagtttctggtttggagttggagctctcatgcagcaaggatcagagctgatgcccaaagctctatcgaccagaatagttggagggatatggtggtttttcaccctaatcatcatttcatcctacacggccaatctggctgccttcttgacagtagagagaatggaatcccccatagattcggcagatgatctggcaaagcaaaccaagatagaatatggggcggttagagatggatcaacaatgaccttcttcaagaaatcaaaaatctccacctatgagaagatgtgggctttcatgagcagcaggcagcagaccgccctggtaagaaacagtgatgaggggatccagagagtgctcaccacagactacgcgctgctgatggagtccaccagcattgagtatgtgacgcagagaaactgcaacctcactcagatcgggggcctcattgactccaaaggttacggagtgggaacacctattggttctccttaccgggataaaattactattgctattcttcaactccaagaagaagggaagctgcatatgatgaaagagaagtggtggcgtgggaatggctgccccgaggaagacaacaaagaagccagtgccctgggagtggaaaatattggaggcatcttcattgttctggctgccggactggtcctttctgtatttgtagctattggagaattcatatacaaatcacggaagaataatgatattgaacagtgtctctctttcaacgctatcatggaagaactgggaatctcactgaagaatcagaaaaaaataaagaaaaagtcaagaactaaggggaaatcttccttcacaagtatccttacttgtcatcagagacgaactcagagaaaagagactgtggcgtga

SEQ ID NO: 3984 - protein, 918 aa, Homo sapiens
  ref <308>: DATABASE ACCESSION NUMBER: SWISS-Prot / P39086
  ref <309>: DATABASE ENTRY DATE: 2002-06-15
MEHGTLLAQPGLWTRDTSWALLYFLCYILPQTAPQVLRIGGIFETVENEPVNVEELAFKFAVTSINRNRTLMPNTTLTYDIQRINLFDSFEASRRACDQLALGVAALFGPSHSSSVSAVQSICNALEVPHIQTRWKHPSVDNKDLFYINLYPDYAAISRAILDLVLYYNWKTVTVVYEDSTGLIRLQELIKAPSRYNIKIKIRQLPSGNKDAKPLLKEMKKGKEFYVIFDCSHETAAEILKQILFMGMMTEYYHYFFTTLDLFALDLELYRYSGVNMTGFRLLNIDNPHVSSIIEKWSMERLQAPPRPETGLLDGMMTTEAALMYDAVYMVAIASHRASQLTVSSLQCHRHKPWRLGPRFMNLIKEARWDGLTGHITFNKTNGLRKDFDLDIISLKEEGTEKAAGEVSKHLYKVWKKIGIWNSNSGLNMTDSNKDKSSNITDSLANRTLIVTTILEEPYVMYRKSDKPLYGNDRFEGYCLDLLKELSNILGFIYDVKLVPDGKYGAQNDKGEWNGMVKELIDHRADLAVAPLTITYVREKVIDFSKPFMTLGISILYRKPNGTNPGVFSFLNPLSPDIWMYVLLACLGVSCVLFVIARFTPYEWYNPHPCNPDSDVVENNFTLLNSFWFGVGALMQQGSELMPKALSTRIVGGIWWFFTLIIISSYTANLAAFLTVERMESPIDSADDLAKQTKIEYGAVRDGSTMTFFKKSKISTYEKMWAFMSSRQQTALVRNSDEGIQRVLTTDYALLMESTSIEYVTQRNCNLTQIGGLIDSKGYGVGTPIGSPYRDKITIAILQLQEEGKLHMMKEKWWRGNGCPEEDNKEASALGVENIGGIFIVLAAGLVLSVFVAIGEFIYKSRKNNDIEQAFCFFYGLQCKQTHPTNSTSGTTLSTDLECGKLIREERGIRKQSSVHTV

SEQ ID NO: 3985 - DNA, 3185 bp, Rattus norvegicus; identical to SEQ ID NO: 3981
  ref <308>: DATABASE ACCESSION NUMBER: EMBL / M83561
  ref <309>: DATABASE ENTRY DATE: 2000-03-04

SEQ ID NO: 3986 - protein, 949 aa, Rattus norvegicus; identical to SEQ ID NO: 3982
  ref <308>: DATABASE ACCESSION NUMBER: SWISS-Prot / P22756
  ref <309>: DATABASE ENTRY DATE: 2002-06-15

SEQ ID NO: 3987 - DNA, 2718 bp, Homo sapiens; identical to SEQ ID NO: 3983
  ref <308>: DATABASE ACCESSION NUMBER: EMBL / U16125
  ref <309>: DATABASE ENTRY DATE: 2000-03-04

SEQ ID NO: 3988 - protein, 918 aa, Homo sapiens; identical to SEQ ID NO: 3984
  ref <308>: DATABASE ACCESSION NUMBER: SWISS-Prot / P39086
  ref <309>: DATABASE ENTRY DATE: 2002-06-15

SEQ ID NO: 3989 - DNA, 840 bp, Rattus norvegicus
  ref <308>: DATABASE ACCESSION NUMBER: EMBL / M83675
  ref <309>: DATABASE ENTRY DATE: 2000-03-04
atcacgacagcctactacaggggtgccatgggtatcatgctggtctacgacattaccaatgagaagtccttcgacaacatccggaattccattcggaacattgaggagcatgcctctgcagatgtggagaagatgatactggggaataagtgtgatgtgaacgacaagaggcaggtgtccaaggaacggggagaaaagctggcactcgactatgggatcaagttcatggagaccagcgcgaaggccaacatcaatgtggagaacgcatttttcactctcgccagggatatcaaagcaaaaatggacaaaaattggaacccaacaaccctcaggagcagccatggagtcaagatcacagtggagcagcagaagaggaggagcttcttccggtgcagtctcctgtgaggacaaggtctctgcccatttgagcctgcgctcagcccagctgactgtgcctgccccgggcgagcctccacctccgatgctcggacacagctgcccggactcaattgagaaattgattattttagtaaccgtctgatcttttccaccttcagagatggaccaagttagaattttgctgtttttcctgtgtcatctgccagtcaggcctatccgtcccctgccgcattgccatagatggagagaggtgggttggggcaaggcagcctccatctccagccttctgcccctccaccacagaagggaggtcagtggcagtggcagtgccagcctgcctggccccatactccaagcaccaccaccagggccactgagggcaagctggcaccctgccttcacccgttctcagttgtggacaagtgacaacttgtccactgt

SEQ ID NO: 3990 - protein, 134 aa, Rattus norvegicus
  ref <308>: DATABASE ACCESSION NUMBER: SWISS-Prot / P35280
  ref <309>: DATABASE ENTRY DATE: 1996-10-01
ITTAYYRGAMGIMLVYDITNEKSFDNIRNSIRNIEEHASADVEKMILGNKCDVNDKRQVSKERGEKLALDYGIKFMETSAKANINVENAFFTLARDIKAKMDKNWNPTTLRSSHGVKITVEQQKRRSFFRCSLL

SEQ ID NO: 3991 - DNA, 660 bp, Homo sapiens
  ref <308>: DATABASE ACCESSION NUMBER: EMBL / X56741
  ref <309>: DATABASE ENTRY DATE: 1994-03-08
gaattccaatatggcgaagacctacgattacctgttcaagctgctgctgatcggggactcgggggtggggaagacctgtgtcctgttccgcttctccgaggacgccttcaactccacttttatctccaccataggaattgactttaaaattaggaccatagagctcgatggcaagagaattaaactgcagatatgggacacagccggtcaggaacggtttcggacgatcacaacggcctactacaggggtgcaatgggcatcatgctggtctacgacatcaccaacgagaagtccttcgacaacatccggaactggattcgcaacattgaggagcacgcctctgcagacgtcgaaaagatgatactcgggaacaagtgtgatgtgaatgacaagagacaagtttccaaggaacggggagaaaagctggccctcgactatggaatcaagttcatggagaccagcgcgaaggccaacatcaatgtggaaaatgcatttttcactctcgccagagatatcaaagcaaaaatggacaaaaaattggaaggcaacagcccccaggggagcaaccagggagtcaaaatcacaccggaccagcagaagaggagcagctttttccgatgtgttcttctgtgaggaacaccgccttactctgagcctcg

SEQ ID NO: 3992 - protein, 207 aa, Homo sapiens
  ref <308>: DATABASE ACCESSION NUMBER: SWISS-Prot / P24407
  ref <309>: DATABASE ENTRY DATE: 2002-06-15
MAKTYDYLFKLLLIGDSGVGKTCVLFRFSEDAFNSTFISTIGIDFKIRTIELDGKRIKLQIWDTAGQERFRTITTAYYRGAMGIMLVYDITNEKSFDNIRNWIRNIEEHASADVEKMILGNKCDVNDKRQVSKERGEKLALDYGIKFMETSAKANINVENAFFTLARDIKAKMDKKLEGNSPQGSNQGVKITPDQQKRSSFFRCVLL

SEQ ID NO: 3993 - DNA, 857 bp, Rattus norvegicus
  ref <308>: DATABASE ACCESSION NUMBER: EMBL / M83678
  ref <309>: DATABASE ENTRY DATE: 2000-03-04
accatcggaattgatttcaagatccgaactgtggaaatagaggggaagagaatcaaactgcaagtctgggacacagctggccaagaacgattcaagacaataaccacctcctattaccgtggagccatgggcattatcctagtatatgacatcacagatgagaaatccttcgagaatattcagaactggatgaaaagcatcaaagagaacgcgtctgctgaagtggagcgccttctgctggggaacaaatgtgacatggaagccaagcggaaggtgcagagagagcaggctgagaggttggcccgagagcacagaatccgattttttgagacaagtgccaaatccagtgtgaatgtggatgaggctttcagttccctggcccgtgacatcttgctcaagacaggaggccggagatcgggaaacagcagcaagccctcaagcactgacctgaaagtatctgacaagaagaacagcaacaagtgctccttgggctgagggacatttcttgcctcctattcaccctgaacctggaggctagacctgagggaggtggactgaggtagactgatggaaaacagaggggaggagctgtggtggtgcctggaggggtggatgacaggggaggaaggaaagatgaaatgggcagggaaaggagggcgaggaaccaaggacgtgaaaagtgaagagaaggggtttgagaagagaaaaagaagaaggtctcaggtctcggaccgtccaacattaatgtcagtatgctgatctctccattcctggttcagggttcgggtcccgagaggctggctcggccctactctgagggtctctcactccacagatgtttgttagtattaaaggcc

SEQ ID NO: 3994 - protein, 164 aa, Rattus norvegicus
  ref <308>: DATABASE ACCESSION NUMBER: SWISS-Prot / P35286
  ref <309>: DATABASE ENTRY DATE: 1996-10-01
TIGIDFKIRTVEIEGKRIKLQVWDTAGQERFKTITTSYYRGAMGIILVYDITDEKSFENIQNWMKSIKENASAEVERLLLGNKCDMEAKRKVQREQAERLAREHRIRFFETSAKSSVNVDEAFSSLARDILLKTGGRRSGNSSKPSSTDLKVSDKKNSNKCSLG

SEQ ID NO: 3995 - DNA, 1238 bp, Homo sapiens
  ref <308>: DATABASE ACCESSION NUMBER: EMBL / X75593
  ref <309>: DATABASE ENTRY DATE: 1994-02-02
gaattcgaggatccgggtaccatgggaggaaaacttcttcctggcctgggctccgtgccgctctgtttgccaaccgtccagtcccgcctaccagtgccgggcgctccccacccctcccccggctcccccggtgtccgccatggccaaagcctacgaccacctcttcaagttgctgctgatcggggactcgggggtgggcaagacttgtctgatcattcgctttgcagaggacaacttcaacaacacttacatctccaccatcggaattgatttcaagatccgcactgtggatatagaggggaagaagatcaaactacaagtctgggacacggctggccaagagcggttcaagacaataactactgcctactaccgtggagccatgggcattatcctagtatacgacatcacggatgagaaatctttcgagaatattcagaactggatgaaaagcatcaaggagaatgcctcggctggggtggagcgcctcttgctggggaacaaatgtgacatggaggccaagaggaaggtgcagaaggagcaggccgataagttggctcgagagcatggaatccgatttttcgaaactagtgctaaatccagtatgaatgtggatgaggcttttagttccctggcccgggacatcttgctcaagtcaggaggccggagatcaggaaacggcaacaagcctcccagtactgacctgaaaacttgtgacaagaagaacaccaacaagtgctccctgggctgaggaccctttcttgcctccccaccccggaagctgaacctgagggagacaacggcagagggagtgagcaggggagaaatagcagaggggcttggagggtcacataggtagatggtaaagagaatgaggagaaaaaggagaaaagggaaaagcagaaaggaaaaaaaggaagagagaggaagggagaagggagaggaatgaattgaggaagtgaaagaaggcaaggaggtaggaagagagggaggaggaaaggaaggagagagatgcctcaggcttcagaccttacctgggttttcagggcaaacataaatgtaaatacactgatttattctgttactagatcaggttttagggtcctgcaaaaggctagctcggcactacactagggaatttgctcctgttctgtcacttgtcatggtctttcttggtattaaaggccaccatttgcacaaaaaaaaaaaaaaaccatggtacccggatcctcgaattc

SEQ ID NO: 3996 - protein, 203 aa, Homo sapiens
  ref <308>: DATABASE ACCESSION NUMBER: SWISS-Prot / P51153
  ref <309>: DATABASE ENTRY DATE: 2002-06-15
MAKAYDHLFKLLLIGDSGVGKTCLIIRFAEDNFNNTYISTIGIDFKIRTVDIEGKKIKLQVWDTAGQERFKTITTAYYRGAMGIILVYDITDEKSFENIQNWMKSIKENASAGVERLLLGNKCDMEAKRKVQKEQADKLAREHGIRFFETSAKSSMNVDEAFSSLARDILLKSGGRRSGNGNKPPSTDLKTCDKKNTNKCSLG

SEQ ID NO: 3997 - DNA, 945 bp, Rattus norvegicus
  ref <308>: DATABASE ACCESSION NUMBER: EMBL / M83679
  ref <309>: DATABASE ENTRY DATE: 2000-03-04
gaattcccccgaatccggagtggcggagatgggcgccgcgaggcgtccagtgcggtaacgcgaccgatcccggagaagccggcgggagccccggggagagttctcttttctttgtgaagggcagggcgccctggggcgggctccggccgcgatggcagaggctgagcggggctgagcccgcagccgcctgcagccttcgggcccccttgagtccctgccatggcgaaacagtacgatgtgctatttcggctactgctgatcggggactccggggtgggcaagacctgcctgctatgccgcttcaccgacaacgagttccactcctcgcatatctccaccatcggtgttgactttaagatgaaaaccatcgaagtagacggcatcaaagtgaggatacagatttgggacacagcagggcaggagaggtaccagactatcacaaaacagtactaccggcgagcccagggaatatttttagtctacgacattagcagcgagcgctcttatcagcacatcatgaagtgggtcagtgacgtggatgagtacgccccagaaggcgtccagaagatcctcatcgggaataaggctgacgaagaacagaaacggcaggtggggagagagcaagggcagcagctggctaaggagtatggcatggacttctacgaaacaagtgcctgcaccaaccttaacattaaagagtccttcactcgtctgaccgagctggtgctgcaggctcacaggaaagagctggatggtctccgaacatgtgccagcaatgagctcgcactggccgagctggaggaagacgaaggcaaaactgaaggcccagcaaactcttcaaagacctgctggtgctgagggtcctgtgtggaatcctccctcccccagtccccttccctcaggagccccgtggaggcagggagtctggcctttgtcatcactgtc

SEQ ID NO: 3998 - protein, 212 aa, Rattus norvegicus
  ref <308>: DATABASE ACCESSION NUMBER: SWISS-Prot / AAA41995
  ref <309>: DATABASE ENTRY DATE: 1996-10-01
MAKQYDVLFRLLLIGDSGVGKTCLLCRFTDNEFHSSHISTIGVDFKMKTIEVDGIKVRIQIWDTAGQERYQTITKQYYRRAQGIFLVYDISSERSYQHIMKWVSDVDEYAPEGVQKILIGNKADEEQKRQVGREQGQQLAKEYGMDFYETSACTNLNIKESFTRLTELVLQAHRKELDGLRTCASNELALAELEEDEGKTEGPANSSKTCWC

SEQ ID NO: 3999 - DNA, 1889 bp, Rattus norvegicus
  ref <308>: DATABASE ACCESSION NUMBER: EMBL / M83681
  ref <309>: DATABASE ENTRY DATE: 2000-03-04
atgttcaaactgcttttgatcgggaacagcagcgtaggcaagacctccttcctgttccgctatgccgatgactccttcacccccgccttcgtgagcacagtgggcattgacttcaaggtcaagacagtctacagacatgacaagaggatcaagctgcagatctgggacacagcaggccaggagcgctaccggacaatcaccacggcctactaccgtggagccatgggcttcctgctgatgtatgacatcgccaaccaggagtccttcacagctgtgcaggactgggctacgcagattaaaacctattcctgggacaacgcccaggtcatccttgtggggaacaagtgtgacctggaggatgaacgggtcgtatctgctgaggatggccagaggctcgctggtgatcttggttttgagttcttcgaggccagcgccaaggagaacatcaacgtgaagcaggtgttcgagcgcctggtggatatcatctgtgacaagatgaatgagtccctggaacccagctccagcccaggcagcaatgggaaaggcccatccctcggggataccccaccccctcagccgagcagctgcggctgttaggttcggcccttgacctccccacacctctccttcttgcctcttcatgggcagcggccaaggtgtcagctatggggactgtctcaaagctcagggcacccccttgcctctggtccacgtacccctcctcttgcacaagttcagctccctttctctccatgtcagaatgctcagacagtcctggttagagcccacgccccggggctctgctcagcattgtctggggttggcacacccacacaggcattcaatggaggtagctgtaggtgccatggcctttcctgacgatggaaggatgtcccatgccttccgcctcagaaccatttcccaggtgtgtgatctactcctctgttgttggctgaagatgtcacctggtgtgggtcgctgtccaacttagtcctggtagcctctccatctcaggtccaccagtttggccttgaaatctgcctatgaactggccgctgccaaggatacaggcagatctgccatctccatctctgcctctctggcatcgactggaaagcctgctttcccgttatagagggatagagtcagagcccctgacacccgggactctccaaagtgcccttccaagcttctcctgaatccatgccactccccagaattaaattttggattattcagggccctatccatggaggctgagaattgcctcaccctttacagtacagctttctgtcagtttacctcagagccagggaactgaggctgcccagccaggtccccatctgtcccgtgttttaagcaacacttttgcaaaccttacatcctgtgtagaaacggaagtgaagaaagcaacccacagagggcgtgcccttgctagtcggtttctcatcgcaccatttgggcttctccacccgaggactcatgtatacacccaccgttggcatcattgtcaccatcagttggcccagggacactggggttgtggggaaggattggggagaaggcatcagtgggcaacccagtgtttttgtttgtacatcatgggagcaacaggccctcctgtgagttagggatgggcttcgggtgtgattgatgtctctacaaagcttgagacttagcccctaggatactctactcactccgctaggaagtcttttgactcaccgaccaaactcccctaaacgccatctgacatgcttggtccaggtgacagtcggtcgctcagagtcagagtcacatacccctgattctgtatcagtgtgtcctccttcagtccccagagccaaaatgattctgcatccctactgagcacagcctcttcctggggt

SEQ ID NO: 4000 - protein, 219 aa, Rattus norvegicus
  ref <308>: DATABASE ACCESSION NUMBER: SWISS-Prot / Q63942
  ref <309>: DATABASE ENTRY DATE: 2002-06-15
MASASEPPASPRDAADQNFDYMFKLLLIGNSSVGKTSFLFRYADDSFTPAFVSTVGIDFKVKTVYRHDKRIKLQIWDTAGQERYRTITTAYYRGAMGFLLMYDIANQESFTAVQDWATQIKTYSWDNAQVILVGNKCDLEDERVVSAEDGQRLAGDLGFEFFEASAKENINVKQVFERLVDIICDKMNESLEPSSSPGSNGKGPALGDTPPPQPSSCGC

SEQ ID NO: 4001 - DNA, 1904 bp, Homo sapiens
  ref <308>: DATABASE ACCESSION NUMBER: Refseq / NM_004283
  ref <309>: DATABASE ENTRY DATE: 2002-11-05
gcccgcgcgggatccgggtggctgcaggctgctggcttctgcggctgcggggtcggggtcgcggccagggccaagccgcagcgagttcacaggcggaacccctgcaggcggcgccccctacgcgaggtcacccctgggaaggagcgcagcccacccggcccctccgcatccgagcaggacgcccgtctcctctccctgaggatttcaggtctccctgtcccaggaggcttgtgccaagatggcatcagctggagacacccaggcaggcccacgggatgcagcagatcagaacttcgactatatgttcaaactgctactgataggcaacagcagtgtgggcaagacttccttcctgttccgatacgcggacgactccttcactcccgccttcgtcagtactgtgggcatcgatttcaaggtcaagaccgtctaccgccatgacaagaggatcaagctgcagatctgggacacagcgggccaggagcgctaccgcaccatcaccacggcctactaccggggagccatgggcttcctgctcatgtatgacatcgccaatcaggaatcctttgccgctgtgcaggactgggccacgcaaatcaagacctactcctgggacaacgcccaggtcatcctggtggggaacaagtgtgacctggaggacgaacgtgttgtgcctgctgaggatggccggaggctcgccgacgaccttggtttcgagttctttgaagccagtgccaaggagaacatcaatgtgaagcaggtcttcgagcgcctggtggatgtcatctgcgagaagatgaacgagtccctggaacccagctccagctcaggcagcaacgggaaaggcccggccgtgggggatgctccagccccccagcccagcagctgcagctgctagagatggcccccaaccccccacccacccctctcctgcctcggcagggactgtgatcgaggcgtgagccacagtggttatctccaagctcagggcaatcccttccctcctgtcaactgctccccgactcctgcatggctcattccttcacaatgtcgccgtggctgccaggttcctcaggcagccccggtgggaggctgcggaccatggggactcagctctgcatggcaggcagaggcccagggacactgacgtgcatgagcttgctgctttccagggtgtgttgagggtggccatgggtgacacgtcccactctttctgatggaggggcatccgtggtgccttctagcttagaaccattttccaggtctcttctgggttgggcaggactgatattcccaagctggtggaagatggttcatcttcctcgcacagtgtgggttcttggagttcatccagggaaggcggcgcctctttctcaggtcctgcaggctggtctctgagcctgcccccacgaactttctggattccaaggtgggatggtgatccctttgacccctgcagaccctctacttgcgaaaagcagcattgaagcagccttttcccattgtagaagggacagggagtcagatcccctcaaccccccggcttcagggaccccagaagtgccttccaagcttcccccaagatccacatcacccacgaccctgccactgtttttgctgtgttcaccacatctctgatcctgaagtgaattctggaactatggaccacattagactgggcagagattcgcccaacccctagcactccggctctgggctttcggccagaagttaattaacctcagagccaggagcctggggctggggcctccctcccaggccctgtttagctgtttagctggttgtgttttaagcaagttcttgcccaatcatgcatcctgctagaaaaggaaatgaagcaacgttcccagccaccgcaaaaaaaaaaaaaaaaaaaaaaaaaa

SEQ ID NO: 4002 - protein, 219 aa, Homo sapiens
  ref <308>: DATABASE ACCESSION NUMBER: SWISS-Prot / O95716
  ref <309>: DATABASE ENTRY DATE: 2002-06-15
MASAGDTQAGPRDAADQNFDYMFKLLLIGNSSVGKTSFLFRYADDSFTPAFVSTVGIDFKVKTVYRHDKRIKLQIWDTAGQERYRTITTAYYRGAMGFLLMYDIANQESFAAVQDWATQIKTYSWDNAQVILVGNKCDLEDERVVPAEDGRRLADDLGFEFFEASAKENINVKQVFERLVDVICEKMNESLEPSSSSGSNGKGPAVGDAPAPQPSSCSC

SEQ ID NO: 4003 - DNA, 949 bp, Rattus norvegicus
  ref <308>: DATABASE ACCESSION NUMBER: EMBL / M83740
  ref <309>: DATABASE ENTRY DATE: 2000-03-04
gaattccggttttatagcaaggacattacattttcaggtacctaaagtcaaaattcaacacactgatataaaacttctatttaaaccaatagggttctgttatgatattgatctgttcacagtaacatttacaaaaagaggcagaggcagggggatctctgccccgcccccgcggtggcctgctgcctgccagccgctctccctcgctgacgccacctgcttcccgcactggacatggctggcaaggcacacaggctgagtgctgaggaacgggaccagctgctgccaaacctgcgggccgtggggtggaatgaactggaaggccgagatgccatcttcaaacagttccattttaaagacttcaacagggcttttggcttcatgacaagagtcgccctgcaggctgaaaagctggaccaccatcccgagtggtttaacgtgtacaacaaggtccatatcaccttgagcacccacgaatgtgccggtctttctgaacgggatataaacctggccagcttcatcgaacaagttgccgtgtctatgacatagatctaccctgcctcctatttccttaggggaaaggagaaggagtgactggaggaggaacccagggagggaaccaaggaggctggcccttgctccctgactcttgcggtgaccaccatctccgtcaggaggggtatgagtccctccctgtgcagaacgatgcccatgttcctggtgccagcctcctcactgggctctgccatgtttataatttgaataagctctcccattttctatagagttcctagcctcagttgtgtcccaggctgcctcttgctccttgtctaccggttctagttaattttccaagtagctgtgataaagcatgacagaaagtccaattcagaccctactaaaacaaaccccaatatattatggaaacagtgcttttatgccggaattc

SEQ ID NO: 4004 - protein, 103 aa, Rattus norvegicus
  ref <308>: DATABASE ACCESSION NUMBER: SWISS-Prot / CAA06587
  ref <309>: DATABASE ENTRY DATE: 2002-06-15
AGKAHRLSAEERDQLLPNLRAVGWNELEGRDAIFKQFHFKDFNRAFGFMTRVALQAEKLDHHPEWFNVYNKVHITLSTHECAGLSERDINLASFIEQVAVSMT

SEQ ID NO: 4005 - DNA, 624 bp, Homo sapiens
  ref <308>: DATABASE ACCESSION NUMBER: Refseq / NM_000281
  ref <309>: DATABASE ENTRY DATE: 2000-10-31
cacctgctgccgcccgcgccatggctggcaaagcacacaggctgagcgctgaggagagggaccagctgctgccaaacctgagggctgtggggtggaatgagctggaaggccgtgatgccatcttcaagcagtttcatttcaaagacttcaacagggcctttgggttcatgacaagagtggccctgcaggctgagaaactggaccaccatcctgaatggtttaacgtgtacaacaaggtccacatcacgctgagcacccatgagtgtgccggcctttcagaacgggacataaacctggccagcttcatcgaacaagtagcagtgtccatgacatagaccctgcccttcctctttgaattcttccgggggaaggggtgactgaactgggagtccagggagggagctgaggagcccttaccctcccaccactcccctcccaagacccagccgccgccgttgagggctgagtccttgctgtgggatgtgccagtgtccccaccaacaccaggaatttagaccttttccctgcaccactctcttcatcctgggggctctgttacactaatttgaataaactctcccctttctttgcaacttcccagcaacaataatgattttcttgcca

SEQ ID NO: 4006 - protein, 103 aa, Homo sapiens; identical to SEQ ID NO: 4004
  ref <308>: DATABASE ACCESSION NUMBER: SWISS-Prot / P80095
  ref <309>: DATABASE ENTRY DATE: 2002-06-15

SEQ ID NO: 4007 - DNA, 2428 bp, Rattus norvegicus
  ref <308>: DATABASE ACCESSION NUMBER: EMBL / M83746
  ref <309>: DATABASE ENTRY DATE: 2000-03-04
acacacactagctctttctctcgggtacacacagctccgcacattcgcacccctgccagtcagccgggctgcgcgactccacggcttccctggcagccagctgctggtggacagcgcacagatttgctgtttgccaagcttctcttctgcctcttttgctacacaaagattttttaaaaaaagaaaaacagaaacaaaaactacatacctattttttatttgcatcttccctcttcttcccctgctccaccaccctgcgcgcctcgcagccccacttttcactcccaaagaaggatggagggcggttgtggatctcagtggaaggcggccgggcttctcttctgtgtcatggtttttgcgtctgccgagagaccggtcttcacgaatcattttcttgtggagttgcataaagacggagaggaagaggctcgccaagttgcagcagaacacggatttggagtccgaaagctcccctttgcagaaggcctgtaccacttttaccacaatggccttgcgaaggccaaaagaagacgcagcctacatcacaagcggcagctggagagagaccccaggataaagatggccctgcagcaagaaggatttgaccgtaaaaagagagggtacagagacatcaatgagattgacatcaatatgaatgatcctctttttacaaagcaatggtacctgttcaacactgggcaagctgacgggactcctgggctagacttgaatgtggccgaagcctgggagctgggatacacagggaaaggagtgaccattggaatcatggacgatggaattgactatctccacccagacctggcctacaactataactctgatgcaagttatgacttcagcagcaatgacccctatccataccctcgatacacagatgactggttcaacagccatggaaccaggtgtgcaggagaagtttccgctgcagccagcaacaatatctgtggagtcggtgtagcatacaactccaaggtggcaggtatccggatgctggaccagccctttatgactgacatcatcgaggcctcctccatcagccacatgcctcaactgatcgacatctacagtgcaagctggggccccacagacaacgggaagacagttgatgggccccgagagctcacgctccaggccatggctgatggtgtgaacaagggccgtgggggcaaaggcagcatctatgtgtgggcctccggggacggtggcagctacgatgactgcaactgtgacggtatctatgcgtcaagcatgtggaccatctccatcaactcggccatcaacgacggcaggaccgccttgcatgacgagagctgctcttccaccttggcctctacgttcagcaacgggaggaagaggaatcccgaggccggtgtggctaccacagacttgtatggcaactgtactctgaggcattctgggacatctgcagctgctcctgaggcagctggcgtgtttgcattggctttggaggctaacgtggatctgacctggcgagacatgcaacatctgacagtgctcacctccaagcgaaaccagcttcacgatgaggttcatcagtggcgacggaatggggttggcctggaattcaatcacctctttggctacggagtccttgatgcaggtgccatggtgaaaatggctaaagactggaaaactgtcccagagagattccactgtgtgggaggctcggtgcagaaccctgagaaaataccacccaccggcaagttggtactgaccctccaaacaaatgcatgtgaggggaaagaaaacttcgtccgctacctcgagcatgtccaagctgtcatcacagtcaacgcaaccaggagaggagacctgaacatcaacatgacctccccgatgggcaccaagtccattttgctaagccggcgtccaagagacgacgactccaaggtgggctttgacaagtggcctttcatgaccacccacacctggggggaggatgcccgagggacctggaccctggagctggggtttgtgggcagtgcaccacagaagggcttgctgaaggaatggaccctcatgctacatggcacccagagtgccccatacatcgatcaggtggtgagggattaccaatcgaagttggccatgtccaagaagcaagagctggaggaagagctagatgaagctgtggagagaagtctgcaaagtatcctgagaaagaactagggccacgcttccgcctccatctccccttcctccctgtctctgcctctccttggtccacagttctggcagccaccagccacccagcaattcctgttaccctcacacaagcagtcccagcctggtctgaagctttgcttgctctcaatgattattttcactacaatggaagcaatcatttttattctgtagcccaaatatagcgttcctaccaacatct

SEQ ID NO: 4008 - protein, 637 aa, Rattus norvegicus
  ref <308>: DATABASE ACCESSION NUMBER: SWISS-Prot / P28841
  ref <309>: DATABASE ENTRY DATE: 1996-10-01
MEGGCGSQWKAAGLLFCVMVFASAERPVFTNHFLVELHKDGEEEARQVAAEHGFGVRKLPFAEGLYHFYHNGLAKAKRRRSLHHKRQLERDPRIKMALQQEGFDRKKRGYRDINEIDINMNDPLFTKQWYLFNTGQADGTPGLDLNVAEAWELGYTGKGVTIGIMDDGIDYLHPDLAYNYNSDASYDFSSNDPYPYPRYTDDWFNSHGTRCAGEVSAAASNNICGVGVAYNSKVAGIRMLDQPFMTDIIEASSISHMPQLIDIYSASWGPTDNGKTVDGPRELTLQAMADGVNKGRGGKGSIYVWASGDGGSYDDCNCDGYASSMWTISINSAINDGRTALYDESCSSTLASTFSNGRKRNPEAGVATTDLYGNCTLRHSGTSAAAPEAAGVFALALEANVDLTWRDMQHLTVLTSKRNQLHDEVHQWRRNGVGLEFNHLFGYGVLDAGAMVKMAKDWKTVPERFHCVGGSVQNPEKIPPTGKLVLTLQTNACEGKENFVRYLEHVQAVITVNATRRGDLNINMTSPMGTKSILLSRRPRDDDSKVGFDKWPFMTTHTWGEDARGTWTLELGFVGSAPQKGLLKEWTLMLHGTQSAPYIDQVVRDYQSKLAMSKKQELEEELDEAVERSLQSILRKN

SEQ ID NO: 4009 - DNA, 2411 bp, Homo sapiens
  ref <308>: DATABASE ACCESSION NUMBER: EMBL / BC005815
  ref <309>: DATABASE ENTRY DATE: 2001-07-13
ggcacgaggccggtacacacagctccccacattctcacccctgcccgcgcgccgggccgcctgactgcacggcttcccctccagccagatgctggagaacacacactgattcgctgctttccaagaccctgttcagtctctttctctatacaaagatttttttaaaaactatatataagaattctttatttgcaccctccctccgagtcccctgctccgccagcctgcgcgcctcctagcaccacttttcactcccaaagaaggatgaagggtggttgtgtctcccagtggaaggcggccgccgggttcctcttctgtgtcatggtttttgcatctgctgagcgaccggtcttcacgaatcattttcttgtggagttgcataaagggggagaggacaaagctcgccaagttgcagcagaacacggctttggagtccgaaagcttccctttgctgaaggtctgtaccacttttatcacaatggccttgcaaaggccaagagaagacgcagcctacaccacaagcagcagctggagagagaccccagggtaaagatggctttgcagcaggaaggatttgaccgaaaaaagcgaggttacagagacatcaatgagatcgacatcaacatgaacgatcctctttttacaaagcagtggtatctgatcaatactgggcaagctgatggcactcctggccttgatttgaatgtggctgaagcctgggagctgggatacacagggaaaggtgttaccattggaattatggatgatgggattgactatctccacccggacctggcctccaactataatgccgaagcaagttacgacttcagcagcaacgacccctatccttaccctcggtacacagatgactggtttaacagccacgggacccgatgtgcaggagaagtttctgctgccgccaacaacaatatctgtggagttggagtagcatacaactccaaggttgcaggcatccggatgctggaccagccattcatgacagacatcatcgaggcctcctccatcagtcatatgccacagctgattgacatctacagcgccagctggggccccacagacaacggcaagacagtggatgggccccgggagctcacgctgcaggccatggccgatggcgtgaacaagggccgcggcggcaaaggcagcatctacgtgtgggcctccggggacggcggcagctatgacgactgcaactgcgacggctacgcctccagcatgtggaccatctccatcaactcagccatcaacgacggcaggactgccctgtacgacgagagctgctcttccaccttggcttccaccttcagcaacgggaggaaaaggaaccccgaggccggtgtggcaaccacagatttgtacggcaactgcactctgaggcattctgggacatctgcagctgcccccgaggcagctggtgtgtttgcactggctctggaggctaacctgggtctgacctggcgggacatgcagcatctgactgtgctcacctccaaacggaaccagcttcacgacgaggtccatcagtggcggcgcaatggggtcggcctggaatttaatcacctctttggctacggggtccttgatgcaggtgccatggtgaaaatggctaaagactggaaaaccgtgcctgagagattccactgtgtgggaggctccgtgcaggaccctgagaaaataccatccactggcaagttggtgctgacactcacaaccgacgcctgtgaggggaaggaaaattttgtccgctacctggagcatgtccaggctgtcatcacggtcaacgcaaccagaagaggagacctgaacatcaacatgacttcccctatgggcaccaagtccattttgctgagccggcgtccaagggatgacgactccaaggtgggctttgacaagtggcctttcatgaccactcacacgtggggggaagacgcccgaggcacctggaccctggagctgggatttgtcggcagcgccccgcagaagggggtgctgaaggagtggaccctgatgctgcatggcactcagagtgccccgtacatcgaccaggtggtgcgggattaccagtccaagttggccatgtccaagaaagaggagctggaggaagagctggacgaagccgtggagagaagcctgaaaagcatccttaacaagaactagcgctgcacatccgcctttcccaccgccctccctccccagctccgcctctgtcctcgctccacgtttcaggcaggcacctagcaattccatcacccgtacaggcaattccgtcttcttaatctgaagcttcactcactgtcaatgattattttcattacaatggaaacaatcttttttactctatgccccaaatatagcgttcccaacaacaaaaaaaaaaaaaaaaaaaa

SEQ ID NO: 4010 - protein, 638 aa, Homo sapiens
  ref <308>: DATABASE ACCESSION NUMBER: SWISS-Prot / P16519
  ref <309>: DATABASE ENTRY DATE: 2001-10-16
MKGGCVSQWKAAAGFLFCVMVFASAERPVFTNHFLVELHKGGEDKARQVAAEHGFGVRKLPFAEGLYHFYHNGLAKAKRRRSLHHKQQLERDPRVKMALQQEGFDRKKRGYRDINEIDINMNDPLFTKQWYLINTGQADGTPGLDLNVAEAWELGYTGKGVTIGIMDDGIDYLHPDLASNYNAEASYDFSSNDPYPYPRYTDDWFNSHGTRCAGEVSAAANNNICGVGVAYNSKVAGIRMLDQPFMTDIIEASSISHMPQLIDIYSASWGPTDNGKTVDGPRELTLQAMADGVNKGRGGKGSIYVWASGDGGSYDDCNCDGYASSMWTISINSAINDGRTALYDESCSSTLASTFSNGRKRNPEAGVATTDLYGNCTLRHSGTSAAAPEAAGVFALALEANLGLTWRDMQHLTVLTSKRNQLHDEVHQWRRNGVGLEFNHLFGYGVLDAGAMVKMAKDWKTVPERFHCVGGSVQDPEKIPSTGKLVLTLTTDACEGKENFVRYLEHVQAVITVNATRRGDLNINMTSPMGTKSILLSRRPRDDDSKVGFDKWPFMTTHTWGEDARGTWTLELGFVGSAPQKGVLKEWTLMLHGTQSAPYIDQVVRDYQSKLAMSKKEELEEELDEAVERSLKSILNKN

SEQ ID NO: 4011 - DNA, 2042 bp, Rattus norvegicus
  ref <308>: DATABASE ACCESSION NUMBER: EMBL / M84719
  ref <309>: DATABASE ENTRY DATE: 2000-03-04
gaacataaagtcagattgctaaacttctgtgtcgactgaaaaacatggtgaagcgagttgcaattgtgggagctggggtcagtggcctggcctccatcaagtgctgcctggaagaaggactagaacccacctgcttcgagagaagctgtgacttgggaggactttggagattcacggaacatgttgaagaaggaagagccagcctttacaactcagtggtttctaacagcagcaaggagatgtcttgttactccgatttcccttttccagaagactacccaaactttgtgccaaattctctgttcctggaatatctccagctgtatgcaacccagttcaaccttctgagatgcatctatttcaacaccaaagtgtgcagtataacaaaacgcccagatttcgctgtctctggacaatgggaagtggtcactgtctgtcaagggaagcaaagctcagacacctttgctgctgtcatggtctgcactgggtttctaactaacccacatctgcccctggattcctttccaggcatacaaacttttaaggggcagtacttccacagccggcagtataaacatccagacgtatttaaggacaagcgagtccttgtggttggaatgggaaattctggtacagacattgccgtggaggccagtcacttagcgaaaaaggtgtttctcagcaccaccggaggggcatgggtgatcagccgagtctttgattcagggtacccctgggacatgatattcatgacgcgatttcagaacatgctcagaaatcttctcccaactccagttgtgagttggttgatatcaaagaagatgaacagctggttcaaccacgtgaattacggtgtggctccagaagacaggactcagctgagagagcctgtgctgaatgatgagctcccaggccgcatcatcactgggaaagtgttgatcaagcccagcatcaaggaggtgaaagaaaactctgtcgtctttaacaatacaccgaaggaggagcctattgacgtcatcgtctttgccactggatactcctttgcgttccccttcctcgatgaatcaatagtgaaagttgaggatggccaggcatcactgtacaagtacatcttcccggcacatctgccaaaaccaactctggccgtgattggcctcatcaaacccctgggttccatgatacccacaggagagacacaagctcgatgggttgttcaggtcctgaaaggtgcgactacattaccacccccgagtgtcatgatgaaagaagtcaatgaacggaagaagaacaagcatagcggatttggcttgtgctactgcaaggctttgcaatccgattacataacgtacatagatgacctcctgacctcgatcaacgcaaaaccggacctgcgggccatgctcctgactgacccacgcctggctctgagcatcttcttcggcccatgcacaccttaccatttccgcctgactggtccaggaaagtgggaaggagccagaaaggccatcttgacccagtgggaccgaacagtgaacgtcaccaaaactcgaaccgtacaagaaaccccatctacctttgaaactttgcttaaactctttagttttctggctttgcttgtggctgttttctttattttcctgtaagtgaaagatctaactggctttccaaatgtgtggagtataaccttccaacttctctaatgtaacaatttcaccttcgtaattgtaaaccacgtccagagacacccaacccctacctctccccaactcacctcattggcaccttcattgctgggtctcttgctagtccatcaggtttagtgcaagaaaataatgtccagcaattctgttcacttaaaatgttggaaggatccaggccccctttcaggaagaatctgcccccagagaggactctgagcattctttcaatctaaaaaactgctttccctagatcttaatgaaaagcccaacttcgcggaatattggtctgcactaaaatagttctctgtgtattagttgactacaaataaaatggaagaaact

SEQ ID NO: 4012 - protein, 532 aa, Rattus norvegicus
  ref <308>: DATABASE ACCESSION NUMBER: SWISS-Prot / P36365
  ref <309>: DATABASE ENTRY DATE: 2000-05-30
MVKRVAIVGAGVSGLASIKCCLEEGLEPTCFERSCDLGGLWRFTEHVEEGRASLYNSVVSNSSKEMSCYSDFPFPEDYPNFVPNSLFLEYLQLYATQFNLLRCIYFNTKVCSITKRPDFAVSGQWEVVTVCQGKQSSDTFAAVMVCTGFLTNPHLPLDSFPGIQTFKGQYFHSRQYKHPDVFKDKRVLVVGMGNSGTDIAVEASHLAKKVFLSTTGGAWVISRVFDSGYPWDMIFMTRFQNMLRNLLPTPVVSWLISKKMNSWFNHVNYGVAPEDRTQLREPVLNDELPGRIITGKVLIKPSIKEVKENSVVFNNTPKEEPIDVIVFATGYSFAFPFLDESIVKVEDGQASLYKYIFPAHLPKPTLAVIGLIKPLGSMIPTGETQARWVVQVLKGATTLPPPSVMMKEVNERKKNKHSGFGLCYCKALQSDYITYIDDLLTSINAKPDLRAMLLTDPRLALSIFFGPCTPYHFRLTGPGKWEGARKAILTQWDRTVNVTKTRTVQETPSTFETLLKLFSFLALLVAVFFIFL

SEQ ID NO: 4013 - DNA, 2134 bp, Homo sapiens
  ref <308>: DATABASE ACCESSION NUMBER: EMBL / M64082
  ref <309>: DATABASE ENTRY DATE: 2000-03-04
acccaagccagcactggctcatactgattcattttgatctctgctaataccagagtcctgcgtggcagagccattggcaccagaaattacaagagaacatggccaagcgagttgccattgtgggagctggggtcagcggcctggcctccatcaagtgctgtctggaagaaggactggagcccacctgctttgagaggagcgatgaccttggggggctgtggagattcaccgaacatgttgaagaaggcagagccagtctctacaagtctgtggtttccaacagctgcaaggagatgtcttgttactcagactttccattcccagaagattatccaaactatgtgccaaattctcaattcctggaatatctcaaaatgtatgcaaaccactttgaccttctgaaacacattcaattcaagaccaaagtctgcagtgtaacaaaatgctcagattctgctgtctctggccaatgggaggtggtcactatgcatgaagagaagcaagagtcagccatctttgatgctgtcatggtctgcactggctttcttactaatccttatttgccactggattcctttccaggtattaatgcctttaaaggccagtactttcatagccggcaatataagcatccagatatatttaaggacaagagagtccttgtgattggaatgggaaattctggcacagacattgctgtggaggccagccacctggcggaaaaggtgttcctcagcaccaccggagggggatgggtgatcagccgaatctttgactcgggctacccatgggacatggtgttcatgacacgctttcagaacatgttgagaaattccctcccaaccccaattgtgacttggttgatggagcgaaagataaacaactggctcaatcatgcaaattacggcttaataccagaagacaggactcagctgaaagagtttgtgctaaatgatgagctcccaggacgcatcatcactgggaaagtgttcatcaggccaagcataaaagaggtaaaggaaaactctgtcatatttaacaatacttcaaaggaagagcctattgacatcattgtctttgccactggatacacatttgctttccccttccttgatgagtctgtagtgaaagttgaagatggccaggcctcactgtacaagtatatcttccctgcacatctgcaaaagccaaccctggccattattggcctcatcaaacccttgggctccatgatacctacaggagaaacacaagctcggtgggctgttcgagtcctgaaaggtgtaaataagttaccaccaccaagtgtcatgatagaggaaattaatgcaaggaaagaaaacaagcccagttggtttggcttgtgctactgcaaggctttacaatcagattatatcacatacatagatgaactcctgacctatatcaatgcaaaacccaacctgttctctatgctcctaacggatccacatctggctctgaccgtcttctttggcccatgctcaccataccagttccgcttgactggcccaggaaaatgggaaggagccagaaatgccatcatgacccagtgggaccgaacattcaaggtcatcaaagctcgagttgtacaagagtctccatctccctttgaaagttttcttaaagtctttagctttctggctttgcttgtggctatttttctgattttcctataagtaaaagatctcctaaatggaagatgcacagagtagatttacaatgctccaattcctctcttacagcaatattgccttcacagttataaactgtattcaaatagtaaaggccaccctctcgcttccctggctggccccagggctaccactggtattcctgagcctctcccagctccacttctaatgctagagaatgataactaagacttctgtgcatttgaaggttgttggaaagttacaggttcattttagaaagaaagctgttcttgacagcactctgagccatcatacctctttcccatataaactattttcacagatctcaactaaaaccccttacttcacaaatgattgtgttgtgctgaaatggtgctcttatagtactggcttattaaaagtaaaaaataaacctaaaaattgattgttttaaaaaaaaa

SEQ ID NO: 4014 - protein, 531 aa, Homo sapiens
  ref <308>: DATABASE ACCESSION NUMBER: SWISS-Prot / Q01740
  ref <309>: DATABASE ENTRY DATE: 1994-06-01
AKRVAIVGAGVSGLASIKCCLEEGLEPTCFERSDDLGGLWRFTEHVEEGRASLYKSVVSNSCKEMSCYSDFPFPEDYPNYVPNSQFLEYLKMYANHFDLLKHIQFKTKVCSVTKCSDSAVSGQWEVVTMHEEKQESAIFDAVMVCTGFLTNPYLPLDSFPGINAFKGQYFHSRQYKHPDIFKDKRVLVIGMGNSGTDIAVEASHLAEKVFLSTTGGGWVISRIFDSGYPWDMVFMTRFQNMLRNSLPTPIVTWLMERKINNWLNHANYGLIPEDRTQLKEFVLNDELPGRIITGKVFIRPSIKEVKENSVIFNNTSKEEPIDIIVFATGYTFAFPFLDESVVKVEDGQASLYKYIFPAHLQKPTLAIIGLIKPLGSMIPTGETQARWAVRVLKGVNKLPPPSVMIEEINARKENKPSWFGLCYCKALQSDYITYIDELLTYINAKPNLFSMLLTDPHLALTVFFGPCSPYQFRLTGPGKWEGARNAIMTQWDRTFKVIKARVVQESPSPFESFLKVFSFLALLVAIFLIFL

SEQ ID NO: 4015 - DNA, 1342 bp, Rattus norvegicus
  ref <308>: DATABASE ACCESSION NUMBER: EMBL / M86235
  ref <309>: DATABASE ENTRY DATE: 1993-04-28
gcagccagacgccaggctggatgaaatgaagaaggcaatggcaggcagtggtgccagcctctgaggtgtcgagctgctacctcccaccgctcatctctcacacaatgccatcaaacccctgcaagccacacttcttgccagccacctggcacccgaatctcagggcctcctgcatgctgtttcccttggagaggctgaagagacagagtctagcaggaatcccctccgcttgcgggtaggaagcttggggagcagcctcatggaagagaagcagatcctgtgcgtggggctggtggtgctggacatcatcaatgtggtggacaaatacccagaggaagacacggatcgcaggtgcctatcccagagatggcagcgtggaggcaacgcgtccaactcctgcactgtgctttccttgctcggagcccgctgtgccttcatgggctcgctggcccatggccatgttgccgacttcctggtggccgacttcaggcggaggggtgtggatgtgtctcaagtggcctggcagagccagggagataccccttgctcctgctgcatcgtcaacaactccaatggctcccgtaccattattctctacgacacgaacctgccagatgtgtctgctaaggactttgagaaggtcgatctgacccggttcaagtggatccacattgagggccggaatgcatcggaacaggtaaagatgctacagcggatagaacagtacaatgccacgcagcctctgcagcagaaggtccgggtgtccgtggagatagagaagccccgagaggaactcttccagctgttcggctatggagaggtggtgtttgtcagcaaagatgtggccaagcacctggggttccggtcagcaggggaggccctgaagggcttgtacagtcgtgtgaagaaaggggctacgctcatctgtgcctgggctgaggagggagccgatgccctgggccccgacggccagctgctccactcagatgccttcccaccaccccgagtagtagacactctcggggctggagacaccttcaatgcctctgtcatcttcagcctctccaagggaaacagcatgcaggaggccctgagattcgggtgccaggtggctggcaagaagtgtggcttgcaggggtttgatggcattgtgtgagagatgagcggtgggaggtagcagctcgacacctcagaggctggcaccactgcctgccattgccttcttcatttcatccagcctggcgtctggctgcccagttccctgggccagtgtaggctgtggaacgggtctttctgtctcttctctgcagacacctggagcaaataaatcttcccctgagcc

SEQ ID NO: 4016 - protein, 298 aa, Rattus norvegicus
  ref <308>: DATABASE ACCESSION NUMBER: PIR / S32426
  ref <309>: DATABASE ENTRY DATE: 2000-07-21
MEEKQILCVGLVVLDIINVVDKYPEEDTDRRCLSQRWQRGGNASNSCTVLSLLGARCAFMGSLAHGHVADFLVADFRRRGVDVSQVAWQSQGDTPCSCCIVNNSNGSRTIILYDTNLPDVSAKDFEKVDLTRFKWIHIEGRNASEQVKMLQRIEQYNATQPLQQKVRVSVEIEKPREELFQLFGYGEVVFVSKDVAKHLGFRSAGEALKGLYSRVKKGATLICAWAEEGADALGPDGQLLHSDAFPPPRVVDTLGAGDTFNASVIFSLSKGNSMQEALRFGCQVAGKKCGLQGFDGIV

SEQ ID NO: 4017 - DNA, 1899 bp, Homo sapiens
  ref <308>: DATABASE ACCESSION NUMBER: EMBL / X78678
  ref <309>: DATABASE ENTRY DATE: 1994-10-14
gtagcctcatggaagagaagcagatcctgtgcgtggggctagtggtgctggacgtcatcagcctggtggacaagtaccctaaggaggactcggagataaggtgtttgtcccagagatggcagcgcggaggcaacgcgtccaactcctgcaccgttctctccctgctcggagccccctgtgccttcatgggctcaatggctcctggccatgttgctgattttgtcctggatgacctccgccgctattctgtggacctacgctacacagtctttcagaccacaggctccgtccccatcgccacggtcatcatcaacgaggccagtggtagccgcaccatcctatactatgacaggagcctgccagatgtgtctgctacagactttgagaaggttgatctgacccagttcaagtggatccacattgagggccggaacgcatcggagcaggtgaagatgctgcagcggatagacgcacacaacaccaggcagcctccagagcagaagatccgggtgtccgtggaggtggagaagccacgagaggagctcttccagctgtttggctacggagacgtggtgtttgtcagcaaagatgtggccaagcacttggggttccagtcagcagaggaagccttgaggggcttgtatggtcgtgtgaggaaaggggctgtgcttgtctgtgcctgggctgaggagggcgccgacgccctgggccctgatggcaaattgctccactcggatgctttcccgccaccccgcgtggtggatacactgggagctggagacaccttcaatgcctccgtcatcttcagcctctcccaggggaggagcgtgcaggaagcactgagattcgggtgccaggtggccggcaagaagtgtggcctgcagggctttgatggcatcgtgtgagagcaggtgccggctcctcacacaccatggagactaccattgcggctgcatcgccttctcccctccatccagcctggcgtccaggttgccctgttcaggggacagatgcaagctgtggggaggactctgcctgtgtcctgtgttccccacagggagaggctctggggggatggctgggggatgcagagcctcagagcaaataaatcttcctcagagccagcttctcctctcaatgtctgaactgctctggctgggcattcctgaggctctgactcttcgatcctccctctttgtgtccattccccaaattaacctctccgcccaggcccagaggaggggctgcctgggctagagcagcgagaagtgccctgggcttgccaccagctctgccctggctggggaggacactcggtgccccacacccagtgaacctgccaaagaaaccgtgagagctcttcggggccctgcgttgtgcagactctattcccacagctcagaagctgggagtccacaccgctgagctgaactgacaggccagtggggggcaggggtgcgcctcctctgccctgcccaccagcctgtgatttgatggggtcttcattgtccagaaatacctcctcccgctgactgccccagagcctgaaagtctcacccttggagcccaccttggaattaagggcgtgcctcagccacaaatgtgacccaggatacagagtgttgctgtcctcagggaggtccgatctggaacacatattggaattggggccaactccaatatagggtgggtaaggccttataatgtaaagagcatataatgtaaagggctttagagtgagacagacctggattcaaatctgccatttaattagctgcatatcaccttagggtacagcacttaacgcaatctgcctcaatttcttcatctgtcaaatggaaccaattctgcttggctacagaattattgtgaggataaaaatcatatataaaaaaaaaa

SEQ ID NO: 4018 - protein, 298 aa, Homo sapiens
  ref <308>: DATABASE ACCESSION NUMBER: SWISS-Prot / P50053
  ref <309>: DATABASE ENTRY DATE: 2002-06-15
MEEKQILCVGLVVLDVISLVDKYPKEDSEIRCLSQRWQRGGNASNSCTVLSLLGAPCAFMGSMAPGHVADFVLDDLRRYSVDLRYTVFQTTGSVPIATVIINEASGSRTILYYDRSLPDVSATDFEKVDLTQFKWIHIEGRNASEQVKMLQRIDAHNTRQPPEQKIRVSVEVEKPREELFQLFGYGDVVFVSKDVAKHLGFQSAEEALRGLYGRVRKGAVLVCAWAEEGADALGPDGKLLHSDAFPPPRVVDTLGAGDTFNASVIFSLSQGRSVQEALRFGCQVAGKKCGLQGFDGIV

SEQ ID NO: 4019 - DNA, 1182 bp, Rattus norvegicus
  ref <308>: DATABASE ACCESSION NUMBER: EMBL / M86564
  ref <309>: DATABASE ENTRY DATE: 2000-03-04
gttcccgggtcgtgctccgcgctcactgcagccaccttcgccgcccaccgtctcctccaacgcggactccggcagctttctcgccagagtcctcgaaactcgactaattccttacgcgtacgaccagaccaccggcgtgccccaccatgtcagacgcggcagtggacaccagctccgagatcaccaccaaggacttgaaggagaagaaggaagttgtggaggaggcagagaatggaagagacgcacctgccaatgggaacgctcaaaatgaggaaaatggggagcaggaggctgacaatgaggtagatgaagaagaggaagaaggtggggaggaagaggaggaggaggaagaaggtgatggtgaggaagaagatggagatgaagatgaggaagctgaggctcctacgggcaagcgggtagctgaggatgatgaggatgatgatgttgagaccaagaagcagaagaagactgatgaggatgactagacagcaaaaggaaaagctaaccttacgcaccgtgacctattcaccctccacttcccgtctcagaatttaaacgtggtcaccttcgagtagagaagcaggcccccgcccgcccactgcgcgagtgccacccaccaatgacatgcgctcttcaccaccccaccaaaaccacaacatgaattggcaacatgggaggagaaaagaaccagaacttcccaggccctgctttttttcttaaaaatactttaaaaggaaaatttgtttgtattttttatttacattttatatttttgtacatattgttaggggtcagccatttttaatgataacgggtgaccaaaccagccttcagagcgttttctgtcctacttcagactttacttgtggtgtgaccatgttcattatactctcaaaggagaaaaaaaaccttgtaaaaaaaacaaaaacaacaacaaaaaaacaatcttattctgagcattccagtaactttttttgtgtatgtacctagctgtactataagtagttggtttgtatgagatggttaaaaaggccaaagataaaaagattttttttcctttttttttgtctatgaagttgctgtttatttttttggcctgtttgatgtatgtgtgaaacaatgtccaacaataaaccggaattttattttgctgagttgttccaaaaaaaaaaaaaggaatcc

SEQ ID NO: 4020 - protein, 111 aa, Rattus norvegicus
  ref <308>: DATABASE ACCESSION NUMBER: SWISS-Prot / P06302
  ref <309>: DATABASE ENTRY DATE: 2002-06-15
SDAAVDTSSEITTKDLKEKKEVVEEAENGRDAPANGNAQNEENGEQEADNEVDEEEEEGGEEEEEEEEGDGEEEDGDEDEEAEAPTGKRVAEDDEDDDVETKKQKKTDEDD

SEQ ID NO: 4021 - DNA, 473 bp, Homo sapiens
  ref <308>: DATABASE ACCESSION NUMBER: EMBL / AI859111
  ref <309>: DATABASE ENTRY DATE: 2000-03-09
tttttttttttttagaacaactcagcaaaataaaattcctgtttattgttggacaacattgtttcacacatacatcaaacaggccaaaaaaaataaacagcaacttcatagacaaaaaaggaaaaaaaagaaaccttttatctttggcctttttaaccatctcatacaaaccaactacttatagtacagctaagtacatacacaaaaaagttactggaatgctcggaataagattgtttttctgttgtcatttttgctttttttacaaggttttttttctcctttgagattataatgaacatggtcacaccacaagtaaagtcagaagtaggacagagaacgctccgaaggctggtttggtcatccgagatcattaaaaatggctgaccctaacaatatgtacaaaaatataaaatgtaaataaaaaatacaaacaaatttcctttttaaagtacttttaagaaaaaaagcag

SEQ ID NO: 4022 - DNA, 3295 bp, Rattus norvegicus
  ref <308>: DATABASE ACCESSION NUMBER: EMBL / M86912
  ref <309>: DATABASE ENTRY DATE: 2000-03-04
aagcttgctgatgtctgattggccacttaacactacgtaggcacatgctctagaaaagtgggccgccgtagattttatcagctcacaaggtttcttcggaaaatatggtctaaagttttttccaaagcgtaaagtagaaccactagatttgtggtggaaaatgaaatttgcttatttacaatcggaacttataatttttaactttttaatgttctttggatttttgtttttttccaggtcaagtggatttcgaatagtgtctgagaccaactcaacccagaaaaacaaaatggcccttaactcttctgctgaagatggtatcaaaagaatccaagatgactgccccaaggctggcaggcacagttacatatttgtcatgatccctaccctctacagcatcatctttgtggtgggaatatttggaaacagcttggtggtgattgtcatttacttttacatgaagctgaagactgtggccagcgtctttcttctcaatctcgccttggctgacttatgctttttgctgactttgcccctgtgggcagtctataccgctatggagtaccgctggcccttcggcaatcacctatgtaagatcgcttcggccagcgtgagcttcaacctctacgccagtgtgttccttctcacgtgtctcagcatcgaccgctacctggccatcgtccacccaatgaagtctcgccttcgccgcacgatgctggtggccaaagtcacctgcatcatcatctggctgatggctggcttggccagtttgccagctgtcatccaccgaaatgtatacttcatcgagaacaccaatatcacagtgtgcgcgtttcattatgagtctcggaattcgacgctccccatagggctgggccttaccaagaatattctgggcttcttgttccctttccttatcattctcaccagctatacccttatttggaaagctctaaagaaggcttatgaaattcaaaagaacaaaccaagaaacgatgacatctttaggataattatggcgattgtgcttttcttcttcttttcctgggtcccccaccaaatattcactttcctggatgtgctgattcagctgggcgtcatccatgactgtaaaatttctgacatcgtggacactgccatgcccatcaccatctgcatagcgtattttaacaactgcctgaaccctctgttctacggctttctggggaagaaatttaaaaagtatttcctccagctcctgaaatatattcccccaaaggccaagtcccactcaagcctgtctacgaaaatgagcacgctttcttaccggccttcggataacatgagctcatcggccaaaaagcctgcgtcttgttttgaggtggagtgacaggttcaaagcacactggcaatgtaatgccctgacagaagccagggcagcctctgactaaatggcttacgaccaaaggaccattcaccctgcctcaggatctaagcagaaaatgcgctcatcagactgtagataatgactaaaactctgagagaagactttgaaggagtaaccaagcaaagccgtcttgcattaatagatgatggctagccaaaggaagagtcaggagctggatggattggtgggtctggaaaacagttcgctggcagaaatgcaatctcatcagtctccctttgctatgttccttttgatttccacacgtaggtatgtggcccatgctaaatatttaggcaagaaacaagagatggaaatcaaggtcacttgttctgttcaactcccaaagggcaaggaacctttgttgtccctgtagtcattagcagtggagacccacttgtcactgttactacacctatcgtgcaaagatttgctaatctgtagttatcaagtttcaggactcctttgtaaaattcagccagtgttttagaaacatgtactgtccccagacaatgctagccagtggtgtacttatgtagcagtgttacccaagtccacacatcaaagtcacactgctttaataacgtgacatactaggtacatctgcgttatttcgcatctgagaaatgtacacagtcagaggtgaatacactatattccatacagtctgccttgctctctaaaaatatatattctccacatacgtgaacatctttatctctaaactgtcatttgatgaaattttggcaatgtatgtttacctctaaataaagtaattttattgtaatgtatctaatcttcattatttaaaatagaagcctatctatttttacaatgacatggatagaagtaaaaatacaaaattacaataatgcatttttacttcaagtttgatctggttgatagtttaatatggttagatataggttttatatcccactgttgaaaaaatcatgaaggccagcttgtaccccacaatgtagggaagatacaacatttttaatttttttagttattcatataacagcaaaaacattttcattgctattaacattaaattaatacttttttttactcataagttttggttacatctagttacatgcatggtaattgcaggaaatatagaagctctggaaaacacaaagcaatagtcatatttagttcttcagtgcaaaaatactccattttagtattttagcccataagtaggaagcagagggtgacttgtaaggcctcatgtcttctgcaacctcaaagcccaccccagtgacagatacatgtgcttcaccaggtatgtcagacttactaatcccccagtcctgcccagccaccaactggggatcaagttttcatactcactatacatacatacatatgtaaattatggtgttagagccataatgtatatacaattctgtatataggcttgtccctcagtgtcattgcagagtacttagtataccattcaatgtatttcctcaaacattccagtactgttaaaaaacacaagcacacctgataacattagggaatcaccaaattggagcatttaccattcttctaaaaatactttgggcactagaagtcaccctgagctgatcaagcacacaaatctgataaactccaagaagaagcagaactgagaatatggttataaacgtttttcgtattcccaatatgtaagagcacgttttccagaaagtataacacaacttatatacgctaccagctatgtttagctgtagctcatggcaagctcagtggagaggagttcacttcctctaagaacccaggtgctgtaggctagaacaggaaacaaactagaccagaatattgccatggggcggctgcctagtcaccagaaagctt

SEQ ID NO: 4023 - protein, 359 aa, Rattus norvegicus [sequence omitted]

SEQ ID NO: 4024 - DNA, 1563 bp, Homo sapiens
  ref <308>: DATABASE ACCESSION NUMBER: EMBL / D13814
  ref <309>: DATABASE ENTRY DATE: 1998-11-24
aggtaccttgacaggcagcagcgaagtgaacaggacgtcatggaccgtcgcgccgctagctagctacttcgggccgtggcggtgatcgatggcgagcggctgatgcggaccctcgacgttaagggcgagagcctgacgcgaggcggcggtgcggtagacccgacatagagcgcctgtctgggacgtacgacgccgtgccgctcttattatatagtgtttgacaatcgaccaggtgatcaatgatcctcaactcttctactgaagatggtattaaaagaatccaagatgattgtcccaaagctggaaggcataattacatatttgtcatgattcctactttatacagtatcatctttgtggtgggaatatttggaaacagcttggtggtgatagtcatttacttttatatgaagctgaagactgtggccagtgtttttcttttgaatttagcactggctgacttatgctttttactgactttgccactatgggctgtctacacagctatggaataccgctggccctttggcaattacctatgtaagattgcttcagccagcgtcagtttcaacctgtacgctagtgtgttcctactcacgtgtctcagcattgatcgatacctggctattgttcacccaatgaagtcccgccttcgacgcacaatgcttgtagccaaagtcacctgcatcatcatttggctgctggcaggcttggccagtttgccagctataatccatcgaaatgtatttttcattgagaacaccaatattacagtttgtgccttccattatgagtcccgaaattcaaccctcccgatagggctgggcctgaccaaaaatatactgggttcctgtttcccttttctgatcattcttacaagttatactcttatttggaaggccctaaagaaggcttatgaaattcagaagaacaacccaagaaatgatgatatttttaggataattatggcaattgtgcttttctttttcttttcctggattccccaccaaatattcacttttctggatgtattgattcaacagggcatcatacgtgactgtagaattgcagatattgtggacacggccatgcccatcaccatttggatagcttattttaacaattgcctgaatcctctgttttatggctttctgggaaaaaaatttaaaaaagatattctccagcttctgaaatatattcccccaaaggccaaatcccactcaaacctttcaacaaaaatgagcacgctttcctaccgcccctcagataatgtaagctcatccaccaagaagcctgcaccatgttttgaggttgagtgacatgttcgaaacctgtccataaagtaattttgtgaaagaaggagcaagagaacattcctctgcagcacttcactaccaaatgagccttagctacttttcagaattgaaggagaaatgcattatgtggactgaaccgacttttctaaagctctgaacaaaagcttttctttccttttgcaacaagacaaagcaaagccacattttgcattagacagatgacggctgctcgaagaacaatgtcaga

SEQ ID NO: 4025 - protein, 359 aa, Homo sapiens [sequence omitted]

SEQ ID NO: 4026 - DNA, 2525 bp, Rattus norvegicus
  ref <308>: DATABASE ACCESSION NUMBER: EMBL / M88751
  ref <309>: DATABASE ENTRY DATE: 2000-03-04
cgggggcggcgcggctcggtggcatctcgggcgcggcccgccgtcctcgcccccggcgccgctcgctccccccaccccaccccggactcccccatgtatgacgactcctacgtgcccgggtttgaggactcggaggcgggttcagccgactcctacaccagccgcccctctctggactcagacgtttccctggaggaggaccgggagagtgcccggcgagaagtggagagtcaggctcagcagcagctggaaagagccaagcacaaacctgtggcatttgctgtgaggaccaatgtcagctactgtggagttctggatgaggaatgcccagtccagggctctggagtcaacttcgaggccaaagattttctgcacattaaagagaagtacagcaatgactggtggatcgggaggctagtgaaagaaggtggcgatattgccttcatccccagcccccaacgcctggagagcatccggctcaaacaggaacagaaggccaggagatccgggaacccttccagcctgagtgacattggcaaccgacgttcccctcctccatctctagccaagcagaagcaaaagcaggcggaacatgtccccccgtatgatgtggtgccctccatgcggcctgtggtgctggtgggaccctctctgaaaggttatgaggtcacagacatgatgcagaaggctctcttcgacttccttaaacacaggtttgatggcaggatctccatcacccgcgtcacggctgacctctcactggccaagcgctctgtgctcaacaatcctggcaagaggaccatcatcgagcgctcttctgcccgctccagcattgctgaggtgcagagtgagattgagcgcatattcgagctggccaaatccctgcagctagtggtgttggatgctgacaccatcaaccacccagcacagctagccaagacctcactggcccccatcatcgtcttcgtcaaagtgtcctcgccaaaggtactgcagcgactgatccgctccagggggaagtcccagatgaagcacctcactgtacagatgatggcatatgataagctggttcagtgcccacctgagtcatttgatgtgattctggatgagaaccagctggacgacgcctgtgagcacctagctgaatacctagaggtttactggcgcgctacccaccacccagcaccgggccccgggatgctgggtccgcccagtgccatccctggacttcagaaccagcagctgctgggggagcgaggtgaggagcattcacccctggagcgggacagtttgatgccctcggatgaggccagtgagagctcccgccaggcctggaccggatcttcacagcgcagctcccgccatctggaggaggactatgcagatgcctaccaggacctgtaccagcctcaccgtcaacacacctcggggctacccagtgctaacgggcatgacccccaagaccggctcctagcccaggactcggagcatgaccacaatgaccggaactggcagcgtaaccggccttggcctaaggacagctactgaccacctcctgccctaccctggcaggcacagacacagcggctggggtgtccacctcaggcaggttggagttagattggcgttaggctgcctctaggttcagctcacacaaccctctgcccagccctaggtccagggctgactgtggtcccaaggttctgggagaagcaaggggccccctcacctcctgggcacagtgaccccgtaggttctcatccaggtactagctgtgttctgcatccttggcaccttcccctgcataagaagctgccccggtgagcaatgatctcaggccgggatcacttagcaggggtcttccagccagaatggatacccctctaaacagcaggagggtgtgagtgcaggcaatgtagcatgaggaagagacatggttcctgagcaggcgtaaaccctaagcaaaggaactccgttcacgtcactgccgcacattagaaatgaagcaatcagagctcaacatggcggcacttctatcccatcagctggggtgggcacttacacctaagacaggagcagtgcaggtgaggcaggacagacagctcatggctgtagctctgttagagaacggccctcctcaccaaaccaggaagcttagcatctggcaagactagggaactggggcacagtcaagcccaaagccggcctggactgcggggaagggggagcagcttccagcccccccaccccccttgctttcctcattctttgcccttgcgtctgtcatttctgttccttccctccatgcctcctgcaagataggggctccctggctcgtagctgccacttgttaagttagggttagatgagaggaacagacacaatgaacagccccagaggctgtcacctggctacccttgccttatggctctagcgtttgacctacagagcatgctccattaagaacccgccccacctcattgtcatctccaataaaacataacgcacagtcccttgggtgtctc

SEQ ID NO: 4027 - protein, 484 aa, Rattus norvegicus
  ref <308>: DATABASE ACCESSION NUMBER: SWISS-Prot / P54287
  ref <309>: DATABASE ENTRY DATE: 2002-06-15
MYDDSYVPGFEDSEAGSADSYTSRPSLDSDVSLEEDRESARREVESQAQQQLERAKHKPVAFAVRTNVSYCGVLDEECPVQGSGVNFEAKDFLHIKEKYSNDWWIGRLVKEGGDIAFIPSPQRLESIRLKQEQKARRSGNPSSLSDIGNRRSPPPSLAKQKQKQAEHVPPYDVVPSMRPVVLVGPSLKGYEVTDMMQKALFDFLKHRFDGRISITRVTADLSLAKRSVLNNPGKRTIIERSSARSSIAEVQSEIERIFELAKSLQLVVLDADTINHPAQLAKTSLAPIIVFVKVSSPKVLQRLIRSRGKSQMKHLTVQMMAYDKLVQCPPESFDVILDENQLDDACEHLAEYLEVYWRATHHPAPGPGMLGPPSAIPGLQNQQLLGERGEEHSPLERDSLMPSDEASESSRQAWTGSSQRSSRHLEEDYADAYQDLYQPHRQHTSGLPSANGHDPQDRLLAQDSEHDHNDRNWQRNRPWPKDSY

SEQ ID NO: 4028 - DNA, 1392 bp, Homo sapiens
  ref <308>: DATABASE ACCESSION NUMBER: EMBL / X76556
  ref <309>: DATABASE ENTRY DATE: 1993-12-14
gctcgctcccccgacccggactcccccatgtatgacgactcctacgtgcccgggtttgaggactcggaggcgggttcagccgactcctacaccagccgcccatctctggactcagacgtctccctggaggaggaccgggagagtgcccggcgtgaagtagagagccaggctcagcagcagctcgaaagggccaagcacaaacctgtggcatttgcggtgaggaccaatgtcagctactgtggcgtactggatgaggagtgcccagtccagggctctggagtcaactttgaggccaaagattttctgcacattaaagagaagtacagcaatgactggtggatcgggcggctagtgaaagagggcggggacatcgccttcatccccagcccccagcgcctggagagcatccggctcaaacaggagcagaaggccaggagatctgggaacccttccagcctgagtgacattggcaaccgacgctcccctccgccatctctagccaagcagaagcaaaagcaggcggaacatgttcccccatatgacgtggtgccctccatgcggcctgtggtgctggtgggaccctctctgaaaggttatgaggtcacagacatgatgcagaaggctctcttcgacttcctcaaacacagatttgatggcaggatctccatcacccgagtcacagccgacctctccctggcaaagcgatctgtgctcaacaatccgggcaagaggaccatcattgagcgctcctctgcccgctccagcattgcggaagtgcagagtgagatcgagcgcatatttgagctggccaaatccctgcagctagtagtgttggacgctgacaccatcaaccacccagcacagctggccaagacctcgctggcccccatcatcgtctttgtcaaagtgtcctcaccaaaggtactccagcgtctcattcgctcccgggggaagtcacagatgaagcacctgaccgtacagatgatggcatatgataagctggttcagtgcccaccggagtcatttgatgtgattctggatgagaaccagctggaggatgcctgtgagcacctggctgagtacctggaggtttactggcgggccacgcaccacccagcccctggccccggacttctgggtcctcccagtgccatccccggacttcagaaccagcagctgctgggggagcgtggcgaggagcactccccccttgagcgggacagcttgatgccctctgatgaggccagcgagagctcccgccaagcctggacaggatcttcacagcgtagctcccgccacctggaggaggactatgcagatgcctaccaggacctgtaccagccccaatgccaactcttaagtcttttgtaattctggctttctctaataaaa

SEQ ID NO: 4029 - protein, 484 aa, Homo sapiens
  ref <308>: DATABASE ACCESSION NUMBER: SWISS-Prot / P54284
  ref <309>: DATABASE ENTRY DATE: 2002-06-15
MYDDSYVPGFEDSEAGSADSYTSRPSLDSDVSLEEDRESARREVESQAQQQLERAKHKPVAFAVRTNVSYCGVLDEECPVQGSGVNFEAKDFLHIKEKYSNDWWIGRLVKEGGDIAFIPSPQRLESIRLKQEQKARRSGNPSSLSDIGNRRSPPPSLAKQKQKQAEHVPPYDVVPSMRPVVLVGPSLKGYEVTDMMQKALFDFLKHRFDGRISITRVTADLSLAKRSVLNNPGKRTIIERSSARSSIAEVQSEIERIFELAKSLQLVVLDADTINHPAQLAKTSLAPIIVFVKVSSPKVLQRLIRSRGKSQMKHLTVQMMAYDKLVQCPPESFDVILDENQLEDACEHLAEYLEVYWRATHHPAPGPGLLGPPSAIPGLQNQQLLGERGEEHSPLERDSLMPSDEASESSRQAWTGSSQRSSRHLEEDYADAYQDLYQPHRQHTSGLPSANGHDPQDRLLAQDSEHNHSDRNWQRNRPWPKDSY

SEQ ID NO: 4030 - DNA, 2509 bp, Rattus norvegicus
  ref <308>: DATABASE ACCESSION NUMBER: EMBL / M89953
  ref <309>: DATABASE ENTRY DATE: 2000-03-04
gatcctgggaaaaaggatgctgctgggagtgcacctctgaatcagttgggttctttttgtctctggttttaaaagctctctggaagagacctgatgtctagaatcttctaagtatgaacaggggaatgctgaagttttgtagttaaatatgtcaatgtctttatgtttcaaaaagcattagaatgtcgaaggcaagaaccccagaaccctgcccatcctcctgtgagaccttgataattatctaacaaatctaacaaaaaactgggctggaccatctgctgggagaagttccagaaccccaagaggccttgggcttcatctgcttccggaagcatctagctgtggagttggtgtcctttcctgggcacgtcttgaggcctttctgctgagctctgtcctgatgtatggctttcacagttgtgaagctgaagtatgactttgttctctggatgggatgagggtgaaggagtgagccgtgtgtgtagaagtctgtgggaagagagaaacactgagcatgtcgctgccaaaccagtccctagaaggccttcctcaggaggcctccaacagatccctgaatgctacaggggcttgggacccagaggtcctgcaggcactcagaatctccctcgtggtggtcctatccatcattacactggccactgtcctctccaatgccttcgtacttaccaccatcctgctcaccaagaagctccataccccagccaactatctcattggctccttggccaccaccgacctcctggtttctatcttggtcatgcccatcagcatagcctataccaccacccgtacctggaactttggccagatcctgtgtgacatctgggtgtcttctgacatcacatgctgtacggcctccatcctgcatctctgtgtcatcgctctggacagatactgggccatcaccgatgccctggagtacagcaagcgccggaccgcaggtcacgcggcggccatgattgcggccgtctgggccatctccatctgtatctccatcccaccgctcttctggcggcaggccacggctcacgaggagatgtctgactgcctggtgaacacatctcagatttcttacaccatctactcgacctgtggggccttctacatcccatccatcttgctcattatcctgtatggccgcatatacgtggccgcccggagtcgaatcctgaacccaccctccctctacgggaagcgcttcaccacagcacagcttatcacgggctctgcgggctcttcactctgctcgctcaaccccagcctccacgagagccacacgcacacagtcggttcccctctttttttcaaccaggtgaaaatcaagcttgctgatagcatcttagaacgcaagaggatctctgcagcccgagaaaggaaagccactaagacattgggcatcattctgggggcctttatcatctgctggctgcctttctttgtggtatccttggtcctccccatctgcagggactcctgttggatccacccggccctctttgacttcttcacgtggctaggttatttaaactctctcattaaccccgtcatctacactgtgttcaacgaagactttcgacaagcgtttcagagagtcgtccatttccgaaaggcctcttagtcgaatttgggggtgactcttgtttatctgttatgtcctgtaacccagctggggttgccttttttaattactgtcgtttctctgggacctgggctgatttgtgctatcttgggtcttggaataaatcaatagatttgttctgtgtttgactgccagcatcttccagacttctgaattactgaaagctaggtgctgtgtaaaaggcgacaggactgaaagacatcccttaacataatatcctcatggttctctggattggaagaaatttaatatgtaggacttagatgagaaactgtcttattctctagaaggctcggagggaaggccttctggtctacctgggattttacagagggctttggaaaatgggtgtgattattgacttgaattaaagtgaatttggagttaaacagagggggttgtcatctcccatagcccactgattagaaaacaacacccaggaattgtttctactgggtcctggttgtccatatggaaagtgaggttggtgacccagggtagatagagagaaattcagaaggtggcagcaggaagagaggtatacgtgggaccagatcaactactctacatccttcattcttccctttgtctctattatataatgttctgaagttaaaacccgtcatcctgctgctcaagaagactgaccagtgtcggatgcaccaagctttgaacggatacctcattctgcccattccgatgtttttattttgaattactatttttttacaacccttgtcgggctggagagatggcttagcagttaagagcactgactgctcttccagaggtcctgagttcaaatcccagcaactgcatggtggctcaccacccttgtcatcagaattc

SEQ ID NO: 4031 - protein, 374 aa, Rattus norvegicus
  ref <308>: DATABASE ACCESSION NUMBER: SWISS-Prot / AAA40614
  ref <309>: DATABASE ENTRY DATE: 1995-11-01
MSLPNQSLEGLPQEASNRSLNATGAWDPEVLQALRISLVVVLSIITLATVLSNAFVLTTILLTKKLHTPANYLIGSLATTDLLVSILVMPISIAYTTTRTWNFGQILCDIWVSSDITCCTASILHLCVIALDRYWAITDALEYSKRRTAGHAAAMIAAVWAISICISIPPLFWRQATAHEEMSDCLVNTSQISYTIYSTCGAFYIPSILLIILYGRIYVAARSRILNPPSLYGKRFTTAQLITGSAGSSLCSLNPSLHESHTHTVGSPLFFNQVKIKLADSILERKRISAARERKATKTLGIILGAFIICWLPFFVVSLVLPICRDSCWIHPALFDFFTWLGYLNSLINPVIYTVFNEDFRQAFQRVVHFRKAS

SEQ ID NO: 4032 - DNA, 2864 bp, Homo sapiens
  ref <308>: DATABASE ACCESSION NUMBER: Refseq / NM_000864
  ref <309>: DATABASE ENTRY DATE: 2002-04-04
ggcacgaggctaaatccagaatcgtttcaattactgtgaggggaattctgaagttctcattaaacacacgaatgtctcaagctttgaaaagagccagatgccaaaggcaagaatcccagggcattgcccacctgggtgtgatcccctgataattgtctaacaaattcagcatgtgtcccctgggcatgaccatctgctgggaaaagttccaggaccctgagacatcttgggattcctgtggtttaggaaagacctttaactaccagctggtagttgtctcagcattcttcaaatagtccggtcttgtttaatattattattattattgttatttaattttattttattgcaactgtacttagagaatagtctggtcttgagaccttttcactgtggtctgttctggtgtacggctcccaccagtgtgaagcagaaggatgactttgctctgttgtcaggacaaccttgaaggaaggagccaaatgtgtggaggtctgtgggaagagagagccacctagcatgtccccactgaaccagtcagcagaaggccttccccaggaggcctccaacagatccctgaatgccacagaaacctcagaggcttgggatcccaggaccctccaggcgctcaagatctcccttgccgtggtcctttccgtcatcacactggccacagtcctctccaatgcctttgtactcaccaccatcttactcaccaggaagctccacacccctgccaactacctgattggctccctggccaccaccgacctcttggtttccatcttggtaatgcccatcagcatcgcctataccatcacccacacctggaactttggccaaatcttgtgtgacatctggctgtcctctgacatcacgtgctgcacagcctccatcctgcatctctgtgtcattgctctggacaggtactgggcaatcacagatgccctggaatacagtaaacgcaggacggctggccacgcggccaccatgatcgccattgtctgggccatctccatctgcatctccatccccccgctcttctggcggcaggccaaggcccaggaggagatgtcggactgtctggtgaacacctctcagatttcctacaccatctactccacctgtggggccttctacattccctcggtgttgctcatcatcctatatggccggatctaccgggctgcccggaaccgcatcctgaatccaccctcactctatgggaagcgcttcaccacggcccacctcatcacaggctctgccgggtcctcgctctgctcgctcaactccagcctccatgaggggcactcgcactcggctggctcccctctctttttcaaccacgtgaaaatcaagcttgctgacagtgccctggaacgcaagaggatttctgctgctcgagaaaggaaagccactaaaatcctgggcatcattctgggggcctttatcatctgctggctgcccttcttcgtggtgtctctggtcctccccatctgccgggactcctgctggatccacccggcgctctttgacttcttcacctggctaggctatttaaactccctcatcaatccaataatctacactgtgtttaatgaagagtttcggcaagcttttcagaaaattgtccctttccggaaggcctcctagtcttattcggtgatgactcttgttatcttttgtgtcctgtaacctcatcgggattgtcttttttttttaattattttctgagacttggattaattcatggtatcttgagtcttggttcaatcaacagaattgttctttttcctgttgttttcttaacttctgaaagagctgtgggtggtggggggcggggggcaggactgaagatttcactacttagcataatattttctttctttttttttttttttgagacggagtcttgccctctcgccaggctggagtgtagtggcacaatctcagctcactgcaacctccgcatcccgggttcaagagattctgcctcagcctccagagtagctgggactacaaacgtgtgtcaccaggcccagctaatttttgtatttttaataaagacggggtttcatcatgttggccagggtggtctcgatctcttgacctcgtgatccgcccgcctcagcatcccaaagtgctgggattacaggcatgagccactgtgcctggccaacataatgttttcacagttcctctttgttggaagaagtgtgtgacctacaagattcctggttgatacagttcaggtgagaaactgtttgattatagaaaagaccccagactcagagggaaggctctctggtctacctgagatctatatggagcttaaaggagggtgaataagattaatgacctgaattgaaagagaatttggagccaggatgggtctccattctgtgtggcaccttgattggaaaataatatccatgcgtttcttccactgagtctttcttagattaaatctctcccagttgtccgtgaagagaaagacagtatttgcagtgccgatgatatagagtgacttggagagagattcagaagttaggggtagcgggggtaggatggttgggaccagattgactaccctgtacccttccttcttccccaatatgcctgcgccatcttcacattctgaagttgaaacccatgatcacccctttgaggtagattgaccggctttagacgcccaccccccacccaccgcaagctttgagtgggacaccattctgaattttttttctgaatttttttttaacatctctttctcattagagatctgaaaactcattagagatgttgagtcttatcaaataaaaagcatgagacatcatggccaaaaaaaaaaaaaaaaaaaaaaa

SEQ ID NO: 4033 - protein, 377 aa, Homo sapiens
  ref <308>: DATABASE ACCESSION NUMBER: SWISS-Prot / P28221
  ref <309>: DATABASE ENTRY DATE: 2002-06-15
MSPLNQSAEGLPQEASNRSLNATETSEAWDPRTLQALKISLAVVLSVITLATVLSNAFVLTTILLTRKLHTPANYLIGSLATTDLLVSILVMPISIAYTITHTWNFGQILCDIWLSSDITCCTASILHLCVIALDRYWAITDALEYSKRRTAGHAATMIAIVWAISICISIPPLFWRQAKAQEEMSDCLVNTSQISYTIYSTCGAFYIPSVLLIILYGRIYRAARNRILNPPSLYGKRFTTAHLITGSAGSSLCSLNSSLHEGHSHSAGSPLFFNHVKIKLADSALERKRISAARERKATKILGIILGAFIICWLPFFVVSLVLPICRDSCWIHPALFDFFTWLGYLNSLINPIIYTVFNEEFRQAFQKIVPFRKAS

SEQ ID NO: 4034 - DNA, 4488 bp, Rattus norvegicus
  ref <308>: DATABASE ACCESSION NUMBER: EMBL / M90518
  ref <309>: DATABASE ENTRY DATE: 2000-03-04
tgggccttttattattatcaggactttattcatgtccggggtgggttcctatcagagaaagtcaagctggtccatctgtgttccagcgagtggtcctccttaaacatccacttcatggcggcgggaagcgacggagccggctctttgaggcgcagacttcggcgaagcgaccacaacaacaacggcggcggcggcggcagcggcagcagcatcagcagcacgggcaccgtggccgccgctcccagctccagcttcccgggagcagccgccgagcgccgctcgctgctccgagactccggccgcttggccgccagctcctccccgccgcgcccgggaccgccggcggctcggcgccccgcttggtccgcagcgtcagcgccgcccgccgcggcccgggctcccggcagtgcgagcagctaagggctggccgccgcctccctgagctcccccggagcagccgacccctggtcgcggcgttcacctcgccgatgcgcggttggtaggagtgaccggagccattctctcctcgttgataagattccctaccaggataggagcctatctccctttccacagcaggacacagaaatctggccttcagtactttgggaaaaggatctgagacctcctggagctctgaccactggctgtcatctgtggctctggcctgtgtgggccactgagctctactcaaacattaaagaggaggaggggagatctgtggaatgggccaccccgttggcctgctgcattactgaacctgcgctgtccacacgtgcccagatcatgggacccagggcctgctagggctaggagcggggcccagtattcatgggtctctaggcctttccgaaatgtccgggaagggaggctgggcctggtggtgggcccggctgcccctctgcctactcctcagcctttatgccccctgggtgccttcatccttgggaaagcccaagggtcacccccacatgaactctatccgaattgacggggacatcacactgggaggcctgtttcccgtccacggccgtggctctgagggtaaggcctgcggggagctgaagaaggagaaaggcatccaccgcctggaggccatgctgtttgccctggaccgcatcaacaatgacccggacctactgcccaacatcacgttgggcgcccgcattctggacacctgctcgagggacacccacgccctggagcagtcactgacctttgtgcgggcgctcatcgagaaggacggcacggaggtccgctgcggcagcgggggcccgcccatcatcaccaagcccgaacgagtggtgggtgtcattggagcttcggggagctccgtctcgatcatggtggccaacatcctccgcctcttcaagatccctcagatcagctatgcctccacggcccctgacttgagtgacaacagccgctatgacttcttctcccgggtggtgccctcagacacataccaggcccaggccatggtggatattgtccgagccctcaagtggaactatgtgtccacactggcctcagagggcagctacggtgagagtggtgtggaggcctttatccagaagtcccgagagaacggaggtgtgtgcattgcccagtcggtgaagattccacgggaacccaagacgggggagttcgacaagatcatcaaacgcctactggaaacatccaatgccaggggtatcatcatctttgccaacgaggatgacatcaggagggtgttggaggcagctcgcagggccaaccagaccggccacttcttttggatgggttctgatagctggggctccaagagtgcccctgtgctgcgccttgaggaggtggccgagggcgcagtcaccattctccccaagaggatgtctgttcgagggttcgaccgatacttctccagccgcacgctggacaacaacaggcgcaacatctggtttgccgagttctgggaggacaacttccattgcaagttgagccgccacgcgctcaagaagggaagccacatcaagaagtgcaccaaccgagagcgcatcgggcaggactcggcctatgagcaggaggggaaggtgcagttcgtgattgacgctgtgtacgccatgggccacgcgctgcacgccatgcaccgtgacctgtgtcccggccgcgtaggactctgccctcgcatggaccccgtggatggcacccagctgcttaagtacatcaggaacgtcaacttctcaggcattgcggggaaccctgtaaccttcaatgagaacggagacgcaccggggcgctacgacatctaccagtaccaactgcgcaatggctcggccgagtacaaggtcatcggctcgtggacagaccacctgcacctcagaatagagcggatgcagtggccagggagtggccagcagctgccgcgctccatctgcagtctgccctgccagcccggggagcgaaagaagactgtgaagggcatggcttgctgctggcactgcgagccctgcaccgggtaccagtaccaagtggaccgctacacctgtaagacctgcccctacgacatgcggcccacagagaaccgcacgagctgccagcccatccccatcgtcaagttggagtgggactcgccgtgggccgtgctgcccctcttcctggccgtggtgggcatcgccgccacgctgttcgtggtggtcacgtttgtgcgctacaacgatacccccatcgtcaaggcctcgggccgggagctgagctacgtgctgctggcgggcatctttctgtgctacgccactaccttcctcatgatcgcagagccggacctggggacctgttcgctccgccgcatcttcctagggctcggcatgagcatcagctacgcggccctgctgaccaagaccaaccgcatttaccgcatctttgagcagggcaaacggtcggtcagtgccccgcgtttcatcagcccggcctcgcagctggccatcaccttcatcctcatctccctgcagctgctcggcatctgcgtgtggttcgtggtggacccctcccactcggtggtggacttccaggaccaacggacacttgacccccgctttgccaggggcgtgctcaagtgcgacatctcggacctgtccctcatctgcctgctgggctacagcatgctgctgatggtcacgtgtactgtgtacgccatcaagacccgaggcgtgcccgagaccttcaacgaggccaagcccatcggcttcaccatgtacaccacctgcattgtctggctggccttcatccccatcttttttggcacctcacagtcagccgacaagctgtacatccagacaaccacactgacggtctccgtgagtctgagcgcttcagtgtccctggggatgctctacatgcccaaagtctacatcatcctcttccacccggagcagaacgtgcccaagcgcaagcgcagtctcaaagccgtggtcaccgccgccaccatgtccaacaagttcacacagaagggcaacttcaggcccaatggggaagccaaatcagagctgtgtgagaacctggagaccccagcgctggctaccaaacagacctacgtcacctacaccaaccatgccatctagccgggccgcggagccaagcaggctaaggagccacaacctctgaggatggcacattgggccagggccgttcccgagggccctgccgatgtctgcccgcctcccgggcatccacgaatgtggcttggtgctgaggacagtagagaccccggccatcactgctgggcaagccgtggtgggcaaccagaggaggccgagtggctggggcagttccaggttatgccacacacaggtcttccttctggaccactgttgggcccagccccaaagcacaggggctcggtctccagagcccagccctggcttcctctccttcctcctgcctccgtctgtcctgtgggtgaccccggttggtccctgccccgtctttacgtttctcttccgtctttgctctgcatgtgttgtctgtttgggccctctgcttccatatttttccattctgctcctggccttcccctgccatctgccctgccccctgcccctcctccctgagctgccccatccccgccatcattttctcttctgttccccctcgatctcatttcctaccagccttccccctacttggcttcatccaccaactctttcaccacgttgcaaaagagaaaaaaaaaggggggggggaatcaccccctacaaaaaagcccaaacaaaaactaatcttgagtgtgtttcgaagtgctgcgtcctcctggtggcctgtgtgtccctgtggcctgcagcctgctcgcccgccctacccgtctgccgtgtgtcctgcccgcccgcctgcccgccttgcccttcctgctaacgacacggagttcagtgcctgggtgtttggtgatggtctctgatgtgtagcatgtctgtttttataccgagaacatttctaataaagataaacacatggttttgc

SEQ ID NO: 4035 - protein, 912 aa, Rattus norvegicus
  ref <308>: DATABASE ACCESSION NUMBER: SWISS-Prot / P31423
  ref <309>: DATABASE ENTRY DATE: 2002-06-15
MSGKGGWAWWWARLPLCLLLSLYAPWVPSSLGKPKGHPHMNSIRIDGDITLGGLFPVHGRGSEGKACGELKKEKGIHRLEAMLFALDRINNDPDLLPNITLGARILDTCSRDTHALEQSLTFVQALIEKDGTEVRCGSGGPPIITKPERVVGVIGASGSSVSIMVANILRLFKIPQISYASTAPDLSDNSRYDFFSRVVPSDTYQAQAMVDIVRALKWNYVSTLASEGSYGESGVEAFIQKSRENGGVCIAQSVKIPREPKTGEFDKIIKRLLETSNARGIIIFANEDDIRRVLEAARRANQTGHFFWMGSDSWGSKSAPVLRLEEVAEGAVTILPKRMSVRGFDRYFSSRTLDNNRRNIWFAEFWEDNFHCKLSRHALKKGSHIKKCTNRERIGQDSAYEQEGKVQFVIDAVYAMGHALHAMHRDLCPGRVGLCPRMDPVDGTQLLKYIRNVNFSGIAGNPVTFNENGDAPGRYDIYQYQLRNGSAEYKVIGSWTDHLHLRIERMQWPGSGQQLPRSICSLPCQPGERKKTVKGMACCWHCEPCTGYQYQVDRYTCKTCPYDMRPTENRTSCQPIPIVKLEWDSPWAVLPLFLAVVGIAATLFVVVTFVRYNDTPIVKASGRELSYVLLAGIFLCYATTFLMIAEPDLGTCSLRRIFLGLGMSISYAALLTKTNRIYRIFEQGKRSVSAPRFISPASQLAITFILISLQLLGICVWFVVDPSHSVVDFQDQRTLDPRFARGVLKCDISDLSLICLLGYSMLLMVTCTVYAIKTRGVPETFNEAKPIGFTMYTTCIVWLAFIPIFFGTSQSADKLYIQTTTLTVSVSLSASVSLGMLYMPKVYIILFHPEQNVPKRKRSLKAVVTAATMSNKFTQKGNFRPNGEAKSELCENLETPALATKQTYVTYTNHAI

SEQ ID NO: 4036 - DNA, 3431 bp, Homo sapiens
  ref <308>: DATABASE ACCESSION NUMBER: EMBL / U92457
  ref <309>: DATABASE ENTRY DATE: 1999-07-08
tcatgggtctctagggatttccgaaatgcctgggaagagaggcttgggctggtggtgggcccggctgcccctttgcctgctcctcagcctttacggcccctggatgccttcctccctgggaaagcccaaaggccaccctcacatgaattccatccgcatagatggggacatcacactgggaggcctgttcccggtgcatggccggggctcagagggcaagccctgtggagaacttaagaaggaaaagggcatccaccggctggaggccatgctgttcgccctggatcgcatcaacaacgacccggacctgctgcctaacatcacgctgggcgcccgcattctggacacctgctccagggacacccatgccctcgagcagtcgctgacctttgtgcaggcgctcatcgagaaggatggcacagaggtccgctgtggcagtggcggcccacccatcatcaccaagcctgaacgtgtggtgggtgtcatcggtgcttcagggagctcggtctccatcatggtggccaacatccttcgcctcttcaagataccccagatcagctacgcctccacagcgccagacctgagtgacaacagccgctacgacttcttctcccgcgtggtgccctcggacacgtaccaggcccaggccatggtggacatcgtccgcgccctcaagtggaactatgtgtccacagtggcctcggagggcagctatggtgagagcggtgtggaggccttcatccagaagtcccgtgaggacgggggcgtgtgcatcgcccagtcggtgaagataccacgggagcccaaggcaggcgagttcgacaagatcatccgccgcctcctggagacttcgaacgccagggcagtcatcatctttgccaacgaggatgacatcaggcgtgtgctggaggcagcacgaagggccaaccagacaggccatttcttctggatgggctctgacagctggggctccaagattgcacctgtgctgcacctggaggaggtggctgagggtgctgtcacgatcctccccaagaggatgtccgtacgaggcttcgaccgctacttctccagccgcacgctggacaacaaccggcgcaacatctggtttgccgagttctgggaggacaacttccactgcaagctgagccgccacgccctcaagaagggcagccacgtcaagaagtgcaccaaccgtgagcgaattgggcaggattcagcttatgagcaggaggggaaggtgcagtttgtgatcgatgccgtgtacgccatgggccacgcgctgcacgccatgcaccgtgacctgtgtcccggccgcgtggggctctgcccgcgcatggaccctgtagatggcacccagctgcttaagtacatccgaaacgtcaacttctcaggcatcgcagggaaccctgtgaccttcaatgagaatggagatgcgcctgggcgctatgacatctaccaataccagctgcgcaacgattctgccgagtacaaggtcattggctcctggactgaccacctgcaccttagaatagagcggatgcactggccggggagcgggcagcagctgccccgctccatctgcagcctgccctgccaaccgggtgagcggaagaagacagtgaagggcatgccttgctgctggcactgcgagccttgcacagggtaccagtaccaggtggaccgctacacctgtaagacgtgtccctatgacatgcggcccacagagaaccgcacgggctgccggcccatccccatcatcaagcttgagtggggctcgccctgggccgtgctgcccctcttcctggccgtggtgggcatcgctgccacgttgttcgtggtgatcacctttgtgcgctacaacgacacgcccatcgtcaaggcctcgggccgtgaactgagctacgtgctgctggcaggcatcttcctgtgctatgccaccaccttcctcatgatcgctgagcccgaccttggcacctgctcgctgcgccgaatcttcctgggactagggatgagcatcagctatgcagccctgctcaccaagaccaaccgcatctaccgcatcttcgagcagggcaagcgctcggtcagtgccccacgcttcatcagccccgcctcacagctggccatcaccttcagcctcatctcgctgcagctgctgggcatctgtgtgtggtttgtggtggacccctcccactcggtggtggacttccaggaccagcggacactcgacccccgcttcgccaggggtgtgctcaagtgtgacatctcggacctgtcgctcatctgcctgctgggctacagcatgctgctcatggtcacgtgcaccgtgtatgccatcaagacacgcggcgtgcccgagaccttcaatgaggccaagcccattggcttcaccatgtacaccacttgcatcgtctggctggccttcatccccatcttctttggcacctcgcagtcggccgacaagctgtacatccagacgacgacgctgacggtctcggtgagtctgagcgcctcggtgtccctgggaatgctctacatgcccaaagtctacatcatcctcttccacccggagcagaacgtgcccaagcgcaagcgcagcctcaaagccgtcgttacggcggccaccatgtccaacaagttcacgcagaagggcaacttccggcccaacggagaggccaagtctgagctctgcgagaaccttgaggccccagcgctggccaccaaacagacttacgtcacttacaccaaccatgcaatctagcgagtccatggagctgagcagcaggaggaggagccgtgaccctgtggaaggtgcgtcgggccagggccacacccaagggcccagctgtcttgcctgcccgtgggcacccacggacgtggcttggtgctgagatagcagagcccccagccatcactgctggcagcctgggcaaaccgggtgagcaacaggaggacgaggggccggggcggtgccaggctaccacaagaacctgcgtcttggaccattgcccctcccggccccaaaccacaggggctcaggtcgtgtgggccccagtgctagatctctccctcccttcgtctctgtctgtgctgttggcgacccctctgtctgtctccagccctgtctttctgttctcttatctctttgtttcaccttttccctctctggcgtccccggctgcttgtactcttggccttttctgtgtctcctttctggctcttgcctccgcctctctctctcatcctctttgtcctcagctcctcctgctttcttgggtcccaccagtgtcacttttctgccgttttctttcctgttctcctctgcttcattctcgtccagccattgctcccctctccctgccacccttccccagttcaccaaaccttacatgttgcaaaagaaaaaaaaaaaaaggaattcctgcagc

SEQ ID NO: 4037 - protein, 912 aa, Homo sapiens
  ref <308>: DATABASE ACCESSION NUMBER: SWISS-Prot / Q14833
  ref <309>: DATABASE ENTRY DATE: 2002-06-15
MPGKRGLGWWWARLPLCLLLSLYGPWMPSSLGKPKGHPHMNSIRIDGDITLGGLFPVHGRGSEGKPCGELKKEKGIHRLEAMLFALDRINNDPDLLPNITLGARILDTCSRDTHALEQSLTFVQALIEKDGTEVRCGSGGPPIITKPERVVGVIGASGSSVSIMVANILRLFKIPQISYASTAPDLSDNSRYDFFSRVVPSDTYQAQAMVDIVRALKWNYVSTVASEGSYGESGVEAFIQKSREDGGVCIAQSVKIPREPKAGEFDKIIRRLLETSNARAVIIFANEDDIRRVLEAARRANQTGHFFWMGSDSWGSKIAPVLHLEEVAEGAVTILPKRMSVRGFDRYFSSRTLDNNRRNIWFAEFWEDNFHCKLSRHALKKGSHVKKCTNRERIGQDSAYEQEGKVQFVIDAVYAMGHALHAMHRDLCPGRVGLCPRMDPVDGTQLLKYIRNVNFSGIAGNPVTFNENGDAPGRYDIYQYQLRNDSAEYKVIGSWTDHLHLRIERMHWPGSGQQLPRSICSLPCQPGERKKTVKGMPCCWHCEPCTGYQYQVDRYTCKTCPYDMRPTENRTGCRPIPIIKLEWGSPWAVLPLFLAVVGIAATLFVVITFVRYNDTPIVKASGRELSYVLLAGIFLCYATTFLMIAEPDLGTCSLRRIFLGLGMSISYAALLTKTNRIYRIFEQGKRSVSAPRFISPASQLAITFSLISLQLLGICVWFVVDPSHSVVDFQDQRTLDPRFARGVLKCDISDLSLICLLGYSMLLMVTCTVYAIKTRGVPETFNEAKPIGFTMYTTCIVWLAFIPIFFGTSQSADKLYIQTTTLTVSVSLSASVSLGMLYMPKVYIILFHPEQNVPKRKRSLKAVVTAATMSNKFTQKGNFRPNGEAKSELCENLEAPALATKQTYVTYTNHAI

SEQ ID NO: 4038 - DNA, 4488 bp, Rattus norvegicus; identical to SEQ ID NO: 4034
  ref <308>: DATABASE ACCESSION NUMBER: EMBL / M90518
  ref <309>: DATABASE ENTRY DATE: 2000-03-04

SEQ ID NO: 4039 - protein, 912 aa, Rattus norvegicus; identical to SEQ ID NO: 4035
  ref <308>: DATABASE ACCESSION NUMBER: SWISS-Prot / P31423
  ref <309>: DATABASE ENTRY DATE: 2002-06-15

SEQ ID NO: 4040 - DNA, 3431 bp, Homo sapiens; identical to SEQ ID NO: 4036
  ref <308>: DATABASE ACCESSION NUMBER: EMBL / U92457
  ref <309>: DATABASE ENTRY DATE: 1999-07-08

SEQ ID NO: 4041 - protein, 912 aa, Homo sapiens; identical to SEQ ID NO: 4037
  ref <308>: DATABASE ACCESSION NUMBER: SWISS-Prot / Q14833
  ref <309>: DATABASE ENTRY DATE: 2002-06-15

SEQ ID NO: 4042 - DNA, 1131 bp, Rattus norvegicus
  ref <308>: DATABASE ACCESSION NUMBER: EMBL / M91234
  ref <309>: DATABASE ENTRY DATE: 2000-03-04
gaattctttacttttctcgctgatcatcattaacatggagagtgcctttggtcctatccccacagcagcccagtttcctgcccctatggttaaaatgactccccaggttgggggacaaaaagagcccctaaaatagtttcaaagaatctacaactgtgaagaactttgttttgccagtcaggattaatgttttcttttccatgggctatagcccactgagacagtttggtaaagggctgttactaaagtcctgaaagccccaggtgaactggttacaattcttttgtcagctgcttagtatttagcacccaggttctaaccatctctccatccttttgttattagttgttactagaagcctagtgtcatttggaggctggttctcttgagagcaaagccaccaagctgacactgaagggaggtaggtactccttaagggaaaatctaagcccagagagacagccggtaacagctaggctgcctctctgctcgcctttctgtttcatagacaaagcttgtgcttatatttacagtggcctttttgtccaaaaaaaggcctcctggtttagctgtgtgactaaatgctatttgtcctcttcagtggacctctctcctctagattcccttcttgttttctcaccatcccacgtgagatgcttgttagtaactgttacaggtcttctttaccaccgaggaaagacagaatcctactagaggcctgaaagaatgttccagacatggctagaaggcccctcacttgtgcctgctctcttcagacgctgaaggtagggagtgccaggtctgcccccaggctccaagggtgggtctcctaggggctggaaaagccccaccaatctggctaagatcaaggaaagggtatgaagagaaagttacagaaatttgaagggttaagctaagttgctgagagttagtataagttacagagaaagtaaggttaaacaaagagaaagagaaaagaaggtaaaaaggcagaagctagggaagaaaagagacaaaaagaagaggaagctagagagctaaagagagataaaagacaagagaggaacatatactggccacagtagttagggaacctaagaagacagttacctggcaacagaagagaattcg

SEQ ID NO: 4043 - DNA, 1859 bp, Rattus norvegicus
  ref <308>: DATABASE ACCESSION NUMBER: EMBL / M91466
  ref <309>: DATABASE ENTRY DATE: 2000-03-04
ggcacgagcggtctcggcgctgtggccatgcctggcggcaccttagcggctgtcctgagcccgacacaaccccggtagaggactccccgggcccggctggcccggccatgcagctagagacgcaggacgcgctgtacgtggcgctggagctggttatcgccgcgctggcagtggcgggcaacgtgctggtgtgcgctgcggtgggagcctcgagtgctttacagacccccaccaactactttctggtgtccctggcgacggcggacgtggctgtgggactcttcgccatcccctttgccatcaccatcagcctgggcttctgcacggactttcacagctgcctcttcctcgcctgcttcgtgctggtgctcacacagagctccatctttagcctcttggcggtggctgtcgaccggtatctggccattcgcgtcccgctcaggtataaaggtttggtcactggaacacgagcaagagggatcatcgctgtcctctgggtccttgcctttggcattggactgactcctttcctgggttggaacagtaaagaccgtgccaccagcaactgcacagaacctggggatggcatcacgaataagagctgctgccctgtgaagtgtctctttgagaacgtagttcccatgagctacatggtttatttcaacttctttgggtgtgtccttcctccactgctcatcatgatggtgatctacatcaaaatcttcatggtggcctgcaagcagcttcagcacatggaactgatggagcactccaggaccacgctgcagcgggagatccacgcggccaagtcactggctatgattgtgggcatctttgctctgtgttggctccccgtgcatgccatcaactgcatcaccctcttccatccagccctggccaaggacaagcccaaatgggtgatgaatgtggccatcctcctgtcacacgccaattcagttgtcaatcccattgtctatgcctacaggaaccgggacttccgctacagtttccacaggatcatctccagatacgttctctgccagacggacaccaagggtgggagcgggcaggccgggggacagtcaactttcagtctgagcttgtgacctaggctctggcctttgggagaagaaggcttaaaataaacaatggactggacacagctggtgacctcactgtggaggacaactaccctctcaagcatgtggcccacctgccctgaacgcttgccaggagtcacacaagtctggctcacacgtacatgcaactaggaggccctgaggctaacagatacacttaggaatctattcagctgctcttacttactgtgtggatggcgggcggctagaactgattccaaaaactgttttatttttaagaatctgcctcattcgtggtagaaaaatgactgaaacttaccttactgtgaaacactgtgaactatataatgtaagtatttttcacttacagcaatgggaaaataaaagttggctctattaacatatactcattccggggacagcaactcagaaaactgaagtataattcttcagtcaagatactgtagtgttaatttagggaatggtactaccctaagtttgaaagtagaattatgtaacaaaacaatttgagttcagtatcttccttgcccacaaaacactagaggtggaaacttggagagctgggtccttcctccactgcacccctgctttagagctaggtactagagtttgcttctctctcacattacagtttattggatcccaaagtatgaaaattttactgagcaaaatcccctagctgtgtattatatccagtgaaataaaactttgaaaggtgaaaaaaaaaaaaaaaaaaaa

SEQ ID NO: 4044 - protein, 332 aa, Rattus norvegicus
  ref <308>: DATABASE ACCESSION NUMBER: SWISS-Prot / P29276
  ref <309>: DATABASE ENTRY DATE: 1996-02-01
MQLETQDALYVALELVIAALAVAGNVLVCAAVGASSALQTPTNYFLVSLATADVAVGLFAIPFAITISLGFCTDFHSCLFLACFVLVLTQSSIFSLLAVAVDRYLAIRVPLRYKGLVTGTRARGIIAVLWVLAFGIGLTPFLGWNSKDRATSNCTEPGDGITNKSCCPVKCLFENVVPMSYMVYFNFFGCVLPPLLIMMVIYIKIFMVACKQLQHMELMEHSRTTLQREIHAAKSLAMIVGIFALCWLPVHAINCITLFHPALAKDKPKWVMNVAILLSHANSVVNPIVYAYRNRDFRYSFHRIISRYVLCQTDTKGGSGQAGGQSTFSLSL

SEQ ID NO: 4045 - DNA, 1687 bp, Homo sapiens
  ref <308>: DATABASE ACCESSION NUMBER: EMBL / M97759
  ref <309>: DATABASE ENTRY DATE: 2000-03-04
cccagccccgaggctcagaagcggcaggcggaggcgcggtccgggcgctatggccatgcccggcgggtctcacgcggctgcccctcgcccggcgcgccttcggtagggggcgcccggggcccagctggcccggccatgctgctggagacacaggacgcgctgtacgtggcgctggagctggtcatcgccgcgctttcggtggcgggcaacgtgctggtgtgcgccgcggtgggcacggcgaacactctgcagacgcccaccaactacttcctggtgtccctggctgcggccgacgtggccgtggggctcttcgccatcccctttgccatcaccatcagcctgggcttctgcactgacttctacggctgcctcttcctcgcctgcttcgtgctggtgctcacgcagagctccatcttcagccttctggccgtggcagtcgacagatacctggccatctgtgtcccgctcaggtataaaagtttggtcacggggacccgagcaagaggggtcattgctgtcctctgggtccttgcctttggcatcggattgactccattcctggggtggaacagtaaagacagtgccaccaacaactgcacagaaccctgggatggaaccacgaatgaaagctgctgccttgtgaagtgtctctttgagaatgtggtccccatgagctacatggtatatttcaatttctttgggtgtgttctgcccccactgcttataatgctggtgatctacattaagatcttcctggtggcctgcaggcagcttcagcgcactgagctgatggaccactcgaggaccaccctccagcgggagatccatgcagccaagtcactggccatgattgtggggatttttgccctgtgctggttacctgtgcatgctgttaactgtgtcactcttttccagccagctcagggtaaaaataagcccaagtgggcaatgaatatggccattcttctgtcacatgccaattcagttgtcaatcccattgtctatgcttaccggaaccgagacttccgctacacttttcacaaaattatctccaggtatcttctctgccaagcagatgtcaagagtgggaatggtcaggctggggtacagcctgctctcggtgtgggcctatgatctaggctctcgcctcttccaggagaagatacaaatccacaagaaacaaagaggacacggctggttttcattgtgaaagatagctacacctcacaaggaaatggactgcctctcttgagcacttccctggagctaccacgtatctagctaatatgtatgtgtcagtagtagcaccaaggattgacaaatatatttatgatctattcagctgcttttactgtgtggattatgccaacagcttgaatggattctaacagactcttttgtttttaaaagtctgccttgtttatggtggaaaattactgaaactattttactgtgaaacagtgtgaactattataatgcaaatactttttaacttagaggcaatggaaaaataaaagttgactgtactaaaaatgtatacttgttgccaggaaggtgacctcaaaaattaaaagtataattattcggccgggcatggtggctcacacctgtaattccagcactttgggaggccaaggcaggcggatcacgaggtcaggagttcaaaaccagcctgtccaatatagtg

SEQ ID NO: 4046 - protein, 332 aa, Homo sapiens
  ref <308>: DATABASE ACCESSION NUMBER: SWISS-Prot / P29275
  ref <309>: DATABASE ENTRY DATE: 2001-10-16
MLLETQDALYVALELVIAALSVAGNVLVCAAVGTANTLQTPTNYFLVSLAAADVAVGLFAIPFAITISLGFCTDFYGCLFLACFVLVLTQSSIFSLLAVAVDRYLAICVPLRYKSLVTGTRARGVIAVLWVLAFGIGLTPFLGWNSKDSATNNCTEPWDGTTNESCCLVKCLFENVVPMSYMVYFNFFGCVLPPLLIMLVIYIKIFLVACRQLQRTELMDHSRTTLQREIHAAKSLAMIVGIFALCWLPVHAVNCVTLFQPAQGKNKPKWAMNMAILLSHANSVVNPIVYAYRNRDFRYTFHKIISRYLLCQADVKSGNGQAGVQPALGVGL

SEQ ID NO: 4047 - DNA, 1758 bp, Rattus norvegicus
  ref <308>: DATABASE ACCESSION NUMBER: EMBL / M91590
  ref <309>: DATABASE ENTRY DATE: 2000-03-04
tttttttttttttgcctattaaaaggtttatttcttccctatgctcagaaacgaagatatggccttgctggtccctcccctgaaatctcatcttcaaggattgggaggcagaaggggacctggcagcgggtgagaaggctgcgagcgagccgcgaacccggcgggtggagggcggcgacggcgcgcgcaccatgggtgaaaaacccgggaccagggtcttcaagaagtcgagccctaactgcaagctcaccgtgtacttgggcaagcgtgactttgtggatcacttggacaaagtggatcctgtcgatggtgtggtgcttgtggatcctgactacttgaaggaccggaaagtgtttgtgaccctcacctgtgccttccgctatggccgagaagacctggatgtactgggcctgtctttccgcaaagatctgttcatcgccacctaccaggccttcccccccatgcccaacccacctcggccccccacccgcctacaggaccgactgctgaagaagttgggccagcatgcccaccccttttttttcacaataccccagaatttgccttgctccgtcacactgcagccaggaccggaggacacagggaaggcctgtggagtagactttgagattcgagccttctgtgccaaatctatagaagaaaaaagccacaaaaggaactccgtgcggcttatcatcagaaaggtacagtttgctcctgagacacccggcccccagccatcagctgaaaccacacgccacttcctcatgtctgaccggaggtccctgcacctagaggcttccctggacaaagagctgtactaccatggggaacccctcaatgtcaacgtccacgtcaccaacaattctgccaagaccgtcaagaagatcagagtgtctgtgagacagtatgccgacatttgcctcttcagcaccgcgcagtacaagtgtcctgtggctcagcttgaacaagatgaccaggtgtctcccagttccacattctgcaaggtgtacaccataaccccgctgctcagtgacaaccgagagaagcgtggccttgcccttgatgggcaactcaagcacgaagacaccaacctggcttccagcaccattgtgaaggagggagccaacaaggaggtgctgggaatcctagtatcctacagggtcaaggtgaagctggtggtgtctcgaggcggggatgtctccgtggagctacctttcgtcctaatgcaccccaagccccacgaccacatcacccttccccgaccccagtcagccccccgggaaatagacatccctgtggataccaacctcattgaattcgataccaactatgccacagacgacgacatcgtgtttgaggactttgcgaggcttcggctgaaggggatgaaggatgacgactgtgatgaccagttctgctaggaagaggggctgggagaggtaggggtgggcaggactgaggtccactgcccttgcgggtaggagggtcccagcctctcctccttccccgttcgtccacccgagatacacactggacccatcactcgttgaaagtgggcattaatcttttgacttcagctctgccaccccagccctgctccctagggtggcaagctgtgtacacacctaaagttttgggaagggaagggaacactgaaagcaaggagtgaatgtagagaaaaggagtagaaaggacacccatgtttggcctcataccaacccacccccagtcaccacttctgcctcccccgaattc

SEQ ID NO: 4048 - protein, 410 aa, Rattus norvegicus
  ref <308>: DATABASE ACCESSION NUMBER: SWISS-Prot / P29067
  ref <309>: DATABASE ENTRY DATE: 2002-06-15
MGEKPGTRVFKKSSPNCKLTVYLGKRDFVDHLDKVDPVDGVVLVDPDYLKDRKVFVTLTCAFRYGREDLDVLGLSFRKDLFIATYQAFPPMPNPPRPPTRLQDRLLKKLGQHAHPFFFTIPQNLPCSVTLQPGPEDTGKACGVDFEIRAFCAKSIEEKSHKRNSVRLIIRKVQFAPETPGPQPSAETTRHFLMSDRRSLHLEASLDKELYYHGEPLNVNVHVTNNSAKTVKKIRVSVRQYADICLFSTAQYKCPVAQLEQDDQVSPSSTFCKVYTITPLLSDNREKRGLALDGQLKHEDTNLASSTIVKEGANKEVLGILVSYRVKVKLVVSRGGDVSVELPFVLMHPKPHDHITLPRPQSAPREIDIPVDTNLIEFDTNYATDDDIVFEDFARLRLKGMKDDDCDDQFC

SEQ ID NO: 4049 - DNA, 1527 bp, Homo sapiens
  misc_feature (1)..(1527): n=a, c, g or t
  ref <308>: DATABASE ACCESSION NUMBER: EMBL / AF106941
  ref <309>: DATABASE ENTRY DATE: 1999-01-20
ggcgaggaggctgcgagcgagccggaaccgagcgggcggcgggcgccgcacctatgggggagaaacccgggaccagggtcttcaagaagtcgagccctaactgcaagctcaccgtgtacttgggcaagcgggacttcgtagatcacctggacaaagtggaccctgtagatggcgtggtgcttgtggaccctgactacctgaaggaccgcaaagtgtttgtgaccctcacctgcgccttccgctatggccgtgaagacctggatgtgctgggcttgtccttccgcaaagacctgttcatcgccacctaccaggccttccccccggtgcccaacccaccccggccccccacccgcctgcaggaccggctgctgaggaagctgggccagcatgcccaccccttcttcttcaccataccccagaatcttccatgctccgtcacactgcagccaggcccagaggatacaggaaaggcctgcggggtagactttgagattcgagccttctgtgctaaatcactagaagagaaaagccacaaaaggaactctgtgcggctggtgatccgaaaggtgcagttcgccccggagaaacccggcccccagccttcagccgaaaccacacgccacttcctcatgtctgaccggtccctgcacctcgaggcttccctggacaaggagctgtactaccatggggagcccctcaatgtaaatgtccacgtcaccaacaactccaccaagaccgtcaagaagatcaaagtctctgtgagacagtacgccgacatctgcctcttcagcaccgcccagtacaagtgtcctgtggctcaactcgaacaagatgaccaggtatctcccagctccacattctgtaaggtgtacaccataaccccactgctcagcgacaaccgggagaagcggggtctcgccctggatgggaaactcaagcacgaggacaccaacctggcttccagcaccatcgtgaaggagggtgccaacaaggaggtgctgggaatcctggtgtcctacagggtcaaggtgaagctggtggtgtctcgaggcggggatgtctctgtggagctgccttttgttcttatgcaccccaagccccacgaccacatccccctccccagaccccagtcagccgctccggagacagatgtccctgtggacaccaacctcattgaatttgataccaactatgccacagatgatgacattgtgtttgaggactttgcccggcttcggctgaaggggatgaaggatgacgactatgatgatcaactctgctaggaagcggggtgggaaagaagggaggggatggggttgggagaggtgagggcaggattaagatccccactgtcaatgggggattgtcccagcccctcttcccttcccctcacctggaagcttcttcaaccaatcccttcacactctctcccccatccccccaagatacacactggaccctctcttgctgaatgtgggcattaattttttgactgcagntctgcttctccagccccgccgtgggtgg

SEQ ID NO: 4050 - protein, 409 aa, Homo sapiens
  ref <308>: DATABASE ACCESSION NUMBER: SWISS-Prot / P32121
  ref <309>: DATABASE ENTRY DATE: 2002-06-15
MGEKPGTRVFKKSSPNCKLTVYLGKRDFVDHLDKVDPVDGVVLVDPDYLKDRKVFVTLTCAFRYGREDLDVLGLSFRKDLFIATYQAFPPVPNPPRPPTRLQDRLLRKLGQHAHPFFFTIPQNLPCSVTLQPGPEDTGKACGVDFEIRAFCAKSLEEKSHKRNSVRLVIRKVQFAPEKPGPQPSAETTRHFLMSDRSLHLEASLDKELYYHGEPLNVNVHVTNNSTKTVKKIKVSVRQYADICLFSTAQYKCPVAQLEQDDQVSPSSTFCKVYTITPLLSDNREKRGLALDGKLKHEDTNLASSTIVKEGANKEVLGILVSYRVKVKLVVSRGGDVSVELPFVLMHPKPHDHIPLPRPQSAAPETDVPVDTNLIEFDTNYATDDDIVFEDFARLRLKGMKDDDYDDQLC

SEQ ID NO: 4051 - DNA, 1758 bp, Rattus norvegicus; identical to SEQ ID NO: 4047
  ref <308>: DATABASE ACCESSION NUMBER: EMBL / M91590
  ref <309>: DATABASE ENTRY DATE: 2000-03-04

SEQ ID NO: 4052 - protein, 410 aa, Rattus norvegicus; identical to SEQ ID NO: 4048
  ref <308>: DATABASE ACCESSION NUMBER: SWISS-Prot / P29067
  ref <309>: DATABASE ENTRY DATE: 2002-06-15

SEQ ID NO: 4053 - DNA, 1527 bp, Homo sapiens; identical to SEQ ID NO: 4049
  misc_feature (1)..(1527): n=a, c, g or t
  ref <308>: DATABASE ACCESSION NUMBER: EMBL / AF106941
  ref <309>: DATABASE ENTRY DATE: 1999-01-20

SEQ ID NO: 4054 - protein, 409 aa, Homo sapiens; identical to SEQ ID NO: 4050
  ref <308>: DATABASE ACCESSION NUMBER: SWISS-Prot / P32121
  ref <309>: DATABASE ENTRY DATE: 2002-06-15

SEQ ID NO: 4055 - DNA, 1065 bp, Rattus norvegicus
  ref <308>: DATABASE ACCESSION NUMBER: EMBL / M91595
  ref <309>: DATABASE ENTRY DATE: 2000-03-04
tctagaaggactgaacttcctcgggactcactcaaggtcattgttcctagcaacacgagggctgtgtgtgagctccgaaatttctaaggtcaagattgcttttgtgtttccccagcagtcagttcacagccggccacgtgggaagtgagcaaactaagtccttccaaatcgaactaaactaaaagacaggagacaaaagcacgggctctttcctactccacgccgattctacccacgctggcaagttattcttactctctctgagcaggcgattccaggctgaagggagcaaagtcctggctagggaagagtagggggacccgccgaatcccctagtaacgtagggtgggcaagtgggcgtgtgcgcaagcacgtgctctcacgcaggagtgccttgggggggaagggagtggtctccaaaagggggaggggagaaggcagggggggcggggagaagcaggctttttaggacccggcagcagcgggggaggagaaagaaggcaaggaggcgtctcccgcgctcgccagggccgtgccacctgcccgctagctcgccgcgctacggtttcccactagccaacatgctgccgagattgggcggccccgcgctgccgctgctcctgccgtcgctgctcttgctgctgctgttgggcgcgggcggttgcggtcctggggtgcgcgccgaggtgctgttccgctgcccaccctgcacgcccgagcgtctggccgcctgcggacccccacccgacgcgccctgcgccgagctggtgcgagagcccggctgcggttgctgctccgtgtgcgcacgacaggagggcgaagcttgcggcgtctacatcccgcgctgcgcccagacgttacgctgttaccccaacccgggctccgagctgcccctgaaggcactggtcaccggcgcgggtacctgtgaaaagagacgcgtgggcgccaccccacagcaggttgcaggtaatgcggactgtgagcactagttcgggggttgggagaaactcgtagctcagcggggtctcctggctggcaatcctcacgtggggaaagagagtcgac

SEQ ID NO: 4056 - protein, 128 aa, Rattus norvegicus
  ref <308>: DATABASE ACCESSION NUMBER: SWISS-Prot / AAA91899
  ref <309>: DATABASE ENTRY DATE: 2000-08-04
MLPRLGGPALPLLLPSLLLLLLLGAGGCGPGVRAEVLFRCPPCTPERLAACGPPPDAPCAELVREPGCGCCSVCARQEGEACGVYIPRCAQTLRCYPNPGSELPLKALVTGAGTCEKRRVGATPQQVA

SEQ ID NO: 4057 - DNA, 1421 bp, Homo sapiens; identical to SEQ ID NO: 3

SEQ ID NO: 4058 - protein, 325 aa, Homo sapiens; identical to SEQ ID NO: 4

SEQ ID NO: 4059 - DNA, 1065 bp, Rattus norvegicus; identical to SEQ ID NO: 4055
  ref <308>: DATABASE ACCESSION NUMBER: EMBL / M91595
  ref <309>: DATABASE ENTRY DATE: 2000-03-04

SEQ ID NO: 4060 - protein, 128 aa, Rattus norvegicus; identical to SEQ ID NO: 4056
  ref <308>: DATABASE ACCESSION NUMBER: SWISS-Prot / AAA91899
  ref <309>: DATABASE ENTRY DATE: 2000-08-04

SEQ ID NO: 4061 - DNA, 1421 bp, Homo sapiens; identical to SEQ ID NO: 3

SEQ ID NO: 4062 - protein, 325 aa, Homo sapiens; identical to SEQ ID NO: 4

SEQ ID NO: 4063 - DNA, 2648 bp, Rattus norvegicus
  ref <308>: DATABASE ACCESSION NUMBER: EMBL / M91599
  ref <309>: DATABASE ENTRY DATE: 2002-08-09
catcaataacgaggaccccaagaccctcagcagctcctcgagtgggcactcctacctgcagcaagcaccttactggacacacccccaacgcatggagaagaaactgcacgcggtacctgccgggaacactgtcaaattccgctgtccagctgcagggaaccccatgcccaccatccactggctcaagaacggacaggccttccacggggagaatcgtatcggaggcattcggctgcgtcaccaacactggagcctcgtgatggagagcgtggtgccctcagaccgtggcacgtacacgtgtcttgtggagaactctctgggtagcattcgctacagctatctgctggatgtgctggagcggtccccgcaccggcccatcctgcaggcgggactcccagccaacaccacggctgtggttggcagcaacgtggagctgctgtgcaaggtgtacagtgacgcccagccgcacatccagtggctgaagcacatcgttatcaacggcagcagtctcggcgctgatggtttcccctacgtacaagtcctgaagacaacagacatcaatagctcagaggtggaggtgctgtatctgaggaacgtgtcggctgaggatgcaggggagtacacctgcctggcgggcaactccatcggcctctcctaccagtcagcgtggctcacagtgctacccgcagaggaagaagacctcgcgtggacaacagcaacatcggaggccagatatacagatattatcctatatgtccatggctcactggctttggttttgctcctgctgctggccggggtgtatcaccgacaagcaatccacggccaccactctcgacagcctgtcactgtacagaagctgtcccggttccctttggcccggcagttctccttggagtcgaggtcctctggcaagtcaagtttgtccctggtgcgaggtgtccggctctcctccagtggcccgcccttgctcacgggccttgtgagtctagacctacctctcgatccactttgggagttcccccgggacaggctggtgctcggaaagcccctgggtgagggctgctttgggcaagtggtttgtgcagaagcccttggcatggattcctcccggccagaccaaaccagcatcgtggctgtgaagatgctgaaagacaatgcctccgacaaggatttggcagacctgatctctgagatggagatgatgaagctaatcggaagacacaagaacatcattaacctgctgggtgtctgcactcaggaagggcccctgtatgtgattgtggaatatgcggccaagggaaaccttcgggaattcctccgtgcccggcgtcccccaggccctgatctcagccctgatgggcctcggagcagcgaaggaccgctctccttcccggccctggtctcctgtgcctaccaggtggcccgaggcatgcagtatctggagtctcggaagtgcatccaccgggacctggctgcccgaaacgtgctggtgaccgaggatgacgtgatgaagatcgctgactttggtctggcccgtggtgtccaccacatcgactactataagaaaaccagcaatggccgcctgccagtcaagtggatggctcctgaggcgttgtttgaccgtgtatacacacaccagagtgacgtgtggtccttcgggatcctgctgtgggaaatcttcaccctcgggggctccccataccccggcatcccagtggaggagctgttctcactgctgcgagaggggcacaggatggagcggcccccaaactgcccctcagagctgtatgggctaatgagggagtgttggcacgcagctccttctcagaggccgacttttaagcagctggtggaagctctggacaaggtcctgctggctgtctctgaagagtaccttgacctccgcctgacctttggaccctattcccccaacaatggggatgccagcagcacgtgctcctccagcgactcggttttcagccacgaccctttgcccctcgagccaagccccttcccatttcctgaggcgcagaccacatgagcctgggaacgatgttgcatgggctcgtaggcccgtggccgtgggactccaacctgtttcatcagcatttgacgttggcactgtcatcaggcctctgactcgaggctactgctggcccagatcctctctctggccctgttttggggaggcccattcttggtcttggggttcacagttgaggccttctgttccaaacttatgttcccagctcagagttcaactcctcgtctcaagatcatggtcgtgcccttggactcatcctcaaaggagcgaagcattaaggccttgacacttagcctccaccccaggggctctccgggcctgactgcaaatctttggtcctaaacatttctagctccccaaacaacctagaggcctcgggacttcactgcacccccgcccccgcagcccacaagcctcgccaccctggtccccaactccccactgcttgttctagcatcttgttgaaggagcctcagctctggtgtccttgagagagggaagcctgtggaaaagacagaagaacaaggcattttataaattattattattttttaaaaaaaaaaaaaaaaatctagaattctgcagaaggatcccgcgccat

SEQ ID NO: 4064 - protein, 650 aa, Rattus norvegicus
  ref <308>: DATABASE ACCESSION NUMBER: SWISS-Prot / AAA41157
  ref <309>: DATABASE ENTRY DATE: 2003-02-01
MEKKLHAVPAGNTVKFRCPAAGNPMPTIHWLKNGQAFHGENRIGGIRLRHQHWSLVMESVVPSDRGTYTCLVENSLGSIRYSYLLDVLERSPHRPILQAGLPANTTAVVGSNVELLCKVYSDAQPHIQWLKHIVINGSSLGADGFPYVQVLKTTDINSSEVEVLYLRNVSAEDAGEYTCLAGNSIGLSYQSAWLTVLPAEEEDLAWTTATSEARYTDIILYVHGSLALVLLLLLAGVYHRQAIHGHHSRQPVTVQKLSRFPLARQFSLESRSSGKSSLSLVRGVRLSSSGPPLLTGLVSLDLPLDPLWEFPRDRLVLGKPLGEGCFGQVVCAEALGMDSSRPDQTSIVAVKMLKDNASDKDLADLISEMEMMKLIGRHKNIINLLGVCTQEGPLYVIVEYAAKGNLREFLRARRPPGPDLSPDGPRSSEGPLSFPALVSCAYQVARGMQYLESRKCIHRDLAARNVLVTEDDVMKIADFGLARGVHHIDYYKKTSNGRLPVKWMAPEALFDRVYTHQSDVWSFGILLWEIFTLGGSPYPGIPVEELFSLLREGHRMERPPNCPSELYGLMRECWHAAPSQRPTFKQLVEALDKVLLAVSEEYLDLRLTFGPYSPNNGDASSTCSSSDSVFSHDPLPLEPSPFPFPEAQTT

SEQ ID NO: 4065 - DNA, 3015 bp, Homo sapiens
  ref <308>: DATABASE ACCESSION NUMBER: Refseq / NM_002011
  ref <309>: DATABASE ENTRY DATE: 2002-11-05
ccgaggagcgctcgggctgtctgcggaccctgccgcgtgcaggggtcgcggccggctggagctgggagtgaggcggcggaggagccaggtgaggaggagccaggaaggcagttggtgggaagtccagcttgggtccctgagagctgtgagaaggagatgcggctgctgctggccctgttgggggtcctgctgagtgtgcctgggcctccagtcttgtccctggaggcctctgaggaagtggagcttgagccctgcctggctcccagcctggagcagcaagagcaggagctgacagtagcccttgggcagcctgtgcggctgtgctgtgggcgggctgagcgtggtggccactggtacaaggagggcagtcgcctggcacctgctggccgtgtacggggctggaggggccgcctagagattgccagcttcctacctgaggatgctggccgctacctctgcctggcacgaggctccatgatcgtcctgcagaatctcaccttgattacaggtgactccttgacctccagcaacgatgatgaggaccccaagtcccatagggacctctcgaataggcacagttacccccagcaagcaccctactggacacacccccagcgcatggagaagaaactgcatgcagtacctgcggggaacaccgtcaagttccgctgtccagctgcaggcaaccccacgcccaccatccgctggcttaaggatggacaggcctttcatggggagaaccgcattggaggcattcggctgcgccatcagcactggagtctcgtgatggagagcgtggtgccctcggaccgcggcacatacacctgcctggtagagaacgctgtgggcagcatccgctataactacctgctagatgtgctggagcggtccccgcaccggcccatcctgcaggccgggctcccggccaacaccacagccgtggtgggcagcgacgtggagctgctgtgcaaggtgtacagcgatgcccagccccacatccagtggctgaagcacatcgtcatcaacggcagcagcttcggagccgacggtttcccctatgtgcaagtcctaaagactgcagacatcaatagctcagaggtggaggtcctgtacctgcggaacgtgtcagccgaggacgcaggcgagtacacctgcctcgcaggcaattccatcggcctctcctaccagtctgcctggctcacggtgctgccagaggaggaccccacatggaccgcagcagcgcccgaggccaggtatacggacatcatcctgtacgcgtcgggctccctggccttggctgtgctcctgctgctggccgggctgtatcgagggcaggcgctccacggccggcacccccgcccgcccgccactgtgcagaagctctcccgcttccctctggcccgacagttctccctggagtcaggctcttccggcaagtcaagctcatccctggtacgaggcgtgcgtctctcctccagcggccccgccttgctcgccggcctcgtgagtctagatctacctctcgacccactatgggagttcccccgggacaggctggtgcttgggaagcccctaggcgagggctgctttggccaggtagtacgtgcagaggcctttggcatggaccctgcccggcctgaccaagccagcactgtggccgtcaagatgctcaaagacaacgcctctgacaaggacctggccgacctggtctcggagatggaggtgatgaagctgatcggccgacacaagaacatcatcaacctgcttggtgtctgcacccaggaagggcccctgtacgtgatcgtggagtgcgccgccaagggaaacctgcgggagttcctgcgggcccggcgccccccaggccccgacctcagccccgacggtcctcggagcagtgaggggccgctctccttcccagtcctggtctcctgcgcctaccaggtggcccgaggcatgcagtatctggagtcccggaagtgtatccaccgggacctggctgcccgcaatgtgctggtgactgaggacaatgtgatgaagattgctgactttgggctggcccgcggcgtccaccacattgactactataagaaaaccagcaacggccgcctgcctgtgaagtggatggcgcccgaggccttgtttgaccgggtgtacacacaccagagtgacgtgtggtcttttgggatcctgctatgggagatcttcaccctcgggggctccccgtatcctggcatcccggtggaggagctgttctcgctgctgcgggagggacatcggatggaccgacccccacactgccccccagagctgtacgggctgatgcgtgagtgctggcacgcagcgccctcccagaggcctaccttcaagcagctggtggaggcgctggacaaggtcctgctggccgtctctgaggagtacctcgacctccgcctgaccttcggaccctattccccctctggtggggacgccagcagcacctgctcctccagcgattctgtcttcagccacgaccccctgccattgggatccagctccttccccttcgggtctggggtgcagacatgagcaaggctcaaggctgtgcaggcacataggctggtggccttgggccttggggctcagccacagcctgacacagtgctcgaccttgatagcatggggcccctggcccagagttgctgtgccgtgtccaagggccgtgcccttgcccttggagctgccgtgcctgtgtcctgatggcccaaatgtcagggttctgctcggcttcttggaccatggcgcttagtccccatcccgggtttggctgagcctggctggagagctgctatgctaaacctcctgcctcccaataccagcaggaggttctgggcctctgaaccccctttccccacacctccccctgctgctgctgccccagcgtcttgacgggagcattggcccctgagcccagagaagctggaagcctgccgaaaacaggagcaaatggcgttttataaattatttttttgaaataaa

SEQ ID NO: 4066 - protein, 802 aa, Homo sapiens
  ref <308>: DATABASE ACCESSION NUMBER: SWISS-Prot / P22455
  ref <309>: DATABASE ENTRY DATE: 2002-06-15
MRLLLALLGVLLSVPGPPVLSLEASEEVELEPCLAPSLEQQEQELTVALGQPVRLCCGRAERGGHWYKEGSRLAPAGRVRGWRGRLEIASFLPEDAGRYLCLARGSMIVLQNLTLITGDSLTSSNDDEDPKSHRDPSNRHSYPQQAPYWTHPQRMEKKLHAVPAGNTVKFRCPAAGNPTPTIRWLKDGQAFHGENRIGGIRLRHQHWSLVMESVVPSDRGTYTCLVENAVGSIRYNYLLDVLERSPHRPILQAGLPANTTAVVGSDVELLCKVYSDAQPHIQWLKHIVINGSSFGADGFPYVQVLKTADINSSEVEVLYLRNVSAEDAGEYTCLAGNSIGLSYQSAWLTVLPEEDPTWTAAAPEARYTDIILYASGSLALAVLLLLAGLYRGQALHGRHPRPPATVQKLSRFPLARQFSLESGSSGKSSSSLVRGVRLSSSGPALLAGLVSLDLPLDPLWEFPRDRLVLGKPLGEGCFGQVVRAEAFGMDPARPDQASTVAVKMLKDNASDKDLADLVSEMEVMKLIGRHKNIINLLGVCTQEGPLYVIVECAAKGNLREFLRARRPPGPDLSPDGPRSSEGPLSFPVLVSCAYQVARGMQYLESRKCIHRDLAARNVLVTEDNVMKIADFGLARGVHHIDYYKKTSNGRLPVKWMAPEALFDRVYTHQSDVWSFGILLWEIFTLGGSPYPGIPVEELFSLLREGHRMDRPPHCPPELYGLMRECWHAAPSQRPTFKQLVEALDKVLLAVSEEYLDLRLTFGPYSPSGGDASSTCSSSDSVFSHDPLPLGSSSFPFGSGVQT

SEQ ID NO: 4067 - DNA, 2648 bp, Rattus norvegicus; identical to SEQ ID NO: 4063
  ref <308>: DATABASE ACCESSION NUMBER: EMBL / M91599
  ref <309>: DATABASE ENTRY DATE: 2002-08-09

SEQ ID NO: 4068 - protein, 650 aa, Rattus norvegicus; identical to SEQ ID NO: 4064
  ref <308>: DATABASE ACCESSION NUMBER: SWISS-Prot / AAA41157
  ref <309>: DATABASE ENTRY DATE: 2003-02-01

SEQ ID NO: 4069 - DNA, 13095 bp, Homo sapiens
  ref <308>: DATABASE ACCESSION NUMBER: EMBL / Y13901
  ref <309>: DATABASE ENTRY DATE: 1998-02-03
gaattcaagctgtcctcctacctcagtctcctagtaactagaactacaggcacccgtcattgtgcccggccattccacagctatttacataattaactgttcagttacaattctggcaagcgtgctgaagaaataacaggtcctaaataattacagctagtattacaaagcaagcgctgcatgccaggcttacacatactgctaacatgtctactttttgcaacaacctcttgtgggtgagactatcatttgcctgttttactgaaaggacagtgaagactgaggccttgtgtgatggtgctgagagctgggcctatgacgtccagccctgtagtctgtgctctgaaccacttcaccctgtttctttctccatcctcacagtagagacgtcatctaagaggagcttgcaagtccagagggcttcctgaaggaagtgagctgagaataatatgaaattaaccagaccaaggggcattccaggaagagagaatggtacgtgaaactgcccaggagtagcagggtgggagccaggaggcgtgggtcatggcaatctatgtataaagagctatgggaatctataggaaaatttaagggagtggctgacacagtcagatttgtgttgtaagtatcactccgcaggttgcgcagggaacaaatgagggagcagaaggaaggggttctcctgtccgctgcacggcactgcgcagaagacaggggagccaggcattccctgaagggtgaaaagcaaggagtagagctgggtagtagactagaatttaggagcctggcctggggcctgggtggggcgaaagaggcggagctgaatggggtgtgtataggggggttgcgtgtaggggtgtgtgtataggctggggcggggtcccgggagtgggctgactgggtcgggggcggggctctccaggtgggcggggatcttggccacccctggccacacctctctccggctcgagctggtctaggcggggcgggcccgagggggtgtggcaggaggtgggcgggcccgggtggggggggggggcgtggaaggaggggcgggcccgagcaggagggggcgggcccgaggggcggggcgggacaggaggtgggccgctcgcggcacgccgccgtcgcgggtacattcctcgctcccggccgaggagcgctcgggctgtctgcggaccctgccgcgtgcaggggtcgcggccggctggagctgggagtgaggcggcggaggagccaggtgaggaggagccaggtgagcaggaccctgtgctgggcgcggagtcacgcaggctcgaggtgagccggaacccttgtgggcccggctgcgctcccagccgccagggggcgagaggcggcggggctacggggactgcccctcccggcgcaggggacctgggcgtccgccgggcggcagggggtggagggggcggtaaatcagtaacccgcagtgcacacagggccttttgtcccgctccgtccaaagagcaccccggccgcggagctggttactcattgcccaccgaggcgggggcaggctggccctgtgcagctaccctcgggacccattgattcgcacctccccccaggctggcccggcaagggtgggggaggacaagcgcgcttgtccctgcggctgtcttcgcgccggcggcagagatgagggacctgaggccccgaaaagttcagtcacttagtgcccgggggcctccagcgcgagtgcgggaggctgaaggagaacccaggactgtctgatgcctaaggcaggccctccattcccacgtggggggtggtcggtcagcggtcagcagccacgggtgactcgactaaggactctgatatcagggcagcctggggtaggaataaactccccgggcctccccacccactcccagcccaagctgtgtacccaaagagctgccctccctgccaagccgagcttggtagggagttttaccaaggaggatccgactggattcgagagttgaggtgggccagagacagcagtatctgagtcaggtagagaagagcaatgaggggcacagagggatgggcaagagagcacatgtgcccagttttgaaagccaatggcttcagcgctcctgaaggggcagacggtgtgaccaaagagataggcagcggcagagagggagccctaggatgttgagctggatcctgctgggcacaggtagccattaagggcttgcaagctggggggcatgacatggcagacttgcaggtttttttgtttgtttttttattttattttatttttttattttgttttttttgagacggagtctcactctgtcgcccaggctggagtgcagtggcgcgatctcggctcactgcaagctccgcctcccgggttcgcgccattctcctgcctcagcctcccgagtagctgggactacaggcgcccgccaccgcgcccggctaattttttgtatttttagtagagacggggtttcaccgtgttagccaggatgttctcgatctcctgacctcgtgatccgcccacctcggcctcccaaagtgctgggattacaggtgtgaaccatcgcgcccagccgacttgtagttttttaaaactctgctggaagatgaaggttgaagagccgagggagaggatgtttccagaggcccatgcaagagatggccatgacctgccttgagaaggggcaggggaagccagatggactggaagtggagtggcagtgaccaaggaggaggaggtgtgataggcttcccacgcagggtagatccagagacaccagtgccacccataggcccctaggactgcagtggtcacccgattcctttgtcccagctgagactcagttctgagtgttctattttggggaacagaggcgtccttggtagcatttggaagaggatagccagctggggtgtgtgtacatcacagcctgacagtaacagcatccgaaccagaggtgactggctaagggcagacccagggcaacaggttaaccgttctagggccgggcacagggaggagaacattccaacactctgtgtgcccagtgccgacgcacgttctctcttttatcctcaaaacagtcctatgaggatataagccagagagagacagagacaaggaattacaagttggtgagagtcaggatttgaacttggctctggcagatggaaaattagggtctgtattctttacaaaaccgtgtgtgcctcagatggagttggtgcataacaagcagaggtatccagggtcgcggtcctgcttgccacggaaggggccgccttgtcagttgtgaccacccagccctggaaatgtcagtaatgctgtaaggagtggggatcggatcagatgccatccagatgctgaagtttgaccttgtgtcatttttcactttcttttttggctcttctgcaatcaattcatttatttagcaaaaaagaaattatgtgtgccgagagcatgcagaagatatgtctccgttctctgcttccctccaaaaaagaatcccaaaactgctttctgtgaacgtgtgccagggtcccagcaggactcagggagagcaggaagcccagcccagaccccttgcacaacctaccgtggggaggccttaggctctggctactacagagctggttccagtctgcactgccacagcctggccagggacttggacacatctgctggccacttcctgtctcagtttccttatctgcaaaataagggaaaagcccccacaaaggtgcacgtgtagcaggagctcttttccctccctattttaggaaggcagttggtgggaagtccagcttgggtccctgagagctgtgagaaggagatgcggctgctgctggccctgttggggatcctgctgagtgtgcctgggcctccagtcttgtccctggaggcctctgaggaagtggagcttggtatggcttctgaggtgggagagggtggcaggggtgggaagagtgggcaccaggagggggctgctgggctgagcaaagctggaaaggatccttgcccaggccctgagaaggtggcggcagggcagggctcaaccactgagactcagtcagtgcctggcttccagcaagcattcatctatcactgtgtctgcgagagaggactggccttgcagggcgcagggccctaagctgggctgcagagctggtggtgagctccttgcctgggtgtgtgtgcgtgtgtgtgtgtgttctgtgcactgggtgtgtgacctaggaggtccaggcagcatgtgtggtataagcattatgagggtgatatgccccggtgcagcatgaccctgtatgtggcaccaacagcatgtgccttgtgtgtgtgtgtgtccgtatgtgtgtgtgtgtatgcgtgtgtgtgtgtgtgtgtgtgtgtcttggccactgtcatgtgcactaaatgctgtgtgtgtgacatgccccaagagtgtggcatttgccctgggtgtggcatccgcagcatgtggctgtgtgggtgtcaaggagtggtggctccttcagcatgcgttgcgaagtgcttgtgccctgcatgtgcggtgtgttctctgtacacaggaggctgcctcagatggggctgcggggtctgctgacctctccctctgcccacagagccctgcctggctcccagcctggagcagcaagagcaggagctgacagtagcccttgggcagcctgtgcggctgtgctgtgggcgggctgagcgtggtggccactggtacaaggagggcagtcgcctggcacctgctggccgtgtacggggctggaggggccgcctagagattgccagcttcctacctgaggatgctggccgctacctctgcctggcacgaggctccatgatcgtcctgcagaatctcaccttgattacaggtggtaagagactctagcagggagtgaagggatgccaggggagacagacctgccccccttggaccttagatgctccctctgtccctgatgtagactccttgacctccagcaacgatgatgaggaccccaagtcccatagggacctctcgaataggcacagttacccccagcaaggtcagtaggtctccaaggacttgtgtcccgctgctgctcatctgatcactgagaagaggaggcctgtgtgggaacacacggtcattctaggggccttcccctgccctccagcaccctactggacacacccccagcgcatggagaagaaactgcatgcagtacctgcggggaacaccgtcaagttccgctgtccagctgcaggcaaccccacgcccaccatccgctggcttaaggatggacaggcctttcatggggagaaccgcattggaggcattcgggtgagtctctgggttccaagaccgtctgctcccccattttcattccttcatcagtcccctcatacctacaagcatacctataaatcaatcgaatgagtgaagcgattgcggggccccggaaggagccctggactgtggacctgggcagctctggttccccttctgctactctctggcaagtgacttaacctctcagcctcagcaactccctttgtaaagggagaagaatcactgactggttggtctgcataagccttagcatctcatcgtcttgatgagaccctgcagggtcggctccatgctgtcatgaggcaactgagcctcagagaaggcaagggttggctcaaagtagcacagctagggagagggagagctaaaattccaaaggctcaaacccaaggctcaagcgccctggggagcctactcctttgtgccatagtccttggcctgggcctgatgttctcagggcctagagagcttgacaagagccctgtgggcaggatgaggatctagcctcctggtcctctggcccccttggtggacatggtccggtggtcccggacactctctctgcctgcagctgcgccatcagcactggagtctcgtgatggagagcgtggtgccctcggaccgcggcacatacacctgcctggtagagaacgctgtgggcagcatccgctataactacctgctagatgtgctgggtgagcgcggggctgggaacaggggaggcctgacccattttgggctcagttgtgccctcttggtggggtctagtctggcaggcaggatggactcagatgagtcaggcagcttggtgagcaggtgggtcaggggaaagcacaggggttagtgtggggctggaggagcagaggtctgccaagaggaaaaacaagaaggacatccaggcagagggcgcagcccgagcggagggcctgagtataacaaacgccctgcacttgcaggccagcatattcgtagggcgtggcgtttatatggggagccaggtggtggagggttttgaatgctaggctgagatgttgtccttgacccgaagcaatagggagccagggaaggtttaagcagggtaagcaggagacagacaagaagctgcagaaaggtccctcccttgaacttgaggaaggctggagggaggcaaacagggtgcttctatgggtgccagtggtcagggttgactgtctcgcccggtccccagagcggtccccgcaccggcccatcctgcaggccgggctcccggccaacaccacagccgtggtgggcagcgacgtggagctgctgtgcaaggtgtacagcgatgcccagccccacatccagtggctgaagcacatcgtcatcaacggcagcagcttcggagccgacggtttcccctatgtgcaagtcctaaaggtaaaaggtgcaccctgctgcagcctgggccccattcttctcccaccttgggttggggggctccccagcttccctgttggccacagtgtggccccaggccctgctgtgaccccagagcatgtcccccaccccagactgcagacatcaatagctcagaggtggaggtcctgtacctgcggaacgtgtcagccgaggacgcaggcgagtacacctgcctcgcaggcaattccatcggcctctcctaccagtctgcctggctcacggtgctgccaggtgagcacctgaagggccaggagatgctgcgagatgcccctctgggccagcagtgggggctgtggcctgttgggtggtcagtctctgttggcctgtggggtctggcctggggggcagtgtgtggatttgtgggtttgagctgtatgacagcccctctgtgcctctccacacgtggccgtccatgtgaccgtctgctgaggtgtgggtgcctgggactgggcataactacagcttcctccgtgtgtgtccccacatatgttgggagctgggagggactgagttagggtgcacggggcggccagtctcaccactgaccagtttgtctgtctgtgtgtgtccatgtgcgagggcagaggaggaccccacatggaccgcagcagcgcccgaggccaggtatacggacatcatcctgtacgcgtcgggctccctggccttggctgtgctcctgctgctggccgggctgtatcgagggcaggcgctccacggccggcacccccgcccgcccgccactgtgcagaagctctcccgcttccctctggcccgacaggtactgggcgcatcccccacctcacatgtgacagcctgactccagcaggcagaaccaagtctcccactttgcagttctccctggagtcaggctcttccggcaagtcaagctcatccctggtacgaggcgtgcgtctctcctccagcggccccgccttgctcgccggcctcgtgagtctagatctacctctcgacccactatgggagttcccccgggacaggtgcgctgagctgtgtgggggcagggacgcgggcgccgggttgcagcccgccctccgcaggagtgactcggaggtctgaggctggactttctccatctccaggctggtgcttgggaagcccctaggcgagggctgctttggccaggtagtacgtgcagaggcctttggcatggaccctgcccggcctgaccaagccagcactgtggccgtcaagatgctcaaaggtgagtgtggcccggtgtggtggctcacacctgtaacgccagcactttaggaggctgagggtgggaggatcgcttgaatccaggaattcgaggccagcctgggcaacatggcaagacttcatctctacaaaaaaaaaataagaaaattagttgggtgtggtggtgtgtgcctttagtctcagttactagggaggctgaggcaggaggatcccttgaatccaggagttggaggttgcagggagccatgatcacgccactgtattccagcctgggcaacacagtgagaccctatctgaaaaaataaataaataaataaaaataaaaggtgaacgtggcagcctggaggaggtgctatggcattgggactaatagaaggggctcacggtgccaccaggtgagccctggagctgggagaggctgtgggatcccacccttaaacctgcaattcacctctgctcctgaccctggcaagtgacttctgagcctcagttttcccttgtgtcatatggggtagataacagtccctactcccagcccaaggattgtggaaagtgcctggctcatagtcagggctcaataaatcttcaccactggggtgatgatgatgagaagaatttggtgtgacaggcttgatatcctgtgtcagcattagtctgtgtcagctttgacttcacatctctttgtcagcctcacaggccctctacctccttccttatggttccccccagacacaccctcagcctcccttggaccctccctaggtctgccccccacgtccactgctgtaggaggacagcccttctgcttgcacccaggcccagccccggggtgctcttgctgggcactcctgcaccccacccatcagggcctctccttgcagttccccagccccctctgcaagaatggcctccactgctcttctgctcctcccctcctctctacacagctggggccacctggtgctccctgggaggcagggattgagaaatgcacattgtgtcattggcccagggccacaggtcagccccaggggctcagccagagaagccaaagcagccttcttcccaagctccccggctgcacccggcctgccgccagctccctgaattcccaggccagttggaagccaggccctggtcaaacagaccccagggcgccagcctgctttccgcacccagaagctctgaccccatgcggggactaccgctgacccctccagcggcagcttccttccttccttcctgctccgagctcttcccctctctcctgtgtcctgggcctgcccgctggaaggcctgcctcttagatccttgatacagttgcatccttgcaactgctgtgacaggcagggtgtgacccactgctctgtttcccacaagacgaacctgaggttcagagacgctaggagactttttcaaggccacacagcctagcaaggattcagccctagacctacgtagccctggtccagtgctgcttgtcctgcacctgcctctgcatgctccctcgtgcagttggagggcagcctctcaccccgtctgctgcccttacagacaacgcctctgacaaggacctggccgacctggtctcggagatggaggtgatgaagctgatcggccgacacaagaacatcatcaacctgcttggtgtctgcacccaggaaggtggggccgaggcggggctggctgcacgggccgttagggtgcagagccaaagctttggcagcctctccacgctccctccactccctctgcagggcccctgtacgtgatcgtggagtgcgccgccaagggaaacctgcgggagttcctgcgggcccggcgccccccaggccccgacctcagccccgacggtcctcggagcagtgaggggccgctctccttcccagtcctggtctcctgcgcctaccaggtggcccgaggcatgcagtatctggagtcccggaaggtataggcgctagggctctgagcccctctcagtctctccagctccactctcaggcctgtggcattcaatgtcccgacttctccctctctgctctttttcatgaccccacctcagtgtccccaggcattcacgctttcctgcattccccactcgttcctcacccttccccagaggggagaggggacgcaggagaaggcactccccgtttctaaaccttgacctcctcctctgtaaagtgggtggagggcccctgcccccgggcctgctggggggtggtgtgtgctcaactccaggccaggtgtcctgaggcacccaagcccccgctccctgcagtgtatccaccgggacctggctgcccgcaatgtgctggtgactgaggacaatgtgatgaagattgctgactttgggctggcccgcggcgtccaccacattgactactataagaaaaccagcaacgtgagggagatggggcagaactggatgggggtggaggggcactgggcccggggtggcaggcacgaggacctgtgggactctgcactgaggccctctctcccctccagggccgcctgcctgtgaagtggatggcgcccgaggccttgtttgaccgggtgtacacacaccagagtgacgtgtgagtcctgccggcggtcactgtcctaccccacaaaaagggcaaggcactgcccaaagtcacgtggccccaggagtcatgcgctcgagggctccttcagatttggtctgggacccgagtgggcccagactccaggaggagcccattccccaacagctgtggtgggtcatgtctgtggggtcccccgtcctagccccggtcgtagggagggcgctgagccacactgagccctggccctgcctccaggtggtcttttgggatcctgctatgggagatcttcaccctcgggggctccccgtatcctggcatcccggtggaggagctgttctcgctgctgcgggagggacatcggatggaccgacccccacactgccccccagagctgtgaggcctcaccctgccctcgaccccactttccagtcctcctcctcctctgccctgaccatggcctcagggtgtgtcccggccagaaggacaacactaacaacaactcctcgtcctcctcctcctcttcctcttcctcctcctcctcttcctcctcctcctcttcctcctcctcctcttcctcctcctcttcctcctcctcctcttcctcctcctcctcttcctcctcctcctcttcctcctcctcctcttcctcctcctcctcttcctcctcctcctcctcctcctcctcctcctcctcctcctcctcctcttcctcctcctcctcttcctcctcctcctcctcctcctcctcctcctcctcctcttcctcctcctcctcttcctcctcctcctcctcctcctcctcctcttcctcctcctcctcttcctcctcctcctcttcctccttctcctcctgctcctcttcctcctcctcctcttcctcctcctcctcctcctcctcttcctcctcctcagcctagtggagtgtcctggcctggcttctactgatgaccctcctatccctcatcaaactccccaccaaactcctccccacccagagaacccccggtcctccccttcctcctgaaggcctgaggctccctgtgaccctccgccccacctctcgcaggtacgggctgatgcgtgagtgctggcacgcagcgccctcccagaggcctaccttcaagcagctggtggaggcgctggacaaggtcctgctggccgtctctgaggaggtacagcccctcccacccaccacctccctctgcctgctcccctccaggcctcatctggcctgaccgcgtggacatgcgccccgtcccatcccgggcgctgcagaggctgaccagctccgttccccacagtacctcgacctccgcctgaccttcggaccctattccccctctggtggggacgccagcagcacctgctcctccagcgattctgtcttcagccacgaccccctgccattgggatccagctccttccccttcgggtctggggtgcagacatgagcaaggctcaaggctgtgcaggcacataggctggtggccttgggccttggggctcagccacagcctgacacagtgctcgaccttgatagcatggggcccctggcccagagttgctgtgccgtgtccaagggccgtgcccttgcccttggagctgccgtgcctgtgtcctgatggcccaaatgtcagggttctgctcggcttcttggaccttggcgcttagtccccatcccgggtttggctgagcctggctggagagctgctatgctaaacctcctgcctcccaataccagcaggaggttctgggcctctgaaccccctttccccacacctccccctgctgctgctgccccagcgtcttgacgggagcattggcccctgagcccagagaagctggaagcctgccgaaaacaggagcaaatggcgttttataaattatttttttgaaataaagctctgtgtgcctgggtcttccctgagcaacatggagtggggtgaggtggagggatccctccagcagagttctgcctacaggacacggactgagggcactggaccaggccatgggctccgccacctccactgccccaggagccagtgtgtgcctatctgggtccgcctgtcccaccagccccatcttgtgtctgcgacagtgtgaatgagtattaatgggctgagtccgcattgcactatacacggtgggactcctgtaccctctgcacatgtgtgtgtgtgcatgtgtgccctgcagctgtccccaagggagctggcagcccccctcccccatctgctcagcattaaccaagctgaccgttaacacagcatgaaaatctgagagccagccttaggccgcggcccgctcccacgctctgccggctcaggctgggggcttgtggaggccatgcccgccccgccctggccagtctcccgggcagcagctggttgccgcccgcctgggctgcagctgtccctgcctgcctggtcttccactgaggagccgtcacagccctgtactcagagctcctcagagtgagcagcttctcaaggctctgagcctggaacctccttccc

SEQ ID NO: 4070 - protein, 802 aa, Homo sapiens; identical to SEQ ID NO: 4066
  ref <308>: DATABASE ACCESSION NUMBER: SWISS-Prot / CAA74200
  ref <309>: DATABASE ENTRY DATE: 2002-06-15

SEQ ID NO: 4071 - DNA, 2648 bp, Rattus norvegicus; identical to SEQ ID NO: 4063
  ref <308>: DATABASE ACCESSION NUMBER: EMBL / M91599
  ref <309>: DATABASE ENTRY DATE: 2002-08-09

SEQ ID NO: 4072 - protein, 650 aa, Rattus norvegicus; identical to SEQ ID NO: 4064
  ref <308>: DATABASE ACCESSION NUMBER: SWISS-Prot / AAA41157
  ref <309>: DATABASE ENTRY DATE: 2003-02-01

SEQ ID NO: 4073 - DNA, 3015 bp, Homo sapiens; identical to SEQ ID NO: 4065
  ref <308>: DATABASE ACCESSION NUMBER: Refseq / NM_002011
  ref <309>: DATABASE ENTRY DATE: 2002-11-05

SEQ ID NO: 4074 - protein, 802 aa, Homo sapiens; identical to SEQ ID NO: 4066
  ref <308>: DATABASE ACCESSION NUMBER: SWISS-Prot / P22455
  ref <309>: DATABASE ENTRY DATE: 2002-06-15

SEQ ID NO: 4075 - DNA, 2648 bp, Rattus norvegicus; identical to SEQ ID NO: 4063
  ref <308>: DATABASE ACCESSION NUMBER: EMBL / M91599
  ref <309>: DATABASE ENTRY DATE: 2002-08-09

SEQ ID NO: 4076 - protein, 650 aa, Rattus norvegicus; identical to SEQ ID NO: 4064
  ref <308>: DATABASE ACCESSION NUMBER: SWISS-Prot / AAA41157
  ref <309>: DATABASE ENTRY DATE: 2003-02-01

SEQ ID NO: 4077 - DNA, 13095 bp, Homo sapiens; identical to SEQ ID NO: 4069
  ref <308>: DATABASE ACCESSION NUMBER: EMBL / Y13901
  ref <309>: DATABASE ENTRY DATE: 1998-02-03

SEQ ID NO: 4078 - protein, 802 aa, Homo sapiens; identical to SEQ ID NO: 4066
  ref <308>: DATABASE ACCESSION NUMBER: SWISS-Prot / CAA74200
  ref <309>: DATABASE ENTRY DATE: 2002-06-15

SEQ ID NO: 4079 - DNA, 2793 bp, Rattus norvegicus
  ref <308>: DATABASE ACCESSION NUMBER: EMBL / M91652
  ref <309>: DATABASE ENTRY DATE: 2000-03-04
acagccgagaatgggagtagggcggagtgtttgagcagcacacccatttcctctccgctcttcgtctcgttctcgtggcctgtccacccatccatcatctgccggccaccgctctgaacaccttccaccatggccacctcagcaagttcccacttgaacaaaggcatcaagcagatgtacatgaacctgccccagggcgagaagatccaactcatgtatatctgggttgatggtaccggggaagggctacgctgcaagacccgtactctggactgtgaccccaagtgtgtagaagagttacccgagtggaactttgatggttctagtacgtttcagtctgaaggctccaacagcgacatgtacctccatcctgtggccatgtttcgagaccccttccgcagagaccccaacaagctggtgttctgcgaagtattcaagtataaccggaagcccgcagagaccaacctgaggcacagctgtaagcgtataatggacatggtgagcagccagcgcccctggtttggaatggaacaggagtatactctcatgggaacagacggccaccctttcggctggccttctaatggcttccctggaccccaaggaccctattactgcggtgtgggagctgacaaggcttatggccgagatatcgtggaggctcactaccgggcctgcttgtatgctggaatcaagatcacagggacaaatgccgaggttatgcctgcccagtgggaattccagataggaccctgcgaagggatccgcatgggagatcatctctgggtagcccgttttatcttgcatcgggtatgcgaagactttggggtgatagcaacctttgaccccaagcccattccagggaactggaatggggcaggctgccacaccaactttagcaccaaggccatgcgggaggagaatggtctgaggtgcattgaggaggccattgataaactgagcaagaggcaccagtaccacatccgtgcctacgaccccaaggggggcctggacaacgcccgccgtctgactggattccacgaaacctccaacatcaacgacttttccgctggcgttgccaaccgcagcgccagtatccgcattccccggattgtcggccaggagaagaagggttactttgaagaccgtcggccttctgccaattgcgacccctatgcggtgacggaagccatcgtccgcacgtgtctcctcaacgaaactggcgacgagcccttccaatacaagaactaagcggactcgacttccagtgatcttgagcccttcctagttcaccccactcccaactgttccctctcccactggtccccactgtaactcaaaaggatggaataccaaggtctttttattccttgcgcccagttaatttttgcctttattggtcagaatagaggggtcaggttcttaatctctacacacccaaccccttctttcctagctagctttccagtgggggaacgggagggggtggggaagggtaacccaccgcttcatctcagcgggaatgcatgtcctgtaggcatagctgtcacaaatcgggtgtacttgtggtgagggaggactggttttttttttccttcaggataattgaaagggcaggcccaacagcttagattaacattttctctgtcagtagagagctgttatttcttccggtgaaaccagctttctattgaagtctggtgaggagttggaggttggtctcttggcttccttagcttagggaaggggagttcaccctcccttcatgaaacacagttcacctgacaaatggccctactgtaaaggaagaaaaaagtttcttggtcctccatttataactcaaagcagagtagtatttttatatttaaatgttaaaaacaaaaaagttatatatatgggtgtgtggatatatatgtcttttctaattgagaaaaccatcctattccctgggtgccaagtttgagtgaggagctcggtgtagaagtgaggcactcttgaggtaggggtggggatgcagtactgggaaagttggttatcttgggggttcagcttcattactacttagggtttccctgcccactctgcaggagcagatgttggacaggtagccagtgggatgccactgcttgccgccactgtccctgggcttagtttaaggggacgtgtatacctaatccacacacgagttagaagtatgagttggctggtcaacttgaacattgttacaggcgggtgggtgttagtggggggttattttttggtgggactagcatgtcactaaagcgggccttttgatatattaaattttttaaagcaaaacaagtttagattttaatcaagttcgtagggtttctaactttacagaattgcctgtttgtttcaatgactccttccacttggctcttaggggaactgaggacaggcctggagttaatacacttgtcattctgtgtcctagtgtcctcttcctccggcagactgtccccttccttctgaaaaagccgatagagtcttgttttatttttcttttataataaacacaccccacctccatcccagcttgttgccttgcagttttctggatgtttgtgtcggcagcaggcagctgtggtttttttctcttgccacgatgactctaattaccatgtatagtatgttcagttagataactcactgtaaacagactgtaactgagagcagagcttgtaaatcaacctaacgtttataagatttcctctgacttgtttctttgtggttccaaaaaaaaaaaaaaaaaaaaaaacctcaaaaact

SEQ ID NO: 4080 - protein, 373 aa, Rattus norvegicus
  ref <308>: DATABASE ACCESSION NUMBER: SWISS-Prot / P09606
  ref <309>: DATABASE ENTRY DATE: 1998-12-15
MATSASSHLNKGIKQMYMNLPQGEKIQLMYIWVDGTGEGLRCKTRTLDCDPKCVEELPEWNFDGSSTFQSEGSNSDMYLHPVAMFRDPFRRDPNKLVFCEVFKYNRKPAETNLRHSCKRIMDMVSSQHPWFGMEQEYTLMGTDGHPFGWPSNGFPGPQGPYYCGVGADKAYGRDIVEAHYRACLYAGIKITGTNAEVMPAQWEFQIGPCEGIRMGDHLWVARFILHRVCEDFGVIATFDPKPIPGNWNGAGCHTNFSTKAMREENGLRCIEEAIDKLSKRHQYHIRAYDPKGGLDNARRLTGFHETSNINDFSAGVANRSASIRIPRIVGQEKKGYFEDRRPSANCDPYAVTEAIVRTCLLNETGDEPFQYKN

SEQ ID NO: 4081 - DNA, 1366 bp, Homo sapiens
  ref <308>: DATABASE ACCESSION NUMBER: EMBL / Y00387
  ref <309>: DATABASE ENTRY DATE: 1993-09-12
cgcgagagcaggttaggagaggagaggaggccgcagtactgctcacacgctccgctcttctcccactctcggcctacctttacccgcccgcctgctcggcgaccagaacaccttccaccatgaccacctcagcaagttcccacttaaataaaggcatcaagcaggtgtacatgtccctgcctcagggtgagaaagtccaggccatgtatatctggatcgatggtactggagaaggactgcgctgcaagacccggaccctggacagtgagcccaagtgtgtggaagagttgcctgagtggaatttcgatggctccagtactttacagtctgagggttccaacagtgacatgtatctcgtgcctgctgccatgtttcgggaccccttccgtaaggaccctaacaagctggtgttatgtgaagttttcaagtacaatcgaaggcctgcagagaccaatttgaggcacacctgtaaacggataatggacatggtgagcaaccagcacccctggtttggcatggagcaggagtataccctcatggggacagatgggcacccctttggttggccttccaacggcttcccagggccccagggtccatattactgtggtgtgggagcagacagagcctatggcagggacatcgtggaggcccattaccgggcctgcttgtatgctggagtcaagattgcggggactaatgccgaggtcatgcctgcccagtgggaatttcagattggaccttgtgaaggaatcagcatgggagatcatctctgggtggcccgtttcatcttgcatcgtgtgtgtgaagactttggagtgatagcaacctttgatcctaagcccattcctgggaactggaatggtgcaggctgccataccaacttcagcaccaaggccatgcgggaggagaatggtctgaagtacatcgaggaggccattgagaaactaagcaagcggcaccagtaccacatccgtgcctatgatcccaagggaggcctggacaatgcccgacgtctaactggattccatgaaacctccaacatcaacgacttttctggtggtgtagccaatcgtagcgccagcatacgcattccccggactgttggccaggagaagaagggttactttgaagatcgtcgcccctctgccaactgcgaccccttttcggtgacagaagccctcatccgcacgtgtcttctcaatgaaaccggcgatgagcccttccagtacaaaaattaagtggactagacctccagctgttgagcccctcctagttcttcatcccactccaactcttccccctctcccagttgtcccgattgtaactcaaagggtggaatatcaaggtcgttttttttcattcc

SEQ ID NO: 4082 - protein, 373 aa, Homo sapiens
  ref <308>: DATABASE ACCESSION NUMBER: SWISS-Prot / P15104
  ref <309>: DATABASE ENTRY DATE: 2002-06-15
MTTSASSHLNKGIKQVYMSLPQGEKVQAMYIWIDGTGEGLRCKTRTLDSEPKCVEELPEWNFDGSSTLQSEGSNSDMYLVPAAMFRDPFRKDPNKLVLCEVFKYNRRPAETNLRHTCKRIMDMVSNQHPWFGMEQEYTLMGTDGHPFGWPSNGFPGPQGPYYCGVGADRAYGRDIVEAHYRACLYAGVKIAGTNAEVMPAQWEFQIGPCEGISMGDHLWVARFILHRVCEDFGVIATFDPKPIPGNWNGAGCHTNFSTKAMREENGLKYIEEAIEKLSKRHQYHIRAYDPKGGLDNARRLTGFHETSNINDFSAGVANRSASIRIPRTVGQEKKGYFEDRRPSANCDPFSVTEALIRTCLLNETGDEPFQYKN

SEQ ID NO: 4083 - DNA, 2793 bp, Rattus norvegicus; identical to SEQ ID NO: 4079
  ref <308>: DATABASE ACCESSION NUMBER: EMBL / M91652
  ref <309>: DATABASE ENTRY DATE: 2000-03-04

SEQ ID NO: 4084 - protein, 373 aa, Rattus norvegicus; identical to SEQ ID NO: 4080
  ref <308>: DATABASE ACCESSION NUMBER: SWISS-Prot / P09606
  ref <309>: DATABASE ENTRY DATE: 1998-12-15

SEQ ID NO: 4085 - DNA, 1366 bp, Homo sapiens; identical to SEQ ID NO: 4081
  ref <308>: DATABASE ACCESSION NUMBER: EMBL / Y00387
  ref <309>: DATABASE ENTRY DATE: 1993-09-12

SEQ ID NO: 4086 - protein, 373 aa, Homo sapiens; identical to SEQ ID NO: 4082
  ref <308>: DATABASE ACCESSION NUMBER: SWISS-Prot / P15104
  ref <309>: DATABASE ENTRY DATE: 2002-06-15

SEQ ID NO: 4087 - DNA, 1576 bp, Rattus norvegicus
  ref <308>: DATABASE ACCESSION NUMBER: EMBL / M91802
  ref <309>: DATABASE ENTRY DATE: 2000-03-04
ttaattctcggagacaaggttgaaattggaccgaattggctgtaatcagtgaaccagaaaaaaaacaccccagcagcgatcttctatgatagatttttttttccttcgctctcgcctttttcctgggccttgcccccccaaagcccctccaaaagagggaacttttcctccgagagggctccaaggagaaggccatgaattacgaatttgagcgagagattggttttatcaatagccagccgtcgctcgctgagtgcctgacatcttttccccctgtcgctgatacatttcaaagttcatcaatcaagacctcgacgctttcacactcgacactgattcctcctccttttgagcagaccattcccagcctgaacccgggcagtcaccctcgccaaagcgctggcgctggcggccgccccaagtcgagccccgcgggcagtcgcggcagcccggtgcccgcccgcgccctgcagccgcctgagtacccctggatgaaggagaagaaggcggccaagaaaaccgcgctgccgcccgccgccgcctccacgggccctgcctgcctcggccacaaagaatccctggaaatagccgatggcagcggtgggggatccaggcgtctgagaactgcttacaccaacactcagcttttggaactggaaaaggaatttcatttcaacaagtacctctgcagaccccggagggtggaaatcgccgcgctgctggatttgaccgagagacaagtgaaagtgtggtttcagaaccggaggatgaagcataagaggcaaacccagtgcaaggagaaccaaaacagcgaagggaaatttaaaaacctggaggattcggacaaagtggaggaagacgaggaagagaagtcactctttgagcaagccctcagtgtctccggggcccttctggagagggaaggttacacttttcagcaaaacgcgctctctcaacagcaggctcccaatggacacaatggcgactcccaaactttcccagtttcgcctttaaccagcaatgagaaaaatttgaaacattttcagcaccagtcacccactgttcctaactgcttgtcaacaatgggccagaactgtggagctggcctaaacaatgacagtcccgaggccctcgaggtcccctctttgcaggactttaatgttttctccacagattcctgcctgcagctttcagacgcactgtcgcccagtttgccaggctccctgggcagtcctgtagatatttcagctgacagctttgacttttttacagacacactcaccacaatcgacctacagcatctgaattactaagaacattaaagcaaaagaaagcttcacaaaacaaaacgcctttggccaggtgctttgccttcttttattccgggagttgattttcgttctattctcttctcgatctacccctgttctcttaaatgttcaggactttctgttttacacccagtttgaaagccatctcttccaaatgatgttggcgttctaagtgttttacaccgaacccaacaagcttctatgtgattttcctgaaaacaaaacacgaggcctgcaagaaagtg

SEQ ID NO: 4088 - protein, 372 aa, Rattus norvegicus
  ref <308>: DATABASE ACCESSION NUMBER: SWISS-Prot / P31246
  ref <309>: DATABASE ENTRY DATE: 2002-06-15
MNYEFEREIGFINSQPSLAECLTSFPPVADTFQSSSIKTSTLSHSTLIPPPFEQTIPSLNPGSHPRQSAGAGGRPKSSPAGSRGSPVPARALQPPEYPWMKEKKAAKKTALPPAAASTGPACLGHKESLEIADGSGGGSRRLRTAYTNTQLLELEKEFHFNKYLCRPRRVEIAALLDLTERQVKVWFQNRRMKHKRQTQCKENQNSEGKFKNLEDSDKVEEDEEEKSLFEQALSVSGALLEREGYTFQQNALSQQQAPNGHNGDSQTFPVSPLTSNEKNLKHFQHQSPTVPNCLSTMGQNCGAGLNNDSPEALEVPSLQDFNVFSTDSCLQLSDALSPSLPGSLGSPVDISADSFDFFTDTLTTIDLQHLNY

SEQ ID NO: 4089 - DNA, 1131 bp, Homo sapiens
  ref <308>: DATABASE ACCESSION NUMBER: Refseq / NM_006735
  ref <309>: DATABASE ENTRY DATE: 2002-11-03
atgaattacgaatttgagcgagagattggttttatcaatagccagccgtcgctcgctgagtgcctgacatcttttccccctgtcgctgatacatttcaaagttcatcaatcaagacctcgacgctttcacactcgacactgattcctcctccttttgagcagaccattcccagcctgaaccccggcagtcaccctcgccacggcgctggcggccgccccaagccgagccccgcgggcagccgcggcagcccggtgcccgccggcgccctgcagccgcccgagtacccctggatgaaggagaagaaggcggccaagaaaaccgcacttctgccggccgccgccgccgccgccaccgccgcagccaccggccctgcttgcctcagccacaaagaatccctggaaatcgccgatggcagcggcgggggatcgcggcgcctgagaactgcttacaccaacacacagcttctagagctggaaaaagaatttcatttcaacaagtacctttgcagaccccgaagggtggagattgcagcgctgctggatttgactgagagacaagtgaaagtgtggtttcagaaccggaggatgaagcacaagaggcagacccagtgcaaggaaaaccaaaacagcgaagggaaatgtaaaagccttgaggactccgagaaagtagaggaggacgaggaagagaagacgctctttgagcaagcccttagcgtctctggggcccttctggagagggaaggctacacttttcagcaaaatgccctctctcagcagcaggctcccaatggacacaatggcgactcccaaagtttcccagtctcgcctttaaccagcaatgagaaaaatctgaaacattttcagcaccagtcacccactgttcccaactgcttgtcaacaatgggccagaactgtggagctggcctaaacaatgacagtcctgaggcccttgaggtcccctctttgcaggactttagcgttttctccacagattcctgcctgcagctttcagatgcagtttcacccagtttgccaggttccctcgacagtcccgtagatatttcagctgacagcttagacttttttacagacacactcaccacaatcgacttgcagcatctgaattactaa

SEQ ID NO: 4090 - protein, 376 aa, Homo sapiens
  ref <308>: DATABASE ACCESSION NUMBER: Refseq / NP_006726
  ref <309>: DATABASE ENTRY DATE: 2002-11-03
MNYEFEREIGFINSQPSLAECLTSFPPVADTFQSSSIKTSTLSHSTLIPPPFEQTIPSLNPGSHPRHGAGGRPKPSPAGSRGSPVPAGALQPPEYPWMKEKKAAKKTALLPAAAAAATAAATGPACLSHKESLEIADGSGGGSRRLRTAYTNTQLLELEKEFHFNKYLCRPRRVEIAALLDLTERQVKVWFQNRRMKHKRQTQCKENQNSEGKCKSLEDSEKVEEDEEEKTLFEQALSVSGALLEREGYTFQQNALSQQQAPNGHNGDSQSFPVSPLTSNEKNLKHFQHQSPTVPNCLSTMGQNCGAGLNNDSPEALEVPSLQDFSVFSTDSCLQLSDAVSPSLPGSLDSPVDISADSLDFFTDTLTTIDLQHLNY

SEQ ID NO: 4091 - DNA, 832 bp, Rattus norvegicus
  ref <308>: DATABASE ACCESSION NUMBER: EMBL / M92059
  ref <309>: DATABASE ENTRY DATE: 2000-03-04
gcggccgccgtgtacctcgtggctctggtggtcctggaggcggctgtatgtgttgcgcagccccgaggtcggattctgggtggccaggaggccatggcccatgctcggccctacatggcttcagtgcaagtgaatggcacgcacgtgtgcggtggcaccctggtggatgagcagtgggtgctgagcgccgcgcactgcatggatggagtgaccaaggatgaggttgtgcaggtgctcctgggtgcccactccctgtccagtcctgaaccctacaagcatttgtatgatgtgcaaagtgtagtgcttcacccgggcagccggcctgacagcgttgaggacgacctcatgctctttaagctctcccacaatgcctcactgggtccccatgtgagacccctgcccttgcaacgcgaggaccgggaggtgaaacccggcacgctctgcgatgtggccggttggggcgtggtcactcatgcgggacgcaggcccgatgtcctgcagcaactgacagtgtcaatcatggaccggaacacctgcaatctgcgcacgtaccatgatggggcaatcaccaagaacatgatgtgtgcagagagcaaccgcagggacacttgcaggggcgactccggcggtcctctggtgtgcggggatgcggtcgaagctgtggttacgtggggatctcgagtctgtggcaaccggagaaagccaggtgtctttacccgcgtggcaacctacgtgccgtggattgaaaacgttctgagtggtaacgtgagtgttaacgtgacggcctgaggggacaccggagaccgtgactcacaataaatgcagcggccgc

SEQ ID NO: 4092 - protein, 263 aa, Rattus norvegicus
  ref <308>: DATABASE ACCESSION NUMBER: SWISS-Prot / AAB31922
  ref <309>: DATABASE ENTRY DATE: 2002-06-15
MHSSVYLVALVVLEAAVCVAQPRGRILGGQEAMAHARPYMASVQVNGTHVCGGTLVDEQWVLSAAHCMDGVTKDEVVQVLLGAHSLSSPEPYKHLYDVQSVVLHPGSRPDSVEDDLMLFKLSHNASLGPHVRPLPLQREDREVKPGTLCDVAGWGVVTHAGRRPDVLQQLTVSIMDRNTCNLRTYHDGAITKNMMCAESNRRDTCRGDSGGPLVCGDAVEAVVTWGSRVCGNRRKPGVFTRVATYVPWIENVLSGNVSVNVTA

SEQ ID NO: 4093 - DNA, 762 bp, Homo sapiens
  ref <308>: DATABASE ACCESSION NUMBER: EMBL / AJ313463
  ref <309>: DATABASE ENTRY DATE: 2001-08-03
atgcacagctgggagcgcctggcagttctggtcctcctaggagcggccgcctgcgcggcgccgccccgtggtcggatcctgggcggcagagaggccgaggcgcacgcgcggccctacatggcgtcggtgcagctgaacggcgcgcacctgtgcggcggcgtcctggtggcggagcagtgggtgctgagcgcggcgcactgcctggaggacgcggccgacgggaaggtgcaggttctcctgggcgcgcactccctgtcgcagccggagccctccaagcgcctgtacgacgtgctccgcgcagtgccccacccggacagccagcccgacaccatcgaccacgacctcctgctgctacagctgtcggagaaggccacactgggccctgctgtgcgccccctgccctggcagcgcgtggaccgcgacgtggcaccgggaactctctgcgacgtggccggctggggcatagtcaaccacgcgggccgccgcccggacagcctgcagcacgtgctcttgccagtgctggaccgcgccacctgcaaccggcgcacgcaccacgacggcgccatcaccgagcgcttgatgtgcgcggagagcaatcgccgggacagctgcaagggtgactccgggggcccgctggtgtgcgggggcgtgctcgagggcgtggtcacctcgggctcgcgcgtttgcggcaaccgcaagaagcccgggatctacacccgcgtggcgagctatgcggcctggatcgacagcgtcctggcctag

SEQ ID NO: 4094 - protein, 253 aa, Homo sapiens
  ref <308>: DATABASE ACCESSION NUMBER: SWISS-Prot / P00746
  ref <309>: DATABASE ENTRY DATE: 2002-06-15
MHSSVYFAVLVLLGAAACAARPRGRILGGREAEAHARPYMASVQLNGAHLCGGVLVAEQWVLSAAHCLEDAADGKVQVLLGAHSLSQPEPSKRLYDVLRAVPHPDSQPDTIDHDLLLLQLSEKATLGPAVRPLPWQRVDRDVAPGTLCDVAGWGIVNHAGRRPDSLQHVLLPVLDRATCNRRTHHDGAITERLMCAESNRRDSCKGDSGGPLVCGGVLEGVVTSGSRVCGNRKKPGIYTRVASYAAWIDSVLA

SEQ ID NO: 4095 - DNA, 3053 bp, Rattus norvegicus
  ref <308>: DATABASE ACCESSION NUMBER: EMBL / M92340
  ref <309>: DATABASE ENTRY DATE: 2000-03-04
ccgtcctgttggggtacagcccatcttgaataaggagcatcccttgcaagatgtccgcactaaggatctggctaatgcaagctttgcttattttcctcactactgagtctataggtcaacttgtggaaccatgtggttatatctaccctgagtttccagttgtccagcgtggctctaacttcactgccacttgtgtgctaaaggagaagtgtctgcaggtgtactccgtgaatgccacttacatcgtgtggaagacaaaccatgttgccgttcctaaggagcaggtcacagtcatcaacagaacggcatccagtgtcacattcacagacgtggtctttcagaacgtccagctcacctgcaatatcctgtcatttggacagatcgagcagaatgtgtatggaatcaccatactttcaggctatcctccagatatacctacaaatttgagttgcattgtgaatgaggggaagaacatgctgtgtcagttggacccaggaagggagacataccttgaaacaaactacactttgaagtcagagtgggcaacagagaagtttcctgattgtcgaacaaagcatggcacgagctcctgcatgatgggctatacccccatctattttgtcaacatcgaggtctgggtggaggccgagaatgcccttgggaatgtctcctcagagcctatcaattttgaccccgtggataaagtgaaacccagcccacctcataatttgtcagtgaccaactcagaagaattatccagtatattaaaactagcatgggtcaattcaggtttggacagtattttaaggctgaagtcggacatccaatataggaccaaagatgcctcaacttggattcaggtccctcttgaagatacagtgtctccccggacttcgttcactgttcaggatctcaagccttttacagaatatgtgtttaggattcggtccattaaggagaatgggaagggctactggagtgactggagtgaggaggcgagcgggaccacatatgaagacagaccatccaaagcgccaagtttctggtataaggtaaatgcaaaccatccacaggagtataggtctgcacggctcatatggaagacattgcccctttctgaagccaatgggaagatcttggattatgaagtggttcttacacagtccaagtcagtttcgcaaacttacacagttaacggcacagagttgatagtaaacctcaccaataaccgctatgtagcgtctctagcagcaagaaatgtggtcggcaagtcccctgcaaccgtcctcaccatccccggctcccacttcaaagcttctcaccccgtagtggatcttaaagcatttccaaaagataacctgctctgggtagaatggacaccgccatctaaacctgtgaacaaatacatactagagtggtgtgtgttgtcagagaactcaccctgcatcccagactggcagcaagaagatggcactgtgaatcggacccacttaagaggaagcctactggagagcaagtgctatctgatcacagtaaccccagtgtttcccggtgggcctggaagccctgagtccatgaaggcgtacctcaaacaagcagctccttctaaaggaccgactgttcggacaaagaaagtggggaaaaatgaagctgtcttagagtgggaccatcttcctgttgatgtccagaacggattcattagaaactactccatatcttatagaaccagtgttggaaaagaaatggttgtgcgtgtggattcttctcacacagaatacacactgtcctctttgagtagcgatacactgtacatggtccacatggcagcatacacagaagaaggtgggaaggatgggccggaattcacttttacaacactaaagtttgctcaaggagaaatcgaagccatagtcgtgcctgtgtgcttagctttcctcctgacaacgctgctgggagtcttgttctgctttaataaacgagacctaattaaaaaacacatctggccgaatgtcccagatccttcaaagagtcatattgcccagtggtcacctcacacccccccaaggcacaattttaactccaaagatcagatgtactcagatgccaatttcactgacgtaagcgttgtggaaatagaagcaaacaacaaaaagccttgtccagatgacctgaaatccttggacctgttcaagaaggagaaaataagtacagaagggcacagcagtggcattggggggtcctcgtgcatgtcctcttctaggcccagcatctccagcagtgaggagaatgagtctgctcagagcaccgcaagcaccgtgcagtactccaccgtggtgcacagcggctacaggcaccaggtgccgtcagtgcaagtgttctcaaggtctgagtccacccagcccctgctagactccgaggagcggccagaggacctgcagctggtggatagtgtggacagcggtgacgagatcttacccaggcaacagtatttcaaacaaagctgcagtcagcctggagccagtccagatgtttcacacttcggaaggtcaagccaggttccgtcaggcagtgaggaggattttgtcagactgaaacagcagcaggtttcagatcacatttcagagccctatggctccgagcaacggaggctgtttcaggaaggttctgtggcagatgctcttggcacagggactgatggacagatagagagattcgaatctgttggaatggagacagcgatggatgaagacatttccaaaagttacttgccacagactgtaagacaaggtggctacatgccacagtgagggaaccggctcctgcgggacctcagcgggactgcgaagtaaagctaaaatgctcgtgacttcagatcggaaataagcttcagtccctgataaccattgcctttaagaacaaaagtcacaactgggccatctccattccagagtatctggaattctccttccaagcactaccatgaacctgactttatcctctgaatagctggaggacgctgcgctgtttcagaatgtttgcactgctgaaaacta

SEQ ID NO: 4096 - protein, 918 aa, Rattus norvegicus
  ref <308>: DATABASE ACCESSION NUMBER: SWISS-Prot / P40190
  ref <309>: DATABASE ENTRY DATE: 2001-10-16
MSALRIWLMQALLIFLTTESIGQLVEPCGYIYPEFPVVQRGSNFTATCVLKEKCLQVYSVNATYIVWKTNHVAVPKEQVTVINRTASSVTFTDVVFQNVQLTCNILSFGQIEQNVYGITILSGYPPDIPTNLSCIVNEGKNMLCQLDPGRETYLETNYTLKSEWATEKFPDCRTKHGTSSCMMGYTPIYFVNIEVWVEAENALGNVSSEPINFDPVDKVKPSPPHNLSVTNSEELSSILKLAWVNSGLDSILRLKSDIQYRTKDASTWIQVPLEDTVSPRTSFTVQDLKPFTEYVFRIRSIKENGKGYWSDWSEEASGTTYEDRPSKAPSFWYKVNANHPQEYRSARLIWKTLPLSEANGKILDYEVVLTQSKSVSQTYTVNGTELIVNLTNNRYVASLAARNVVGKSPATVLTIPGSHFKASHPVVDLKAFPKDNLLWVEWTPPSKPVNKYILEWCVLSENSPCIPDWQQEDGTVNRTHLRGSLLESKCYLITVTPVFPGGPGSPESMKAYLKQAAPSKGPTVRTKKVGKNEAVLEWDHLPVDVQNGFIRNYSISYRTSVGKEMVVRVDSSHTEYTLSSLSSDTLYMVHMAAYTEEGGKDGPEFTFTTLKFAQGEIEAIVVPVCLAFLLTTLLGVLFCFNKRDLIKKHIWPNVPDPSKSHIAQWSPHTPPRHNFNSKDQMYSDANFTDVSVVEIEANNKKPCPDDLKSLDLFKKEKISTEGHSSGIGGSSCMSSSRPSISSSEENESAQSTASTVQYSTVVHSGYRHQVPSVQVFSRSESTQPLLDSEERPEDLQLVDSVDSGDEILPRQQYFKQSCSQPGASPDVSHFGRSSQVPSGSEEDFVRLKQQQVSDHISEPYGSEQRRLFQEGSVADALGTGTDGQIERFESVGMETAMDEDISKSYLPQTVRQGGYMPQ

SEQ ID NO: 4097 - DNA, 150 bp, Homo sapiens
  ref <308>: DATABASE ACCESSION NUMBER: EMBL / S80479
  ref <309>: DATABASE ENTRY DATE: 2000-03-04
accccaaagtttgaattaaaaaacacatctggcctaatgttccagatccttcaaagagtcatattgcccagtggtcacctcacactcctccaaggcacaattttaattcaaaagatcaaatgtattcagatggcaatttcactgatgtaa

SEQ ID NO: 4098 - protein, 918 aa, Homo sapiens [sequence omitted]

SEQ ID NO: 4099 - DNA, 4645 bp, Rattus norvegicus
  ref <308>: DATABASE ACCESSION NUMBER: EMBL / M93017
  ref <309>: DATABASE ENTRY DATE: 2000-03-04
tccctgccaccatcctgctcgttccctccggacgcggctgggctccgtgtggcgccaccgtgccgccagcagcgcccgtcgcccgaggcgcgtggggcgcccccgcagccccgcgatgtggccgtggctgacactaaagactttgtagccatcaaccagagtgcagtttcgatggaaaatgaaggttgcacgatttcaaaagatccctaatgttgaaaatgagacaatgatccctgtactgacatccaagagagcaagtgagttagcagtcagtgaggtcgcaggccttctccaggctgatcttcagaatggcttaaacaaatctgaagttagtcataggcgagccttccatggctggaatgagtttgatatcagtgaagatgaaccattatggaagaagtacatttctcagtttaaaaatcccctcatcatgctgcttctggcttcggcagtcatcagcgttttaatgcgtcagtttgatgatgccgtcagtatcactgtggcaatactgattgttgtcaccgtggcctttgttcaggaatatcgttcagaaaaatctttagaagaattaagtaaacttgtgccaccagaatgccattgtgttcgtgaaggaaaattggagcatacacttgcccgagacttggttccaggtgatacagtttgtctgtctgtgggggacagagttcctgctgacttacgcttattcgaggccgtggatctttccatcgatgagtctagcttgacaggagagacaactccttgttctaaggtgaccgctcctcaaccagctgctaccaatggggatcttgcatcaagaagtaacattgccttcatggggactctggtcagatgtggcaaagcaaagggtattgtcattggaacaggagagaattctgaatttggagaggtctttaagatgatgcaggcagaagaagcaccaaaaacgcctctgcagaagagcatggacctcttgggcaagcagctgtccttttactcctttggtataataggtatcatcatgttggttggctggttactagggaaagacattctggaaatgttcactattagtgtaagtttggctgtagctgcaattcctgaaggtctgcctattgtggtcacagtgacactagcccttggtgttatgagaatggtgaagaaaagggctattgtaaagaaattgcctattgttgaaacgctgggctgctgtaatgtgatttgttcagataaaactggaaccctgacgaagaatgagatgactgttactcacatcctcacttcagacggcctgcatgctgaggttactggagttggctacaatcagtttggtgaagtgattgttgatggtgatgttgttcatggattctataacccagctgttagcagaattgttgaggcgggctgtgtgtgcaacgatgctgtcattaggaacaacactctgatgggaaagccaactgaaggagccttaatcgctctcgcgatgaagatgggtcttgatggactgcaacaagactatatcagaaaagctgaatacccttttagttctgagcagaaatggatggctgttaagtgtgtgcaccgaacacagcaggacagaccagagatttgttttatgaagggtgcttatgagcaggtgattaagtattgtactacgtacaacagcaaagggcagactttggcacttacccagcagcagagagatttgtaccaacaagagaaggcccagatgggctcggcaggactccgagttcttgcactggcgtctggtccggacctggggcagctgaccctccttggcctggtaggaatcattgaccctccgagaactggtgtgaaagaagccgtcacaacactcattgcctcaggagtctccatcaaaatgatcacaggagactctcaggagactgcaattgcaatcgctagtcgtctgggattgtattctaaaacttcacagtctgtgtctggagaagaagtagatacaatggaagtccagcacctttcacagatagtgccaaaggttgcagtattttacagagcaagcccaagacacaagatgaaaattatcaagtctctacaaaagaacgggtcagttgtagccatgacaggagatggggtaaatgatgcagtggctctgaaggctgcagatattggagttgcaatgggccagactggcacagatgtttgcaaagaggctgcggacatgatcttggtggatgatgatttccaaactataatgtctgcaatagaagagggtaaaggcatttataataacattaaaaattttgttagatttcaactgagcacgagtatagcagcattaactttaatctcattggctacgttaatgaactttcctaaccctctcaatgcaatgcagattttgtggatcaatattataatggatggacccccagctcagagccttggagtagagccagtggataaagatgtcattcgaaaaccccctcggaactggaaggacagcattttgacaaaaaacttgatccttaaaatacttgtttcatcaataatcattgtctgtgggactttgtttgtcttctggcgagagcttcgagacaatgtgataacaccccgagacacaacaatgactttcacttgcttcgtgttttttgatatgttcaatgcactgagttccagatctcagactaagtctgtgtttgagattggactctgcagtaataagatgttctgctatgcggttcttggatccatcatggggcagttgcttgttatctacttcccgcctctgcagaaggtttttcagaccgagagcctcagtattctggatctgttgtttcttttgggtctcacttcatcagtgtgcattgtgtctgaaattataaagaaggttgaaaggagcagggaaaagactcagaagaacactacttcaacaccatcgtcttttcttgaagtatgatgcatattgcattttttttttcatttgcaaactaggaattgcagtctgggaatcatttagaagggcaagttcaagaggataatgaagatttaaggacttttaaactttccattgactaaaaatgaccattaatgttaaagacttgatttgaaccttgttggtagtcccaaatgaaattatgcaactttgaataacacgttccttgatttgaattggcttttgcaatcgattggaacttcaacatatggtcaagtactgaattaaaaaagtacaaaaggcaaaacgtgaacaccttctgcacttagagttctaatgtacaaatacactatctgtcttagatggatataaatattttttttatttttaaatattgtactatttatggttgtggggctttcttactaatacactcaataaatgcactcagtcatttcaaaggcattctatttggtttagaaattgccaggagtgccatatttcagctaccatgtttcctttttcctgcaatgtacgcaaatgataccttgtgctaccatttttatatttcaagttttttattttttatttttgcacaggatgtgaccactgtctaatcactgttctttctttttgtgactgaaaagcatatactgcaattgaagtaaatgtttgctcttcttagtaagtgtacatggttgttttggttttttgtagtggttttccacagaggtgtgagtctttgacctagcaggattagttcaggctgttgttgcattacagttagagtaattgtacttaacacagtcaaagagtcaaaaacaacaaaggccggatggaatttcaaacagactatgttaacacgtccttgtttaggttaatacagttctactttgtcagtgtcatcttgtcatttcttctttataaatcaaacacttcagctaaataattgacctttattactgtttcatatttgtatttttaagtctatttcttagagagtatagactaccatacttagaaaatcaaaagtcccaaactcagagagataggacatgaaccagggtgtccatcagaagatcctgtgcaggccttgctcctccgaatcctctaggcagccgctttggcctagattgtagcacaaccctgagtctgtcccttctgccgtttgttgggatccgtcttcttcttttggtatgcttgggaaatagatggatttgctttgtgtaaaccatcagtttttataagagcttgacaaaataaaggtaagtgttgaatcttgtatttcataaactgtcagaattaactgttctgagcttgttcaatattactggtgagtgttaacgctgctgcgctgtcgttgataggagaactctgttgtctgagtctgtactactgaagcatgaacgtaaggagccagatgtctgactttgtcttaatctctcaggctcaactgtcagtgtacattgttctgtctcattaggtgggacgtgaggtcactgtcaaccaactcatagaggtttgatgtctcatagcaaaattttataatggttttttacattctgttccaaacttgaaaactacatattaagtgcatattcagtcttgtttgttttacagtagaggttgagaatatgactcatgaaatgaatgtgcctatcttttcacttggtattgaactataaaaataaagtgagtttttcataagttcaaaaaaaaaaaaaaaaaaaa

SEQ ID NO: 4100 - protein, 919 aa, Rattus norvegicus
  ref <308>: DATABASE ACCESSION NUMBER: SWISS-Prot / Q64566
  ref <309>: DATABASE ENTRY DATE: 2001-10-16
MKVARFQKIPNVENETMIPVLTSKRASELAVSEVAGLLQADLQNGLNKSEVSHRRAFHGWNEFDISEDEPLWKKYISQFKNPLIMLLLASAVISVLMRQFDDAVSITVAILIVVTVAFVQEYRSEKSLEELSKLVPPECHCVREGKLEHTLARDLVPGDTVCLSVGDRVPADLRLFEAVDLSIDESSLTGETTPCSKVTAPQPAATNGDLASRSNIAFMGTLVRCGKAKGIVIGTGENSEFGEVFKMMQAEEAPKTPLQKSMDLLGKQLSFYSFGIIGIIMLVGWLLGKDILEMFTISVSLAVAAIPEGLPIVVTVTLALGVMRMVKKRAIVKKLPIVETLGCCNVICSDKTGTLTKNEMTVTHILTSDGLHAEVTGVGYNQFGEVIVDGDVVHGFYNPAVSRIVEAGCVCNDAVIRNNTLMGKPTEGALIALAMKMGLDGLQQDYIRKAEYPFSSEQKWMAVKCVHRTQQDRPEICFMKGAYEQVIKYCTTYNSKGQTLALTQQQRDLYQQEKAQMGSAGLRVLALASGPDLGQLTLLGLVGIIDPPRTGVKEAVTTLIASGVSIKMITGDSQETAIAIASRLGLYSKTSQSVSGEEVDTMEVQHLSQIVPKVAVFYRASPRHKMKIIKSLQKNGSVVAMTGDGVNDAVALKAADIGVAMGQTGTDVCKEAADMILVDDDFQTIMSAIEEGKGIYNNIKNFVRFQLSTSIAALTLISLATLMNFPNPLNAMQILWINIIMDGPPAQSLGVEPVDKDVIRKPPRNWKDSILTKNLILKILVSSIIIVCGTLFVFWRELRDNVITPRDTTMTFTCFVFFDMFNALSSRSQTKSVFEIGLCSNKMFCYAVLGSIMGQLLVIYFPPLQKVFQTESLSILDLLFLLGLTSSVCIVSEIIKKVERSREKTQKNTTSTPSSFLEV

SEQ ID NO: 4101 - DNA, 3458 bp, Homo sapiens
  ref <308>: DATABASE ACCESSION NUMBER: EMBL / AF225981
  ref <309>: DATABASE ENTRY DATE: 2000-04-30
cttcctccctcccgctcgcttcttctcacgccgggagcaggctcgcgcctcgcaccgctgccccgcgagcagctcctcttctcccgaggcgcgcggggcgcccccgcgagccccgcggctgagaccccgcagcctggaggagggctgtccggggctttgggttgcacgttttcaaaaaatacctaatggtgaaaatgagacaatgattcctgtattgacatcaaaaaaagcaagtgaattaccagtcagtgaagttgcaagcattctccaagctgatcttcagaatggtctaaacaaatgtgaagttagtcataggcgagcctttcatggctggaatgagtttgatattagtgaagatgagccactgtggaagaagtatatttctcagtttaaaaatccccttattatgctgcttctggcttctgcagtcatcagtgttttaatgcatcagtttgatgatgccgtcagtatcactgtggcaatactattcgttgttacagttgcctttgttcaggaatatcgttcagaaaaatctcttgaagaattgagtaaacttgtgccaccagaatgccattgtgtgcgtgaaggaaaattggagcatacacttgcccgagacttggttccaggtgatacagtttgcctttctgttggggatagagttcctgctgacttacgcttgtttgaggctgtggatctttccattgatgagtccagcttgacaggtgagacaacgccttgttctaaggtgacagctcctcagccagctgcaactaatggagatcttgcatcgagaagtaacattgcctttatgggaacactggtcagatgtggcaaagcaaagggtgttgtcattggaacaggagaaaattctgaatttggggaggtttttaaaatgatgcaagcagaagaggcaccaaaaacccctctgcagaagagcatggacctcttaggaaaacaactttccttttactcctttggtataataggaatcatcatgttggttggctggttactgggaaaagatatcctggaaatgtttactattagtgtaagtttggctgtagcagcaattcctgaaggtctccccattgtggtcacagtgacgctagctcttggtgttatgagaatggtgaagaaaagggccattgtgaaaaagctgcctattgttgaaactctgggctgctgtaatgtgatttgttcagataaaactggaacactgacgaagaatgaaatgactgttactcacatatttacttcagatggtctgcatgctgaggttactggagttggctataatcaatttggggaagtgattgttgatggtgatgttgttcatggattctataacccagctgttagcagaattgttgaggcgggctgtgtgtgcaatgatgctgtaattagaaacaatactctaatggggaagccaacagaaggggccttaattgctcttgcaatgaagatgggtcttgatggacttcaacaagactacatcagaaaagctgaatacccttttagctctgagcaaaagtggatggctgttaagtgtgtacaccgaacacagcaggacagaccagagatttgttttatgaaaggtgcttacgaacaagtaattaagtactgtactacataccagagcaaagggcagaccttgacacttactcagcagcagagagatgtgtaccaacaagagaaggcacgcatgggctcagcgggactcagagttcttgctttggcttctggtcctgaactgggacagctgacatttcttggcttggtgggaatcattgatccacctagaactggtgtgaaagaagctgttacaacactcattgcctcaggagtatcaataaaaatgattactggagattcacaggagactgcagttgcaatcgccagtcgtctgggattgtattccaaaacttcccagtcagtctcaggagaagaaatagatgcaatggatgttcagcagctttcacaaatagtaccaaaggttgcagtattttacagagctagcccaaggcacaagatgaaaattattaagtcgctacagaagaacggttcagttgtagccatgacaggagatggagtaaatgatgcagttgctctgaaggctgcagacattggagttgcgatgggccagactggtacagatgtttgcaaagaggcagcagacatgatcctagtggatgatgattttcaaaccataatgtctgcaatcgaagagggtaaagggatttataataacattaaaaatttcgttagattccagctgagcacgagtatagcagcattaactttaatctcattggctacattaatgaactttcctaatcctctcaatgccatgcagattttgtggatcaatattattatggatggacccccagctcagagccttggagtagaaccagtggataaagatgtcattcgtaaacctcctcgcaactggaaagacagcattttgactaaaaacttgatacttaaaatacttgtttcatcaataatcattgtttgtgggactttgtttgtcttctggcgtgagctacgagacaatgtgattacacctcgagacacaacaatgaccttcacatgctttgtgttttttgacatgttcaatgcactaagttccagatcccagaccaagtctgtgtttgagattggactctgcagtaatagaatgttttgctatgcagttcttggatccatcatgggacaattactagttatttactttcctccgcttcagaaggtttttcagactgagagcctaagcatactggatctgttgtttcttttgggtctcacctcatcagtgtgcatagtggcagaaattataaagaaggttgaaaggagcagggaaaagatccagaagcatgtctggctctgggagaggagtggacagcagctggttgagatacatccccatctggagacaggactgccactgacagaagatgtgagctgtgtctaagtccagtcttgtgcccagccgtgtctgcgccttcactctttggaactctgcatacaacatcttagcaccatcttcctgcagctcttccttacctaaataaagaaacagcccaagggcagtatttctaaaagcactgtaacagcttttcattttctccacatatactacaaattctataaagaaagaaattaatttaaaaaaactaagatgtttttctcttctggcttcataaatgccttgctgtataaattgaaatattgatactgaactgtctttttaatgatgacctaactttattcaacccatcggaatttactttttccctgaaataagatcttttccactggtctactacctgaccataaacatgtctgcatttgaattctctaaaccctaaatctgtgtctatgaaaaatacaaatgactattaaatattattctctttactgttctctttcaccgaaaaaaaaaaaaaaaaaaaaaa

SEQ ID NO: 4102 - protein, 919 aa, Homo sapiens
  ref <308>: DATABASE ACCESSION NUMBER: SWISS-Prot / P98194
  ref <309>: DATABASE ENTRY DATE: 2002-06-15
MKVARFQKIPNGENETMIPVLTSKKASELPVSEVASILQADLQNGLNKCEVSHRRAFHGWNKFDISEDEPLWKKYISQFKNPLIMLLLASAVISVLMHQFDDAVSITVAILIVVTVAFVQEYRSEKSLEELSKLVPPECHCVREGKLEHTLARDLVPGDTVCLSVGDRVPADLRLFEAVDLSIDESSLTGETTPCSKVTAPQPAATNGDLASRSNIAFMGTLVRCGKAKGVVIGTGENSEFGEVFKMMQAEEAPKTPLQKSMDLLGKQLSFYSFGIIGIIMLVGWLLGKDILEMFTISVSLAVAAIPEGLPIVVTVTLALGVMRMVKKRAIVKKLPIVETLGCCNVICSDKTGTLTKNEMTVTHIFTSDGLHAEVTGVGYNQFGEVIVDGDVVHGFYNPAVSRIVEAGCVCNDAVIRNNTLMGKPTEGALIALAMKMGLDGLQQDYIRKAEYPFSSEQKWMAVKCVHRTQQDRPEICFMKGAYEQVIKYCTTYQSKGQTLTLTQQQRDVYQQEKARMGSAGLRVLALASGPELGQLTFLGLVGIIDPPRTGVKEAVTTLIASGVSIKMITGDSQETAVAIASRLGLYSKTSQSVSGEEIDAMDVQQLSQIVPKVAVFYRASPRHKMKIIKSLQKNGSVVAMTGDGVNDAVALKAADIGVAMGQTGTDVCKEAADMILVDDDFQTIMSAIEEGKGIYNNIKNFVRFQLSTSIAALTLISLATLMNFPNPLNAMQILWINIIMDGPPAQSLGVEPVDKDVIRKPPRNWKDSILTKNLILKILVSSIIIVCGTLFVFWRELRDNVITPRDTTMTFTCFVFFDMFNALSSRSQTKSVFEIGLCSNRMFCYAVLGSIMGQLLVIYFPPLQKVFQTESLSILDLLFLLGLTSSVCIVAEIIKKVERSREKIQKHVSSTSSSFLEV

SEQ ID NO: 4103 - DNA, 307 bp, Rattus norvegicus
  ref <308>: DATABASE ACCESSION NUMBER: EMBL / M93257
  ref <309>: DATABASE ENTRY DATE: 2000-03-04
aagtcagcaaactgtaaatgttccagacggccaaaataacagcagaggctcagagacagtactgtactactgtccccagcagctcacaccacatctcatctgaagaatgagtacaagctttccaggtatggtggtgacgcctgtcatccccagtatccaggaggcagaggcatcggagttcagcgccagcctggtctacataagtgagttccaagacagccagggctacgtagaaatactttttaaagaaagttataacctcttttatattataaaagaaattaaagatctacatatttggatacaa

SEQ ID NO: 4104 - protein, 264 aa, Rattus norvegicus
  ref <308>: DATABASE ACCESSION NUMBER: SWISS-Prot / CAA78276
  ref <309>: DATABASE ENTRY DATE: 2002-06-15
MPLAAVSLGLLLLALLLLLRHLGWGLVTIFWFEYVLQPVHNLIMGDTKEQRILRYVQQNAKPGDPQSVLEAIDTYCTQKEWAMNVGDAKGQIMDAVIREYSPSLVLELGAYCGYSAVRMARLLQPGARLLTMEMNPDYAAITQQMLNFAGLQDKVTILNGASQDLIPQLKKKYDVDTLDMVFLDHWKDRYLPDTLLLEKCGLLRKGTVLLADNVIVPGTPDFLAYVRGSSSFECTHYSSYLEYMKVVDGLEKAIYQGPSSPDKS

SEQ ID NO: 4105 - DNA, 507 bp, Rattus norvegicus
  ref <308>: DATABASE ACCESSION NUMBER: EMBL / M93297
  ref <309>: DATABASE ENTRY DATE: 2000-03-04
tttagatttatttgtttactttgagtgttttgcctacctgtatgtatgcaccatgtgggtgctgggagtcaaacgcagagctctgggaaagcagcaagtattccagactgctaagccgtctctcccacccctcataattaattctcaacaggcagttgccaaacaaatagaaagaagctattaaaactcctgtttcttttgtagcgtgctcttcaggatcccaatgttgctgctttcatggtggagcccatccagggtgaagcgggtgttatcgttccagatccaggatacctgacgggagttcgagaactttgcacccggcaccaggttgtcccactcactttgcagtgacgccaggctcgcctgcacttgtttggactctgctgacaggctagatgatggattccaaggcttgaggaacatgctaatgcttgcaccttctgaggaacacgctaatgcttgcaccctctgaggaacatgctaaatgcttgcaccttctgaggaaca

SEQ ID NO: 4106 - protein, 223 aa, Rattus norvegicus
  ref <308>: DATABASE ACCESSION NUMBER: SWISS-Prot / AAA42061
  ref <309>: DATABASE ENTRY DATE: 2000-07-04
RALQDPNVAAFMVEPIQGEAGVIVPDPGYLTGVRELCTRHQVLFIADEIQTGLARTGRWLAVDHENVRPDIVLLGKALSGGLYPVSAVLCDDDIMLTIKPGEHGSTYGGNPLGCRIAIAALEVLEEEHLAENADKMGAILRKELMKLPSDVVTAVRGKGLLNAIVIRETKDCDAWKVCLRLRDNGLLAKPTHGDIIRLAPPLVIKEDEIRESVEIINKTILSF

SEQ ID NO: 4107 - DNA, 2013 bp, Homo sapiens
  ref <308>: DATABASE ACCESSION NUMBER: Refseq / NM_000274
  ref <309>: DATABASE ENTRY DATE: 2000-10-31
aattcctgtcctcaggcgctgtcagatctgtggtttttctacttgaaggacacaatgttttccaaactagcacatttgcagaggtttgctgtacttagtcgcggagttcattcttcagtggcttctgctacatctgttgcaactaaaaaaacagtccaaggccctccaacctctgatgacatttttgaaagggaatataagtatggtgcacacaactaccatcctttacctgtagccctggagagaggaaaaggtatttacttatgggatgtagaaggcagaaaatattttgacttcctgagttcttacagtgctgtcaaccaagggcattgtcaccccaagattgtgaatgctctgaagagtcaagtggacaaattgaccttaacatctagagctttctataataacgtacttggtgaatatgaggagtatattactaaacttttcaactaccacaaagttcttcctatgaatacaggagtggaggctggagagactgcctgtaaactagctcgtaagtggggctataccgtgaagggcattcagaaatacaaagcaaagattgtttttgcagctgggaacttctggggtaggacgttgtctgctatctccagttccacagacccaaccagttacgatggttttggaccatttatgccgggattcgacatcattccctataatgatctgcccgcactggagcgtgctcttcaggatccaaatgtggctgcgttcatggtagaaccaattcagggtgaagcaggcgttgttgttccggatccaggttacctaatgggagtgcgagagctctgcaccaggcaccaggttctctttattgctgatgaaatacagacaggattggccagaactggtagatggctggctgttgattatgaaaatgtcagacctgatatagtcctccttggaaaggccctttctgggggcttataccctgtgtctgcagtgctgtgtgatgatgacatcatgctgaccattaagccaggggagcatgggtccacatacggtggcaatccactaggctgccgagtggccatcgcagcccttgaggttttagaagaagaaaaccttgctgaaaatgcagacaaattgggcattatcttgagaaatgaactcatgaagctaccttctgatgttgtaactgccgtaagaggaaaaggattattaaacgctattgtcattaaagaaaccaaagattgggatgcttggaaggtgtgtctacgacttcgagataatggacttctggccaagccaacccatggcgacattatcaggtttgcgcctccgctggtgatcaaggaggatgagcttcgagagtccattgaaattattaacaagaccatcttgtctttctgagggtagccagctgttttcagtggtccctgggagccagctggagacaggtggtcctgtaaaagctttattcctaatgtgggcacattccactcccatgagtcttcaaaaactttttttttgaatatatttttttcagttgatacataatagaacaacgtttatgaacctgccgtttgctttgtaacgtaactaaataatgtaatggcatctatattcagttgaagtgttttgatgtgcatgtgtacttcctaaggtgaaatgcatctatatacagacagcctctaaatcaagtccttcagtataattgatatatgtttttataatttcctcactggtataagtgtttcatatttgaaaaagttatctctgggtattgcataaaaggcttcatcttataaagtgaaatcattgttattgaattttaggaaggattaatggttaagtgtatataaaatactaatattaagtaaacttcatattggccaacaccagggttgtattctatggatgtcattattttgaattaagaattagtgtttaacattcctaaattgttttgagtgcttgattataatttgtaaaaaatgtttattttcaatacttctttaaatttaaaataaagcttatatttcaaatgtc

SEQ ID NO: 4108 - protein, 439 aa, Homo sapiens
  ref <308>: DATABASE ACCESSION NUMBER: SWISS-Prot / P04181
  ref <309>: DATABASE ENTRY DATE: 2002-06-15
MFSKLAHLQRFAVLSRGVHSSVASATSVATKKTVQGPPTSDDIFEREYKYGAHNYHPLPVALERGKGIYLWDVEGRKYFDFLSSYSAVNQGHCHPKIVNALKSQVDKLTLTSRAFYNNVLGEYEEYITKLFNYHKVLPMNTGVEAGETACKLARKWGYTVKGIQKYKAKIVFAAGNFWGRTLSAISSSTDPTSYDGFGPFMPGFDIIPYNDLPALERALQDPNVAAFMVEPIQGEAGVVVPDPGYLMGVRELCTRHQVLFIADEIQTGLARTGRWLAVDYENVRPDIVLLGKALSGGLYPVSAVLCDDDIMLTIKPGEHGSTYGGNPLGCRVAIAALEVLEEENLAENADKLGIILRNELMKLPSDVVTAVRGKGLLNAIVIKETKDWDAWKVCLRLRDNGLLAKPTHGDIIRFAPPLVIKEDELRESIEIINKTILSF

SEQ ID NO: 4109 - DNA, 2059 bp, Rattus norvegicus
  ref <308>: DATABASE ACCESSION NUMBER: EMBL / M93401
  ref <309>: DATABASE ENTRY DATE: 2000-03-04
ggcaggagaagtgatctgttatctcacctggcacatgaagcccattcctggaactatgcaaagggcagagtctggtgagccatggcggcggcagtggcggcagcagcagcagtgcggtcccggatcctgcaggtttcttctaaagtaaactccacatggtatccagcatcttctttctcttcatcatcagtgccaactgtaaagctcttcattgatgggaaattcgttgaatccaaaagtgacaaatggattgacatccacaacccagccaccaatgaggttgttggtcgggttcctcagtccaccaaagctgaaatggaggcagccgtagccgcctgcaaacgcgctttccctgcgtgggcagacacatctattttaagccggcagcaggtcctgcttcgttatcagcaactcattaaagaaaacctgaaagaaatcgccaggttaatcacattggaacaagggaagactctggctgatgctgaaggagatgtgttccgaggccttcaggtggttgagcatgcctgcagtgtgacgtccctcatgctgggagagaccatgccatctattaccaaagacatggacctttattcctaccgcctgcctctgggagtgtgtgcaggcatcgcaccatttaattttcctgccatgatccccctttggatgtttcccatggctatggtctgtggaaatactttcctaatgaaaccatcagagcgagtacctggagcaaccatgcttcttgctaagttgcttcaggattctggtgccccggacggaacactgaacatcatccatggacaacatgaagctgtaaattttatttgcgatcatccagacatcaaggcaatcagctttgtgggatccaaccaggcgggagagtacatcttcgaaagagggtcaagaaatggcaagagggttcaagccaatatgggagccaagaaccatggggtagtcatgccagatgccaataaggaaaataccctcaaccagctggttggggcagcatttggagctgctgggcagcgctgcatggctctttcaacagccgtccttgtgggagaagctaagaagtggctgccagaactggtagagcgtgccaagaatctccgcgtcaatgcaggagatcagcctggagctgatcttggtcccctgatcaccccccaggccaaagagagagtctgcaatctgattgatagtggagcaaaagagggggcttccatccttctggatgggcggaaaattaaagttaagggctacgaaaacggtaactttgttggaccaaccatcatctccaatgttaagccaagtatgacttgttacaaagaggagatttttggtccagttcttgtggtcttagagacagaaaccctggatgaagccatcaagattgttaatgacaacccatatggaaacgggactgctatctttaccaccaacggagccatagctcggaaatacgctcacatggtggatgtgggacaggtgggcgtgaatgtccccattccagtgcctttgccaatgttttccttcaccggctctcgatcttccttcaggggagacaccaatttctatggcaaacagggcatccagttttacactcagttaaagactatcacatctcagtggaaggaagaagatgctactctttcctcacctgcagtggtcatgcctaccatggggcgttagaacgttcaagactccatccagcctgagtaacttcccactgtccttggcaatcttcgtctgccatctttgctcaaaacagatccatgaggatggagtatattgcaatgaaattctttctcagaactcgcaatcccttcaaagttatagggagtacaggataacaccaacgccaggccttcacttgttctccatacttctctacggtttttgaggttaactgttgttaagcgtgaagtgtttgcctagaataagagcttagaactgtcttctaacaattcttttctgatgacttggagggacaacgtaggggcccggtccttggcaatcttcgtctgccatctttgctcaaaaacagtccatgaggatggag

SEQ ID NO: 4110 - protein, 535 aa, Rattus norvegicus
  ref <308>: DATABASE ACCESSION NUMBER: SWISS-Prot / Q02253
  ref <309>: DATABASE ENTRY DATE: 2002-06-15
MAAAVAAAAAVRSRILQVSSKVNSTWYPASSFSSSSVPTVKLFIDGKFVESKSDKWIDIHNPATNEVVGRVPQSTKAEMEAAVAACKRAFPAWADTSILSRQQVLLRYQQLIKENLKEIARLITLEQGKTLADAEGDVFRGLQVVEHACSVTSLMLGETMPSITKDMDLYSYRLPLGVCAGIAPFNFPAMIPLWMFPMAMVCGNTFLMKPSERVPGATMLLAKLLQDSGAPDGTLNIIHGQHEAVNFICDHPDIKAISFVGSNQAGEYIFERGSRNGKRVQANMGAKNHGVVMPDANKENTLNQLVGAAFGAAGQRCMALSTAVLVGEAKKWLPELVERAKNLRVNAGDQPGADLGPLITPQAKERVCNLIDSGAKEGASILLDGRKIKVKGYENGNFVGPTIISNVKPSMTCYKEEIFGPVLVVLETETLDEAIKIVNDNPYGNGTAIFTTNGAIARKYAHMVDVGQVGVNVPIPVPLPMFSFTGSRSSFRGDTNFYGKQGIQFYTQLKTITSQWKEEDATLSSPAVVMPTMGR

SEQ ID NO: 4111 - DNA, 2157 bp, Homo sapiens
  ref <308>: DATABASE ACCESSION NUMBER: EMBL / AK026842
  ref <309>: DATABASE ENTRY DATE: 2000-09-29
gatcacaaatccaaacccttcagaagaaggtagtaaacttggagactgctctgagttacatgaccaaagagtttgagagtgaagttttaaaactgcagcaacacgcaatgatagagaaccaagcaggtcaggtagaaattgacaagctgcagcaccttcttcagatgaaggacagggaaatgaatcgtgtgaagaagctggccaagaacatactggatgagagaacagaagtggaaagattctttttagatgctctgcaccaagtgaagcaacagatcctaattagcaggaagcattataagcagatagcacaagctgctttcaatttaaaaatgagagcagcatgtacaggaagaacagaatatcccaaaatcagaacatttgatggcagagagcacagcaccaatagtgtgaatcaggatcttctggaggccgaaaaatggacacatattgaaggaaatgtggatattggagatttgacctgggagcagaaggaaaaagtattgcgattgctctttgcaaaaatgaatggctgtccttctaggaaatacaaccagagttctaggcctccagttccagactatgttgtttctgacagtggggaaacaaaggaatttggggatgaaagtaagcttcaagataaaatcttcatcacccagcaaattgcaatatcagactcttctggtgaagtggtgctacccactattccaaaagaacctcaggagtctgacacaggaaccttctgagaagcactgattatgacctcacagatgctgctggcagtcccttccttgcagaatccttgctcctgaatatctttaagaaaatttcttaaaggaaaagacaaaaaatttaactcaaaagttacctgtttgccatagaaattggtgtctcccctgaaggaggatcgagagccggtgaatgagaacattggcaaaggcactggaatggggacattcactcccacctaaaacagaacaaatccgtgtcatatcctaaggacaaaggaactctccatttagaaacacaaaggcatcagagaccagttttaaatacccaccttctaccctatcctctaccccatgaactttcattcctgaggaagaaatggggcaatgtgggaggtcatgggggcaatcttaaaccaatgactcaccattatttactgtttcctcttaggaaatagtaaatggatataagaatctcttaaaaattctgttcacgaacctgtccaacatccaccaagtgggcatatttccgagcagtggctccattggtggtgaagatggcagttccatttccatatgggttgttatttacaatctggatggcttcatccaatgtttctgtctccagaaccacaagaactggaccaaaaatctcctctttgtaacaggtcatatttggctgccaggagtgatgcatccagaaaagaagtcagctttttggattctgagtattttatgcttatttggtactttcacttactacacatcatttacgtggacaactttcatattactaatctcttttcatttcaaatcacctatttaaaaaaaaagtcctctctcaagtgtattccgtcttccaagttaccaatcatataaacaacttggaattcctatcaacaataaccacacttcctttaagggactgtatctttagttcatgacccatcatcagctgcctttttaatacctgaacgactagtttcatccaattgttatcaaaaagttacatgaaaatttattttttataaatccaatctatagtaaatataccaggataatttttctctttacagaaaccccatgctgttttctgtaacataaataatccattcttattcactcctttgcctcccaaatatgtctgtatgtttatattttgatatcaggtcgcagacactcaaaacatccttcaccatgcaattaatgtttgttgctgataaacggatttttctgtatggttctgtggcaagagatttcataatttctactgcacttacattcaacacttgatgattcactattatagtaaggatatatgaatttcaaaaaatgcctcataacctcaatttttaagtcatgttagctgagagactttcaaagttttgataaataaaaattgccaagtcaaaaaaaaaaaaaaaaaaaa

SEQ ID NO: 4112 - protein, 535 aa, Homo sapiens
  ref <308>: DATABASE ACCESSION NUMBER: SWISS-Prot / Q02252
  ref <309>: DATABASE ENTRY DATE: 2002-06-15
MAALLAAAAVRARILQVSSKVKSSPTWYSASSFSSSVPTVKLFIGGKFVESKSDKWIDIHNPATNEVIGRVPQATKAEMDAAIASCKRAFPAWADTSVLSRQQVLLRYQQLIKENLKEIAKLITLEQGKTLADAEGDVFRGLQVVEHACSVTSLMMGETMPSITKDMDLYSYRLPLGVCAGIAPFNFPAMIPLWMFPMAMVCGNTFLMKPSERVPGATMLLAKLLQDSGAPDGTLNIIHGQHEAVNFICDHPDIKAISFVGSNKAGEYIFERGSRHGKRVQANMGAKNHGVVMPDANKENTLNQLVGAAFGAAGQRCMALSTAVLVGEAKKWLPELVEHAKNLRVNAGDQPGADLGPLITPQAKERVCNLIDSGTKEGASILLDGRKIKVKGYENGNFVGPTIISNVKPNMTCYKEEIFGPVLVVLETETLDEAIQIVNNNPYGNGTAIFTTNGATARKYAHLVDVGQVGVNVPIPVPLPMFSFTGSRSSFRGDTNFYGKQGIQFYTQLKTITSQWKEEDATLSSPAVVMPTMGR

SEQ ID NO: 4113 - DNA, 8287 bp, Rattus norvegicus
  ref <308>: DATABASE ACCESSION NUMBER: EMBL / M93661
  ref <309>: DATABASE ENTRY DATE: 2001-03-01
agatgccaaccaagtcagttctccattgtttcctggagatctgggacagaaagtacagactcctcagaagctgaggacagttcatcttcttcatcttgggtgaggtcatcaaagtcctcctcctcttcttcctcagccccgtccttctccgctccagtgtctgttcctgctggggttcccacagactgaccatcagcgttggctgagtcctcaggcttccctggaggactgttaagcactgtgccctggtccatggaggacagagtgctttgtggcaatcctttgcttgcatccctaattgcatcgggagcatcttgagacacagtagcttgccgaattcggcacgagagccaaacttcgggcggcggcctggctgcgcggagtgccggggcggcgtagcggcagctcctggactcggcgagccgcgggggcagggtagagcacgcgagagcggggctcctggtcgggacccgctccccatgcggatctgctttggctgcggcagtgaagatgcccgctctgcgtcccgccgcgctgcgggcgctgctgtggctctggctgtgcggcgcgggccccgcgcacgctttgcagtgtcgaggtggtcaagagccctgtgtaaatgaggggacctgtgttacctaccacaacggcacaggctactgccgatgtccagagggcttcttgggagaatattgtcaacatcgagacccttgtgagaagaaccgctgtcagaatggtggtacttgtgtgacgcaggccatgttgggaaaagccacctgtcgatgtgctccagggttcacaggggaggactgccaatactcgacctctcacccctgttttgtttcccgcccctgtcagaatggaggtacctgccacatgctcagctgggacacctatgagtgcacctgtcaagttggcttcacaggaaagcagtgtcagtggacagatgtctgtctgtctcatccctgtgaaaatggaagcacctgtagctctgtggccaaccagttctcctgcagatgtcctgcaggcatcacaggccagaagtgtgacgccgacatcaatgaatgtgacattccaggacgctgccaacatggtggcacctgcctcaaccttcctgggtcctaccgatgccaatgccctcagcggttcacaggccagcactgtgacagcccttacgtgccctgtgcaccctcaccctgcgtcaatggaggcacctgccgtcagactggagacttcacttctgaatgccattgcctgccaggctttgaagggagcaactgcgagcggaatatcgacgactgccctaaccacaagtgtcagaatggaggggtgtgtgtggatggcgtcaatacttacaactgccgctgcccccctcagtggactgggcagttctgcacagaagacgtggatgagtgtctgctgcagcccaatgcttgtcagaatggaggcacttgcaccaaccgcaacggaggctacggctgcgtgtgcgtgaacggctggagtggggatgactgcagcgagaacatcgatgactgtgccttcgcttcctgcacgccaggctccacctgtattgaccgtgtggcctccttctcctgcctttgtccagagggaaaggcagggctcctgtgtcatctggatgatgcctgtatcagcaacccttgtcacaagggggcgctgtgtgataccaaccccctgaatgggcagtacatttgcacctgcccacaggcgtacaagggcgctgactgcacagaagacgtggatgagtgtgctatggccaacagtaacccttgtgagcatgcaggaaagtgtgtgaatacagatggcgccttccactgcgagtgtctgaagggctacgcagggcctcgctgtgagatggacatcaacgagtgtcactcagacccctgtcagaacgacgccacctgcctggataagattggaggcttcacctgtctctgcatgccgggtttcaaaggtgtgcattgtgaactggaggtgaatgaatgccagagcaacccgtgtgtaaacaatgggcagtgtgtggacaaagtcaatcgcttccagtgtctgtgtccccctggtttcacaggaccagtgtgccagatcgacattgacgactgctccagtactccctgcctgaatggggccaagtgcatcgatcacccgaatggctatgaatgccagtgtgccacaggattcactggcacactgtgtgatgagaacatcgacaactgtgacccggatccttgccaccatggccagtgccaggatgggattgactcctacacctgcatctgcaaccccgggtacatgggagccatctgtagtgaccagattgatgaatgctacagcagcccctgcctgaatgatggacgctgcatcgacctggtgaacggctaccagtgcaactgccaaccgggtacctcaggccttaattgtgaaattaattttgatgactgtgccagcaacccttgtctgcacggagcctgtgtggacggcatcaaccgttacagttgtgtgtgctctccgggattcacagggcagaggtgcaacatagacattgatgagtgtgcctccaacccctgtcgcaaggatgcgacgtgcatcaatgacgtgaatggtttccggtgtatgtgccctgagggaccacaccatcccagctgctactcacaggtgaacgagtgtttgagcagtccctgcatccatggaaactgtactggaggtctcagtggctataagtgcctctgcgatgcaggctgggttggtatcaactgcgaagtggacaaaaatgagtgtctttctaacccgtgccagaatggagggacatgtaataacctggtgaatggctacaggtgtacatgcaagaaggggttcaaaggctataactgccaggtgaacatagatgagtgtgcctcgaacccgtgtctgaaccaagggacctgcctcgatgacgtcagtggctacacctgccactgcatgctgccttacacaggcaagaattgtcaaacggtgttggcgccctgctcccctaacccgtgtgagaacgctgcagtttgtaaagaggcacccaactttgagagcttcacctgcctgtgtgcccctggctggcaaggtcagcgctgtacagttgacgttgatgagtgtgtctccaagccgtgtatgaacaatggcatctgccataatactcagggcagctacatgtgcgagtgccctcccggcttcagtggtatggactgtgaggaggacatcaatgactgccttgccaacccctgccagaacggaggctcctgtgtggacaaagtgaacaccttctcctgcctgtgccttcctggcttcgtaggggacaagtgccaaacagacatgaatgaatgtctgagcgagccctgtaagaatggggggacctgctctgactacgtcaacagctacacctgcacgtgccctgcgggcttccatggagtccactgtgaaaacaacatcgatgagtgcactgagagctcctgtttcaatggcggcacgtgtgttgatgggatcaactctttctcttgcttatgccctgtgggtttcactggtcccttctgcctccatgatatcaatgagtgcagctctaacccgtgcctgaattcgggaacgtgtgttgatggcctgggtacctaccgatgcacctgtcccttgggctacactgggaaaaactgtcagaccctggtgaacctctgcagcccctctccatgtaaaaacaaaggaacttgtgctcaggaaaaggcaaggccacgctgcctgtgtccgcctggatgggatggcgcatactgtgatgtgctcaatgtgtcctgtaaggcggcagccttgcagaaaggagtacctgttgaacacttgtgccagcactcgggtatctgtatcaatgctggcaacacgcatcactgccagtgccccctgggctacacggggagctactgcgaggaacagcttgacgagtgtgcgtccaatccatgccagcatggtgccacctgcagtgacttcatcggaggatacagatgtgagtgtgttccagggtatcagggtgtcaactgtgagtatgaagtggacgagtgccagaaccagccctgtcagaacggaggcacctgcatcgacctcgtgaaccatttcaagtgctcgtgcccaccaggcacccggggcctgctttgtgaagagaacattgatgactgtgctggggccccccactgccttaatggtggccagtgtgtggaccggattggaggctacagttgtcgctgtttgcctggctttgctggggagcggtgtgagggggacatcaatgaatgcctgtccaatccttgcagctcagagggcagcctggactgcattcagctcaaaaataactaccagtgtgtctgccgcagcgccttcacaggccgacactgcgaaaccttcctagatgtgtgtccccagaagccttgcctgaatggagggacttgtgctgtggctagcaacgtgcctgatggcttcatttgtcgttgtcccccagggttctccggggcaagatgccagagcagctgtggacaagtgaagtgcagaagaggggagcagtgtgtgcacaccgcctcgggaccccactgcttctgcccgaaccacaaggactgcgagtcaggttgcgctagtaacccctgccagcacggaggcacctgctaccctcagcgccagcctccttactactcttgccgctgctccccaccgttctggggcagccactgcgagagctacacagcccccaccagcacccctcctgctacctgtctgagtcagtactgtgccgacaaggctcgggacggcatctgtgatgaggcctgcaacagtcatgcctgccagtgggatggaggtgactgttccctcactatggaggacccctgggccaactgcacctcctcacttcgctgctgggagtacatcaacaaccagtgtgatgagctgtgcaacactgcagagtgcctgtttgacaactttgaatgccagaggaatagcaaaacctgcaagtatgacaaatactgtgcagaccacttcaaagacaatcactgcgataagggatgcaacaacgaggagtgtggctgggacgggctggactgcgctgcggaccagcctgagaacctggcggagggcatcctggtcatcgtggtgctcctaccccctgagcagctgcttcaggattctcgaagcttcttgagggccctgggcaccctgctccacaccaacttacgcattaaacaagactctcagggcgccctcatggtgtacccctactatggggagaagtcagctgccatgaagaagcagaaggtggcacgcaggtctcttcctgatgagcaggaacaggagataataggctctaaggtatttctggaaatcgacaaccgacagtgtgttcaagactcagaccagtgcttcaagaacacagatgctgcagctgctctcctggcttctcatgccatccaagggaccttgtcctaccctctggtgtctgttgtcagtgaatcggaggatccaaggaacactccgctcctctatctgcttgcggttgctgtggtcattatcctgttcctcatcctgctgggggtcatcatggcaaagcggaagcgcaagcacggcttcctctggctgcctgaaggcttcacgcttcgccgagactccagcaatcacaagcgccgtgaacctgtggggcaggatgccgtggggctgaagaatctctcagtgcaagtgtcagaggcaaacctgatcggctccacgacaagcgagcattggggtgatgatgaaggaccccagccaaagaaagccaaggctgaggacgacgaggctttgctgtcggaagacgaccctgtcgaccggcgcccctggacacagcagcaccttgaagctgcagacatccgccggactccatccctggcgctcacccctcctcaggcagagcaggaggtggacgtgctggacgtgaatgtccgaggcccagatgggtgcaccccactgatgctggcttctctccgaggaggcagctcagacctgagtgatgaagatgaagatgctgaggactcttctgccaacatcatcacagacttggtctaccaaggtgccagcctccaggcacagacggaccgcactggtgagatggccctgcaccttgcagcccgctattcgagagctgatgctgccaaacgcctcctggatgctggtgcagatgccaacgcccaggacaacatgggccgctgtcctcttcatgctgcagttgcagcggatgcccaaggtgtcttccagattctgatccgcaaccgagtaacggatctagacgccaggatgaatgatggcactacccccctgatcctggctgcccgcctggctgtggaaggaatggtggcagagctgatcaactgccaagcagatgtgaacgcagtggatgaccatggaaaatctgccctccactgggcagccgccgtcaataatgtggaggcaactcttttgctgttgaagaatggggccaaccgggatatgcaggacaacaaggaagagacacctttgtttcttgctgcccgagagggaagttatgaagcagccaaaatcctgttagaccactttgccaaccgggacatcacggaccacatggaccgccttccccgggatgtggctcgggaccgcatgcaccatgacatagttcgcctcctggacgagtacaacgtgactcccagccctccggggactgtcttgacttctgctctctcacctgtcctctgtgggcccaacaggtctttcctcagtctgaagcacaccccaatgggtaagaaggccagacggcccaacaccaagagcaccatgcccacaagcctgcctaaccttgccaaggaggccaaggacgtcaaggggagcaggaggaagaagtgtctcaacgagaaggtccagctctccgagagctcagtgactttatcccctgtcgactcgctcgagtctcctcacacatatgtttctgatgccacgtcttcccccatgatcacgtcccctgggatcttacaggcctcacccacgcctcttctggctgctgccccagctgccccagtgcatgctcagcatgcactgtctttctctaaccttcacgaaatgcagcctttgcgtcctggagccagcaccgtgctcccctcagtcagccagttgttgtcccaccaccacatcgtccccccagggagtggcagtgcaggaagcttgggcaggttacattcagtccctgtcccctcagactggatgaaccgcgtggagatgagtgagacccagtacagtgaaatgtttggcatggtcctggctcctgcagagggaacccaccctggcatggcagctcctcagagcagagctccggaagggaagcccatccccacacagcgtgagcccttgcctcccattgtaactttccagctcatcccgaaaggcagccttgctcaggcagctggggctccccagacacagtccggctgccccccagctgtggcaggccccttgccctctatgtaccagatcccagagatggcccgtttgcccagtgtggctttcccacctaccatgatgccccagcaggaggggcaggtagctcagaccattgtcccaacctatcaccctttcccagcctctgtgggcaagtaccccacacccccttcccaacacagttatgcctcctcaaatgctgccgagcgcacccccaatcatggtggtcacctccagggcgagcacccgtacctgacaccatccccagagtctcctgaccaatggtcgagctcttcaccgcactctgcgtctgactggtcagatgtgaccaccagcccaactcctggagggggtggaggcggtcagcggggacctggaacacacatgtccgagccaccacacagcaacatgcaggtttatgcatgaagagtgcctcagttacacatggacgtgcccatcacacgcactcctgagggccgagtgaaggttatccaagagaaatgaagagacctctaaccagcctctggaggcaggaggaaagacgctcctgacttcacacaagcatgagcagcattattttcatcttcactgagtatctgtgcagtttagggaggactcagctcctactgacctttgcccatcctgcaagttcatggagatgcaagatgaatgcaagccttggggcccctcgctctcttcttggagagtacgatgaatgcctgttgtcgcccggacatccttgcagcttgtaacatatcaagccctggaggcttctgcctccatgtgg

SEQ ID NO: 4114 - protein, 2471 aa, Rattus norvegicus
  ref <308>: DATABASE ACCESSION NUMBER: SWISS-Prot / Q9QW30
  ref <309>: DATABASE ENTRY DATE: 2002-06-15
MPALRPAALRALLWLWLCGAGPAHALQCRGGQEPCVNEGTCVTYHNGTGYCRCPEGFLGEYCQHRDPCEKNRCQNGGTCVTQAMLGKATCRCAPGFTGEDCQYSTSHPCFVSRPCQNGGTCHMLSWDTYECTCQVGFTGKQCQWTDVCLSHPCENGSTCSSVANQFSCRCPAGITGQKCDADINECDIPGRCQHGGTCLNLPGSYRCQCPQRFTGQHCDSPYVPCAPSPCVNGGTCRQTGDFTSECHCLPGFEGSNCERNIDDCPNHKCQNGGVCVDGVNTYNCRCPPQWTGQFCTEDVDECLLQPNACQNGGTCTNRNGGYGCVCVNGWSGDDCSENIDDCAFASCTPGSTCIDRVASFSCLCPEGKAGLLCHLDDACISNPCHKGALCDTNPLNGQYICTCPQAYKGADCTEDVDECAMANSNPCEHAGKCVNTDGAFHCECLKGYAGPRCEMDINECHSDPCQNDATCLDKIGGFTCLCMPGFKGVHCELEVNECQSNPCVNNGQCVDKVNRFQCLCPPGFTGPVCQIDIDDCSSTPCLNGAKCIDHPNGYECQCATGFTGTLCDENIDNCDPDPCHHGQCQDGIDSYTCICNPGYMGAICSDQIDECYSSPCLNDGRCIDLVNGYQCNCQPGTSGLNCEINFDDCASNPCLHGACVDGINRYSCVCSPGFTGQRCNIDIDECASNPCRKDATCINDVNGFRCMCPEGPHHPSCYSQVNECLSSPCIHGNCTGGLSGYKCLCDAGWVGINCEVDKNECLSNPCQNGGTCNNLVNGYRCTCKKGFKGYNCQVNIDECASNPCLNQGTCLDDVSGYTCHCMLPYTGKNCQTVLAPCSPNPCENAAVCKEAPNFESFTCLCAPGWQGQRCTVDVDECVSKPCMNNGICHNTQGSYMCECPPGFSGMDCEEDINDCLANPCQNGGSCVDKVNTFSCLCLPGFVGDKCQTDMNECLSEPCKNGGTCSDYVNSYTCTCPAGFHGVHCENNIDECTESSCFNGGTCVDGINSFSCLCPVGFTGPFCLHDINECSSNPCLNSGTCVDGLGTYRCTCPLGYTGKNCQTLVNLCSPSPCKNKGTCAQEKARPRCLCPPGWDGAYCDVLNVSCKAAALQKGVPVEHLCQHSGICINAGNTHHCQCPLGYTGSYCEEQLDECASNPCQHGATCSDFIGGYRCECVPGYQGVNCEYEVDECQNQPCQNGGTCIDLVNHFKCSCPPGTRGLLCEENIDDCAGAPHCLNGGQCVDRIGGYSCRCLPGFAGERCEGDINECLSNPCSSEGSLDCIQLKNNYQCVCRSAFTGRHCETFLDVCPQKPCLNGGTCAVASNVPDGFICRCPPGFSGARCQSSCGQVKCRRGEQCVHTASGPHCFCPNHKDCESGCASNPCQHGGTCYPQRQPPYYSCRCSPPFWGSHCESYTAPTSTPPATCLSQYCADKARDGICDEACNSHACQWDGGDCSLTMEDPWANCTSSLRCWEYINNQCDELCNTAECLFDNFECQRNSKTCKYDKYCADHFKDNHCDKGCNNEECGWDGLDCAADQPENLAEGILVIVVLLPPEQLLQDSRSFLRALGTLLHTNLRIKQDSQGALMVYPYYGEKSAAMKKQKVARRSLPDEQEQEIIGSKVFLEIDNRQCVQDSDQCFKNTDAAAALLASHAIQGTLSYPLVSVVSESEDPRNTPLLYLLAVAVVIILFLILLGVIMAKRKRKHGFLWLPEGFTLRRDSSNHKRREPVGQDAVGLKNLSVQVSEANLIGSTTSEHWGDDEGPQPKKAKAEDDEALLSEDDPVDRRPWTQQHLEAADIRRTPSLALTPPQAEQEVDVLDVNVRGPDGCTPLMLASLRGGSSDLSDEDEDAEDSSANIITDLVYQGASLQAQTDRTGEMALHLAARYSRADAAKRLLDAGADANAQDNMGRCPLHAAVAADAQGVFQILIRNRVTDLDARMNDGTTPLILAARLAVEGMVAELINCQADVNAVDDHGKSALHWAAAVNNVEATLLLLKNGANRDMQDNKEETPLFLAAREGSYEAAKILLDHFANRDITDHMDRLPRDVARDRMHHDIVRLLDEYNVTPSPPGTVLTSALSPVLCGPNRSFLSLKHTPMGKKARRPNTKSTMPTSLPNLAKEAKDVKGSRRKKCLNEKVQLSESSVTLSPVDSLESPHTYVSDATSSPMITSPGILQASPTPLLAAAPAAPVHAQHALSFSNLHEMQPLRPGASTVLPSVSQLLSHHHIVPPGSGSAGSLGRLHSVPVPSDWMNRVEMSETQYSEMFGMVLAPAEGTHPGMAAPQSRAPEGKPIPTQREPLPPIVTFQLIPKGSLAQAAGAPQTQSGCPPAVAGPLPSMYQIPEMARLPSVAFPPTMMPQQEGQVAQTIVPTYHPFPASVGKYPTPPSQHSYASSNAAERTPNHGGHLQGEHPYLTPSPESPDQWSSSSPHSASDWSDVTTSPTPGGGGGGQRGPGTHMSEPPHSNMQVYA

SEQ ID NO: 4115 - DNA, 543 bp, Homo sapiens
  ref <308>: DATABASE ACCESSION NUMBER: EMBL / AA725658
  ref <309>: DATABASE ENTRY DATE: 2000-03-03
ttcaattttaaatcataaattttaatttttgaagtggtatgcctctatttaacaaaacacacacaaacacacacacaaaatcatcagattcgcagagctattgtctctgacttctccactggctagggcatttgccttgagacatttatgtttgtggctttggctgtgcttctcagaatcaggactgttttttaggtatctgagcatatgccaacagtctgaaacatctgtgtaaacagatttgagaaacagtgaaaaccccataccaaacataaacagagtgggcttacctgacgtgcctggctggcagttgcactggtagccattgaccaggtcaatgcagcgaccatcgttcaggcaagggctgctgtaacattcatcaatctggtcactgcagatggcgcccatgtacccgggattgcagatgcaggtgtaggaatcaataccatcctgacactgaccatggtggcaaggatcggggtcacagttgtcaatgttctcctcacacaacacaccagtgaaacctttggaaagaattttatc

SEQ ID NO: 4116 - protein, 2471 aa, Homo sapiens
  ref <308>: DATABASE ACCESSION NUMBER: SWISS-Prot / AAA36377
  ref <309>: DATABASE ENTRY DATE: 2002-06-15
MPALRPALLWALLALWLCCAAPAHALQCRDGYEPCVNEGMCVTYHNGTGYCKCPEGFLGEYCQHRDPCEKNRCQNGGTCVAQAMLGKATCRCASGFTGEDCQYSTSHPCFVSRPCLNGGTCHMLSRDTYECTCQVGFTGKECQWTDACLSHPCANGSTCTTVANQFSCKCLTGFTGQKCETDVNECDIPGHCQHGGTCLNLPGSYQCQCPQGFTGQYCDSLYVPCAPSPCVNGGTCRQTGDFTFECNCLPGFEGSTCERNIDDCPNHRCQNGGVCVDGVNTYNCRCPPQWTGQFCTEDVDECLLQPNACQNGGTCANRNGGYGCVCVNGWSGDDCSENIDDCAFASCTPGSTCIDRVASFSCMCPEGKAGLLCHLDDACISNPCHKGALCDTNPLNGQYICTCPQGYKGADCTEDVDECAMANSNPCEHAGKCVNTDGAFHCECLKGYAGPRCEMDINECHSDPCQNDATCLDKIGGFTCLCMPGFKGVHCELEINECQSNPCVNNGQCVDKVNRFQCLCPPGFTGPVCQIDIDDCSSTPCLNGAKCIDHPNGYECQCATGFTGVLCEENIDNCDPDPCHHGQCQDGIDSYTCICNPGYMGAICSDQIDECYSSPCLNDGRCIDLVNGYQCNCQPGTSGVNCEINFDDCASNPCIHGICMDGINRYSCVCSPGFTGQRCNIDIDECASNPCRKGATCINGVNGFRCICPEGPHHPSCYSQVNECLSNPCIHGNCTGGLSGYKCLCDAGWVGINCEVDKNECLSNPCQNGGTCDNLVNGYRCTCKKGFKGYNCQVNIDECASNPCLNQGTCFDDISGYTCHCVLPYTGKNCQTVLAPCSPNPCENAAVCKESPNFESYTCLCAPGWQGQRCTIDIDECISKPCMNHGLCHNTQGSYMCECPPGFSGMDCEEDIDDCLANPCQNGGSCMDGVNTFSCLCLPGFTGDKCQTDMNECLSEPCKNGGTCSDYVNSYTCKCQAGFDGVHCENNINECTESSCFNGGTCVDGINSFSCLCPVGFTGSFCLHEINECSSHPCLNEGTCVDGLGTYRCSCPLGYTGKNCQTLVNLCSRSPCKNKGTCVQKKAESQCLCPSGWAGAYCDVPNVSCDIAASRRGVLVEHLCQHSGVCINAGNTHYCQCPLGYTGSYCEEQLDECASNPCQHGATCSDFIGGYRCECVPGYQGVNCEYEVDECQNQPCQNGGTCIDLVNHFKCSCPPGTRGLLCEENIDDCARGPHCLNGGQCMDRIGGYSCRCLPGFAGERCEGDINECLSNPCSSEGSLDCIQLTNDYLCVCRSAFTGRHCETFVDVCPQMPCLNGGTCAVASNMPDGFICRCPPGFSGARCQSSCGQVKCRKGEQCVHTASGPRCFCPSPRDCESGCASSPCQHGGSCHPQRQPPYYSCQCAPPFSGSRCELYTAPPSTPPATCLSQYCADKARDGVCDEACNSHACQWDGGDCSLTMENPWANCSSPLPCWDYINNQCDELCNTVECLFDNFECQGNSKTCKYDKYCADHFKDNHCNQGCNSEECGWDGLDCAADQPENLAEGTLVIVVLMPPEQLLQDARSFLRALGTLLHTNLRIKRDSQGELMVYPYYGEKSAAMKKQRMTRRSLPGEQEQEVAGSKVFLEIDNRQCVQDSDHCFKNTDAAAALLASHAIQGTLSYPLVSVVSESLTPERTQLLYLLAVAVVIILFIILLGVIMAKRKRKHGSLWLPEGFTLRRDASNHKRREPVGQDAVGLKNLSVQVSEANLIGTGTSEHWVDDEGPQPKKVKAEDEALLSEEDDPIDRRPWTQQHLEAADIRRTPSLALTPPQAEQEVDVLDVNVRGPDGCTPLMLASLRGGSSDLSDEDEDAEDSSANIITDLVYQGASLQAQTDRTGEMALHLAARYSRADAAKRLLDAGADANAQDNMGRCPLHAAVAADAQGVFQILIRNRVTDLDARMNDGTTPLILAARLAVEGMVAELINCQADVNAVDDHGKSALHWAAAVNNVEATLLLLKNGANRDMQDNKEETPLFLAAREGSYEAAKILLDHFANRDITDHMDRLPRDVARDRMHHDIVRLLDEYNVTPSPPGTVLTSALSPVICGPNRSFLSLKHTPMGKKSRRPSAKSTMPTSLPNLAKEAKDAKGSRRKKSLSEKVQLSESSVTLSPVDSLESPHTYVSDTTSSPMITSPGILQASPNPMLATAAPPAPVHAQHALSFSNLHEMQPLAHGASTVLPSVSQLLSHHHIVSPGSGSAGSLSRLHPVPVPADWMNRMEVNETQYNEMFGMVLAPAEGTHPGIAPQSRPPEGKHITTPREPLPPIVTFQLIPKGSIAQPAGAPQPQSTCPPAVAGPLPTMYQIPEMARLPSVAFPTAMMPQQDGQVAQTILPAYHPFPASVGKYPTPPSQHSYASSNAAERTPSHSGHLQGEHPYLTPSPESPDQWSSSSPHSASDWSDVTTSPTPGGAGGGQRGPGTHMSEPPHNNMQVYA

SEQ ID NO: 4117 - DNA, 2289 bp, Rattus norvegicus
  ref <308>: DATABASE ACCESSION NUMBER: EMBL / M93669
  ref <309>: DATABASE ENTRY DATE: 2000-03-04
acaatataagacagaggaaaattttaagacatgactgaatcgaaggcttaccgatttggagcagttctgcttcttatccacttaattttccttgtccctggaaccgaagcagcttccttccagcgaaaccagctgcttcagaaagaaccagacctcagattggagaatgtccagaagtttcctagtccagaaatgatcagggctttggagtacatagaaaagctcaggcagcaggcccacagagaagaaagcagcccagactacaatccctaccaaggcatctctgttccccttcaactcaaagaaaacggagaagaaagtcacttggcagagagctcaagggatgtcctgagtgaagacgagtggatgcggataatacttgaggctttgaggcaggctgaaaatgagccgccatctgccctcaaggagaacaagccctatgccttgaatctggagaagaacttccctgtggacacgcctgatgactatgagactcaacaatggcctgagaggaaactcaagcacatgcggttccctctcatgtatgaagagaattccagggaaaaccccttcaaacgcacaaacgaaatagtagaagaacagtacacaccccaaagtcttgctaccctggagtctgtgttccaagagcttgggaaactgacagggccaagcaaccagaagcgtgagagggttgacgaggaacagaagctctacacggacgatgaagatgacgtgtacaagaccaacaacattgcctatgaagatgtggtcgggggagaagactggagtcctatggaggagaaaatagagactcaaacccaggaagaggtgagagacagcaaagagaacacagaaaaaaacgaacaaatcaatgaagagatgaaacggtcagggcacttggggctcccagatgaaggtaaccggaaagagagcaaagaccagctctcagaggacgcctccaaggtcatcacctacttgagaaggttagtgaatgctgtgggcagtgggaggtcccagagtgggcaaaacggggacagggcagccaggcttcttgagaggccccttgattctcagtctatttatcagctgattgaaatctccaggaatttgcagataccccctgaagacttaattgagatgctcaaagctggggagaaaccaaatgggttggtggagcccgagcaggatctggagcttgctgttgacctagatgacatcccggaagctgacatagaccgcccagacatgtttcaaagtaagacgctctccaagggtgggtatcccaaggcacctggtcgaggtatgatggaggccttgccagatggcctcagtgttgaagacattttaaatgttttagggatggagaatgtagcaaatcagaagtccccatatttccccaaccaatacagccgagacaaggctctgctgaggcttccttatggtcctgggaaatctagagccaaccagattcccaaagtagcctggatcccagacgttgaaagcagacaagccccctatgacaatctgaatgataaggaccaagaattgggagagtacttagccaggatgctagttaagtaccctgagctcatgaataccaaccagctgaagagagtgcccagcccaggctcctcagaagatgacctccaagaagaagagcagctcgagcaggccatcaaggagcatctgggtcaaggaagctcccaggaaatggagaaactggccaaggtgagcaaaaggatccctgcaggatccctgaagaatgaggataccccaaatagacagtacctggatgaagatatgctcctgaaagtgctagagtatctcaatcaagaacaggcagagcagggaagggaacatcttgccaaacgggccatggaaaacatgtaaacagctttaatgcccaatttcccttcttttccccaagtgaatcccctccctttctcttaagtgtgttaatctctatcctgttaacactgtaatatctttaagtgatgtacaagcagatgactccagatagttttggggatctgctttacttattctgagctgttatgttgtgtatggatgtgtataaatgttatgactctcagattaaaaatatgtcctttattcaagaaagatatctatgatagtgttgactaatgtatccaatggtcatggtattgacaatgctcacatatgatgaagagtatcctataattatcttggaagtttttaacatttattgaattattttgttactgtctgtagtgttttgtggagttctggagcaaaatcaataaagca

SEQ ID NO: 4118 - protein, 619 aa, Rattus norvegicus
  ref <308>: DATABASE ACCESSION NUMBER: SWISS-Prot / P10362
  ref <309>: DATABASE ENTRY DATE: 2002-06-15
MTESKAYRFGAVLLLIHLIFLVPGTEAASFQRNQLLQKEPDLRLENVQKFPSPEMIRALEYIEKLRQQAHREESSPDYNPYQGISVPLQLKENGEESHLAESSRDVLSEDEWMRIILEALRQAENEPPSALKENKPYALNLEKNFPVDTPDDYETQQWPERKLKHMRFPLMYEENSRENPFKRTNEIVEEQYTPQSLATLESVFQELGKLTGPSNQKRERVDEEQKLYTDDEDDVYKTNNIAYEDVVGGEDWSPMEEKIETQTQEEVRDSKENTEKNEQINEEMKRSGHLGLPDEGNRKESKDQLSEDASKVITYLRRLVNAVGSGRSQSGQNGDRAARLLERPLDSQSIYQLIEISRNLQIPPEDLIEMLKAGEKPNGLVEPEQDLELAVDLDDIPEADIDRPDMFQSKTLSKGGYPKAPGRGMMEALPDGLSVEDILNVLGMENVANQKSPYFPNQYSRDKALLRLPYGPGKSRANQIPKVAWIPDVESRQAPYDNLNDKDQELGEYLARMLVKYPELMNTNQLKRVPSPGSSEDDLQEEEQLEQAIKEHLGQGSSQEMEKLAKVSKRIPAGSLKNEDTPNRQYLDEDMLLKVLEYLNQEQAEQGREHLAKRAMENM

SEQ ID NO: 4119 - DNA, 2494 bp, Homo sapiens
  ref <308>: DATABASE ACCESSION NUMBER: EMBL / BC022509
  ref <309>: DATABASE ENTRY DATE: 2002-09-02
ggcgggcgcagcggctccctataagcagaggagctgtccgtgtgctgaaacggcccgagaagctcgcccggagaacggggaggaatatgctgtggagctcctctgccatataaacaaaaagaggaaatctttcaaacatggctgaagcaaagacccactggcttggagcagccctgtctcttatccctttaattttcctcatctctggggctgaagcagcttcatttcagagaaaccagctgcttcagaaagaaccagacctcaggttggaaaatgtccaaaagtttcccagtcctgaaatgatcagggctttggagtacatagaaaacctccgacaacaagctcataaggaagaaagcagcccagattataatccctaccaaggtgtctctgtcccccttcagcaaaaagaaaatggcgatgaaagccacttgcccgagagggattcactgagtgaagaagactggatgagaataatactcgaagctttgagacaggctgaaaatgagcctcagtctgcaccaaaagaaaataagccctatgccttgaattcagaaaagaactttccaatggacatgagtgatgattatgagacacagcagtggccagaaagaaagcttaagcacatgcaattccctcctatgtatgaagagaattccagggataacccctttaaacgcacaaatgaaatagtggaggaacaatatactcctcaaagccttgctacattggaatctgtcttccaagagctggggaaactgacaggaccaaacaaccagaaacgtgagaggatggatgaggagcaaaaactttatacggatgatgaagatgatatctacaaggctaataacattgcctatgaagatgtggtcgggggagaagactggaacccagtagaggagaaaatagagagtcaaacccaggaagaggtgagagacagcaaagagaatatagaaaaaaatgaacaaatcaatgatgagatgaaacgctcagggcagcttggcatccaggaagaaggtcttcggaaagagagtaaagaccaactctcagatgatgtctccaaagtaattgcctatttgaaaaggttagtaaatgctgcaggaagtgggaggttacagaatgggcaaaatggggaaagggccaccaggctttttgagaaacctcttgattctcagtctatttatcagctgattgaaatctcaaggaatttacagatacccccagaagacttaattgagatgctcaaaactggggagaagccgaatggatcagtggaaccggagcgggagcttgaccttcctgttgacctagatgacatctcagaggctgacttagaccatccagacctgttccaaaataggatgctctccaagagtggctaccctaaaacacctggtggtgctgggactgaggccctaccagacgggctcagtgttgaggatattttaaatcttttagggatggagagtgcagcaaatcagaaaacgtcgtattttcccaatccatataaccaggagaaagttctgccaaggctcccttatggtgctggaagatctagatcgaaccagcttcccaaagctgcctggattccacatgttgaaaacagacagatggcatatgaaaacctgaacgacaaggatcaagaattaggtgagtacttggccaggatgctagttaaataccctgagatcattaattcaaaccaagtgaagcgagttcctggtcaaggctcatctgaaggtgacctgcaggaagaggaacaaattgagcaggccatcaaagagcatttgaatcaaggcagctctcaggagactgacaagctggccccggtgagcaaaaggttccctgtggggcccccgaagaatgatgataccccaaataggcagtactgggatgaagatctgttaatgaaagtgctggaatacctcaaccaagaaaaggcagaaaagggaagggagcatattgctaagagagcaatggaaaatatgtaagctgctttcattaattaccctactttcattcctcccaccccaagcaaatcccaacatttctcttcagtgtgttgacttctatcctgttaacactgtaatatctttaaatgatgtacaggcagatgaaaccaggtcactggggagtctgcttcatttcctctgagctgttatcttgtgtatggatatgtgtaaatgttatgactccttgataaaaaatttattatgtccattattcaagaaagatatctatgactgtgtttaatagtatatctaatggctgtggcattgttgatgctcacatatgataaaaaagtgtcctataattctattgaaagtttttaatatttattgaattattttgttactgtctgtagtgttttgtggagtactggaccaaaaaaataaagcattataaatatatagttttatttataaggccttttctattgtgtgttttactgttgattaataaatgttatttctggacaaaaaaaaaaaaaaaa

SEQ ID NO: 4120 - protein, 617 aa, Homo sapiens
  ref <308>: DATABASE ACCESSION NUMBER: SWISS-Prot / P13521
  ref <309>: DATABASE ENTRY DATE: 2002-06-15
MAEAKTHWLGAALSLIPLIFLISGAEAASFQRNQLLQKEPDLRLENVQKFPSPEMIRALEYIENLRQQAHKEESSPDYNPYQGVSVPLQQKENGDESHLPERDSLSEEDWMRIILEALRQAENEPQSAPKENKPYALNSEKNFPMDMSDDYETQQWPERKLKHMQFPPMYEENSRDNPFKRTNEIVEEQYTPQSLATLESVFQELGKLTGPNNQKRERMDEEQKLYTDDEDDIYKANNIAYEDVVGGEDWNPVEEKIESQTQEEVRDSKENIGKNEQINDEMKRSGQLGIQEEDLRKESKDQLSDDVSKVIAYLKRLVNAAGSGRLQNGQNGERATRLFEKPLDSQSIYQLIEISRNLQIPPEDLIEMLKTGEKPNGSVEPERELDLPVDLDDISEADLDHPDLFQNRMLSKSGYPKTPGRAGTEALPDGLSVEDILNLLGMESAANQKTSYFPNPYNQEKVLPRLPYGAGRSRSNQLPKAAWIPHVENRQMAYENLNDKDQELGEYLARMLVKYPEIINSNQVKRVPGQGSSEDDLQEEEQIEQAIKEHLNQGSSQETDKLAPVSKRFPVGPPKNDDTPNRQYWDEDLLMKVLEYLNQEKAEKGREHIAKRAMENM

SEQ ID NO: 4121 - DNA, 1831 bp, Rattus norvegicus
  ref <308>: DATABASE ACCESSION NUMBER: EMBL / M94537
  ref <309>: DATABASE ENTRY DATE: 2001-03-01
agccctgctagcttgggccgatcccagacacaccggcctggctagtccacgccagccgcagacggtggctgagcatggagctgtccccccgcagtcctccagagatgctggagtcggattgcccgtcacccctggagctgaagtcagcccccagcaagaagatgtggattaagctacggtctctgctgcgctacatggtgaagcagttggagaatggggaggttaacatcgaggagctgaagaaaaacctggaatacacagcttccctgctggaagctgtctacattgatgagacaaggcaaatcttggacactgaagatgagcttcgggaacttcggtcagatgccgtgccttcagaggtgcgggactggctggcctccaccttcacccagcagacccgagccaaaggtcgcagggcagaagagaaacccaagttccgaagcattgtgcacgctgtgcaggctgggatcttcgtggagcggatgttccggagaacgtataccgctgtgggtcccacgtattctactgcagtccacaactgtctcaagaacctggacgtctggtgcttcgatgtcttctctttgaaccgggcagctgatgaccacgctctgaggaccattgtttttgagttgctgactcggcatagcctcatcagccgcttcaagattcccacagtgtttctgatgagttttctggaggccttagagacaggctacgggaaatataagaacccttaccacaaccagatccatgccgctgacgtgacccagactgtccattgcttcctgctccgcacaggcatggtgcactgcctgtcagagattgaggtcttggccatcatcttcgcggcagccatccatgactatgagcacacaggcacaaccaacagcttccacatccagaccaagtcagaatgcgccatcctgtacaatgaccgatcggtgctggagaatcaccacatcagctctgttttccgaatgatgcaggatgatgagatgaacatttttatcaatctcaccaaggatgaattcgtagagctgcgggccctggtcattgagatggtgttagccacagacatgtcctgccatttccagcaagtgaagactatgaagacagccctgcagcagcttgaaaggattgacaaatccaaggccctgtctcttctgcttcatgctgctgacatcagccacccaaccaagcagtggtcagtccacagccgctggaccaaggccctaatggaagagttcttccgccagggtgacaaggaggcagagctgggcttgcccttctctccactctgtgaccgcacctccacattggtggcccagtcccagataggtttcattgacttcattgtggagcccaccttctctgtgctgactgatgtggcagaaaagagtgtccagcccttgacagatgatgattccaagtctaaaagtcagcccagcttccagtggcgccagccttctttagatgtggacgtaggagaccccaaccctgatgtggtcagtttccgctccacctggaccaagtacattcaagagaataaacagaagtggaaggaacgggcagcgagtggcatcaccaaccagatgtccattgatgaactgtccccctgtgaggaagaagccccatcctcccctgcagaagatgagcacaaccagaatgggaatctggattagggaactgggagctggccaggtcctcactgagtccaaagtcttcgatgtcattagcactatccatcaggactggttcccccatctgctccaagggagtgtgttggttgtgatagagacagcccacctgagagccaaatgttggagcaggt

SEQ ID NO: 4122 - protein, 535 aa, Rattus norvegicus
  ref <308>: DATABASE ACCESSION NUMBER: SWISS-Prot / Q01066
  ref <309>: DATABASE ENTRY DATE: 2002-06-15
MELSPRSPPEMLESDCPSPLELKSAPSKKMWIKLRSLLRYMVKQLENGEVNIEELKKNLEYTASLLEAVYIDETRQILDTEDELRELRSDAVPSEVRDWLASTFTQQTRAKGRRAEEKPKFRSIVHAVQAGIFVERMFRRTYTAVGPTYSTAVHNCLKNLDVWCFDVFSLNRAADDHALRTIVFELLTRHSLISRFKIPTVFLMSFLEALETGYGKYKNPYHNQIHAADVTQTVHCFLLRTGMVHCLSEIEVLAIIFAAAIHDYEHTGTTNSFHIQTKSECAILYNDRSVLENHHISSVFRMMQDDEMNIFINLTKDEFVELRALVIEMVLATDMSCHFQQVKTMKTALQQLERIDKSKALSLLLHAADISHPTKQWSVHSRWTKALMEEFFRQGDKEAELGLPFSPLCDRTSTLVAQSQIGFIDFIVEPTFSVLTDVAEKSVQPLTDDDSKSKSQPSFQWRQPSLDVDVGDPNPDVVSFRSTWTKYIQENKQKWKERAASGITNQMSIDELSPCEEEAPSSPAEDEHNQNGNLD

SEQ ID NO: 4123 - DNA, 2265 bp, Homo sapiens
  misc_feature (1)..(2265): n=a, c, g or t
  ref <308>: DATABASE ACCESSION NUMBER: EMBL / U56976
  ref <309>: DATABASE ENTRY DATE: 1999-07-01
gctngtccnngccagccgcagaccgtggctgagcatggagctgtccccccgcagtcctccggagatgctggaggagtcggattgcccgtcacccctggagctgaagtcagcccccagcaagaagatgtggattaagcttcggtctctgctgcgctacatggtgaagcagttggagaatggggagataaacattgaggagctgaagaaaaatctggagtacacagcttctctgctggaagccgtctacatagatgagacacggcaaatcttggacacggaggacgagctgcaggagctgcggtcagatgccgtgccttcggaggtgcgggactggctggcctccaccttcacccagcaggcccgggccaaaggccgccgagcagaggagaagcccaagttccgaagcattgtgcacgctgtgcaggctgggatcttcgtggaacggatgttccggagaacatacacctctgtgggccccacttactctactgcggttctcaactgtctcaagaacctggatctctggtgctttgatgtcttttccttgaaccaggcagcagatgaccatgccctgaggaccattgtttttgagttgctgactcggcataacctcatcagccgcttcaagattcccactgtgtttttgatgagtttcctggatgccttggagacaggctatgggaagtacaagaatccttaccacaaccagatccacgcagccgatgttacccagacagtccattgcttcttgctccgcacagggatggtgcactgcctgtcggagattgagctcctggccatcatctttgctgcagctatccatgattatgagcacacgggcactaccaacagcttccacatccagaccaagtcagaatgtgccatcgtgtacaatgatcgttcagtgctggagaatcaccacatcagctctgttttccgattgatgcaggatgatgagatgaacattttcatcaacctcaccaaggatgagtttgtagaactccgagccctggtcattgagatggtgttggccacagacatgtcctgccatttccagcaagtgaagaccatgaagacagccttgcaacagctggagaggattgacaagcccaaggccctgtctctactgctccatgctgctgacatcagccacccaaccaagcagtggttggtccacagccgttggaccaaggccctcatggaggaattcttccgtcagggtgacaaggaggcagagttgggcctgcccttttctccactctgtgaccgcacttccactctagtggcacagtctcagatagggttcatcgacttcattgtggagcccacattctctgtgctgactgacgtggcagagaagagtgttcagcccctggcggatgaggactccaagtctaaaaaccagcccagctttcagtggcgccagccctctctggatgtggaagtgggagaccccaaccctgatgtggtcagctttcgttccacctgggtcaagcgcattcaggagaacaagcagaaatggaaggaacgggcagcaagtggcatcaccaaccagatgtccattgacgagctgtccccctgtgaagaagaggcccccccatcccctgccgaagatgaacacaaccagaatgggaatctggattagccctggggctggcccaggtcttcattgagtccaaagtgtttgatgtcatcagcaccatccatcaggactggctcccccatctgctccaagggagcgtggtcgtggaagaaacaacccacctgaaggccaaatgccagagatttggggttggggaaagggcccctccccacctgacacccactggggtgcactttaatgttccggcagcaagactggggaacttcaggctcccagtggtcactgtgcccatccctcagcctctggattctcttcatggccaggtggctgccagggagcggggagcttcctggaggcttcccagggccttggggaagggtcagagatgccagccccctgggacctcccccatcctttttgcctccaagtttctaagcaatacattttgggggttccctcagccccccaccccagatcttagctggcaggtctgggtgccccttttcctcccctgggaagggctggaataggatagaaagctgggggttttcagagccctatgtgtggggaggggagtggattccttcagggcatggtacctttctaggatctgggaatggggtggagaggacatcctcttcaccccagaattgcgggaattc

SEQ ID NO: 4124 - protein, 536 aa, Homo sapiens
  ref <308>: DATABASE ACCESSION NUMBER: SWISS-Prot / Q01064
  ref <309>: DATABASE ENTRY DATE: 2002-06-15
MELSPRSPPEMLEESDCPSPLELKSAPSKKMWIKLRSLLRYMVKQLENGEINIEELKKNLEYTASLLEAVYIDETRQILDTEDELQELRSDAVPSEVRDWLASTFTQQARAKGRRAEEKPKFRSIVHAVQAGIFVERMFRRTYTSVGPTYSTAVLNCLKNLDLWCFDVFSLNQAADDHALRTIVFELLTRHNLISRFKIPTVFLMSFLDALETGYGKYKNPYHNQIHAADVTQTVHCFLLRTGMVHCLSEIELLAIIFAAAIHDYEHTGTTNSFHIQTKSECAIVYNDRSVLENHHISSVFRLMQDDEMNIFINLTKDEFVELRALVIEMVLATDMSCHFQQVKTMKTALQQLERIDKPKALSLLLHAADISHPTKQWLVHSRWTKALMEEFFRQGDKEAELGLPFSPLCDRTSTLVAQSQIGFIDFIVEPTFSVLTDVAEKSVQPLADEDSKSKNQPSFQWRQPSLDVEVGDPNPDVVSFRSTWVKRIQENKQKWKERAASGITNQMSIDELSPCEEEAPPSPAEDEHNQNGNLD

SEQ ID NO: 4125 - DNA, 707 bp, Rattus norvegicus
  ref <308>: DATABASE ACCESSION NUMBER: EMBL / M94555
  ref <309>: DATABASE ENTRY DATE: 2000-03-04
ctttggtgtctgagctcagcaagaggcgctcgggggacgctgagggacagctttaacacccgcacaacacagggtacctggttcccagtccagagctgcttggagggcagagatgtcgcgagcagctaatcgccgcccagggctctccgcaggacaattggccgctgcaactgcatctcctctcctgtcactgctgctgctgctcgcctgctgtgcggacgcttgcagaggtacgccaatatcgcctcaaagattaccaccagaacaagaactacaattgtggaatgagattcctgaagcttgtgcgtcctttctgtctgttgattcccagcctcaggcatctgttgcattgaggaagctttgccgtgtcctgatggagattttccagaagcctcaggagcaaactgagaaagataatgctaagaggttcttatttcattattcaaagacacagaagttgggaaattcaaatgttgtgtcgtctgtcgtgcatccgttgctgcagctcgttcctcaactgcatgagagaagaatgaagagatacaaagtgaatgaataccagggtcctgtagctccaagtgggggattctttttatttaggccacgcaatgggaagaggtcaacaagtttcatttaaaatggatgccaaatgatcttttcattgaaaactctgctatgggatataaaatgtactcacatttgttctc

SEQ ID NO: 4126 - protein, 174 aa, Rattus norvegicus
  ref <308>: DATABASE ACCESSION NUMBER: SWISS-Prot / P12760
  ref <309>: DATABASE ENTRY DATE: 2002-06-15
MSRAANRRPGLSAGQLAAATASPLLSLLLLLACCADACRGTPISPQRLPPEQELQLWNEIPEACASFLSVDSQPQASVALRKLCRVLMEIFQKPQEQTEKDNAKRFLFHYSKTQKLGNSNVVSSVVHPLLQLVPQLHERRMKRYKVNEYQGPVAPSGGFFLFRPRNGKRSTSFI

SEQ ID NO: 4127 - DNA, 816 bp, Homo sapiens
  ref <308>: DATABASE ACCESSION NUMBER: EMBL / BC012908
  ref <309>: DATABASE ENTRY DATE: 2001-08-24
ccgaggcacagccagggcaccaggtggagcaccagctacgcgtggcgcagcgcagcgtccctagcaccgagcctcccgcagccgccgagatgctgcgaacagagagctgccgccccaggtcgcccgccggacaggtggccgcggcgtccccgctcctgctgctgctgctgctgctcgcctggtgcgcgggcgcctgccgaggtgctccaatattacctcaaggattacagcctgaacaacagctacagttgtggaatgagatagatgatacttgttcgtcttttctgtccattgattctcagcctcaggcatccaatgcactggaggagctttgctttatgattatgggaatgctaccaaagcctcaggaacaagatgaaaaagataatactaaaaggttcttatttcattattcgaagacacagaagttgggcaagtcaaatgttgtgtcgtcagttgtgcatccgttgctgcagctcgttcctcacctgcatgagagaagaatgaagagattcagagtggacgaagaattccaaagtccctttgcaagtcaaagtcgaggatattttttattcaggccacggaatggaagaaggtcagcagggttcatttaaaatggatgccagctaattttccacagagcaatgctatggaatacaaaatgtactgacattttgttttcttctgaaaaaaatccttgctaaatgtactctgttgaaaatccctgtgttgtcaatgttctcagttgtaacaatgttgtaaatgttcaatttgttgaaaattaaaaaatctaaaaataaaaaaaaaaaaaaaaaa

SEQ ID NO: 4128 - protein, 174 aa, Homo sapiens
  ref <308>: DATABASE ACCESSION NUMBER: SWISS-Prot / P48645
  ref <309>: DATABASE ENTRY DATE: 2002-06-15
MLRTESCRPRSPAGQVAAASPLLLLLLLLAWCAGACRGAPILPQGLQPEQQLQLWNEIDDTCSSFLSIDSQPQASNALEELCFMIMGMLPKPQEQDEKDNTKRFLFHYSKTQKLGKSNVVSSVVHPLLQLVPHLHERRMKRFRVDEEFQSPFASQSRGYFLFRPRNGRRSAGFI

SEQ ID NO: 4129 - DNA, 1662 bp, Rattus norvegicus
  ref <308>: DATABASE ACCESSION NUMBER: EMBL / M95591
  ref <309>: DATABASE ENTRY DATE: 2000-06-03
ggccccgctcctcgccctgcctaccgccggcatctaaacacaggtgggagtgggagatcccgacaggtgagccccgcgccccgcagccacaaggatggagttcgtgaagtgtctaggccacccggaggagttctacaacctgctgcgattccgcatgggaggccggcggaatttcatacccaagatggaccggaactcgctcagcaacagcttgaagacttgctataagtatcttgatcagaccagtcgcagcttcgccgcggttatccaggcgctggatggggacatacgtcatgcggtgtgtgtgttttacctgatcctccgagccatggacacagtggaggatgacatggccatcagtgtggagaagaagatcccactgctgcgaaactttcacactttcctctatgagccggagtggcggttcaccgagagcaaggagaagcaccgagtagtgctggaggacttccccacgatctccctggagtttagaaatttggctgagaaatatcaaacagtgatcgctgacatctgtcacaggatgggatgtgggatggcagaatttctaaacaaggatgtaacctccaaacaggactgggacaagtactgtcactatgttgctggactggtgggaatcggcctttctcgcctattctctgcctcagagtttgaagatcccatagttggtgaagacacagagtgtgccaattctatgggtctgtttctgcagaaaacaaatatcattcgtgattatctggaagaccaacaagaaggaagacagttttggcctcaagaggtatggggcaaatatgttaagaagctggaagactttgttaagccagagaacgtagatgtggccgtgaagtgcttgaatgaactcataaccaacgccctacaacacatccctgacgtcatcacctacctgtcaaggctccggaaccaaagtgtgtttaacttctgtgccattccacaggtaatggccattgctacgctggctgcctgttacaataaccatcaggtattcaagggagtagtgaagattcggaaggggcaagcagttaccctcatgatggatgccaccaacatgccagctgtcaaagctatcatataccagtacatagaagagatttatcaccgggtccccaactcagacccgtcagctagcaaggccaagcagctcatctccaacatcaggacgcagagccttcccaattgccagctcatctcccgaagccactactcccccatttacctgtccttcatcatgctcttggctgccctgagctggcagtacttgagcactctgtcccaggtcacagaagactatgtccagagagaacactgactttgtttagctggaagcggaagtccacgtgaagtgggtttttcttcttcccccagctggattttgacttcccttggtttttccttctactctaatctttcggagaactgagtgtgggacctttaggaactctgaagaggaaaggacgccttgccctcagcagcctggtgcttcctggatgtggtccctgcctcttgtagccactggcatcatgttgaccgaagcactggaaaggccacatgtgatcctagtgaacctggctagaatgctgattgaatctatttaatttgaaacagcctttgaatacctatcacagt

SEQ ID NO: 4130 - protein, 416 aa, Rattus norvegicus
  ref <308>: DATABASE ACCESSION NUMBER: SWISS-Prot / Q02769
  ref <309>: DATABASE ENTRY DATE: 2002-06-15
MEFVKCLGHPEEFYNLLRFRMGGRRNFIPKMDRNSLSNSLKTCYKYLDQTSRSFAAVIQALDGDIRHAVCVFYLILRAMDTVEDDMAISVEKKIPLLRNFHTFLYEPEWRFTESKEKHRVVLEDFPTISLEFRNLAEKYQTVIADICHRMGCGMAEFLNKDVTSKQDWDKYCHYVAGLVGIGLSRLFSASEFEDPIVGEDTECANSMGLFLQKTNIIRDYLEDQQEGRQFWPQEVWGKYVKKLEDFVKPENVDVAVKCLNELITNALQHIPDVITYLSRLRNQSVFNFCAIPQVMAIATLAACYNNHQVFKGVVKIRKGQAVTLMMDATNMPAVKAIIYQYIEEIYHRVPNSDPSASKAKQLISNIRTQSLPNCQLISRSHYSPIYLSFIMLLAALSWQYLSTLSQVTEDYVQREH

SEQ ID NO: 4131 - DNA, 1673 bp, Homo sapiens
  ref <308>: DATABASE ACCESSION NUMBER: EMBL / S76822
  ref <309>: DATABASE ENTRY DATE: 2000-03-04
gccggtgagcgcctggggaccgcagaggtgagagtcgcgcccgggagtccgccgcctgcgccaggatggagttcgtgaaatgccttggccaccccgaagagttctacaacctggtgcgcttccggatcgggggcaagcggaaggtgatgcccaagatggaccaggactcgctcagcagcagcctgaaaacttgctacaggtatctcaatcagaccagtcgcagtttcgcagctgttatccaggcgctggatggggaaatgcgcaacgcagtgtgcatattttatctggttctccgagctctggacacactggaagatgacatgaccatcagtgtggaaaagaaggtcccgctgttacacaactttcactctttcctttaccaaccagactggcggttcatggagagcaaggagaaggatcgccaggtgctggaggacttcccaacgatctcccttgagtttagaaatctggctgagaaataccaaacagtgattgccgacatttgccggagaatgggcattgggatggcagagtttttggataagcatgtgacctctgaacaggagtgggacaagtactgccactatgttgctgggctggtcggaattggcctttcccgtcttttctcagcctcagagtttgaagaccccttagttggtgaagatacagaacgtgccaactctatgggcctgtttctgcagaaaacaaacatcatccgtgactatctggaagaccagcaaggaggaagagagttctggcctcaagaggtttggagcaggtatgttaagaagttaggggattttgctaagccggagaatattgacttggccgtgcagtgcctgaatgaacttataaccaatgcactgcaccacatcccagatgtcatcacctacctttcgagactcagaaaccagagtgtgtttaacttctgtgctattccacaggtgatggccattgccactttggctgcctgttataataaccagcaggtgttcaaaggggcagtgaagattcggaaagggcaagcagtgaccctgatgatggatgccaccaatatgccagctgtcaaagccatcatatatcagtatatggaagagatttatcatagaatccccgactcaaacccatcttctagcaaaacaaggcagatcatctccaccatccggacgcagaatcttcccaactgtcagctgatttcccgaagccactactcccccatctacctgtcgtttgtcatgcttttggctgccctgagctggcagtacctgaccactctctcccaggtaacagaagactatgttcagactggagaacactgatcccaaatttgtccatagctgaagtccaccataaagtggatttactttttttctctttatttttttcctactactttaatccctaaaagaacgctgtgtggctgggacctttaggaaagtgaaatgcaggtgagaagaacctaaacatgaaaggtaaagggtgcctcatcccagcaacctgtccttgtgggtgatgatcactgtgctgcttgtggctcatggcagagcattcagtgccacggtttaggtgaagtcgctgcatatgtgactgtcatgagatcctacttagtatgatcctggctagaatgataattaaaagtatttaatttgaagcaaaaaaaaaaaaaaaaaaaa

SEQ ID NO: 4132 - protein, 417 aa, Homo sapiens
  ref <308>: DATABASE ACCESSION NUMBER: SWISS-Prot / P37268
  ref <309>: DATABASE ENTRY DATE: 2002-06-15
MEFVKCLGHPEEFYNLVRFRIGGKRKVMPKMDQDSLSSSLKTCYKYLNQTSRSFAAVIQALDGEMRNAVCIFYLVLRALDTLEDDMTISVEKKVPLLHNFHSFLYQPDWRFMESKEKDRQVLEDFPTISLEFRNLAEKYQTVIADICRRMGIGMAEFLDKHVTSEQEWDKYCHYVAGLVGIGLSRLFSASEFEDPLVGEDTERANSMGLFLQKTNIIRDYLEDQQGGREFWPQEVWSRYVKKLGDFAKPENIDLAVQCLNELITNALHHIPDVITYLSRLRNQSVFNFCAIPQVMAIATLAACYNNQQVFKGAVKIRKGQAVTLMMDATNMPAVKAIIYQYMEEIYHRIPDSDPSSSKTRQIISTIRTQNLPNCQLISRSHYSPIYLSFVMLLAALSWQYLTTLSQVTEDYVQTGEH

SEQ ID NO: 4133 - DNA, 1662 bp, Rattus norvegicus; identical to SEQ ID NO: 4129
  ref <308>: DATABASE ACCESSION NUMBER: EMBL / M95591
  ref <309>: DATABASE ENTRY DATE: 2000-06-03

SEQ ID NO: 4134 - protein, 416 aa, Rattus norvegicus; identical to SEQ ID NO: 4130
  ref <308>: DATABASE ACCESSION NUMBER: SWISS-Prot / Q02769
  ref <309>: DATABASE ENTRY DATE: 2002-06-15

SEQ ID NO: 4135 - DNA, 1673 bp, Homo sapiens; identical to SEQ ID NO: 4131
  ref <308>: DATABASE ACCESSION NUMBER: EMBL / S76822
  ref <309>: DATABASE ENTRY DATE: 2000-03-04

SEQ ID NO: 4136 - protein, 417 aa, Homo sapiens; identical to SEQ ID NO: 4132
  ref <308>: DATABASE ACCESSION NUMBER: SWISS-Prot / P37268
  ref <309>: DATABASE ENTRY DATE: 2002-06-15

SEQ ID NO: 4137 - DNA, 1662 bp, Rattus norvegicus; identical to SEQ ID NO: 4129
  ref <308>: DATABASE ACCESSION NUMBER: EMBL / M95591
  ref <309>: DATABASE ENTRY DATE: 2000-06-03

SEQ ID NO: 4138 - protein, 416 aa, Rattus norvegicus; identical to SEQ ID NO: 4130
  ref <308>: DATABASE ACCESSION NUMBER: SWISS-Prot / Q02769
  ref <309>: DATABASE ENTRY DATE: 2002-06-15

SEQ ID NO: 4139 - DNA, 1673 bp, Homo sapiens; identical to SEQ ID NO: 4131
  ref <308>: DATABASE ACCESSION NUMBER: EMBL / S76822
  ref <309>: DATABASE ENTRY DATE: 2000-03-04

SEQ ID NO: 4140 - protein, 417 aa, Homo sapiens; identical to SEQ ID NO: 4132
  ref <308>: DATABASE ACCESSION NUMBER: SWISS-Prot / P37268
  ref <309>: DATABASE ENTRY DATE: 2002-06-15

SEQ ID NO: 4141 - DNA, 1662 bp, Rattus norvegicus; identical to SEQ ID NO: 4129
  ref <308>: DATABASE ACCESSION NUMBER: EMBL / M95591
  ref <309>: DATABASE ENTRY DATE: 2000-06-03

SEQ ID NO: 4142 - protein, 416 aa, Rattus norvegicus; identical to SEQ ID NO: 4130
  ref <308>: DATABASE ACCESSION NUMBER: SWISS-Prot / Q02769
  ref <309>: DATABASE ENTRY DATE: 2002-06-15

SEQ ID NO: 4143 - DNA, 1673 bp, Homo sapiens; identical to SEQ ID NO: 4131
  ref <308>: DATABASE ACCESSION NUMBER: EMBL / S76822
  ref <309>: DATABASE ENTRY DATE: 2000-03-04

SEQ ID NO: 4144 - protein, 417 aa, Homo sapiens; identical to SEQ ID NO: 4132
  ref <308>: DATABASE ACCESSION NUMBER: SWISS-Prot / P37268
  ref <309>: DATABASE ENTRY DATE: 2002-06-15

SEQ ID NO: 4145 - DNA, 1616 bp, Rattus norvegicus
  ref <308>: DATABASE ACCESSION NUMBER: EMBL / M95768
  ref <309>: DATABASE ENTRY DATE: 2000-03-04
atggcgctgagtgacctcctggaactcactctgctgctgctgctgcccctgctggagcggctctcggccgaggactgcccgtgctccgaggcttctctctgccgaccgatccgccaccaccgcgacttcgaggtctttgtgtttgatgttggacagaaaacctggaaatcttatgactggtcgcagattacgactgtggcagtttttggaaaatatgactcagaacttatgtgctatgctcattcgaaaggagccagggtagtgctaaaaggtgatgtggccctgaaggacatcattaatcctaccttcagagcgtcatggatagcgcaaaaagttgccttagccaaagcacaacacatggatggaattaatatagacatagaacaggaagttgattgctcgtcacctgaatatgaagcattgacagctttggtcagagaaaccacagagggtttccatcgtgagattgagggatcacaggtaacttttgatgtagcttggtcaccaaagggcatagacaaaaggtgctataattatactgggattgcggatgcctgcgactttctttttgtgatgtcttacgatgagcaaagtcagatctggtcagaatgtattgcagccgccaatgctccctacaatcagacattaactggatatggtgactacctcaggatgggcatcagccccaggaaacttgtaatgggtattccctggtatggctatgattacatttgcctaaacctctcaaaggatgatgtctgcgccattgcaaaggtccctttcagaggggctccttgcagtgatgctgcagggcatcaggtgccctacagggtcatcatgaagcaagtaaacagttctgtttctggaagccagtggaaccaagaccagcaagctccgtactataattacaaggatcccactggccgtttgcatcaggtgtggtacgataacccccggagcatctcactaaaggcagcattcgtcaaacactacggcttgcggggcattggcatgtggaacgcgaactgtctggactactcagatgacgctctagccagagagcaaacggaggaaatgtggggagccctgagaccacggctgtgatacatacagaggaatgtcttttgtcagacggttagatttgcaggactggcctgtgtaagcagatctacctcttcaagagataaaaatatatattttgtcatgttaccctaacttacttattggtctactcaatacacaggaaagaaataaagaaactattcatttgtacttggaaaatacatacatatcttaaatatccaggaatgtaaaagcaaaaacaagtcaacttactctattaaatattcctctgtttcagtattataattatattatattataattagaaaagttgcttttagaattccatgctgaatttttcctcctgttattaaaatatactgttaaaaaccaatagggatttttaaaaatgtataactagtagacaagtgaagatactggagaagggagtgcacatgaccatagtgtgttacacacatgtatagactatcatagtaaagcccattatttttataattaatatatgctaataaaagatgtgtaacttgaaatgg

SEQ ID NO: 4146 - protein, 367 aa, Rattus norvegicus
  ref <308>: DATABASE ACCESSION NUMBER: SWISS-Prot / Q01460
  ref <309>: DATABASE ENTRY DATE: 1999-07-15
MALSDLLELTLLLLLPLLERLSAEDCPCSEASLCRPIRHHRDFEVFVFDVGQKTWKSYDWSQITTVAVFGKYDSELMCYAHSKGARVVLKGDVALKDIINPTFRASWIAQKVALAKAQHMDGINIDIEQEVDCSSPEYEALTALVRETTEGFHREIEGSQVTFDVAWSPKGIDKRCYNYTGIADACDFLFVMSYDEQSQIWSECIAAANAPYNQTLTGYGDYLRMGISPRKLVMGIPWYGYDYICLNLSKDDVCAIAKVPFRGAPCSDAAGHQVPYRVIMKQVNSSVSGSQWNQDQQAPYYNYKDPTGRLHQVWYDNPRSISLKAAFVKHYGLRGIGMWNANCLDYSDDALAREQTEEMWGALRPRL

SEQ ID NO: 4147 - DNA, 1618 bp, Homo sapiens
  ref <308>: DATABASE ACCESSION NUMBER: Refseq / NM_004388
  ref <309>: DATABASE ENTRY DATE: 2000-11-01
atgtcccggccgcagcttcgacgctggcgcctcgtctctagcccgccgagcggcgtcccgggtctagcgctgctggcgctgctggcgctgctggcgctgcggctcgcggccgggaccgactgcccatgcccggagcctgagctctgccgcccgattcgccaccatccagatttcgaggtctttgtgtttgatgttggacagaaaacttggaaatcttatgattggtcacagattacaactgtggcaacatttggaaaatatgactcagaacttatgtgctacgctcattcaaaaggagccagagtagtacttaaaggagatgtatccttaaaggatatcattgatcctgctttcagagcatcctggatagctcaaaaacttaatttggccaaaacacaatatatggatggaattaatatagatatagagcaagaagttaattgtttatcacctgaatatgatgcattaactgctttagtcaaagaaactacagactctttccatcgtgaaattgagggatcacaggtaacctttgatgtagcttggtctccaaagaacatagacagaagatgctataattatactggaatcgcagatgcttgtgacttcctctttgtgatgtcttatgatgaacaaagtcagatctggtcagaatgtattgcagcagccaatgctccctataatcagacattaactggatataatgactacatcaagatgagcattaatcctaagaaacttgtaatgggtgttccttggtatggttatgattatacctgcctgaatctgtctgaggatcatgtttgtaccattgcaaaagtccctttccggggggctccttgtagtgacgctgcaggacgtcaggtgccctacaaaacgatcatgaagcaaataaatagttctatttctggaaacctatgggataaagatcagcgggctccttattataactataaagatcctgctggccactttcatcaagtatggtatgataaccctcagagtatttctttaaaggcaacatatatacaaaactatcgcttacggggcattggcatgtggaatgcaaactgtcttgactactctggagatgctgtagccaaacagcaaactgaagaaatgtgggaagtcttaaagccaaagctgttacagagatgaacatcttttgtcaaaccattaagagttagaaagatgatctgtatcaacagatctagtttcttgcatttttattatgttgctatatacttttgttatccgtatactaaaaaaaaagaataaataaatgttttgattgtttgaatttgaaaaatacacacgaatgtcctcagtatccaggaacataaaggcaagaagcaagtcaacttacctattaaatattcctctattagatgtttcaacactataatttaattgggaaaaattgctttcagaattttattatgccatatttcccttcattatagtaaaatatatgctcacgaatcaatgctgatttttaaaatatgtataatctgaagtggaaattgtttgcttagagtttttaaaaacctagtctttgaaaagcagtttgtgctatacttttcccccaaccctccaataaatcttaaatttaaaacct

SEQ ID NO: 4148 - protein, 385 aa, Homo sapiens
  ref <308>: DATABASE ACCESSION NUMBER: SWISS-Prot / Q01459
  ref <309>: DATABASE ENTRY DATE: 2001-10-16
MSRPQLRRWRLVSSPPSGVPGLALLALLALLALRLAAGTDCPCPEPELCRPIRHHPDFEVFVFDVGQKTWKSYDWSQITTVATFGKYDSELMCYAHSKGARVVLKGDVSLKDIIDPAFRASWIAQKLNLAKTQYMDGINIDIEQEVNCLSPEYDALTALVKETTDSFHREIEGSQVTFDVAWSPKNIDRRCYNYTGIADACDFLFVMSYDEQSQIWSECIAAANAPYNQTLTGYNDYIKMSINPKKLVMGVPWYGYDYTCLNLSEDHVCTIAKVPFRGAPCSDAAGRQVPYKTIMKQINSSISGNLWDKDQRAPYYNYKDPAGHFHQVWYDNPQSISLKATYIQNYRLRGIGMWNANCLDYSGDAVAKQQTEEMWEVLKPKLLQR

SEQ ID NO: 4149 - DNA, 2462 bp, Rattus norvegicus
  ref <308>: DATABASE ACCESSION NUMBER: EMBL / M96375
  ref <309>: DATABASE ENTRY DATE: 2000-03-04
ttttttttctcttttctttcttttctttttcttttcttttttcacctctccgctttctcatctgctcctgcttttcctctgctcgattcccccagttcgatcccagctatcttcacaagggtgccctcttccctctgaacccatcgccgggcgtaagtgtcaggaggcggcggactcggagattgcctctggagcaggcgatgcgcgccgctgctctgcgcgctgcccgggggaggctggcgggagctggagagctggccagggctgaatggagggaaggggtgcctcgcgtccatggggtctgcttctctcctgaaaggaggctggaccggcgaagtggtctccccgttccccacgcacaatgctaaatggatttacctagtggattcccggtggatggctgtcatgtagaagtgaagaccctccgggaggagctttaaacaatttccaggctccccaaccccggcacacactctcacccgaaactcttggggagtatctctggagaacctggaaccctgcaaacctgggagcagccaccctctctgcgcttgctgttcttcggggctgcctttctggacaagtcccccctgccagctgcattcacctcggctatgtttcggattgtttggggtgtagggtacggcagactccagcacctcgagaagactgtccgaaagagggagaggatgggtgccctggcgcggtgaggcggccagccccgcagcccaccgcgagcagccggattcccggcttcctcgcctcttcttgtgccccaaactttgtctcccgcggcggctgccccttggcgggcgccccgccatgtaccagaggatgctccggtgcggtgccgagctgggatcgcccggaggcggcagtagtggcggcgcaggggggcgcctggccctgctctggatagtcccgctcaccctcagcggcctcctaggagtggcctggggggcatccagtttgggagcgcaccacatccaccatttccatggcagcagcaagcatcattcagtgcctattgcaatctacaggtcaccagcatccttgcgaggcggacacgctgggacgacgtatatctttagcaaaggtggtggacaaattacatataagtggcctcctaatgaccgacccagtacacgagcagacaggctggccatcgggtttagcactgttcagaaggaagcagtgttggtgcgtgtggacagttcctcaggcctgggtgactaccttgagctgcacatacaccaaggaaaaattggagttaaatttaatgttgggacagatgacatcgccattgaggagtccaatgcaatcattaatgatggaaaataccatgtagtgcgtttcacgaggagtggtggcaatgccacgttacaggtggacagctggccagtcatcgaacgataccctgcaggaaacaatgataacgagcgcctggcgattgctagacagcgaattccatatcgacttggtcgagtagttgatgaatggctactcgacaaagggcgtcagctcacaatcttcaatagccaagcaaccataataattggcgggaaagagcagggccagcccttccagggccagctctctgggctttactacaatggcttgaaagttctgaatatggcggcagagaacgatgccaacatcgccatagtgggaaatgtgaggctggtcggtgaagtgccttcctctatgacaactgagtcgacagccactgccatgcagtccgagatgtccacctcaatcatggagaccaccacaaccctggctaccagcacagctcgacgaggaaagccccccacaaaggagcctatcagccagaccacggatgatatccttgtggcctcggcagagtgtcccagcgacgatgaggacattgacccctgtgagccgagctcaggtgggttagccaaccccacccgagtgggcggccgcgaaccatacccaggctcggcagaggtgatccgggagtctagcagtaccactggcatggtggtggggattgtcgcagcagcagctctgtgcatcctcatcctcctctatgccatgtacaagtacagaaaccgggatgaaggctcatatcacgtggatgagagtcgaaactacatcagtaactcagcacagtccaatggggctgtggtcaaggagaagcagcccagcagtgcgaaaagcgccaacaaaaacaagaagaacaaggataaggagtattatgtctgatctcaagattcgaaaaggacacttgtatagaaatagtcttcattttatctgagacataatataaacttatttactttcctttttatgaagcacatacaaaagaagacagggaatgcgatcaggagggaaaactctttttaaaaaaaaacaaacaagtatgtcatgctcttgtttctcaaaaaaaaaacatacacaaaaaaaaggaaagagagaaaaaaaaaaaaaaggaattc

SEQ ID NO: 4150 - protein, 468 aa, Rattus norvegicus
  ref <308>: DATABASE ACCESSION NUMBER: SWISS-Prot / Q63373
  ref <309>: DATABASE ENTRY DATE: 2002-06-15
MYQRMLRCGAELGSPGGGSSGGAGGRLALLWIVPLTLSGLLGVAWGASSLGAHHIHHFHGSSKHHSVPIAIYRSPASLRGGHAGTTYIFSKGGGQITYKWPPNDRPSTRADRLAIGFSTVQKEAVLVRVDSSSGLGDYLELHIHQGKIGVKFNVGTDDIAIEESNAIINDGKYHVVRFTRSGGNATLQVDSWPVIERYPAGNNDNERLAIARQRIPYRLGRVVDEWLLDKGRQLTIFNSQATIIIGGKEQGQPFQGQLSGLYYNGLKVLNMAAENDANIAIVGNVRLVGEVPSSMTTESTATAMQSEMSTSIMETTTTLATSTARRGKPPTKEPISQTTDDILVASAECPSDDEDIDPCEPSSGGLANPTRVGGREPYPGSAEVIRESSSTTGMVVGIVAAAALCILILLYAMYKYRNRDEGSYHVDESRNYISNSAQSNGAVVKEKQPSSAKSANKNKKNKDKEYYV

SEQ ID NO: 4151 - DNA, 3069 bp, Homo sapiens
  misc_feature (1)..(3069): n=a, c, g or t
  ref <308>: DATABASE ACCESSION NUMBER: EMBL / AF064842
  ref <309>: DATABASE ENTRY DATE: 2000-03-03
cttttttctttttctttttctttttctgtttctctcccttactccttcgtctgcatcttcttctcagctgcctttccgccgttcgattcccacttccttcagaagggcgcactcttgcctctgaacccctcgccgggcgtaagtgtcaggaggcggcggacgcggagattgcctcgggagcaggcgatgcgcgccgctgctccgcgcgctgcccgggggaggctggcgctagcgggcgagccggccggggctgaatggagggaaggggcgcctggattccatggggtctgcttctgtcttgaaaggaggttgggccggcgaagtggcctccctagtccccgcacacaaagctaaatggatttacctagtggattcgcggtggatgtctgtcatgtagaagtgaggacctccaggaggagctttaaacaatttctcggccccccacccgccggcacgcactctcgcccgaaactctttgggagtatctctcgagaacctggagccctggaaatctgggagcagccacccgctccgcgcttgctgttcccggggctgcctttccggacaagcccctctccagctgcattcgcctcggctatgtttcggattgtttggggtgctaggcacggcggactccaggaccccgagaagactgtccgaaggagggagaggatgggtgccctggcgcggtgaggcggccggcccctcagcccactccgcgccgcccgctcccctgcgccctctcctctccccgcgccccaaactttgcctcccgcggcggctgcccctcggcgggcgccccgccatgtaccagaggatgctccggtgcggcgccgagctgggctcgcccgggggcggcggccgcggcggcggcggcggcggcgcaggggggcgcctggccctgctttggatagtcccgctcaccctcagcggcctcctacgagtggcgtggggggcatccagttttgggagcgcaccacatccaccatttccatggcagcagcaagcatcattcagtgcctattgcaatctacaggtcaccggcatccttgcgaggcggacacgctgggacgacatatatctttagcaaaggtggtggacaaatcacgtataagtggcctcctaatgaccgacccagtacacgagcagacagactggccataggttttagcactgttcagaaagaagccgtattggtgcgagtggacagttcttcaggcttgggtgactacctagaactgcatatacaccagggaaaaattggagttaagtttaatattgggacagatgacatcgccattgaagaatccaatgcaatcattaatgatgggaaataccatgtagttcgtttcacgaggagtggtggcaatgccacgttgcaggtggacagctggccagtgatcgagcggtaccctgcagggcgtcagctcacaatcttcaatagccaagcaaccataataattggcgggaaagagcagggccagcccttccagggccagctctctgggctgtactacaatggcttgaaagttctgaatatggcagccgaaaacgatgccaacatcgccatagtgggagatgtgagactggttggtgaagtgccttcctctntgacaactgagtcaacagccactgccatgcaatcagagatgtccacatcaattatggagactaccacgaccctggctactagcacagccagaagaggaaagcccccgacaaaagaacccattagccagaccacaggtgacatccttgtggcctcagcagagtgtcccagcgatgatgaggacattgacccctgtgagccgagctcaggtgggttagccaacccaacccgagcaggcggcagagagccgtatccaggctcagcagaagtgatccgggagtccagcagcaccacgggtatggtcgttgggatagtagccgctgccgccctgtgcatccttatcctcctctgtgccatgaacaagtgcagaaaccgggatgaaggctcataccatgtggacgagagtcgaaactacatcagtaactcagcacagtccaatggggctgttgtaaaggagaaacaacccagcagtgcgaaaagctccaacaaaaataagaaaaacaaggataaagagtattatgtctgatcccaagatcttaaatggacacttgtatagaaatagtcttcattttatctgagacataatataaacttatttactttcctttttatgaagcacatacaaaagaagacagggaatgcaatcaggaaggaaagactttttaaaaaataaaaacaagtatctcatgctcttgtttctcaaaaaagaaaaacaaaaaacaaaaaacagggggccaataaattccctaacatccacagtgttttcatttactctgcttgtctttatgttgctgggacatttctaaaagacagtgatgaccgcacgcattcataaagcaaaggagtagtacagcatcaaggcacgacacaaaaaccaacacaaaacataacacaaaaaagaagctacctatgatcctggatttagccaaagtgctagcgctttcctgagaagtcagtccaattgccagagaagactgtccttttgagtgactcaacctgcaaacctttaagagtttgccgcctggtgcaactggagcagtggttggcacttgcatatgaaacaaagtgctggcttttttgaagacttgtgtaggaacacattcaaaaagcccctttctggttgtgagagaggaaaaaaaagtatggaggccttattttcaaaaatgtgaaatataaggcacgttttcacacaaaatttcaaaacaaaaacaagagggcatagatgcaatcattgggaaattttcatgcacgcttattatgttattacatatgtttatataaaatccatctctgtgtgctttctggactgtgataagtgacgttttatagcctgttgtatagaaaatgcgaaatatatctctgctcttcagccatttttggtaaagtcaatgttataagtgttgctaagtatagggagttttatgacatcagagcaacaattatttcagttggatttttcg

SEQ ID NO: 4152 - protein, 442 aa, Homo sapiens
  misc_feature (1)..(442): Xaa=Unknown amino acid
  ref <308>: DATABASE ACCESSION NUMBER: SWISS-Prot / P58400
  ref <309>: DATABASE ENTRY DATE: 2002-06-15
MYQRMLRCGAELGSPGGGGGGGGGGGAGGRLALLWIVPLTLSGLLGVAWGASSLGAHHIHHFHGSSKHHSVPIAIYRSPASLRGGHAGTTYIFSKGGGQITYKWPPNDRPSTRADRLAIGFSTVQKEAVLVRVDSSSGLGDYLELHIHQGKIGVKFNIGTDDIAIEESNAIINDGKYHVVRFTRSGGNATLQVDSWPVIERYPAGRQLTIFNSQATIIIGGKEQGQPFQGQLSGLYYNGLKVLNMAAENDANIAIVGDVRLVGEVPSSXTTESTATAMQSEMSTSIMETTTTLATSTARRGKPPTKEPISQTTGDILVASAECPSDDEDIDPCEPSSGGLANPTRAGGREPYPGSAEVIRESSSTTGMVVGIVAAAALCILILLCAMNKCRNRDEGSYHVDESRNYISNSAQSNGAVVKEKQPSSAKSSNKNKKNKDKEYYV

SEQ ID NO: 4153 - DNA, 2489 bp, Rattus norvegicus
  ref <308>: DATABASE ACCESSION NUMBER: EMBL / M96601
  ref <309>: DATABASE ENTRY DATE: 2000-03-04
gccaacgccgcgatcgccgccaatcccgccagcctcgggccgggccatccgctgtgggcttagccacccagatgcagagccagtgccacagcctcttcagaggagcctctcaagcaaaacgaggagatggccaccaaggagaagcttcaatgtctgaaagacttccacaaagacatcctgaagccttctccagggaagagcccaggcacgcggcctgaggatgaggctgatgggaagccccctcagagggagaagtggtccagcaagatcgactttgtgctgtctgtggccggaggcttcgtgggtttgggcaatgtctggcgtttcccgtacctctgctacaaaaatggtggaggtgcattcctcataccgtattttattttcctgtttgggagcggcctgcctgtgtttttcctggaggtcatcataggccagtacacctcagaagggggcatcacctgctgggagaagatctgccccttgttctctggcattggctacgcgtccatcgtcatcgtgtccctcctgaatgtgtactacatcgtcatcctggcctgggccacatactacctattccagtctttccagaaggatcttccctgggcccactgcaaccatagctggaacacgccacagtgcatggaggacaccctgcgtaggaacgagagtcactgggtctcccttagcgccgccaacttcacttcgcctgtgatcgagttctgggagcgcaacgtgctcagcctgtcctccggaatcgaccacccaggcagtctgaaatgggacctcgcgctctgcctcctcttagtctggctcgtctgttttttctgcatctggaagggtgttcggtccacaggcaaggttgtctacttcactgctactttcccgtttgccatgcttctggtgctgctggtccgtggactgaccctgccaggtgctggtgaaggcatcaaattctacctgtaccctaacatcagccgccttgaggacccacaggtgtggatcgacgctggaactcagatattcttttcctacgctatctgcctgggggccatgacctcactgggaagctataacaagtacaagtataactcgtacagggactgtatgctgctgggatgcctgaacagtggtaccagttttgtgtctggcttcgcaattttttccatcctgggcttcatggcacaagagcaaggggtggacattgctgatgtggctgagtcaggtcctggcttggccttcattgcctacccaaaagctgtgaccatgatgccgctgcccaccttttggtccattctgttttttattatgctcctcttgcttggactggacagccagtttgttgaagtcgaaggacagatcacatccttggttgatctttacccgtccttcctaaggaagggttatcgtcgggaaatcttcattgccatcgtgtgcagcatcagctacctgctggggctgacgatggtgacggagggtggcatgtatgtgtttcaactctttgactactatgcagctagtggtgtatgccttttgtgggtcgcattctttgaatgttttgttattgcctggatatatggcggtgataacttatatgacggtattgaggacatgatcggctatcggcctggaccctggatgaagtacagctgggctgtcatcactccagctctctgtgttggatgtttcatcttctctctcgtcaagtatgtacccctgacctacaacaaagtctaccggtaccctgattgggcaatcgggctgggctggggcctggccctttcctccatggtgtgtatccccttggtcattgtcatcctcctctgccggacggagggaccgctccgcgtgagaatcaaatacctgataacccccagggagcccaaccgctgggctgtggagcgtgaaggggctacgccctttcactccagagcaaccctcatgaacggtgcactcatgaaacccagtcacgtcattgtggagaccatgatgtgaggtccgggctgtgtgaccggcgccgctttcctgccgtttactaaccttagattctcctaggaccaggtttacagagctttatatttgtactaggattttttttttaattgtcacagaaaatgttactctgtgtgtgtgtgtgtgtgtgtgtgtgtgtgtgtgtgtgtgtgtgtttcgtgtgtgtctgtatatgtgtattttgttttatttgggggattattttgtacaaaaagaaaacccatgggcctatgtcctggggggagaggatggactttcatattgattttgatgtattttatgggaacttggtaaatttttctttgtatttttttaacatataactatatatagagtctgtcatacactttgccacttgaattggtcttgccagcaacggatctcgttttttgttttttgtttttttttcaaaagcaattcttcggtgcttacatagctggcagagagttctgcccaaaaacaaatgaaaaaaaaaaaaa

SEQ ID NO: 4154 - protein, 621 aa, Rattus norvegicus
  ref <308>: DATABASE ACCESSION NUMBER: SWISS-Prot / P31643
  ref <309>: DATABASE ENTRY DATE: 2001-10-16
MATKEKLQCLKDFHKDILKPSPGKSPGTRPEDEADGKPPQREKWSSKIDFVLSVAGGFVGLGNVWRFPYLCYKNGGGAFLIPYFIFLFGSGLPVFFLEVIIGQYTSEGGITCWEKICPLFSGIGYASIVIVSLLNVYYIVILAWATYYLFQSFQKDLPWAHCNHSWNTPQCMEDTLRRNESHWVSLSAANFTSPVIEFWERNVLSLSSGIDHPGSLKWDLALCLLLVWLVCFFCIWKGVRSTGKVVYFTATFPFAMLLVLLVRGLTLPGAGEGIKFYLYPNISRLEDPQVWIDAGTQIFFSYAICLGAMTSLGSYNKYKYNSYRDCMLLGCLNSGTSFVSGFAIFSILGFMAQEQGVDIADVAESGPGLAFIAYPKAVTMMPLPTFWSILFFIMLLLLGLDSQFVEVEGQITSLVDLYPSFLRKGYRREIFIAIVCSISYLLGLTMVTEGGMYVFQLFDYYAASGVCLLWVAFFECFVIAWIYGGDNLYDGIEDMIGYRPGPWMKYSWAVITPALCVGCFIFSLVKYVPLTYNKVYRYPDWAIGLGWGLALSSMVCIPLVIVILLCRTEGPLRVRIKYLITPREPNRWAVEREGATPFHSRATLMNGALMKPSHVIVETMM

SEQ ID NO: 4155 - DNA, 3958 bp, Homo sapiens
gaaagcaaggagatggccaccaaggagaagctgcagtgtctgaaagatttccacaaggacatcctgaagccctcaccagggaagagcccaggcacgcggcctgaggacgaggctgagggaaaacctccgcagagggagaagtggtctagcaagatcgactttgtgctctctgtggctggcggcttcgtgggcttgggcaacgtctggcgcttcccgtacctctgctacaagaatggtggaggtgcgtttctcataccgtattttattttcctgtttgggagcggcctgcctgtgtttttcttggagatcatcataggccagtacacctctgaagggggcatcacctgctgggaaaagatctgccccttgttctctggtatcggctatgcctccgttgtaattgtgtccctcctgaatgtctactacatcgtcatcctggcctgggccacatactacctgttccagtccttccagaaggagctgccctgggcacactgcaaccacagctggaacacacctcactgcatggaggacaccatgcgcaagaacaagagtgtctggatcaccatcagctccaccaacttcacctcccctgtcatcgagttctgggagcgcaacgtgctgagcttgtcccctggaatcgaccacccaggctctctgaaatgggacctcgctctctgccttcttttagtctggctagtgtgtttcttctgcatctggaagggcgtcaggtccactgggaaggtcgtctacttcacagccacttttccattcgccatgctcctggtgctgctggtccgagggctgacgctgccgggcgcgggcgcaggcatcaagttctatctgtatcctgacatcacccgccttgaggacccacaggtgtggattgacgctgggactcagatattcttctcttatgccatctgcctgggggctatgacctcgctggggagctacaacaagtacaagtataactcgtacagggactgtatgctgctgggatgcctgaacagtggtaccagttttgtgtctggcttcgcaattttttccatcctgggcttcatggcacaagagcaaggggtggacattgctgatgtggctgagtcaggtcctggcctggccttcattgcctacccaaaagctgtgacaatgatgccgctgcccacattttggtccattcttttttttattatgcttctcttgcttggactggatagccagtttgttgaagttgaaggacagatcacatccttggttgatctttacccatccttcctaaggaagggttatcgtcgggaaatcttcatcgccttcgtgtgtagcatcagctacctgctggggctgacgatggtgacggagggtggcatgtatgtgtttcagctctttgactactatgcagctagcggtgtatgccttttgtgggttgcattctttgaatgttttgttattgcctggatatatggaggtgataacctttatgatggtattgaggacatgattggctatcggcccgggccctggatgaagtacagctgggctgtgatcactccagttctctgtgttggatgtttcatcttctcgctcgtcaagtacgtacccctgacctacaacaaaacatacgtgtaccccaactgggccattgggctgggctggagcctggccctttcctccatgctctgcgttcccttggtcatcgtcatccgcctctgccagactgaggggccgttccttgtgagagtcaagtacctgctgaccccaagggaacccaaccgctgggctgtggagcgcgagggagccacaccttacaactctcgcaccgtcatgaacggcgctctcgtgaaaccgacccacatcattgtggagaccatgatgtgagctctctcgggtcgacggggccggcggctttcctgctgtttactaacattagattctcataggaccaggtttacagagctttatatttgcactaggatttttttttttttgtaattgtcacagaaaatgtaattgtgggtatgtgtgcgtgcgtgtgtgtgtgtgtgtgtatcgtgtgtgtgtgttttgttttgatttgggggatattttgtacaaaaagaaaacccacgggaagatgtccgtggagaggcagagctttcatactgaattagatgtattttatgggaatttggtaaatttttctttgtatttttttttttacatataagtatatatacacttagagattgtcatatacttttaccacttgaattgatcttcttgccagcaatagatctcattttcaaaagcaattcttcggtgctgtgtagctggcagaaagttctgtccagtaaacgcaggatggaattttcctgggactctacacccatcttaaggtggtataccttccaaatcctggttcagatggaagaaatagcaggagagaggacccattagctggcagacccagggggaagaaaggagggctgtgaggagatacctcattaaacttggcttagtgaagaagagagatgccaaaggaatgaaccaacccttcacataaaggagactggctgaagctgaatgaggaggccctatagcagaagtctgattctaagagcagtagaaacttgtaccagaagcaaaatcccacttttaattttgagatggtgagtggatagtcagtagaccgtcagaaccactggccagagagggagctgctagagatccaagaaggctggcaggagtgaggctcacaactcagcctcgcaagaggtggcagaggcacaggaggccacagtccttcctggggcattccaggcagagaaggagcagaggctctcccggcaggagctggggtctcagggctcagatgagtctgttgcatttgaatggggtcatagcaggttctggtcattccccaagcaacatctcagcatctcttaaagttgcctgcaggaatgaagcatgacatacctgttgagggactaggggagtggtggggaggtgagtggaccaaaggatataggccccaggcatgcagatgggcccggtgtcggggaggggtgctttctttcctcatctccccactccccactctcagcctgggagactcctgccaagccctcattaaagatgccaccctgggctgccctggcacctagcaaggcacaccaagaacagcttttgagtctgtatcctccactgggggaagtgctcccagttcagaacaagggcagcccgtggtgctgacctaggatataacaaagctcttcacttcaaaacccctgcaatagctgggtttacagacatttaccacctgcggacccaaaagagaaggcctaggagagttttctagaaggttgggattgtcagggtcctggcccctcagaactggcttgatcaagggccttatgtggagcagaggttgtctctgaaccaggagagaaggtactatacctttcaaatccccagggcagacacacccccacccagcccctatttggacctaaactgtgccatttgaacagtcacttccaagctcagtctaaatgaaaccgaaacgtgaccacgcacaaaggcagtcactgcctcgaggggtgcagaccgcagaattttcacagcaggggctcttggaaccctggaaacccccttcttaaatttgggaggaggagtatgcctttggtgtccccctcccaaggggcaattctgaaccccatctttggcaggcatacatatttcactgtttccaaagctatctactctgccaaacaacacccagtcctattccaaactctcaacgattctatcttgttcctgtttttctatgtatttatggttgccgtttgtgtctgatttgattttactgttttttccctgattttatggagtagcattgtgacctgttttcctttgtcttatataactttagtaaactaaccactgtcaatgattgagggcaggtggcacgtggggaagaggg

SEQ ID NO: 4156 - protein, 620 aa, Homo sapiens
MATKEKLQCLKDFHKDILKPSPGKSPGTRPEDEAEGKPPQREKWSSKIDFVLSVAGGFVGLGNVWRFPYLCYKNGGGAFLIPYFIFLFGSGLPVFFLEIIIGQYTSEGGITCWEKICPLFSGIGYASVVIVSLLNVYYIVILAWATYYLFQSFQKELPWAHCNHSWNTPHCMEDTMRKNKSVWITISSTNFTSPVIEFWERNVLSLSPGIDHPGSLKWDLALCLLLVWLVCFFCIWKGVRSTGKVVYFTATFPFAMLLVLLVRGLTLPGAGAGIKFYLYPDITRLEDPQVWIDAGTQIFFSYAICLGAMTSLGSYNKYKYNSYRDCMLLGCLNSGTSFVSGFAIFSILGFMAQEQGVDIADVAESGPGLAFIAYPKAVTMMPLPTFWSILFFIMLLLLGLDSQFVEVEGQITSLVDLYPSFLRKGYRREIFIAFVCSISYLLGLTMVTEGGMYVFQLFDYYAASGVCLLWVAFFECFVIAWIYGGDNLYDGIEDMIGYRPGPWMKYSWAVITPVLCVGCFIFSLVKYVPLTYNKTYVYPNWAIGLGWSLALSSMLCVPLVIVIRLCQTEGPFLVRVKYLLTPREPNRWAVEREGATPYNSRTVMNGALVKPTHIIVETMM

SEQ ID NO: 4157 - DNA, 609 bp, Rattus norvegicus
  ref <308>: DATABASE ACCESSION NUMBER: EMBL / M96626
  ref <309>: DATABASE ENTRY DATE: 2000-03-04
gaattcagattgtcattgtccaatttggagggaagcccttcagctgttccccactgtccacagaacagtggctctggtgtctttttgttggtgttggggagctggtctggggacaggtcattgccactatccccaccagccagctcaagtgcctgaaggaagcagggcatgggcctgggaaggatgagatgactgatgaagagttggcggaaggggaagaagaaattgaccatgctgagcgagagctccgcagaggccagatcctctggtttcggggcctcaaccggatccagacacaggtgtgttgggacggaaaaaaaatgttgagaactaccgaagtaggataaggaagtattgccaaacacagatggaggtagtgagtaccttcaagagaagcgggtcatttcagggtgctgtgcgccggcggtcttcggtcctcagccagctccatgacgtaaccaatctttctacccctactcacgtaactctctctgccgccaagcccaccagcgctgctggcagtgagtcttgacttcccttttctctcataaatggcacctgggggaagataaagcctccccgactctgccttctcttttccagtcttgc

SEQ ID NO: 4158 - protein, 1258 aa, Rattus norvegicus; identical to SEQ ID NO: 2602
  ref <308>: DATABASE ACCESSION NUMBER: SWISS-Prot / Q64568
  ref <309>: DATABASE ENTRY DATE: 2001-10-16

SEQ ID NO: 4159 - DNA, 257 bp, Homo sapiens
  ref <308>: DATABASE ACCESSION NUMBER: EMBL / U15689
  ref <309>: DATABASE ENTRY DATE: 2000-03-04
cagacgcaggtgtgttgggacggaaaaaaaatgttgagaactaccgaagtaggataaggaagtattgccaaacacagatggaggtagtgagtaccttcaagagaagcggttcagttcagggtgctgtgcgccggcggtcttcggtcctcagccagcttcatgacgtaaccaatctttctacccctactcacgcaattctctctgctgccaatcctaccagtgctgctgggaatccgggtggtgaaagcgttccgtag

SEQ ID NO: 4160 - protein, 1220 aa, Homo sapiens [sequence omitted]

SEQ ID NO: 4161 - DNA, 609 bp, Rattus norvegicus; identical to SEQ ID NO: 4157
  ref <308>: DATABASE ACCESSION NUMBER: EMBL / M96626
  ref <309>: DATABASE ENTRY DATE: 2000-03-04

SEQ ID NO: 4162 - protein, 1258 aa, Rattus norvegicus; identical to SEQ ID NO: 2602
  ref <308>: DATABASE ACCESSION NUMBER: SWISS-Prot / Q64568
  ref <309>: DATABASE ENTRY DATE: 2001-10-16

SEQ ID NO: 4163 - DNA, 257 bp, Homo sapiens; identical to SEQ ID NO: 4159
  ref <308>: DATABASE ACCESSION NUMBER: EMBL / U15689
  ref <309>: DATABASE ENTRY DATE: 2000-03-04

SEQ ID NO: 4164 - protein, 1220 aa, Homo sapiens [sequence omitted]

SEQ ID NO: 4165 - DNA, 609 bp, Rattus norvegicus; identical to SEQ ID NO: 4157
  ref <308>: DATABASE ACCESSION NUMBER: EMBL / M96626
  ref <309>: DATABASE ENTRY DATE: 2000-03-04

SEQ ID NO: 4166 - protein, 1258 aa, Rattus norvegicus; identical to SEQ ID NO: 2602
  ref <308>: DATABASE ACCESSION NUMBER: SWISS-Prot / Q64568
  ref <309>: DATABASE ENTRY DATE: 2001-10-16

SEQ ID NO: 4167 - DNA, 257 bp, Homo sapiens; identical to SEQ ID NO: 4159
  ref <308>: DATABASE ACCESSION NUMBER: EMBL / U15689
  ref <309>: DATABASE ENTRY DATE: 2000-03-04

SEQ ID NO: 4168 - protein, 1220 aa, Homo sapiens [sequence omitted]

SEQ ID NO: 4169 - DNA, 609 bp, Rattus norvegicus; identical to SEQ ID NO: 4157
  ref <308>: DATABASE ACCESSION NUMBER: EMBL / M96626
  ref <309>: DATABASE ENTRY DATE: 2000-03-04

SEQ ID NO: 4170 - protein, 1258 aa, Rattus norvegicus; identical to SEQ ID NO: 2602
  ref <308>: DATABASE ACCESSION NUMBER: SWISS-Prot / Q64568
  ref <309>: DATABASE ENTRY DATE: 2001-10-16

SEQ ID NO: 4171 - DNA, 257 bp, Homo sapiens; identical to SEQ ID NO: 4159
  ref <308>: DATABASE ACCESSION NUMBER: EMBL / U15689
  ref <309>: DATABASE ENTRY DATE: 2000-03-04

SEQ ID NO: 4172 - protein, 1220 aa, Homo sapiens [sequence omitted]

SEQ ID NO: 4173 - DNA, 3083 bp, Rattus norvegicus
  ref <308>: DATABASE ACCESSION NUMBER: EMBL / M96853
  ref <309>: DATABASE ENTRY DATE: 2000-03-04
gcaaaactccaatgaagtcagagccccctactcgccgccgcggccaggccccccaacatggactgtctctgtatagtgacaaccaagaaataccgctaccaagatgaagacacgccccctctggaacacagcccggcccacctccccaaccaggccaattctccccctgtgattgtcaacacggacaccctagaagccccaggatatgagttgcaggtgaatggaacagagggggagatggagtatgaggagatcacattggaaaggggtaactcaggtctgggcttcagcatcgcaggtggcactgacaacccgcacatcggtgacgacccgtccatttttatcaccaagatcattcctggtggggctgcagcccaggatggccgcctcagggtcaatgacagcatcctgtttgtaaatgaagtggatgttcgggaggtgacccattcagctgcggtggaggccctcaaagaggcaggttccatcgttcgcctctatgtcatgcgccggaaacccccagccgaaaaggtcatggagatcaaactcatcaaagggcctaaaggacttggcttcagcattgcggggggcgttgggaaccagcacatccctggagataacagcatctatgtaacgaagatcatcgaaggaggtgctgcccacaaggatggcaggttgcagattggagacaagatcctggcggtcaacagtgtggggctggaggacgtcatgcacgaggatgccgtggcagccctgaagaacacatatgacgttgtgtacctaaaggtggccaagcccagcaatgcctacctgagtgacagctatgctcccccagacatcacaacctcgtattctcagcacctggacaatgagatcagtcatagcagctacttgggcactgactaccccacagccatgacccccacttcccctcggcgctactcccctgtggccaaggacctgctgggggaggaagacattccccgggaaccaaggcggatcgtgatccatcggggctccaccggcctgggcttcaacatcgtgggcggcgaggatggtgaaggcatcttcatctccttcatccttgctgggggtccagccgacctcagtggggagctacggaagggggaccagatcctgtcggtcaatggtgttgacctccgcaatgccagtcacgaacaggctgccattgccctgaagaatgcgggtcagacggtcacgatcatcgctcagtataaaccagaagagtatagtcgattcgaggccaagatccatgatcttcgggaacagctcatgaatagtagcctaggctcagggactgcatccttgcgaagcaaccccaagaggggcttctacattagggccctgtttgattacgacaagaccaaggactgcggtttcttgagccaggccctgagcttccgcttcggggatgtgcttcatgtcattgacgctggtgacgaagagtggtggcaagcacggcgggtccactccgacagtgagaccgacgacattggcttcattcccagcaaacggcgggtcgagcgacgagagtggtcaaggttaaaggccaaggactggggctccagctctggatcacagggtcgagaagactcggttctgagctatgagacggtgacccagatggaagtgcactatgctcgtcccatcatcatccttggacccaccaaagaccgtgccaacgatgatcttctctccgagttccccgacaagtttggatcctgtgtccctcatacgacacgtcctaagcgggaatatgagatagacggccgggattaccactttgtctcctcccgggagaaaatggagaaggacatccaggcacacaagttcattgaggctggccagtacaacagccacctctatgggaccagcgtccagtctgtgcgagaggtagcagagcaggggaagcactgcatcctcgatgtctcggccaatgccgtgcggcggctgcaggcggcccacctgcaccccatcgccatcttcatccgtccccgctccctggagaatgtgctagagatcaataagcggatcacagaggagcaagcccggaaagccttcgacagagccacgaagctggagcaggagttcacagagtgcttctcagccatcgtagagggcgacagctttgaagagatctatcacaaagtgaaacgtgtcattgaagacctctcaggcccctacatctgggtcccagcccgagagagactctgattcctgccctggcttggcctggactcaccctgcctccaccacatgggcccttggtgtggactgaatagcccaagtcctttgtaccccagcctcccttcccacccttcttatttatttcctttctaactggatcgagcccactggaggggggacactcctctgcatgtatccctgcaacccagatcagggcccctggaccccaagaacctggggtctgggggaggggagctgggctcctggttccgagcccttgctccttaggacccctacccccgcccgcccccatgcacacatagacccactgggggcctctgccctccccattttctcccacacacattccagaagtcagggcccctctcaaggagtacccgctgtagggatgcagggccacaggcttccgcgctctcctgaggcaggggctggggtcacccctgccccatcataactccccatgccatttgagttctcatttattttctccatttttttcttctcaaaggtggtttttggggggagacgcatgggggctctcctgagggtcccctgtctttcacacacctcccaccttttttctttgctggtttgcatgagtggaaggtctaactgtgggcttttttttttcctgggattttattttattttatttcattttatttttttgggaaaaggggagggatgggtctagggagtggggaatatgggaggggggtgggggggcaaggggtcaggggttgggtgtccgggagccaggggaggacaggaaatgctgccgccttctgcaatttatttattttttcttttgagagagtgaaaggaagagacagacacttgaaaaaaaaaaaaaaaaa

SEQ ID NO: 4174 - protein, 724 aa, Rattus norvegicus
  ref <308>: DATABASE ACCESSION NUMBER: SWISS-Prot / P31016
  ref <309>: DATABASE ENTRY DATE: 2002-06-15
MDCLCIVTTKKYRYQDEDTPPLEHSPAHLPNQANSPPVIVNTDTLEAPGYELQVNGTEGEMEYEEITLERGNSGLGFSIAGGTDNPHIGDDPSIFITKIIPGGAAAQDGRLRVNDSILFVNEVDVREVTHSAAVEALKEAGSIVRLYVMRRKPPAEKVMEIKLIKGPKGLGFSIAGGVGNQHIPGDNSIYVTKIIEGGAAHKDGRLQIGDKILAVNSVGLEDVMHEDAVAALKNTYDVVYLKVAKPSNAYLSDSYAPPDITTSYSQHLDNEISHSSYLGTDYPTAMTPTSPRRYSPVAKDLLGEEDIPREPRRIVIHRGSTGLGFNIVGGEDGEGIFISFILAGGPADLSGELRKGDQILSVNGVDLRNASHEQAAIALKNAGQTVTIIAQYKPEEYSRFEAKIHDLREQLMNSSLGSGTASLRSNPKRGFYIRALFDYDKTKDCGFLSQALSFRFGDVLHVIDAGDEEWWQARRVHSDSETDDIGFIPSKRRVERREWSRLKAKDWGSSSGSQGREDSVLSYETVTQMEVHYARPIIILGPTKDRANDDLLSEFPDKFGSCVPHTTRPKREYEIDGRDYHFVSSREKMEKDIQAHKFIEAGQYNSHLYGTSVQSVREVAEQGKHCILDVSANAVRRLQAAHLHPIAIFIRPRSLENVLEINKRITEEQARKAFDRATKLEQEFTECFSAIVEGDSFEEIYHKVKRVIEDLSGPYIWVPARERL

SEQ ID NO: 4175 - DNA, 29640 bp, Homo sapiens
  misc_feature (1)..(29640): n=a, c, g or t
  ref <308>: DATABASE ACCESSION NUMBER: EMBL / AF156495
  ref <309>: DATABASE ENTRY DATE: 1999-09-26
gtctgtcttaggtctaggtaggagggtgacttgctactagtcagtctattgttaggcaatccccaacttagagatttgtaaggacttgggaaccagggtgaggcccatggctcaggcctaggggactgcatgtaaattgtgttatgtttggacagttaacatccatcccacaggcacccagggcaggtgcttagaagagaccttagccctagtctctaggtctatggcaaaagagctgagtctgccaagctggggtatggcatactgggatgtggcgatagggcgccctcacctgggtgttgcaaaggcccacaccacccagctcactgggcacttgcagaccaaaggcccccagctccttgaggccctgccaagtggtctcctccaccatctccagagcgtcattcttggcgggatcgttcacttcctggggaaggcacaggatcccacatccaggctccttttgagcttaacatctccaaacacctcaccagggaccaagccccgagtcattccttacctcgaagaaacgggacacaggctccaccagctctttaagaaactgtgtctgctcttcgttgagcactgcagagggtgggggacaggctggtcaggccaggctggcaggggaaaccaccctggccccacccagctctgattatcccttcccttaccggacgggtatgggaacacctgatctgtggtgagctggcctttgaacattcccacagcaaaggacttagattcctgggcagagagaggcaaatttcagggctctggttgggtctggctaaggtccacctggcctcggggctacctaccgccttggccggttttttcttttttctggtcagagcgtcagaggggtgggaatctgacttgtccagagccagctgggaaaagagacggttagcaagttcagggaagggacttccgctgtgtcaaggggagaacaggcgagagccgcgcggggaggcgggccgaagcggtgacctttcccctagtttccgcctagggcaccctggcttgccctttcccctactttcggcgactgagcagtaggcaggtacctggcaccaagagggagatccctgccgatggcgggcgccgaacgggaccgccgctcccacacccccttgccaaggctgcggtgacttacctgagcggcacccccggcatagggccgccgggcagggccgggccggggctgccccaggagcgccgtgagccgcgagctgtggggagtgggggttcagtgccggcccggtgcccagggccgctgcccaccgtccctcttgtcacacacagaccttccgcccccgagcctcagcagctgccgccccaagctcgcggccatccgagccgcctgcatctccgaatctctccgggcgccgctggctcgagctctgacccagctctggcgtcctgcacgcccacgtcctggcgcccctaaccctgactcatcgtccacagtgcaccgggcggcggacggttgcgggccccggggcatgctgggagctgtagttccctggagcccggccctgcgttccgctgacttagagggatctccaagcgtccctcgtctcccccaaactccttaatcccgcccgtccgacctagagtctagtcctccgacggggtgatgggataggatgggacagaagaggaaggggcttaagtcactgcagccagagggatggaggtggactgaagggagggcttctccggtggggttagaagggaaaagtagggaaagagaagtgtaaggtagatggcagaggcagagacatggaaagacagactctagggttcctgatgatatctatctcggccaacacaaaagggagggtacagtggtgggggcacccaagctagggtgtgagtaccctaagtgtattcttctgagatgtaggccattcactaactcttggaacagctacagtttcacagtaggaagacccccccagattcactgcccctcccttagtaaagcctctgagaccttcctgaacattcccttctgtctttgccctctgttccttccagagactatgtgcccaggcagatggattcctcccgggcctgagaggaactgcaggaattctcctgcctcttacccgtaaaaccccaacttctctagccctagggcaggaagtcccaaacaatttctacccctttttctgcaattctcattggggtgagaggaggcccaggaggagagagagctgggctcagcttctttttgagctgctggagccctctgtgaggaggccctctttgctggcttctcaggagagtgtggctaggttctgcctgcctatgggaagagggggccagggtgtgtggagcaagatggtgcggtgctggtgccttgggacctgggggaatgggacagctggtcggctcagagacggcctactttactcacagctggaatttagtggggagaagcagctcaactccaatcctggaggattagggagattaaagtgagagaagagagagatgtcccagagaccaagaggtgaaaaacagggctccttgtggaggggaggtctgggagcgaagtggggggctggggctcggagatccttctccccaaatctttccgtaggggctggggtgaagggcacagtctggggagatgaagtgacagtgtgttcatcttcctgtgttggcatcttccctgtcccaattctccttgcatctcactagctcccaggtcagccctctggctcctggcacccccactgctgcggtgggcacccccactcctcacagtgctgcatagcgacctcttccaggccttgctgggtgagtagcccgttttctgagggacctgggcctccaagggccattactgaacttcgggggctgtttgggagcccagagatcatttggtccaagctggagcaccatgcagggtcctgcctatggtgtcctccatgagtgtggaccagccttggctgaaagggctcctcccttgccagccagccagcagcggtgatgacaggggtgatgtgcctggagaggcctggggtggggaggtaactcagttctgttcctgtgacagacatcctggactattatgtggcttccctctcagagagtcaggtaaggaggtgggggcgagcgcctaacttcctgaggggcaggcagggctggaggggtgagccaaatatcactaatattacctggaatcttgggggccctgctgacaaaagcctgagtcagtggcccagggacttggggcaccgagaatgcactctctgtggtcctgtacccactctccctttcttcctcgttttctttggctgccccagtttcaggcactaaagagtctagggcttaactttttaggtttccccctgagaaacctgagggagaactaggcccccagggattgcctccttcagctcctccctcacacccgaccccctaccgcctgccgagaggcctccctcccgtattcaaataaccgtgggtgctcccagcccaactatagatgcttccttctctaagaaatgaaatccagcctcatcgtctttgctgtcatcgctggtggctggccaggtctccatgtttgcctcaggggcctctgtgcttctgcttctatctcctttcccattatccgggttcctgccagcacagaaggagttaactctgccaaggcaccccccccattctggctcctagctccctccctccctccccctgcttcctctctcctcctctctccccttccctcttcggctccacggctcccntcggccgctgncgttttcccatccccccnaccccactnntcccccgccacggcccctagcccctggccgtttggcaantatccccccctaccccggggctccccgaaatccagttcccctcccccaccccagctcatgccccagcccccgaacntccggggctgccagcccccngtngncccccgcccctcctgagaatcggggtgtgctccccaagccccctcccctccactggggagccccttttagggcccccttcccctccctcccacgctcccctccccttcccttctccaaccccctccttcccctctcacccctccccccatcctggccccccctgcaaaagtggggtgcggaggggggaggggtgagaacccacggaggggaggaacgaaacntccgatgaagntcagagcccctttacccnccgccgcggccaggccccccaacatggactgtctctgtatagtgacaaccaaggtaagcatgatgggggggctataaactggggggagggtatgagtttgtggggaggggttagtaggccttatctgggactggcgcccctggagtggcagcatcagaagtaagatgtatttgggggtcttaatttagttttggggttcacatctgagaaaatgcaggatttggccacaggtgccccctggagtgatccctttgtacctgtagggatatggaaaatttaggatattccatggttcggggggcctggcgggtttgggggttcatcagcgctgtttgagggagacttatttaaggagaagcctggctcataagggagtcctgctggtgtatgtgggaaggtgggctatgttggggggttcctctttcctccccagggaaaagctggcttccaagggccttgtccagttttggggggctcctggcatggggtaaaggttattggttgtgagtgcctgactgatctgggggtgtcagctggcagggaaggggtgggccttcagactctagaacaagcatctcgtggtggctgcatttagggatgctctctcaatttgagggaactgttaatttagggttcagtcatatagaatggaggtagttggaagttgtcangagggctggggccctggcatgggatcacctgagggaatggaccaggtgaggcaaggatttgggggtactcccataggaggcagaagattgcagcagccgagcttgccagcccctgaggaggaggatgagaggcttagggagagaggggatttgaggaggggganccgggtgggtggtgcacaatttgggggtggcccaaaggcnaggtgcccaatatccccatctcctcccacactgtatctagccctgatcaagagagagggagaagagcagatgtggggactgttccagatacccctgacgcttgggatcaaggtgggggaggacacctggatttaagggtccctgagggcttatgaccgaagttactgaggttactggggtgaaaaggtgtaggaggagggcagggctggcagcgatggggatctgtgcaagagtgtccctctggttggagcctggcaaaggcaggagatctcggatggagcacaggcgagctcctggtgggatgcagatacctaggctctccttggagactctgggactggagagctggatgcctggtgtgtggagggaggcttgggcgggtggcaggcagctgggggctggggggtgggacaggaagtgggggcncgggggaggcgggngtccgggtgagtcacaggnctggggagggggttatatttagtgggaactgcagcttttcatgggagggagctgaggacacacatgttccctgccacaaactcacacatgtgtgtacacatgcattgtgcacgtgtgaggatggttggaagagattgggggctgaggacctttagatctggagcccccaccctctctccaccagggcgactttcttgtccttcattctgtgggtttcggngctttctcccaggctgcctcttccccacatcccctgtagtttcggtggatttttatgcctcagtttctctggcctggtttccntctgctcccgctgtctcctgcccttaggcctgtcacttggccttaggctccatggctgtggtcccctgcattccaggtgtaaatagaaagcccgctggaatgtgtgggctctgcttccaacacgtgaacacacaaatgggagcgagggtgaggggcttgncagcanggcagctattctgggtgggtgggtggccttattcattacccactccagactcctacttcttccatggagcccagggttgagcatccctgaaggaaggaggcttacagagcagatcatgcatttggggtttacagaggcgtggagacccaggcttgccacattccttggctggaaaacttgtcagcctcggtatggtggggactccaactcccataaggccccgnaggcaccagatccctcaatgttagagggttgctgcccatggcngctgttgggagttgtggttcatctctatccagggcagccagcggagggtagcnccaagaggagcctgcagggggcacatggctcctgcttccccaaatgctggatggggcagggagtgctcaggctttgcggtcgttgagctccccagctctgcctgagtcttccatctttcattgcctatatttagactcctgccgcagtaatttaaggaacatttattgaaagcctactgcgtgctaggccctgtgttgtgtgcaaactccactctacagcgatcactttgtctttcttggtgcnctttatctctgccagaatctctcgtctctgagcatctctttctcccactccgccccncgtccctccccctttcccccgcgctgctgccgccgttgccatggtaaccggcgacgactgaagctgcgtggcggactggagggccgggcgagggtggcggaaggcggnagcaganacaagtgggggtggggatacagtgggggaaagactgaggctatttgccagagccccaggagcgaagcgtttaaanncctccgggtggtccttattgggcaaagccgnagatgccgggggcggggcangntgtgtccgacggcctcnattcattggccgtcaggggcgtggcggagggacagtgtgggcgaggcagggggagcgaacgggcgggaagtggaacgngaggcgtggcctcccgggcaggtgggtggggtctggcttactctatcgagggaggcagcaaacttcggaaaggggaggaaccttggggctgggttacctgaccgaaatgagggcggggctgacctgggatgggcgtngcgtggccccccgtgcgtaaaggagacagggtttgaggagctattgtccaagtaacttcagggcgcgggggtctttggaaaggagaatccgggggttgggaagtctgacgtctcaattttcctaagatggaggtctgttcagatttcatcagagcacccctcctacctcagctctgtgttcccaggagacggttgctaggcgacggcaaagtccttgattgctgcgttgccagngcaacagagaaacggaaaatggagggaaaagggaaatgggggatggggaagggtctttatgggccatggcgcccactggtggataagcagggcctgcaggttttctattctagaaggaaatttgagtccagccccttccgcactgactccttggatcctctggtgatccaagccttcctaccagatatgaaactaggacattgggggtcatcttgggggcgcatgtaacagatgccgatcaacggggtcaatctcgcttgggtgagattctagggaagtcgtcatttctaccatgtatgggcattttatagaagtcagccgatttgaggagacccctcactgggttttaagagctggaagggtgggcgttcaatgggagaatatttggaagagaggctttcaggttaagttgtttgggagaaaatggaaatctctgaagagacctgaaggaggcggttgggagtgttctggacgatttgtgggtcattgcagattgccggccgtatctttggtgtgtattttttgagtcctgagtgtggagaagatatatttgggagcaatcttccgacaaagttggaattcagaatcgtggaggggatgttctgggcagacagaaaagggtgtaatctatgaacctcaggggtaaagaaaaggagaggaggtgccgggtgcggtggctcacacctgtaatcccagcactttgggagcccgaggcgcgcggatcatgtgaggtcacgagttcgagaccagcctggccaacatggcgataccccgtctctactaaaaatacaaaaaaattagccgggcgtagtggcgggcgcctgtaatgccagatatccgggaggttgaggtaggagaatcactcgaacccgggagccggatgttgcagtaagccgagatcgcgccattgcactccagcatgagcaacagagcgagaatctgtctcaaaaaaaaaaaaaaaaaaangaaagaaagaaaagaaaaggaaaaggnaaaantacttttaattaattaattattaatttttgagaccgagtctcactctgtcgcctaggctagagtgcagtggcacgatctcggctcactgcaatctctgctgcccagattcaagccatcctcctgcctcagcctccctagtagctaggattnacaggcgcctgccaccgcgcccggctaatttttgtagttttagtagagatggggtttcaccatcttggccaggctgatctggaacgcctgacctcatgatccaaccgcctcggcctcccaaagtgctgggattacaggtgtgagccaccgtgccaggccaaaatttttttttttagagatgggatctcactatgttgcccaagctggtgttgggcacctggcctccagcgatcttcccgtctacatttctttttataagagttttggaaaaaattgacgagattgctatttaatttggagggtctgctttaaagtagattaaatatttcctgaaattgggttctggtgtggatttggagactggcatattaggaagtcatgagtatcttattagattcgggggtttggacaggggatccccaacaaattagaggacttgttatttggatgtttatattagagcaagagtaatatttgcactaattgcaacatccctgttagtggattgggagatagatgtgatatagaaagggatgatttagcatatattaatttggggggccaacaaggctctgtggttccttaaactcttgaagaaacatgggctgcctatcaggtggggctggactgcaggggagaactatgctggttagagtaggagatgccttggaatctgaggagatgctatccacagcaccaatcttgcgggggntttggntgggagaggcagtgtagatcccttgggggttcttgtgagagaagtgctgtttgtttccctggactctgggaggccagtagtgacgagatgtccagtgaggttttggaatggtttggggtctcgcgatgttggggttgggggattagatgggatggaataaggggtccctgagaactagagagataaactggtaaatttaagtctgtctttaattgtagaggggtcggaatagaagtatactgtggaaagtgaagttcacagagaaacagcgtgaaccagggaagttggtggctaagagggtctcccctcacccctctctcccaacgtgacgctcttccttactgcgcaagctgcgcaggcgccgtccccccccccgccgcagcctccagttgccgcggccgccgcagcccccgcccctctgcccctccccctcccccaacccccgggacccttgatatcccacctacccccttccctcagtccccctccccttctccatgtcggctcggaacagattcgcctccatgtgtctctgcgtggtacgtgccgcggtattggctccggcccgcntcccccttcccggacccccgcaaatatcagggtgcaagcttcaagcgctgtcgctcttccttctgcttggtgcggggtctctgggttgcaacttctcgtggacaggcgccgtgggtcgcccctcttatcattcactttgactcacacccctatgttttgggggtgcaagcctcagttccaggtcattctgtgcaactggggctctggtgaggagggggccaaaggggaaggaacaacagcgactccgtccgtgtcccccattccccaggccttttacttgttttaagccctaatatattgggggtgcagatatgtcccagtagcatctgagttgtctgggttagggccctgagtcccagtaggataaaggatggggggggtcctcctttcccgtcctgctttagttgccctgtaatccaagactgagaggtgctgatcccccaccttcccagccccccagtctgcagtttcagaattactctcccccgcccccacccccacccctcccgacgtttctccccgcccccctacatgtacgtcgaaaatttccagagactgaacctagtccctaacctcttccagccacattctggaaaccctggcacccatttcttgttccccattttctccatgttgcctcccaatcctgaggagccttttcttcagtgccagacaccaccctccctccatgggggtggggcagggagaggtattgggggctcgctgagataaaagtttaccttcatttcctccctagaataaatgatgaaatggccctcctcatgtttccattttctttgggtgcacgctgacatttcctcctcagattcaggaattttctctctgaggtggagtgaagatggagaggcactggactcaaaccctcccccagactccaaaacttggagctttggtcctaatttaccttgcagggaattggaggccttgtgaaggaagagtggatagcggagagcggcttccaccccttcccccaggtctcaattctggggcttgcccctcagcttgtgcactgcccaggtagaagaccaccttctcaggatgtggaatgaacagtctctgttggttcatagaactcctttattcaagacagctcagccttggaggagggctattttgtgtgttctcctattttccttctctactttttgtgcccatcggattgaaatctggagttcaggattctctccaagtctgtggcccagagaatagactcaatcttgctgagcccgttttccttctttaagactctttaaatgtatcagggtgcttcttgatttgagttgtctctgtgttctgggtttgagagttttcgtgctgacaggaccacttcccttctcccattctcttactgtacccttactctacagccaaagttgtgttatattctcagccttgattcatcatctttaacattttcagaatcctactcaaggattggccattgaccttgataagcttcctcccatttgatctcgcagctgctgccctctaagtattagggcactctcagcctctcagaaacttttgggagggaaattctgctcgccctctctcttttttgttttggagatggagtctcactctgtcgccaggctagagtgcagtggcatgatctcggctcactgcaacctccgcttcccaggttcaagcaattctcctgcctcagcctcccatgtagctaggattacagccatgtgccaccatgcccagctaatttttgtatttttagtagagatgggatttcaccatgttggccaggctggtctctgacctcaggtgatgtacccacctcggcattataagcatcagccactgctcctggcctctctctctttttgagacagggtcttactctgttgcccaggctggagtgcggtggcgtgatcatggctcactgcagcctccacctcttgggctcaagcaatcctcccacctcagcctccttagcagttgggactacaggtgtgcaccaccatgcctggctaatttttgtattttttgtagacagggtttcactgtgttgcccaggctggtctccaactccaactcctgggctcaagctgtctgcctgcctcagcctcccaaagtgctgggattgccgtgccttctctttttacccatgtgtactgggcggtgcattctgtcttcttcagttcctgagggagccctgcgtatgataccttccccttcctgaacctggagcttggagggtcagtctctgtggaggcccgttccagaggagaggagcaggcgagggcagaggcggacacggaaggacccaggcagaaacgctgtcttcttctgctgtctccatctgcccttttcctccttctctggcccccagttaatctcattttactgttgtccctattaagctagcacaggaggcccttgggatggcagctgattaactgggcagggagtcaggggtcatgttgggcctttcaccccaaaagagcagagggagaccagaaattcactctgaggctcagcatgctaccctcctccccaaccagggaggctggcacccattcttgcccctgtcctgagccctgctgtctctgttcttccccttcctcccccagcccatgcccttatagcataaccggattagctggctgggctgtgggctgttgcaggggtagggccagactcccggggcccctctgttgactgcttggaaaccagcaagggcagtgaactggacaggcttagccttgtcctgtctcgggggctgataccaagtaccttctggtggaaggggtgacttcagtccttgcctaaggagtgcaaggtaaaggagagccaatcacctgtggggtagaggctgcaatggggagactgaggccatggaggtggggcgcggggaggatgccatgcagagtaggagcagccagaggggtaggggaggggaggctagaacaagagtgagtctgagatggtgagagaagcaaggaagttggggactggaggcagagaatggagatgtgagtgtcggggctagagctctgagaagctggagggactcgaagatgaaggtggtggggaaaggggtgaagacacagatgccagaggggctatgcccaccagaaggccagtgtcccaggatgtgaggagtaggagttgggggatgggattgggacctggggattgatgagaggtgctgaggccntggcgggagagggggctgttgggagagtggagagaggggagccaatgggctagaggagagggagggggaggagcntggttcangccccagggccttccgcactgcactggctgggggaagaggcggcggccagggcggccagcctggagcctgaggcaccgggctggccccagtgacacctccgtccccatccccagaaataccgctaccaagatgaagacacgccccctctggagcacagcccggcccacctccccaaccaggtaaacgcccccgagctggtgcacgtggcggagaggaacttgtcccacctcgaggctggccacggggtcgtgggccacgcccacctctcccccttcaaggtaggagaccctggtggccccctccccagtgcggccctcggagcctcggagctgcagcaatccctaagggccggtagggtgagagagagccgtggggagggggatgctgggactgggggcgggggtttggggcttgggctcctggggtctgggggagggggcgtttgtggggctggaaacaccttggtcccacnagaggagaaacaggccaggccaatgggagtggatgtaaagcctaaagcaagaatgtgtgtgtgcgcgcgtgcctgtgcgcgtgtgctgtgtgtgtgcctgtgcgtgtgtgcatgcatgcgtgcctgtgtgtgtgctgtgtgtgtgtgtgcgtgcgtgcgccgtttgtgtgcctgtgcgtgtgctgtatgcgtgtgtgttgaggtgtgtgcatcccccaangaggnncccccacgcctgggacctcttcattccttcacacccccaacctccatttccattttctgtgtccagagctctgttccaangcngcctgctgccctcatttgctcttgtcccttccccgcctcctcccccntacctccgcctctgggcctggctcgccctgtccccaagtctccagctctttccatctgtctggcctgagacttcacatggtggggccttgctgcctcgtcccctgccccagctttgctccactcctgagttctcttccccctctgcagcctttcctccctgctggctggctggctggctggctcttgatgctgtctctctcttcctcccacgcattctcctctccctctccctgatccccagcccaggccgctggggcctgatcagtcctttccctcatcagtcctctccctccatcagccagctcccctttcccatgttccctcttgcctattcatcttcaccttccctcttttcctcctcccctctctcatcctcttgggttcgcacctctgccatatcttctttctatccccctctgccccctccatcatcccccaccacctgtttccctttctcctctctgctcacagcgtcctcctctctccagtcccgggaggcctggtttctgggaccttccattctccagtccactttccatcttccccttcctccatctcctcttctggggacacaggatggggaggactggagagcaccaggcaagctgtgagattgaggggacactgtggggtcagggtggggattctaggatgttgtgggatgctctgggaagggggaggttgctgacatttcaccaagaagatggggaggaggtctctgagcctagggagcgggcaagcaggttctggagttagaactggcaagagaggagttgggggataggaagggtaagaggtcctgggtcaggggccagatagggataagactgtgagatcagggcagtgaatgaggccgacagagcaaggaaaggaaggccctggagacagggatggtacagagtgtttgtgcgaattctgtggatgctaggagtgagggaaagaagactagagatgctttgtgcaaggcagggccattaaatccctgagcagggggaagaggaggtagggagcctgaggggtggtagttagtacagagctgctgctgatcagagctcaggagcagaagggggtggagggagagagtgttggaggccataagcatggggtggaggtctcaggacaaggcctcacctggggaacaggagaagccccaattttcagaagagaggggagttgattgagaagtgtaagattgttacttgagaataatcttgagggtatgaaggtagggtaagggagaatggtgataaactctctggggaatcagaaattgagatggagtagctgggtggggtggcatgtgcctgtagctactcaggaggctgaggtgggaggactgcttgagcccaggagttcaaggccgcagtgagctatgatcacaccactgcactccagcctgggtgacacagcgagaccttgtctctggaaaaaaagaaattgggatggaggatgaggccacattggtaagggatggggctggagggtgcgacagggccagggaagcggatggagaatggaggctggggttggaagatggatgttgaagggcgagacagggatggagatggagcatgtgggatgcgggcagagatagggatgggaagcaaatgaatgtcgtagtggatgaaggtgggtgtgctgggaaggaggttccaggatagggatggggatggggattgaggatgggctatgggatggaggacgggctatgggatggaggacgggctgcgggatgggggacgggctgcgggatgggggacgggctgcgggatgggggatgaacacgtggatgagattttggcagtcagtgactgttggttggacaacagcatttgctgatatgtgaagggttggagggtggtgttaatagatttatgggtgtgaaatctgtgatacagcttgaaaatggtcggtagtttgtaggcttgagaaatagcagtaggagaggggagggacccctttggacggggagagcgggaaggagactagggaatccttgcgcttgggcgactgcaaatacatgtttctttaaggaggaagtaggttggggaccccggaaggaggctcttggcggcctccccccattgccatagagacgtggcttcggttgccctggcaattggggaagcccctaggaccgggctaaagcgggccccgcctgggagtctagagaccaggcgattgacgtcagggacctgggcacgccccactttaaccctttcccgaatgaagtggggggagggagtagatgagcgggataggacccggatgtctttcaccactccccgttcctgacgtcctttgcactgcgtagggtgaggggcgtaggggagcgaggaaggcaggttattcaggatgcgctgcgcccacaaacctcttcagcccggcctccntctcggcctggctaacgtggggcggggccnagggcaggagaggcggggctagcggatcccttctgcgctcaggagtttnggntcggccccanggcacgccccacccccctgttgtcctgacgacagggcctcctggaggtgggtctccccgggtcttgactggtcctagataccgttgctaggcaacacggtccttagaggaaggggtggattggacggctggttggtgagaccgagggaggggcctgcagctggggaacnccnggattcccggggtgncagggtttagggcaaatgtctgtgaaagtgaggggcaagtctaggggagggttatgaaaatatctgggtagatatggggggttggggggatggggcanggaaatggggaccaggacccggtggacatgatnccctggggtgtccatgtgtagcacataaggcatgtaacaccctgtggtgttacatccggtgagaagctcccttncccccaagcctacccccctctccccactctttgccatctgctgctcccctctccgtctggctgtctcccttcccgcttctcctacacctccttccacatgcagggggccccgggctgggcagagttagatccttgcgcgtgtgcatctgtgcgtgtgtngntgcgcgtgcnnantngttgcacncgtgntngcgtgtgntngtngatgtggattgaggctgggcccttgagcagctctcagggtggcggagtgggcttggctaagaggctgaaangggtagccnacgctgatgggaccctccgttatgggctccctctcgagtcaaggctcaggctgctttttgtctcttgttttcccaaacaggccaattctcccccagtgattgtcaacacagataccctagaagccccaggatatgtgagttgtttagattttggggctggggccattgcagaaggaaggagggagtaagggagggcagcagatgacgggcaggtggtcagacaggaatgtctgtctcactgcttttgtgtttctgtcccgtgctggagttgcaggtgaacgggaccgagggggagatggaatacgaggaaatcacattggaaagggtgagcaggctcctccatcggcagtccccgtggcctcccgtctgtacctttctttctgccatgtggtctgggtggctagcccctcaccctgtgccttcctcctctggctgctccaagccatttcccaccccacttgccttgccagacttgggcagtgaggggagctgaccctcttcccctccttcacccagggtaactcaggtctgggcttcagcatcgcaggtggcactgacaacccacacatcggtgacgacccatccattttcatcaccaagatcattcctggtggggctgcggcccaggatggccgcctcaggtggggagaggagacaggggttaggttgcttggtccctggagagggagggccagggcagcaggaagctcttggctcaggcccaccttgctgctcccagggtcaacgacagcatcctgtttgtaaatgaagtggacgtgcgcgaggtgacccactcagcggcggtggaagccctcaaagaggcaggctccatcgttcgcctctatgtcatgcgccggaagcccccggctgagaaggtcatggagatcaagctcatcaaggggcctaaaggtagtaactcattttgttcccacccccatcccaactgtcctgtgcccccaagcctgcttcctgggcacccacctctggcctcccctccatccaggtcttggcttcagcatcgcagggggcgtagggaaccagcacatcccaggagataatagcatctatgtaacaaagatcatcgaagggggtgctgcccacaaggatgggaggttgcagattggagacaagatcctggcggtgaggactccatctagcccattttctagcccagatttgggtctcacctactagccctggcaggcccaagttcatcacttcaccccagtgcttctgtcttgggccatttgtggctttgtctgagctttgctttccttgactccaggtcaacagtgtggggctagaggacgtcatgcatgaagatgctgtggcagccctgaagaacacgtatgatgttgtctacctaaaggtggccaagcccagcaatgcctacctgagtgacagctatgctcccccagacatcacaacctgtgagagcccttcaaacaccaaagttccccatgacccatcccgtttaacccatgacatgcagtcccacgacatccctgtagctgtccctcttcagatattccctatgaaatagccacaacctctgatccttgctgttgttggagaagagatggaaaatcaattaccataaaagaactagaaaagatcgtcaacgatctctctcctggaaggcacaaagcctggttggttttatggctaattttgtgaaattctcaaggaatagataattcttctgctcttccagagtacaggaaaagataaaagatttcacatttcattttataaggccagttcgaatggtcacaaggatagtgtaaaataaggagagtatagacccgttttgcttctgaatagagatacaagagtttacaataatatagtagcaaagcaaacatggcagcatgttaagggaataacatagggtttgtttcagaaaactaaagatggctcaatattaggaaatctcttaatatgattcatatattaaaacgttacgggaggctaagtgtggtggctcatgcttgtaatcccagcacttgggaggccaaagtgggaggatttgagaccagctagggatttgagaccagcctaggcaacaaagcgagatcctgtctctaaaaaaattaaaaaaattagcacgtgcctatactccttgctacttgggaggctgaggctggaggatcgcttgagccgaggagttggaagctgcagtaagccaatgattgcgccactgcccaccagactgggtgacagagcgagaggagaaaacgatgtgattatctcaaatagacgtgaaaaaggcatttggtgaaattcaccatctcttttggatgaaagcttttagtaaactaggaacacagaaattttccttaagatggtgaagactagttatcaggaaccagtaacaaacattttataatgatacaattttagcagtgtgtccattaacttattttttaatttaattttaatttttttcttgaaatggagtttcgctcttcttgcccaggctggagtgcagtggtgtgatctcagctgactgcaacctctgcctcccaggttcaagtgattctgctgccccggcctcccgagtagctgggattacaggtgcccaccatcacgcctggctaatttttgtagttttagtggagacagggtttcaccatgttggccaggctggtctcgaatgcctgacctcaggtgatctgccctcctcggcctcccaaagtgctgagattacaggcgtgagccaccgcgcccggcctccgttaacttacaaagagggcagggatgcctcttcccactgctattattcttcattgctttagagcagggtttctcagtgttactcctgacatttttggacccaataactcttcattgtggggggttgttctgtgccttgtgggatattaagcagcatccctggcctctgtctatcagatgacaatggtactcctccccctcagtcataacaattaaaaaatgttatgacagaattgccccagcgaaattatggtggttgagaatcactgctttagagatttcagacagtgtaacaagacaaggagaatagttacatttggaagggaaaaacaaaagttatctctatttgtaaattatactactgtgcatctagatcaaaatctaagtgaattaactggaaaaatatgcaaagttaagaatgtggctatttgttggctgggcgaggtggctcatgcctgtaatcccaacactttgggaggccaaggcgggcggatcacctgaggtcaggagtttgagaacagcctggccaacatggagaaacgctgtctctactaaaaatacaaaaaaaaattagctgggtgtggtggccagcgcctgtaataccagctaatcctgaggctgagacaggagaattccttgaccctgggaggcggagcttgcagtgagccaagatctcaccactgcactccagcctgggcgatagagcgagactccatctcaaaaaaaaaaaaaaaaaaaaaaccatttagtacagatgggatttaccatcttggccaggctggttttgaactcctgaccttgtgatccacctgcctcggcctcccaaagtgctgggattacaggcgtgacacttgcgcccagcctcagctaactttcaacttttgtcttttgtagagatagggtttcaccatgttacccaagctggaggaatttttttttttttttttttgagagggagtctcgctctgtcacccaggctggagtgcagtggcacaatcttggctccttgcaacctccgcctcctgggttcaagcaattctcctgcctcagcctcccgagtacctgagattatagacgtaagccagcacgcccagcctatttttgtatttttagtagagacgggatttcaccatgttagccaggctggtctcaaagtcttaacctcaagtgatctgcctgccttggcctccacagtgctgggattacaggcatgagccatcgtgcctggtcgagatttttcttttttacagaagaattcccactagtaaatgacaatcaccaccattttgcagtccttgatacttatcagaaccaggcggtgattgtcagtgtggctaaaacttacctgaaaggctgatggggcgctagataatggatggactgggctgatgaccctgaacctaccattaatcttacctgacagaaagacaaccaggcattattgcatcctgtggtgatgctgtaggaagaacgtagcgctacctatgaagtatacaggagttactaaaaaaaactctgaattgaacttgaaactgatcaagcctccagaatgaactgccagtttacaggagatacaggggcagaggcataggctaaacaaaccacaggagggtaagcagtaatttccctgttagaatttccctcataggctggtcaaggtggctcatgcctgtaatcccagcactttgggaggcataagcgggtggatcatttgagttcagaagttccagaccagcctggacaacatggtgaaacactgtctctactaaaaatacaaaaattagctgggcatggtggcgcgcgcctgtaatcccagctacttgggaggctgaggcatgagaatcacttgaacctgggaggcagaggctgcagtgagccaagatcacggcactgcactccagcctgagactccttctcaaaaaaaccccaaaaaaacaaaagaatttccctcatagaatgtgggaaattcttttagacaaatgacctagttttttcaacgaatggatggcagagaggtggggggaaaaaagagggagaagaattttatggattaagagattcgagtgacacaggaacccagagaaaacccccaaagcgtaatattaatgctccctttgacttccccatccctgggcatactgaggacatataacgttcaaatcctttatcccctaggacaaccagcctctgatgtcacctataaattcctgacccctgatgtcactgtgatctgatatccccttaccaccccaccctggcatctctggcagaatatcttcccttccacctaactttggctcttctggcaccctggggagaaggttgggtggcgggtgctgtttccctccaggcactttcatctctgccctgtcttcctcagcttattcccagcacctggacaatgagatcagtcacagcagctacctgggcaccgactaccccacagccatgacccccacttcccctcggcgctactctccagtggccaaggacctgctcggggaggaagacattccccgagaaccgaggcgaattgtgatccaccggggctccacgggcctgggcttcaacatcgtgggtggcgaggacggtgaaggcatcttcatctcctttatcctggccgggggccctgcagacctcagtggggagctgcggaagggggaccagatcctgtcggtgagggaaggccatgcccctacctgcaccaccccctccccacagggcagagcgcagagctcttggggaggggcctggatgggctgcagccgagtcctcttgcgggaccactccctgctcactggacccagaagtgctgctcctgtctctggtgacacagcctgtcgtcctctctctaggtcaacggtgtggacctccgaaatgccagccatgagcaggctgccattgccctgaagaatgcgggtcagacggtcacgatcatcgctcagtataaaccagaaggtaccaggccggaagttccttgtcttgtgagctgaaatggcccttagaactcttcctcagctgatggcttcagtaggggaggacaggggtgacagtaggatggggacagagctcagaaacctccctgtccttcctcagagtacagccgattcgaggccaagatccacgaccttcgggaacagctcatgaacagcagcctgggctcagggactgcgtccttgcggagcaaccccaaaaggggtttctacatcaggtcagaggcttcccgggctggactcctcagcccctctgcgttcctgggcactctgtgcctggcccgggcctcagccgctcctcttctccaccctgcctgctctagctccccaccccaggcctgaggcgcagccagggttcatgggcttggctgcacaggttaacatttgaaatactccctgtcgatgggaaaatagcctctgccccaagtatcccaattgccttctagccctggtcatcccagcacttccccgggactcccaggccaccccacaatttggcgtctcgaaggttaatgcttggtgaagcagggtcctctagggtatttggagtgttgccccagccttcacgtccctgtgggcagtcccggatacgtgggccgcagctctgtggtgcctgcccccgtctctccagcggcattttgctcccctcttaggctcgtctccattgactctttttgtggcttaggtttctgccaaaacacacctctctcccgcccccgggggtcacccctccacttctgtccctgtctggccctgtggcttgcatggcctcgtctgccgctgcgctgtgcagatgtctctcggaggtgctggccctggctgacctatttccagaggtcaagacctgcacttctggccattggctttctggccatctccactgggatgtcccacaggcgtcccacactcaacatgtcccacgctgagctcatcatcctgctgtgggcctgggttccatcttgctgtgccagcagtttccctcttgttggatggcatcaccagccacccagacactggctcccacctgagcccttgctctgcccttcctccctgctcgggtccggttggtccccaaggttgttctgactcccagtgaccacagaggttgtgtagtggctcccaggcggaatgtcatctggttgtcacacttccagggggcccggggtctcctccctcctctccaggcccattgctttcttctgtgtcttcattacttccctggttctgaccccaggggttgtgacttactgatagaaatttgatactggtaagggtaaccattatttggaaacacgggacattttctttttcttatgaatttgggcagattcagggttacccctgtgactttatgatgtgcgtgtgtactgcacactgctttctgtttttctttttctttttcttttttttttttttgagacggtgtctcgctccgttgcccaggctggagtgcagtggcgtgatctctgctcactgcaagctccgcctcctgggttcatgccattttcctgcctcagcctcccgagaagctgggaatacaggcacccgccagggtgcccggctaatattttgtatttttagtagagacggggtttcaccatggtctcaatctcctgaccttgtgatccgcccgccttggcctcccaaagtcagctgggattccaggtgggagccaccacgcctggcccaaactgctttcttgagagggtcaagttcaagccctgcctctggaaatgtgctcagtgtggactgagtgatggctaatagttgttatgagttatagtcagcgtttggtccccacacagttttgggttcctcggcatccatagctcccatgggagtgccatctgcagacctctgggccgggtctttgggtgactggggcatccttcctggagtcctcagctgggctctgaccgatagccacttgccctccagggccctgtttgattacgacaagaccaaggactgcggcttcctgagccaggccctgagcttccgctttggggatgtgctgcatgtcatcgatgctagtgatgaggagtggtggcaggcacggcgggtccactctgacagtgagaccgacgacattgggttcatccccagcaaacggcggtgaggctcctgggctctgtaccttcctgccacaggcactgaagttcccaaggtcccccggggtgggcagccaacaggggatgggtttgccctctgaactcctagggtttgtctgttgggccctcctggggtccgtggctccatgagcctttgggaaggacaactccttattgaggagcacagtgtccagggctgcaggagaaggggtgtcagctggcccagagtatggagaaggggttgtcagctggctcagagcatgggggtggcatggggtangcattcccctacccgcgtatccctccatgtatcccacagggttgagcgacgagagtggtcaaggttaaaggccaaggtaggtggaggagggtgtgagctgggtggaagtgtgagggctcatggagctgagctcataactaaccccgtggcctgctttttcttcttaggactggggctccagctctggatcgcagggtaggtagggttagttcgggaagatgtgggtgagaggagcactgagttgcttttgatatcctcaagggggagacagggctccaggtcccctgtttcagagccccttgcagatgccccacctcccaccaggtcgagaagactcggttctgagctacgagacagtgacgcagatggaaggtgagccctggcccctgccttggccccagcacttgctgctcccccaaccctgcgctcggcctaagccaggctctctctgcagtgcactatgctcgccccatcatcatccttgggcccaccaaggaccgcgccaacgatgatcttctctccgagttccccgacaagtttggatcctgtgttccccgtgagtgctggggccttggatggaggagaaggtggaagtgggggtggggcatgggatgcccatccctggggccaaggcagagcctcctgggggatcggtgtgtaggagatacagggtttctccgagaaggggtgcttctcagccaccctctcattccatagtacccatgcccaggccagagacttggaggccctggagggtgctaggggaagcggttctggccctctgcagtcttggactgggtggcagctccctttcaccaaaggaccagctgggcactatggggatttgattgaagtaggcaggatttaagctagagggatggtggttagatctttggggggtggggtgactttcctggcagatacgacacggcccaagcgggagtatgagatagatggccgggattaccactttgtgtcgtcccgggagaaaatggagaaggacattcaggcgcacaagttcattgaggccggccagtacaacagccacctctatgggaccagcgtccagtccgtgcgagaggtggcagagcaggtaggacctggcgggcacccggtcctcttccttctcccctctccccaccccactgcctccctccagctttctctaactctctctctctctgtctctttccctgctgggtctccactccgctcctccacctccttctcctcttgggcaactctgtctgactgcctgctctctgcccctgctctctctcccacctccctcacttcctgaccccaaattccccaccaccatctggcctctttctctccccactcccttctccttgccccatttctcctctcttcccatggccttgtctttggtggcttggccttcccactgggtccctccctttttcctgactccccgctggccctctcccctgcctcacccttttctggggcccggctcccctctcccactcctctgctaactcctttcctttccccgctgctcctcaccctgccctccctccctccctccacggttcctttctccatctgcctcactccctcccatctgtctccttgttccttccatctgtctgtcctctgtccgtcctcccctccctcctccctctatcctacttcctttctcctttttcttggctttccttcccgcctgtgtcacctctgccttgcacaccccgccccactcgctgctgccccgctctgccaccatctcttgggtccctgcctgcctggtgctcctcccttcctccattctgtcctgtccctgccctctcccgtgctctccatcttccctttcctttccctctgtcttttactctgtccatacccgcttcctgcctgactctctgcccccctgtttcttcacatccatgtcactcccttcggccaacttcccattccccacctctccccgtccgtgtccctccggcactgctctctgtcctttctcgccacccgctggcccccctccgcccaccctgcctgcccccaggggaagcactgcatcctcgatgtctcggccaatgccgtgcggcggctgcaggcggcccacctgcaccccatcgccatcttcatccgcccccgctccctggagaatgtgctgtgagtatggtcctgggggcctcccctttgctcccccaacacctgtggccctgggcctcacaaggcgtctgcgttcaactctcccttcagaaccctggacagcggtttcagcagcccctgacggggatccctggaacccagaggatgtgggggaatcgggtctttcccctcctctcctgccttggctagacaggactacatttcccagcagcccctggggcataccagctggggcgagtcagggcctctagggctgttgggaattggagtccgaatcccatctctggggctgaaggctggaaggatgaagctccgtagatgtccctggagtagccacacctggctggggcggttgcgggtggcaggggggtggggggtggttctcatctgtggccccagagatattgggaattgtatttttttttttgctatgtgctccaaatagaagaatacttaacattcctggatagaggagataaaaggcagggtcaggtgggtccagtctcaggcctgctctccctccctcttcacagagagattaacaagcggatcacagaggagcaagcccgcaaagccttcgacagagccaccaagctggagcaggagttcacagagtgcttctcaggtgaggccacagcaaggctgttgccagcatgtagggtgcccttgctcggattagaaagagctcccccgccacccccagtggatggcttagaaagaggtgcccctgtgggcgcggcatggtggctcacgcctgtaatcccacactggcgggcacctgtaatcccagctactcggtaggccgaggcaggagaatcgcttgaacctgggaggcagaggttgcagtgagccgagatcgcaccactgcactccagcctggcgctaagagcaaaactcaatctcaaaaaaaaaaaaaaaaaaaaaaaagaggtgcccctgtgggagggtgcagccccaggacttatggcttggagagttggaaagaggtgccccttcctctgggctggtgcaacccccttggccaggtgtcctctggccttccttggcctcactccctgctacaccccactcccagccatcgtggagggtgacagctttgaggagatctaccacaaggtgaagcgtgtcatcgaggacctctcaggcccctacatctgggttccagcccgagagagactctgattcctgccctggcttggcctggactcgccctgcctccatcacctgggcccttggtctggactgaattgcccaagcccttggctccccccggcctccctcccaccccttcttatttatttcctttctaactggatccagcctgttggaggggggacactcctctgcatgtatccccgcaccccagaactgggctcctgaacgccaggaacctggggtctgggggggagctgggctccttgttccgagcccttgctccttaggatccccgcccccacctgcccccaatgcacacacagacccaccgggggccacctgcctcccccatcctctcccacacacattccagaagtcagggccccctcgaggagcacccgctgcagggatgcagggccacaggcctccgctctctcctaaggcagggtctggggtcacccctgcctcatcgtaattccccatgttaccttgatttctcatttattttttccactttttttcttctcaaaggtggttttttggggggagaagcaggggactccgcagcgggcccctgccttccacatgcccccaccatttttctttgccggtttgcatgagtggaaggtctaaatgtggctttttttttttttttcctgggaatttttttggggaaaagggagggatgggtctagggagtgggaaatgcgggagggagggtggggcaggggtcgggggtcgggtgtccgggagccagggaagactggaaatgctgccgccttctgcaatttatttatttttttcttttgagagagtgaaaggaagagacagatacttgaaacttggtgtgtggcctggttatttgggacctgggtgtggagggagatgggcgcacgagagtcagatccttcttcactccaagccagagaggttagtggcctggaaaatgggccagggaggtaactggcaaatcaaggaacccgagttggtgaagactgagcctgggaaggtctggagctctgtccaaagtcatgacaggccagaaaggggaggctggaacttgtctggggccctgcagacttagtccagctctgatccctgccggctgtctcagtcctgttggaagcacaacagtccttaaaggaaaatagagaggaacttcgttcattcatgttcatggagttgtgg

SEQ ID NO: 4176 - protein, 767 aa, Homo sapiens
  ref <308>: DATABASE ACCESSION NUMBER: SWISS-Prot / AAD56173
  ref <309>: DATABASE ENTRY DATE: 2002-06-15
MSQRPRAPRSALWLLAPPLLRWAPPLLTVLHSDLFQALLDILDYYEASLSESQKYRYQDEDTPPLEHSPAHLPNQANSPPVIVNTDTLEAPGYELQVNGTEGEMEYEEITLERGNSGLGFSIAGGTDNPHIGDDPSIFITKIIPGGAAAQDGRLRVNDSILFVNEVDVREVTHSAAVEALKEAGSIVRLYVMRRKPPAEKVMEIKLIKGPKGLGFSIAGGVGNQHIPGDNSIYVTKIIEGGAAHKDGRLQIGDKILAVNSVGLEDVMHEDAVAALKNTYDVVYLKVAKPSNAYLSDSYAPPDITTSYSQHLDNEISHSSYLGTDYPTAMTPTSPRRYSPVAKDLLGEEDIPREPRRIVIHRGSTGLGFNIVGGEDGEGIFISFILAGGPADLSGELRKGDQILSVNGVDLRNASHEQAAIALKNAGQTVTIIAQYKPEEYSRFEAKIHDLREQLMNSSLGSGTASLRSNPKRGFYIRALFDYDKTKDCGFLSQALSFRFGDVLHVIDASDEEWWQARRVHSDSETDDIGFIPSKRRVERREWSRLKAKDWGSSSGSQGREDSVLSYETVTQMEVHYARPIIILGPTKDRANDDLLSEFPDKFGSCVPHTTRPKREYEIDGRDYHFVSSREKMEKDIQAHKFIEAGQYNSHLYGTSVQSVREVAEQGKHCILDVSANAVRRLQAAHLHPIAIFIRPRSLENVLEINKRITEEQARKAFDRATKLEQEFTECFSAIVEGDSFEEIYHKVKRVIEDLSGPYIWVPARERL

SEQ ID NO: 4177 - DNA, 3083 bp, Rattus norvegicus; identical to SEQ ID NO: 4173
  ref <308>: DATABASE ACCESSION NUMBER: EMBL / M96853
  ref <309>: DATABASE ENTRY DATE: 2000-03-04

SEQ ID NO: 4178 - protein, 724 aa, Rattus norvegicus; identical to SEQ ID NO: 4174
  ref <308>: DATABASE ACCESSION NUMBER: SWISS-Prot / P31016
  ref <309>: DATABASE ENTRY DATE: 2002-06-15

SEQ ID NO: 4179 - DNA, 29640 bp, Homo sapiens; identical to SEQ ID NO: 4175
  misc_feature (1)..(29640): n=a, c, g or t
  ref <308>: DATABASE ACCESSION NUMBER: EMBL / AF156495
  ref <309>: DATABASE ENTRY DATE: 1999-09-26

SEQ ID NO: 4180 - protein, 767 aa, Homo sapiens; identical to SEQ ID NO: 4176
  ref <308>: DATABASE ACCESSION NUMBER: SWISS-Prot / AAD56173
  ref <309>: DATABASE ENTRY DATE: 2002-06-15

SEQ ID NO: 4181 - DNA, 3800 bp, Rattus norvegicus
  ref <308>: DATABASE ACCESSION NUMBER: EMBL / M99567
  ref <309>: DATABASE ENTRY DATE: 2001-03-06
gccgtggtggagaccctgcggcgcgggagtaaattcatcaaatgggacgaggaggcctccagtcggaacctggtgaccctgcgactggaccccaatggcttcttcttgtactggacaggacccaacatggaggtggacacactggacatcagctccatcagggacacaaggacaggtcgttatgcccgcctgcccaaggaccccaagattcgagaggtactgggctttgggggtcctgacacccggctggaggagaaactgatgacagtggtagcaggaccagatccagtaaacaccacattcttgaacttcatggccgtgcaagatgacacagtcaaggtctggtcagaggagttgtttaagctggctatgaacatactggctcagaacgctccggaacacgttcttcggaaagcatacacgaaactgaagctgcaggtgaaccaggatggacggattccagtcaagaacattctgaagatgttctccgcggacaagaagcgggtggagactgcactgatctgcggcctcaacttcaaccggagtgagtccattcggcctgatgagttttccttggaaatcttcgagcggttcttgaataagctgttgctgcgaccggatattgacaagatcctgctggagataggtgccaagggcaagccgtacctcactctggagcagctcatggactttatcaaccagaagcaaagagacccaagactcaacgaggtgctgtacccaccgcttcgctcctcacaggctcggctgctcattgagaagtatgagccgaacaaacagttcctggagcgcgaccagatgtctatggagggtttcagccgctatctgggaggggaggagaatggcatcctgcccctggaggccctggatctgagcatggacatgacgcagccactgagcgcatacttcatcaattcttcacacaatacctatctcactgcgggccagctggctggaacatcgtcagtggagatgtaccgccaggcgctgctgtggggctgccgttgtgtggagctggatgtatggaagggacggccaccggaggaagagcccttcattacccatggtttcaccatgaccactgaggtgccattgcgtgatgtgttagaggccatcgccgagacagccttcaagacctcaccctaccctgtcattctctccttcgaaaaccatgtggactcggcaaaacagcaggccaagatggcagagtactgccgctctatctttggggaagcgctgctcattgacccactggacaagtacccgctgtctgcgggcaccccccttcctagtccacaggacctgatgggccgtatcctggtgaagaataagaagcggcatcggcccagcacaggtgtccctgacagctccgtggccaagcggcctctggaacagagcaattcagccctgagtgagagctcagctgccacagagccctcctcaccccagctggggtcccccagctctgacagctgccctggcctaagcaatggggaagaggtgggacttgagaagaccagcctggagcctcagaagtctctaggtgaggagggcctcaaccgaggacctaatgttctcatgcctgaccgtgaccgagaggatgaggaggaagatgaagaagaggaggaaacaacggatccaaaaaagcccaccaccgatgagggcacagccagcagtgaggtcaacgccacagaggagatgtcgacactcgtcaattacgttgagcccgtcaagttcaagtcctttgaggcttctcgaaaaaggaacaagtgctttgagatgtcgtcctttgtggagaccaaggcgatggagcagctgaccaagagccccatggagttcgtggaatacaacaaacagcagcttagtcgcatctaccccaaggggacccgtgtggactcctccaactacatgcctcagctcttctggaacgtgggctgtcagcttgttgccctcaacttccagaccttggatttgccaatgcagctcaacgcaggcgtgtttgagtacaacgggcgcagtgggtacttgctcaagcctgagtttatgcggcggccggacaagtcttttgaccccttcactgaggtcatcgtagatggcatagtggccaacgccttgcgggtcaaggtgatttcggggcagtttctgtctgacaggaaggtgggcatctatgtcgaggtggacatgtttggtctcccagttgacacaagacgcaaatatcgcacacggacatcccaggggaactcattcaaccctgtgtgggatgaagaaccctttgacttccccaaggttgtgctgcccacgctggcctcacttcgcattgcagcctttgaggagggtggcagatttgttgggcatcgtatcctgcctgtctctgctatccgctcaggataccactacgtctgcctgcgaaatgaggccaaccaaccgttgtgcctgcctgccctgcttatctacactgaagcttctgactacatcccagatgaccaccaggactatgcggaggccttgatcaaccccatcaagcacgtcagcctaatggaccagcgggccaagcaactggctgctctcattggggagagtgaggctcaggccagtacagaaatgtgtcaggagaccccgtctcaacagcaaggctcacagctctcctccaaccccgtacctaacccactggatgactcacctcgatggcccccaggtcctaccacctcccccactagcacctccctcagtagcccagggcagcgagatgatctgatcgccagcatcctttctgaggtgaccccaacacccctagaggagctccgaagccacaaggctatggtgaagctccggagccggcaggatcgagacctgagggaactgcataaaaaacaccagcgcaaggctgtggccctcacccgccgccttctggatggcctggcccaggccagggctgaggggaagtgccggccctcctccagcgccctgagcagggccaccaatgtggaagacgtgaaggaggaagaaaaagaggcagccagacagtatcgagagttccagaaccgacaagtacagagcctgctggagctgagggaggcccaggcagatgcagagacagaacggaggctggagcatctgaaacaggctcagcagcggctcagggaggttgtcctggacgcacatacgactcagttcaagaggctgaaggagttgaatgaaagggagaagaaggagcttcagaagatcctggacaggaagcgcaacaacagcatctcagaggccaagacaagggagaaacacaagaaggaggtggaactgacagagatcaatcggaggcacatcactgagtcagtgaactccatcaggaggctggaagaggcccagaagcagcgccacgaacgcctcttggcagggcaacagcaggtcctccagcagctagtggaagaggagcccaagctggtggcccagctgacccaggagtgtcaggaacagcgagagaggctgccccaggagatccgtcggtgcctgctgggcgagacatcagagggattgggggatggccccctggtggcctgtgccagcaatggtcatgcagctgggagtggtgggcaccagtccggcgctgactcggagagccaggaggaaaacacccagctttgaactggcggagcaagaggtggccacaagactgggtgggcactgggctgtgggtagaagacactaatactttgggttttttttaaccttttatctttagaaattttatttttttaaaatccgaggcaaatcggaattcgtgtaca

SEQ ID NO: 4182 - DNA, 3705 bp, Homo sapiens
  ref <308>: DATABASE ACCESSION NUMBER: Refseq / NM_000932
  ref <309>: DATABASE ENTRY DATE: 2000-11-28
atggcgggcgcccagcccggcgtccacgcgctgcagttggagccgcccaccgtggtggagaccctgcggcgcgggagtaagttcatcaaatgggacgaggagacctccagtcggaacctggtgaccctgcgtgtggaccccaatggcttcttcttgtactggacgggccccaacatggaggtggacacactggacatcagttccatcagggacacacggacaggccggtacgcccgcctgcccaaggaccccaagatccgggaagttctgggctttgggggtcccgatgcccggctggaggagaagctgatgacggtggtgtctgggccagacccggtgaacacagtgttcttgaacttcatggccgtgcaggatgacacagccaaggtctggtctgaggagctattcaagctggctatgaacatcctggctcagaacgcctcccggaacaccttcctgcgcaaagcatacacgaagctgaagctgcaggtgaaccaggatggtcggatccccgtcaagaacatcctgaagatgttctcagcagacaagaagcgggtggagactgcgctggaatcctgtggcctcaaattcaaccggagtgagtccatccggcctgatgagttttccttggaaatctttgagcggttcctgaacaagctgtgtctgcggccggacattgacaagatcctgctggagataggcgccaagggcaagccatacctgacgctggagcagctcatggacttcatcaaccagaagcaacgcgacccgagactcaacgaagtgctgtacccgcccctgcggccctcccaggcccggctgctcatcgaaaagtatgagcccaaccagcagtttctggagcgagaccagatgtccatggagggctttagccgctacctgggaggcgaggagaatggcatcctgcccctggaagccctggatctgagcacggacatgacccagccactgagtgcctacttcatcaactcctcgcataacacctatctcactgcggggcagctggctgggacctcgtcggtggagatgtaccgccaggcactactatggggctgccgctgcgtggagctggacgtgtggaagggacggccgcctgaggaggaacccttcattacccacggcttcaccatgaccacagaggtgcctctgcgcgacgtgctggaggccattgccgagactgccttcaagacctcgccctaccccgtcatcctctccttcgagaaccatgtggactcggcaaagcaacaggcaaagatggctgagtactgccgctccatctttggagacgcgctactcatcgagcctctggacaagtacccgctggccccaggcgttcccctgcccagcccccaggacctgatgggccgtatcctggtgaagaacaagaagcggcaccgacccagcgcaggtggcccagacagcgccgggcgcaagcggcccctggagcagagcaattctgccctgagcgagagctccgcggccaccgagccctcctccccgcagctggggtctcccagctctgacagctgcccaggcctgagcaatggggaggaggtagggcttgagaagcccagcctggagcctcagaagtctctgggtgacgagggcctgaaccgaggcccctatgttcttggacctgctgaccgtgaggatgaggaggaagatgaggaagaggaggaacagacagaccccaaaaagccaactacagatgagggcacagccagcagcgaggtgaatgccactgaggagatgtccacgcttgtcaactacatcgaacctgtcaagttcaagtcctttgaggctgctcgaaagaggaacaaatgcttcgagatgtcgtcctttgtggagaccaaggccatggagcaactgaccaagagccccatggagtttgtggaatacaacaagcagcagctcagccgcatctaccccaagggcacccgcgtggactcctccaactacatgccccagctcttctggaacgtagggtgccagcttgttgcgctcaacttccagaccctcgatgtggcgatgcagctcaacgcgggcgtttttgagtacaacgggcgcagcgggtacctgctcaagccggagttcatgcggcggccggacaagtccttcgaccccttcactgaggtcatcgtggatggcatcgtggccaatgccttgcgggtcaaggtgatctcagggcagttcctgtccgacaggaaggtgggcatctacgtggaggtggacatgtttggcctccctgttgatacgcggcgcaagtaccgcacccggacctctcaggggaactcgttcaaccccgtgtgggacgaagagcccttcgacttccccaaggtggtgctgcccacgctggcttcacttcgcattgcagcctttgaggaggggggtaaattcgtagggcaccggatcctgcctgtctctgccatccgctccggataccactacgtctgcctgcggaacgaggccaaccaaccgctgtgcctgccggccctgctcatctacaccgaagcctcggactacattcctgacgaccaccaggactatgcggaggccctgatcaaccccattaagcacgtcagcctgatggaccagagggcccggcagctggccgccctcattggggagagtgaggctcaggctggccaagagacgtgccaggacacccagtctcagcagctggggtctcagccgtcctcaaaccccacccccagcccactggatgcctccccccgccggccccctggccccaccacctcccctgccagcacctccctcagcagcccagggcagcgtgatgatctcatcgccagcatcctctcagaggtggcccccaccccgctggatgagctccgaggtcacaaggctctggtcaagctccggagccggcaagagcgagacctgcgggagctgcgcaagaagcatcagcggaaggcagtcaccctcacccgccgcctgctggatggcctggctcaggcacaggctgagggcaggtgccggctgcggccaggtgccctaggtggggccgctgatgtggaggacacgaaggagggggaggacgaggcaaagcggtatcaggagttccagaacagacaggtgcagagcctgctggagctgcgggaggcccaggtggacgcagaggcccagcggaggctggaacacctgagacaggctctgcagcggctcagggaggtcgtccttgatgcaaacacaactcagttcaagaggctgaaagagatgaacgagagggagaagaaggagctgcagaagatcctggacagaaagcgccataacagcatctcggaggccaagatgagggacaagcataagaaggaggcggaactgacggagattaaccgtcggcacatcactgagtcagtcaactccatccgtcggctggaggaggcccagaagcagcggcatgaccgtcttgtggctgggcagcagcaggtcctgcaacagctggcagaagaggagcccaagctgctggcccagctggcccaggagtgtcaggagcagcgggcgaggctcccccaggagatccgccggagcctgctgggcgagatgccggaggggctgggggacgggcctctggtggcctgtgccagcaacggtcacgcacccgggagcagcgggcacctgtcgggcgctgactcggagagccaggaggagaacacgcagctctga

SEQ ID NO: 4183 - protein, 1234 aa, Homo sapiens
  ref <308>: DATABASE ACCESSION NUMBER: SWISS-Prot / Q01970
  ref <309>: DATABASE ENTRY DATE: 2002-06-15
MAGAQPGVHALQLEPPTVVETLRRGSKFIKWDEETSSRNLVTLRVDPNGFFLYWTGPNMEVDTLDISSIRDTRTGRYARLPKDPKIREVLGFGGPDARLEEKLMTVVSGPDPVNTVFLNFMAVQDDTAKVWSEELFKLAMNILAQNASRNTFLRKAYTKLKLQVNQDGRIPVKNILKMFSADKKRVETALESCGLKFNRSESIRPDEFSLEIFERFLNKLCLRPDIDKILLEIGAKGKPYLTLEQLMDFINQKQRDPRLNEVLYPPLRPSQARLLIEKYEPNQQFLERDQMSMEGFSRYLGGEENGILPLEALDLSTDMTQPLSAYFINSSHNTYLTAGQLAGTSSVEMYRQALLWGCRCVELDVWKGRPPEEEPFITHGFTMTTEVPLRDVLEAIAETAFKTSPYPVILSFENHVDSAKQQAKMAEYCRSIFGDALLIEPLDKYPLAPGVPLPSPQDLMGRILVKNKKRHRPSAGGPDSAGRKRPLEQSNSALSESSAATEPSSPQLGSPSSDSCPGLSNGEEVGLEKPSLEPQKSLGDEGLNRGPYVLGPADREDEEEDEEEEEQTDPKKPTTDEGTASSEVNATEEMSTLVNYIEPVKFKSFEAARKRNKCFEMSSFVETKAMEQLTKSPMEFVEYNKQQLSRIYPKGTRVDSSNYMPQLFWNVGCQLVALNFQTLDVAMQLNAGVFEYNGRSGYLLKPEFMRRPDKSFDPFTEVIVDGIVANALRVKVISGQFLSDRKVGIYVEVDMFGLPVDTRRKYRTRTSQGNSFNPVWDEEPFDFPKVVLPTLASLRIAAFEEGGKFVGHRILPVSAIRSGYHYVCLRNEANQPLCLPALLIYTEASDYIPDDHQDYAEALINPIKHVSLMDQRARQLAALIGESEAQAGQETCQDTQSQQLGSQPSSNPTPSPLDASPRRPPGPTTSPASTSLSSPGQRDDLIASILSEVAPTPLDELRGHKALVKLRSRQERDLRELRKKHQRKAVTLTRRLLDGLAQAQAEGRCRLRPGALGGAADVEDTKEGEDEAKRYQEFQNRQVQSLLELREAQVDAEAQRRLEHLRQALQRLREVVLDANTTQFKRLKEMNEREKKELQKILDRKRHNSISEAKMRDKHKKEAELTEINRRHITESVNSIRRLEEAQKQRHDRLVAGQQQVLQQLAEEEPKLLAQLAQECQEQRARLPQEIRRSLLGEMPEGLGDGPLVACASNGHAPGSSGHLSGADSESQEENTQL

SEQ ID NO: 4184 - DNA, 3800 bp, Rattus norvegicus; identical to SEQ ID NO: 4181
  ref <308>: DATABASE ACCESSION NUMBER: EMBL / M99567
  ref <309>: DATABASE ENTRY DATE: 2001-03-06

SEQ ID NO: 4185 - DNA, 3705 bp, Homo sapiens; identical to SEQ ID NO: 4182
  ref <308>: DATABASE ACCESSION NUMBER: Refseq / NM_000932
  ref <309>: DATABASE ENTRY DATE: 2000-11-28

SEQ ID NO: 4186 - protein, 1234 aa, Homo sapiens; identical to SEQ ID NO: 4183
  ref <308>: DATABASE ACCESSION NUMBER: SWISS-Prot / Q01970
  ref <309>: DATABASE ENTRY DATE: 2002-06-15

SEQ ID NO: 4187 - DNA, 3800 bp, Rattus norvegicus; identical to SEQ ID NO: 4181
  ref <308>: DATABASE ACCESSION NUMBER: EMBL / M99567
  ref <309>: DATABASE ENTRY DATE: 2001-03-06

SEQ ID NO: 4188 - DNA, 3705 bp, Homo sapiens; identical to SEQ ID NO: 4182
  ref <308>: DATABASE ACCESSION NUMBER: Refseq / NM_000932
  ref <309>: DATABASE ENTRY DATE: 2000-11-28

SEQ ID NO: 4189 - protein, 1234 aa, Homo sapiens; identical to SEQ ID NO: 4183
  ref <308>: DATABASE ACCESSION NUMBER: SWISS-Prot / Q01970
  ref <309>: DATABASE ENTRY DATE: 2002-06-15

SEQ ID NO: 4190 - DNA, 301 bp, Rattus norvegicus
  ref <308>: DATABASE ACCESSION NUMBER: EMBL / AA684919
  ref <309>: DATABASE ENTRY DATE: 2000-03-08
aaaccccgagtttatttaaccattttggaggtttaagagcatggtaccagcaattgtttccctccaatcggcatctcctagctacatcacagtgtggtgaaatggtggttaaccctcattgtcatcttgactgcatctggactcacataggaggcacctctgggagtatgtgggagggtactgccagagaggcttaacaggatggcagacatttctgaatatgggcagcagcaaaccatcagctgtggtcctgagctgtgccttgtgctggagggcaggtctgtaggtagcatgatggtcg

SEQ ID NO: 4191 - DNA, 325 bp, Rattus norvegicus
  ref <308>: DATABASE ACCESSION NUMBER: EMBL / AA685221
  ref <309>: DATABASE ENTRY DATE: 2000-03-08
aaataaatcatttttttaattttggaaaaaaagaatcaaaaggcagggagaggggggactaggaagagctgagtaggtaaacaccttgcttctatctcaaggacagactttggtctccagaaccctgggttcccttgtagtcctagcactgggtaggcagagacacttgggtccctggggctctctagccagtctagccgtatgtatgtatgtatgtatgtatgtatgtatgtatgtatgtatgtgtgtatgtggtttcttagtataggatctgtggggattggaggacaaggggccatggaaaatgccatatggtgaagcaagg

SEQ ID NO: 4192 - DNA, 371 bp, Rattus norvegicus
  misc_feature (1)..(371): n=a, c, g or t
  ref <308>: DATABASE ACCESSION NUMBER: EMBL / AA685974
  ref <309>: DATABASE ENTRY DATE: 2000-03-08
gcctcgccacagcctttattgcgcgggcactccaccgggctctgcaggatgcacgggggctaggatgtcagagcggggaccctctggtttgttgagggtgacctatggcgcantgggagacccccagacccggaactctattaatccctggtcaggccaggctgaagagggatgagctgacttggacaagctggattcagcccggttctgtcacttgggtgcattgaagggcagcgcacgctggtttcatcgggttgtcaggagagcgcaaccactccttcttcagcagctgcttcagctgtnagagccgcatgttggggttttcctgcttcaaccgtggcagcttcanctcctcaaatgcggtgaaggcc

SEQ ID NO: 4193 - protein, 217 aa, Rattus norvegicus
  ref <308>: DATABASE ACCESSION NUMBER: SWISS-Prot / BAB25123
  ref <309>: DATABASE ENTRY DATE: 2001-06-01
MPKKFQGENSKSAAARARRAEAKAAADAKKQKELEDAYWKDEDKHVMRKEQRKEEKEKRRLEQLERKKETQRLLEEEDSRLKGGKAPRVAPAKVTRAQIEDSLRREQRAEPVEKAKSHLELPLEENLNRRLQEEGSVEARTVEDAIAVLSVAEEADRHPERRMRAAFTAFEEVQLPRLKQENPNMRLSQLKQLLKKEWLRSPDNPMNQRALPFNAPK

SEQ ID NO: 4194 - DNA, 1070 bp, Homo sapiens
  ref <308>: DATABASE ACCESSION NUMBER: EMBL / BC013949
  ref <309>: DATABASE ENTRY DATE: 2001-09-11
ggcacgagggagacggactcttgctatgttgcccaggctggtcttgaactcctggcctcaagcaatcctcctgcctcagcctcccaaagcacggggattacaaaccctgctgagggatgcccaagaagttccagggtgagaacaccaagtcggcagcggcccgggcacggagggcagaggccaaggcggccgctgatgccaagaagcagaaggagctggaggatgcctactggaaggacgacgacaaacacgtcatgaggaaggagcagcgcaaggaggagaaggagaagcggcgcctcgaccagctggaacgtaagaaggagacgcagcgcctactggaggaggaggactccaagctcaagggcggcaaggcgccgcgggtggccacgtccagcaaggtcacccgggcccagatcgaggacacgctgcgccgagaccatcagctcagggaggccccggacacagccgagaaagccaagagccatctggaggtgccgctggaggagaacgtgaaccgccgcgtgctggaggagggcagcgtggaggcgcgcaccatcgaggacgccattgcagtgctcagcgtggcggaggaggcggccgaccggcacccagaaagacgcatgcgggcagccttcacagcctttgaggaagcccagctgccgcggctcaaacaagagaaccccaacatgcggctgtcgcagctgaaacagctgctcaagaaggagtggctccgctctcctgacaaccccatgaaccagcgggccgtgcccttcaatgcccccaagtgagcccagaacttggggagccagttcacccacggggtggtccaggtcacgactctgcacgcccttaggccaggtcagctgcgagggtcacagagcgttccgggggccaaggcgccgggccccggggccatgctcttatcaccagccacccgtcctcccgccagagggtccctgccccgagtgacaccccatcccctcccatcccccggcgcgtgtgtgtagagcctcagggctgagtgcccaataaaggtggcggcaaggctaaaaaaaaaaaaaaaaaaaaaa

SEQ ID NO: 4195 - protein, 223 aa, Homo sapiens
  ref <308>: DATABASE ACCESSION NUMBER: SWISS-Prot / AAH13949
  ref <309>: DATABASE ENTRY DATE: 2001-12-01
MPKKFQGENTKSAAARARRAEAKAAADAKKQKELEDAYWKDDDKHVMRKEQRKEEKEKRRLDQLERKKETQRLLEEEDSKLKGGKAPRVATSSKVTRAQIEDTLRRDHQLREAPDTAEKAKSHLEVPLEENVNRRVLEEGSVEARTIEDAIAVLSVAEEAADRHPERRMRAAFTAFEEAQLPRLKQENPNMRLSQLKQLLKKEWLRSPDNPMNQRAVPFNAPK

SEQ ID NO: 4196 - DNA, 373 bp, Rattus norvegicus
  misc_feature (1)..(373): n=a, c, g or t
  ref <308>: DATABASE ACCESSION NUMBER: EMBL / AA686164
  ref <309>: DATABASE ENTRY DATE: 2000-03-08
cagttgataatgttttactatgacttagaactttttcccccaagaacaaaattatttgcataaaaattcaggtatctgaaagactcaaaaggctattttncactttgttcaagtnctgcttccaggcattaagagtgtcgtacagttgtngccactgctgttttccaaatgtccgatgtgtgctgtgactgacaactacttttctttgtgtctgatcgattttgcagtagaccattttagttcttacagcatcaataacaaatgcttcaacatcatcagctccaatctgtagctcttgctgcattgtatcaaaagaaatctctttgttttccactgccattcccataaaggtgaggngtctcattttcgccat

SEQ ID NO: 4197 - protein, 374 aa, Rattus norvegicus
  ref <308>: DATABASE ACCESSION NUMBER: SWISS-Prot / AAH05598
  ref <309>: DATABASE ENTRY DATE: 2002-06-01
MSVPAFIDISEEDQAAELRAYLKSKGAELSEENSEGGLHVDLAQIIEACDVCLKEDDKDVESVMNSVVSLLLILEPDKQEALIESLCEKLVKFREGERPSLRLQLLSNLFHGMDKNTPVRYTVYCSLIKVAASCGAIQYIPTELDQVRKWISDWKLTTEKKHTLLRLLYEALVDCKKSDAASKVMVELLGSYTEDNASQARVDAHRCIVRALKDPNAFLFDHLLTLKPVKFLEGELIHDLLTIFVSAKLASYVKFYQNNKDFIDSLGLLHEQNMAKMRLLTFMGMAVENKEISFDTMQQELQIGADDVEAFVIDAVRTKMVYCKIDQTQRKVVVSHSTHRTFGKQQWQQLYDTLNAWKQNLNKVKNSLLSLSDT

SEQ ID NO: 4198 - DNA, 1249 bp, Homo sapiens
  ref <308>: DATABASE ACCESSION NUMBER: EMBL / AF064603
  ref <309>: DATABASE ENTRY DATE: 1998-05-26
gggtcggcgtggtcttgcgagtggagtgtccgctgtgcccgggcctgcaccatgagcgtcccggccttcatcgacatcagtgaagaagatcaggctgctgagcttcgtgcttatctgaaatctaaaggagctgagatttcagaagagaactcggaaggtggacttcatgttgatttagctcaaattattgaagcctgtgatgtgtgtctgaaggaggatgataaagatgttgaaagtgtggtgaacagtgtggtatccctactcttgatcctggaaccagacaagcaagaagctttgattgaaagcctatgtgaaaagctggtcaaatttcgcgaaggtgaacgcccgtctctgagactgcagttgttaagcaaccttttccacgggatggataagaatactcctgtaagatacacagtgtattgcagccttattgaagtggtagcatcttgtggggccatccagtacatcccaactgagctggatcaagttagaaaatggatttctgactggaatctcaccactgaaaaaaagcacacccttttaagactactttatgaggcacttgcggattgtaagaagagtgatgctgcttcaaaagtcatggtggaattgctcggaagttacacagaggacaatgcttcccaggctcgagttgatgcccacaggtgtattgtcgaaccattgaaagatccaaatgcatttctttttgaccaccttcttactttaaaaccagtcaagtttttggaaggcgagcttattcatgatcttttaaccatttttgtgagtgctaaattggcatcatatgtcaagttttatcagaataataaagacttcattgattcacttggcctgttacatgaacagaatatggcaaaaatgagactacttacttttatgggaatggcaatagaaaataaggaaatttcttttgacacaatgcagcaagaacttcagattggagctgatgatgttgaagcatttgttattgacgccgtaagaactaaaatggtctactgcaaaattgatcagacccagagaaaagtagttgtcagtcatagcacacatcggacatttggaaaacagcggtggcaacaactgtatgacacacttaatgcctggaaacaaaatctgaacaaagtgaaaaacagccttttgagtctttccgatacctgagtttttatgcttataatttttgttctttgaaaaaaaagccctaaatcatagtaagacattataaaccaaaaaa

SEQ ID NO: 4199 - protein, 375 aa, Homo sapiens
  misc_feature (1)..(375): Xaa=Unknown amino acid
MSVPAFIDISEEDQAAELRAYLKSKGAEISEENSEGGLHVDLAQIIEACDVCLKEDDKDVESVVNSVVSLLLILEPDKQEALIESLCEKLVKFREGERPSLRLQLLSNLFHGMDKNTPVRYTVYCSLIEVVASCGAIQYIPTELDQVRKWISDWNLTTEKKHTLLRLLYEALADCKKSDAASKVMVELLGSYTEDNASQARVDAHRCIVEPLKDPNAFLFDHLLTLKPVKFLEGELIHDLLTIFVSAKLASYVKFYQNNKDFIDSLGLLHEQNMAKMRLLTFMGMAIENKEISFDTMQQELQIGADDVEAFVIDAVRTKMVYCKIDQTQRKVVVSHSTHRTFGKQRWQQLYDTLNAWKQNLNKVKNSLLSLSDTX

SEQ ID NO: 4200 - DNA, 619 bp, Rattus norvegicus
  ref <308>: DATABASE ACCESSION NUMBER: EMBL / AA799279
  ref <309>: DATABASE ENTRY DATE: 2000-03-03
cccaagattaaatgattattaaaaaagcgtgccactgtatagaaatcaacattctctcccataattctgtgcattgggactatagaaatgtcactgtccctgctccacatcttcaaattaacattctcaggtcacaatagtaagtcttcccacaaggaaccttccggaaaaacaagctgtttcctcggctcatatttcccgctttttgtagcatgcaccagcaatctatccaagaagtatatattggggagtaaggaggagatccaccagcaagcccacagttgttaacagccataagattagatacaagcacaaagggatatgtcaacatactggcaaagaatcctgtgacagcttgggaataacttttcatttcattcatggtagagaccccactgtccagtgcataggtattgatgagataagccagtgagttacacagccacaaagaaatgatgtcacctaggaggcgaggaatgaggcccgcaaaaaatcctacgatgccttcttcccggtagatggttactatggagtcacacagtccgcagtacttagactctctgccgataaactgtaccatggacctcagagtaatcaccttgaagggatgtgtaatgag

SEQ ID NO: 4201 - DNA, 619 bp, Rattus norvegicus; identical to SEQ ID NO: 4200
  ref <308>: DATABASE ACCESSION NUMBER: EMBL / AA799279
  ref <309>: DATABASE ENTRY DATE: 2000-03-03

SEQ ID NO: 4202 - DNA, 506 bp, Rattus norvegicus
  ref <308>: DATABASE ACCESSION NUMBER: EMBL / AA799299
  ref <309>: DATABASE ENTRY DATE: 2000-03-03
aaaggacagcttaaataggcaatgcagaaggaaaggtggccccagtggcagtaaacagaaaggagtgagcaccatcacccccaggggcaggtgtcccccggacagccatggctgctggcttacaggctctctgggctcacaggggaagtcactagggatggggacagggtccaaggacaggtgagtatcaacagagccttcctgtgtaatgagatcaaagagtaaagaactggagagagctgccagctcttccttctccatgatagatgacagcatcttgcccctcgacgatccagagctgacttctgcccgaagcaggtccccagtagagaggtgggtgtagccatatttctgcacaatcttctcacactgggtaccttttcctgagccaggcccgcccaccacgaagatgatcttggccttcttcagcttgtcttccatcctgctgaggtctgggagctaggtcagcgctctgggggagggtgtggtgggcgctggggccagtc

SEQ ID NO: 4203 - protein, 123 aa, Rattus norvegicus
  ref <308>: DATABASE ACCESSION NUMBER: SWISS-Prot / P39069
  ref <309>: DATABASE ENTRY DATE: 2002-06-15
VLDMLRDAMLAKVDSSNGFLIDGYPREVKQGESFERKIAQPTLLLYVDAGPETMTQRLLKRGETSGRVDDNEETIKKRLETYYKATEPVISFYDKRGIVRKVNLEGSWDTVFSQVSTYLDSLK

SEQ ID NO: 4204 - DNA, 585 bp, Homo sapiens
  ref <308>: DATABASE ACCESSION NUMBER: EMBL / AB021871
  ref <309>: DATABASE ENTRY DATE: 1999-06-04
atggaagagaagctgaagaaaaccaagatcatctttgtggtgggtgggcctggctcagggaagggcacccagtgtgagaagatcgtgcagaagtatggctacacccacctctccaccggggacctcctgcggtccgaggtcagctcaggctcggccaggggcaagaagctgtcggaaatcatggagaaggggcagctggttccactggagacagtgttggacatgctccgggatgccatggtggccaaagtcaatacttccaaaggcttcctgattgatggctacccgcgggaggtgcagcaaggagaagagtttgagcgacggattggacagcccacactgctgctgtatgtggacgcaggccctgagaccatgacccagcggctcttgaaacgtggagagaccagcgggcgtgtggacgacaatgaggagaccatcaaaaagcggctggagacctattacaaggccacagaacccgtcatcgccttctatgagaaacgtggcattgtgcgcaaggtcaacgctgagggctccgtggacagtgtcttctcccaggtctgcacccacctggacgccctaaagtag

SEQ ID NO: 4205 - protein, 194 aa, Homo sapiens
  ref <308>: DATABASE ACCESSION NUMBER: SWISS-Prot / P00568
  ref <309>: DATABASE ENTRY DATE: 2002-06-15
MEEKLKKTKIIFVVGGPGSGKGTQCEKIVQKYGYTHLSTGDLLRSEVSSGSARGKKLSEIMEKGQLVPLETVLDMLRDAMVAKVNTSKGFLIDGYPREVQQGEEFERRIGQPTLLLYVDAGPETMTQRLLKRGETSGRVDDNEETIKKRLETYYKATEPVIAFYEKRGIVRKVNAEGSVDSVFSQVCTHLDALK

SEQ ID NO: 4206 - DNA, 328 bp, Rattus norvegicus
  ref <308>: DATABASE ACCESSION NUMBER: EMBL / AA799323
  ref <309>: DATABASE ENTRY DATE: 2000-03-03
atgtgttgtgtacagtcgcacagaaattgttttattcaggtgagaagaaaacaggtgggagaactcagaatacaaaagaacgaacatctcgtcctcctccagccttgagactttctggaatatccgtgaggtctccaaagttcccctggcaagttacacaggcacaagattgttttctttgagtgccgggatgcggtgaacaaacatacaaagtgagaattcttgcttcagtgaatattaaataaacaataatgctacagctgggacccatctgagtgaaggcgtacgacagaacgccaactgaaagttcaaagtctggtcatgaatt

SEQ ID NO: 4207 - protein, 350 aa, Rattus norvegicus
  ref <308>: DATABASE ACCESSION NUMBER: Refseq / NP_062422
  ref <309>: DATABASE ENTRY DATE: 2002-09-19
MEPKRIREGYLVKKGSVFNTWKPMWVVLLEDGIEFYKKKSDNSPKGMIPLKGSTLTSPCQDFGKRMFVLKITTTKQQDHFFQAAFLEERDAWVRDIKKAIKCIEGGQKFARKSTRRSIRLPETIDLGALYLSMKDPEKGIKELNLEKDKKVFNHCLTGSGVIDWLVSNKLVRNRQEGLMISASLLSEGYLQPAGDLSKNAADGIAENPFLDSPDAFYYFPDSGFFCEENSSDDDVILREEFRGVIIKQGCLLKQGHRRKNWKVRKFILREDPAYLHYYDPAGGEDPLGAVHLRGCVVTSVESSHDVKKSDEENLFEIITADEVHYYLQAATSKERTEWIKAIQVASRTGK

SEQ ID NO: 4208 - DNA, 2745 bp, Homo sapiens
  ref <308>: DATABASE ACCESSION NUMBER: EMBL / X07743
  ref <309>: DATABASE ENTRY DATE: 1993-09-12
ggcccagctgctgagaggagttgcctgagagtgacctttgcatctgcctgtccagccagcatggaaccaaagcggatcagagagggctaccttgtgaagaaggggagcgtgttcaatacgtggaaacccatgtgggttgtattgttagaagatggaattgaattctataagaagaaaagtgacaacagccccaaaggaatgatcccgctgaaagggagcactctgactagcccttgtcaagactttggcaaaaggatgtttgtgtttaagatcactacgaccaaacagcaggaccacttcttccaggcagccttcctggaggagagagatgcctgggttcgggatatcaataaggccattaaatgcattgaaggaggccagaaatttgccaggaaatctaccaggaggtccattcgactgccagaaaccattgacttaggtgccttatatttgtccatgaaagacactgaaaaaggaataaaagaactgaatctagagaaggacaagaagatttttaatcactgcttcacaggtaactgcgtcattgattggctggtatccaaccagtctgttaggaatcgccaggaaggcctcatgattgcttcatcgctgctcaatgaggggtatctgcagcctgctggagacatgtccaagagtgcagtggatggaactgctgaaaaccctttcctggacaaccctgatgccttctactactttccagacagtgggttcttctgtgaagagaattccagtgatgatgatgtgattctgaaagaagaattcagaggggtcattatcaagcagggatgtttactgaagcaggggcatagaaggaaaaactggaaagtgaggaagttcatcttgagagaagaccctgcctacctgcactactatgaccctgctggggcagaagatcccctgggagcaattcacttgagaggctgtgtggtgacttcagtggagagcaactcaaatggcaggaagagtgaggaagagaacctttttgagatcatcacagcagatgaagtgcactatttcttgcaagcagccacccccaaggagcgcacagagtggatcaaagccatccagatggcctcccgaactgggaagtaaagagactcctgcattcctcctcccctcctgagggaagcccatggacaagctcagtccaggacctgtccacttctgtgacaaatcaacgggaaacagcccaggggtgggaagttttcatttgcaggggggtctgaatgtaactcaccatgtggtgtgcaaggttcccctgcattgtattgctcactgcagcccctctgcccctatccatgacccccaagcagatataacaagctgtgcagcctcagtaggctgcttgccctctccagcctcagggcctcttctggaaaatgaagaaattcaactagtagattcctgaggtccccctagcttaaaaaaaaaaaaatctgccccatgattctaacactcgcagtagtgatagtgtatctagttgttctgctggtgtccttccttggctaagtcttggccttcagttatcttcaaatgtaccagaacctgagccaacgcctccctgtgaaactgttgctgatctgtagtacagtaccaggaagaaacctcttttgttctctttagacatcttctacttgctcttggccttgagatcgtgtaacaaaatgaaggagggctctcttctttcttcctcatcctactcaaaaacttcccgagagcagtggtggttttgagggttttgacttctattacttttggcagcctggaaagttgtgtcttctgggaaagagacccggggaggccaggagtagctgagggtcctttctgtgcccttaaaccgcccagaggagccctattccactctggttttaggctgatctgagagggtctccctttgttcctttctggagcatttctctaacgtttattacaattaggagggggaccccacatctgtgagattctgtttcatttgaggtttacagaaaaaaaaaagtggccagatgtgttccccccatgggtgagaggcctgggcaactgcctggtgaatgtgtcttgcggcagctgcagcaagtggaggggctgaactactggccagctcactggatgatgggttaatacaacaactgcactgtaaggactcagagccacacagaacttctgagaggggctgttagcattgcgcagcatcttcagttctccagtaaatgatattgcgttcgtgcctcagctttaagcacaagtagcagcagctcctgcttgagttctgagggcatcatggccctatgattaaccagagtgatctaacctagactaaaattgggaacttatttgcaatttttgaccctgaccactaactagtgattcttctccaaaattgagaaagacagcacccattgaaacagatatgtgtgtgaaagtatatttttcaattccagatttttaattttaaggctccaggaaagaaaggagagtagaacatttttcctcattttatcaaatcctctcttgccctccctcaattcccctgtaacattcctgaagctgttcccactcccagatggttttatcaatagcctagaggtaaagaactgtctttttctctgattctttaataaattatctttatagaatatgcacaagtttttctacactcagtgttaaagtatttattaatgggaagtcaacttaatgttttgaaataaatatatgactctgtttaat

SEQ ID NO: 4209 - protein, 350 aa, Homo sapiens
  ref <308>: DATABASE ACCESSION NUMBER: SWISS-Prot / P08567
  ref <309>: DATABASE ENTRY DATE: 2002-06-15
MEPKRIREGYLVKKGSVFNTWKPMWVVLLEDGIEFYKKKSDNSPKGMIPLKGSTLTSPCQDFGKRMFVFKITTTKQQDHFFQAAFLEERDAWVRDINKAIKCIEGGQKFARKSTRRSIRLPETIDLGALYLSMKDTEKGIKELNLEKDKKIFNHCFTGNCVIDWLVSNQSVRNRQEGLMIASSLLNEGYLQPAGDMSKSAVDGTAENPFLDNPDAFYYFPDSGFFCEENSSDDDVILKEEFRGVIIKQGCLLKQGHRRKNWKVRKFILREDPAYLHYYDPAGAEDPLGAIHLRGCVVTSVESNSNGRKSEEENLFEIITADEVHYFLQAATPKERTEWIKAIQMASRTGK

SEQ ID NO: 4210 - DNA, 637 bp, Rattus norvegicus
  ref <308>: DATABASE ACCESSION NUMBER: EMBL / AA799328
  ref <309>: DATABASE ENTRY DATE: 2000-03-03
agctgtaaaaacaacatttattactttataatattgagaatgagtatttgggccaaaacaatgggaatgccatacaaataattttttcatcttatatttcaaaacctactacagatattacactgttttttaattgattcacctgtatttgatttgggaaaaatacattgggcaggggacacaaaatatcacacaatagcactaggaaatgtctggaaaataaggggagttgtggattaggatcatgttagctctcatacaggacatatttcagttatgataaaggaagaattgaagcaatcgctggatcccagcaacattccttcagcatctcatctactcctactttctctcaaataatctaagatctctggccttctgttcataaatactccttgactctgtttttgatgagattacttctgaacgcagttttctttctcttcaaaggaccaagacttgagtgtcacactgctgagaattgtcccaggttgtgtccaatatcctcctagcactctccattgtgaatcgtatcaagtagaaaccacctattcccatgtttgctctccacaactcaagtccagaaagtctcaggtacatgcattctgtggcagagaccagctccttgcttgctcaa

SEQ ID NO: 4211 - DNA, 637 bp, Rattus norvegicus; identical to SEQ ID NO: 4210
  ref <308>: DATABASE ACCESSION NUMBER: EMBL / AA799328
  ref <309>: DATABASE ENTRY DATE: 2000-03-03

SEQ ID NO: 4212 - DNA, 617 bp, Rattus norvegicus
  ref <308>: DATABASE ACCESSION NUMBER: EMBL / AA799330
  ref <309>: DATABASE ENTRY DATE: 2000-03-03
tatttaattggaatacatgtcctgccaaccaaaccataaaacacttcatgggaacccatcacacatgaaaccccagcaggaccaacaagtgcggccttgcacttgtcaaggatgctgtagaagaagaaactattgagtttccgtcttaatcctcttcagaacttgaatcatcctcttggtcagaaagttccggcacagggaagcggagaatggcagctactccagtcagctgaccaagctgttccccagacacgtggagactggagaatatccttacggtgcccgcattctctttcacactgtccaccagcctgacataccggctccgggtggccacatcctgatgccggaagagctcatcactgatgagcaaggtgtcaatcgccaaggcttcattggccctctccacctgcttgagtccatagaatgctcggtcaggttcgtgctgtaacattttgtagaagtcatccaaggcttttacttccccggcagctttcgtgtctgaaaggcggctcgctacagtaggatcacataggacctctttcagggagtacctgtgtccagaggaggcgtgtacctgaaggaatttggagccgttttccaggagcaccttgttt

SEQ ID NO: 4213 - protein, 385 aa, Rattus norvegicus
  ref <308>: DATABASE ACCESSION NUMBER: SWISS-Prot / AAK58116
  ref <309>: DATABASE ENTRY DATE: 2003-02-01
MKLVRKDIEKDNAGQVTLVPEEPEDMWHTYNLVQVGDSLRASTIRKVQTESSTGSVGSNRVRTTLTLCVEAIDFDSQACQLRVKGTNIQENEYVKMGAYHTIELEPNRQFTLAKKQWDSVVLERFEQACDPAWSADVAAVVMQEGLAHVCLVTPSMTLTRAKVEVNIPRKRKGNCSQHDPALERFYEQVVQAIQRHINFEVVKCVLVASPGFVREQFCDYMFQQAVKTDNKVLLENRSKFLQVHASSGHKYSLKEALCDPTVASRLSHTKAAGEVKALDDFYKMLQHEPDRAFYGLKQVERANEALAIDTLLISDELFRHQDVATRSRYVRLVDSVKENAGTVRIFSSLHVSGEQLGQLTGVAAILRFPVPELSDQEDDSSSEED

SEQ ID NO: 4214 - DNA, 1680 bp, Homo sapiens
  ref <308>: DATABASE ACCESSION NUMBER: Refseq / NM_015946
  ref <309>: DATABASE ENTRY DATE: 2002-11-05
gcccgctgttgcgtgctgccagcgggaactgtgtaggggtagattttcgctgcagtgttccccgagcctgttagacgcagcgcgccgggagactgagagaggaaaggatagaggaagtgctgccctaggctgcatgagtcgaagcaagcgtgtttccttcccgccaggcaagtgcccttagaaaccgggccccgcccccttcctggcctgcattcccatcccctctcccggggcggaggtgaggacctctttggttcctttggttctgtcagtgagccccttccttggccatgaagctcgtgaggaagaacatcgagaaggacaatgcgggccaggtgaccctggtccccgaggagcctgaggacatgtggcacacttacaacctcgtgcaggtgggcgacagcctgcgcgcctccaccatccgcaaggtacagacagagtcctccacgggcagcgtgggcagcaaccgggtccgcactaccctcactctctgcgtggaggccatcgacttcgactctcaagcctgccagctgcgggttaaggggaccaacatccaagagaatgagtatgtcaagatgggggcttaccacaccatcgagctggagcccaaccgccagttcaccctggccaagaagcagtgggatagtgtggtactggagcgcatcgagcaggcctgtgacccagcctggagcgctgatgtggcggctgtggtcatgcaggaaggcctcgcccatatctgcttagtcactcccagcatgaccctcactcgggccaaggtggaggtgaacatccctaggaaaaggaaaggcaattgctctcagcatgaccgggccttggagcggttctatgaacaggtggtccaggctatccagcgccacatacactttgatgttgtaaagtgcatcctggtggccagcccaggatttgtgagggagcagttctgcgactacatgtttcaacaagcagtgaagaccgacaacaaactgctcctggaaaaccggtccaaatttcttcaggtacatgcctcctccggacacaagtactccctgaaagaggccctttgtgaccctactgtggctagccgcctttcagacactaaagctgctggggaagtcaaagccttggatgacttctataaaatgttacagcatgaaccggatcgagctttctatggactcaagcaggtggagaaggccaatgaagccatggcaattgacacattgctcatcagcgatgagctcttcaggcatcaggatgtagccacacggagccggtatgtgaggctggtggacagtgtgaaagagaatgcaggcaccgttaggatattctctagtcttcacgtttctggggaacagctcagccagttgactggggtagctgccattctccgcttccctgttcccgaactttctgaccaagagggtgattccagttctgaagaggattaatgattgaaacttaaaattgagacaatcttgtgtttcctaaactgttacagtacatttctcagcatccttgtgacagaaagctgcaagaagggcactttttgattcatacagggatttcttatgtctttggctacactagatattttgtgattggcaagacatgtatttaaacataaactaaaaggaaataaaaaaaaaaaaaaaaaaaaaaaaaaaaaaaaaaaaaaaaaaa

SEQ ID NO: 4215 - protein, 385 aa, Homo sapiens
MKLVRKNIEKDNAGQVTLVPEEPEDMWHTYNLVQVGDSLRASTIRKVQTESSTGSVGSNRVRTTLTLCVEAIDFDSQACQLRVKGTNIQENEYVKMGAYHTIELEPNRQFTLAKKQWDSVVLERIEQACDPAWSADVAAVVMQEGLAHICLVTPSMTLTRAKVEVNIPRKRKGNCSQHDRALERFYEQVVQAIQRHIHFDVVKCILVASPGFVREQFCDYLFQQAVKTDNKLLLENRSKFLQVHASSGHKYSLKEALCDPTVASRLSDTKAAGEVKALDDFYKMLQHEPDRAFYGLKQVEKANEAMAIDTLLISDELFRHQDVATRSRYVRLVDSVKENAGTVRIFSSLHVSGEQLSQLTGVAAILRFPVPELSDQEGDSSSEED

SEQ ID NO: 4216 - DNA, 637 bp, Rattus norvegicus
  ref <308>: DATABASE ACCESSION NUMBER: EMBL / AA799396
  ref <309>: DATABASE ENTRY DATE: 2000-03-03
ggaacaccagcaaatccggtactttattaagacatcttaggcttccctgcattttcaaaaacaggaatgctctattgactgaacacatcaaagggtctctgcagagtccttgggggccagccacaggaggtgtcatgtgattctgcagtcccagagcatggcagctagtgcttgcaatcacaggaagcaggcagtcggttctccatctgcctaggggagggtatccttcattcttttgaaggactgccttcaagtcacagctcaattccagtgtgtagactcggtctctaggactggggacaaaggcagctgccaggtgcaacagtttatgaggctccgccttttatatatgccacgggagcccgggctctgggagccagaagcccaagctggaccaaccgctgctgtgggctgatggccttagcagccacataatcttccctttgatgtccagggtcaatgcagtcctggccccaccagggctaggagaaggtgtatgaaagagaatctcactgtgatctgtcctgtgaaggaaacagcaataaaatttattacccagtcaccacagtcattctgacaggagttctcctagcctctgacctccacttgagagggaactttcagggaggacagggac

SEQ ID NO: 4217 - DNA, 1208 bp, Homo sapiens
  ref <308>: DATABASE ACCESSION NUMBER: EMBL / AF043896
  ref <309>: DATABASE ENTRY DATE: 2000-03-03
acggagctcccagctgaggcgctgcttctccgggctgtcgattggacccgccctccggtgcctactgagctgatatcagttctcattttacacactggctcagttcagcaggaacaggagtcgagcccttgagcaaaaagccttcgtgtctgtaagtgcccgagctcaggagagctggggctcccactcgcggcagacaggcccgcgtccaccctgcgtccaccccggcccggcggcagcacggtgccagtcatctgcatgtgctcctgcggcgtgggggtttgtagacttggaaaaccctgttggcagaaagttaagagctcccaggcctgaaggcaggacacagtgccagcagggggccgtttgcccccatgtgtaagggaggcagggcccagctctcccacggcgaggtgagctgagactttctgagaatagttagagtgggtgcgtgtctgaaatgggtactcctaccagctattgtgtacgcaaagcctgagtacagcctgctggtgtcatggccacgtgtgagcaggccagcgtcacacggctcgctgtgacccgtcccggagactgaaatgggcctgggtcttctccttgtcctgtgattaaagtcctctcttgaaagtggagagcaaaggcacacagaggtgcgcgctcacaagaattcctcccggtgactgggtaatcaatgttactgctgtttcctttgcaggaaagaccacagcaagattctttcattcgtctcctcctagcctgggggaccaggctcgaactgaccctggacatcaaaggagggattatgtggctgctaaagccatcggcccacagccctgttcacgtcttggtgcttctctttcccagaggctggtcccagccaggcacacacaaaaggcagattctcgtaaacgcagcctccctccctggaggctgcctcctgccctggatctggagtggagctgctctgagattttgagttcttctgcagagatgattaaatatatccaagagacattggaaaacctgctgaacattttacattggtctgctcagcacatggctggatgcggatatttctataattccagaaagtcacacagctcctctgtatgagaccagtgggcgccatttaaaagaacaggatgagaatctaagatatattattaataaatgtaatggattttttttttgtaaaaaaaaaaaaaaaaaaa

SEQ ID NO: 4218 - DNA, 637 bp, Rattus norvegicus; identical to SEQ ID NO: 4216
  ref <308>: DATABASE ACCESSION NUMBER: EMBL / AA799396
  ref <309>: DATABASE ENTRY DATE: 2000-03-03

SEQ ID NO: 4219 - DNA, 1208 bp, Homo sapiens; identical to SEQ ID NO: 4217
  ref <308>: DATABASE ACCESSION NUMBER: EMBL / AF043896
  ref <309>: DATABASE ENTRY DATE: 2000-03-03

SEQ ID NO: 4220 - DNA, 591 bp, Rattus norvegicus
  ref <308>: DATABASE ACCESSION NUMBER: EMBL / AA799406
  ref <309>: DATABASE ENTRY DATE: 2000-03-03
gaaaaagcttgcggccgatcccggggagcccggcgggtcgccggcgcggggttttcctccggcctcgtcctcccccttccccctccgcggggtcgggggttcccggggttcggggttctcctccgcgtcggcggttcccccgccgggtgcgccccccgggccgcggtttcccgcgcggcgcctcgcctcggccggcgcctagcagccgacttagaactggtgcggaccaggggaatccgactgtttaattaaaacaaagcatcgcgaaggcccgcggcgggtgttgacgcgatgtgatttctgcccagtgctctgaatgtcaaagtgaagaaattcaatgaagcgcgggtaaacggcgggagtaactatgactctcttaaggtagccaaatgcctcgtcatctaattagtgacgcgcatgaatggatgaacgagattcccactgtccctacctactatccagcgaaaccacagccaagggaacgggcttggcggaatcagcggggaaagaagaccctgttgagcttgactctagtctggcacggtgaagagacatgagaggtgtaaaataagtgggaggcccccggcgccc

SEQ ID NO: 4221 - DNA, 612 bp, Rattus norvegicus
  ref <308>: DATABASE ACCESSION NUMBER: EMBL / AA799410
  ref <309>: DATABASE ENTRY DATE: 2000-03-03
agaagaagaatgagaacacaagtctttattttgcttttgaagaacgggagcagtccaaacaaactgccttccatgcagttatgcagatctctggtagaattaagtcatacctataattagtaaccgggacacagcctttggaggcatatctggagcggcgaccaatgggtattggtatttccagctcaaacaggtctaatcttctcttagatgtcagaagccaaggtctgggtgtagccggtcagttgcaaagagcagctcaggaatgttaagtggcttcaggagtcttgtggacagcaccatcacctgggttcctggcttcagagatgctacaaggtctttgaccattttggcttcagcaactgtgacgccgcccaccacaaagaggatcaagaggggatggtcactgggatggggccggctcaccttcatgaacatgctgaatccagttttaaggagatcagtgaggcctgaggacatatgttcaatgtcaatgggatctggcttctcaggattaaatatttcttccacaacctgcttcaacagtggcttataggctgcctgatgggtactatttccaggaacatacaccgatttgaactgtctcaggag

SEQ ID NO: 4222 - DNA, 2154 bp, Homo sapiens
  ref <308>: DATABASE ACCESSION NUMBER: EMBL / BC012458
  ref <309>: DATABASE ENTRY DATE: 2001-08-21
agagcctgcactggggctgcggatccacccgtctcctggaggcggtggggggtcctgactgtcacctgcgagagttcgagcccgacgcaattggtggtggagccaagcagcccaaggcagtgtttgtgctgagctgcctgctgaaaggccggaccgtggagatcctacgggacatcatctgccgcagtcacttccagtattgtgtggtggtcacaaccgtgagccacgctgtccacctcacagctaatcatgtcccagcggcggcagcggccgagatggaggggcagcagccggtgttcgagcagctggaggagaagctgtgtgaatggatgggcaacatgaactacacggccgaggtgttccatgtcccgttattgcttgcccctgttgctccccactttgccttgactccagcttttgcatcccttttcccactgctaccccaggatgtgcacctccttaatagcgcccgaccggacaagaggaagctgggaagcctgggtgatgtggactccactacgctaaccccagagctgctgctgcagatcagatgcctagtgtcaggcctcagttctctgtgtgaacatttaggagtacgggaggagtgttttgctgtaggttccttaagtcaggtcatcgctgcggatctggccaattatgcccctgcaaagaacaggaagaagactgctgcaggcagggcatcagtggtttttgtggacagaaccctggatctcacaggagcagttggacatcatggagacaacttagtagagaagatcatttcagcacttccccagctcccaggccacacaaatgatgtgatggttaacatgatagcgctcactgcactccatactgaggaggaaaattataatgtggttgcaccaggctgtctttcacaatccagtgacaccacagccaaagccctatgggaagctttactgaacactaagcacaaagaggcagtgatggaagttcggagacatctagtggaagcggcaagcagagaaaacctgccaatcaagatgagtatggggagagtcacaccgggacagctcatgtcctatattcagctcttcaagaacaacctcaaagctctaatgaatcattgtggcctcctccagcttggactggccacagctcaaacgttgaaacacccacagactgccaagtgggacaactttctggcttttgaaaggctccttcttcagagcattggggagtcagcaatgtccgttgtgttaaatcagctgctgcccatgattaagcctgtaacccagagaaccaacgaggactacagccctgaggaactgctgatccttctcatatatatttattctgtcactggagagctcacggtagacaaagacctgtgtgaagcagaagaaaaagtcaagaaagcattggctcaggttttctgtgaggaatctggattgtcacctttgctgcaaaaaattacggactgggactcttcaattaatctgacatttcacaaatccaaaattgccgtggatgaactctttacttcacttcgggatattgctggagctcggagtctcctgaaacagtttaagtctgtatatgttcctggaaatcatacccaccaggcatcttataagccattgttgaagcaagttgtggaggaaatatttcatcccgagaggccagattccgttgatattgaacacatgtcttcaggcctcactgatctccttaaaactggatttagcatgttcatgaaggtgagccggcctcatcctagtgactaccccctcctgatcctctttgtggtaggtggggtcacagtctctgaagtgaaaatggtcaaagatcttgtggcatcgttgaagccaggaacccaggtaatcgtgctgtccacacgactcctgaagccacttaacattcctgagctgttatttgcaactgaccgactgcatccagaccttggcttctgagcatccgctaagaagataagacctactcaagctggaaatgccgatgcaattttctgccaccactccaaatactcctccacaaccagcgtccctgtcactaattgcgagaatgatggaattctgcctgaagggtcttgatacctactcagtgaggtactttgcttggattgctgtgattcttaaaaaaaaaaaaaaaaaa

SEQ ID NO: 4223 - DNA, 612 bp, Rattus norvegicus; identical to SEQ ID NO: 4221
  ref <308>: DATABASE ACCESSION NUMBER: EMBL / AA799410
  ref <309>: DATABASE ENTRY DATE: 2000-03-03

SEQ ID NO: 4224 - DNA, 2154 bp, Homo sapiens; identical to SEQ ID NO: 4222
  ref <308>: DATABASE ACCESSION NUMBER: EMBL / BC012458
  ref <309>: DATABASE ENTRY DATE: 2001-08-21

SEQ ID NO: 4225 - DNA, 621 bp, Rattus norvegicus
  ref <308>: DATABASE ACCESSION NUMBER: EMBL / AA799421
  ref <309>: DATABASE ENTRY DATE: 2000-03-03
cttattttaaatgttaagagttcaaaatcaaagcgagggcgtccatgagatacaaacgcacacaacttgggcatgctcaaaaaaagctaaaaccaaagcaagcaggaatgtgcaattccagagcaaaccgccacagttggacagcctgagcatccccaggatcctcccatgaagggcgtgcctcggggcaccagcccttgtggaagaaactctggtctcttctcttaggtagccgggcaggaatggcgggccaggaggaatgagagaagggaggagtcaagattccatgtccagtgggcacagccagagttttcgtgggttttttttctttgtaataaaagaactgaagctgcttcagggttgtgggtggacggctactccagacctagcactgcacacagagcagacgcagttcaaatctgtgatcttggtgagtctggaccaaagagggccttctggtcactgggagggtggggaaggacagggcctgggatgaggggatgcaataaataagagagcagatgtgggactggggctctggggaggacgaatagttcgagacattctgagcctctgcaacacgggattgtctcaacaccctccttgcagtgagctaactcc

SEQ ID NO: 4226 - protein, 737 aa, Rattus norvegicus; identical to SEQ ID NO: 3389
  ref <308>: DATABASE ACCESSION NUMBER: SWISS-Prot / KIRTCE
  ref <309>: DATABASE ENTRY DATE: 1999-07-15

SEQ ID NO: 4227 - DNA, 2244 bp, Homo sapiens; identical to SEQ ID NO: 3330
  ref <308>: DATABASE ACCESSION NUMBER: EMBL / X65293
  ref <309>: DATABASE ENTRY DATE: 1993-07-25

SEQ ID NO: 4228 - protein, 737 aa, Homo sapiens; identical to SEQ ID NO: 3331
  ref <308>: DATABASE ACCESSION NUMBER: SWISS-Prot / Q02156
  ref <309>: DATABASE ENTRY DATE: 2002-06-15

SEQ ID NO: 4229 - DNA, 774 bp, Rattus norvegicus
  ref <308>: DATABASE ACCESSION NUMBER: EMBL / AB049641
  ref <309>: DATABASE ENTRY DATE: 2001-06-14
gagagcatgtccagcttctctagggcgccccagcaatgggccacttttgctcgaatgtggtatctcttagatggcaaaatgcagccccctggcaaacttgcggttatagcatccaacaaactgcaaggattaaataaaccagtgtaccatcagctgagtgactgtggagaccacgttgtcataataaacacaagacatattgcattttctggaaacaaatgggaacaaaaagtgtactcctcacatactggctacccaggcggctttagacaagtaacagctgcgcagcttcaccggaaagaccccgtggcgattgtgaaattggctatttatggcatgctgcccaaaaacctgcacagaaggacaatgatgcaaaggctgcatcttttcccagacgaggatattccggaagatattcttaagaatttagtggaagagcttcctcagccacggagagtgcctaaacggctggacgagtacacccaagaagaaatagaggctttccccagagtgtggactccacctgatgattttcggatgtaggagaatggaaatgatagaacattacagcaagagactgaatgtttcctgaagtattaccatgacccaaggcagagagaaaccatgggaactccctgtggggaacactcaagaaggccaagcctcagcaggaaagtgcagtagaagatactgttttacagacaagtcctgtgtaacctgctttaaatgctacacatgttaataaaatgcttatttggttagctaaaaaaaaaa

SEQ ID NO: 4230 - protein, 178 aa, Rattus norvegicus
  ref <308>: DATABASE ACCESSION NUMBER: SWISS-Prot / BAB40846
  ref <309>: DATABASE ENTRY DATE: 2002-06-15
MSSFSRAPQQWATFARMWYLLDGKMQPPGKLAVIASNKLQGLNKPVYHQLSDCGDHVVIINTRHIAFSGNKWEQKVYSSHTGYPGGFRQVTAAQLHRKDPVAIVKLAIYGMLPKNLHRRTMMQRLHLFPDEDIPEDILKNLVEELPQPRRVPKRLDEYTQEEIEAFPRVWTPPDDFRM

SEQ ID NO: 4231 - DNA, 1086 bp, Homo sapiens
  ref <308>: DATABASE ACCESSION NUMBER: Refseq / NM_014078
  ref <309>: DATABASE ENTRY DATE: 2002-05-30
gtcggctggaaattatgtcctccgtcggttttccgcagtttttccaccaagcgagatatttttgggagttattccctaaataactgcattatatgctcctttcatgacgaaattgctgccgtggagaagactggaggaaactcgaggaagagggagaagccgacaagtgctcgacgggctaggaactgtcctgcttgggtgttagcgtttcccgccgggccagtaaggctgagtgacccggcgtggctactaggagaaggacgtacggtcctgctagtagaggaatatgtcgagtttctctagggcgccccagcaatgggccacttttgctagaatatggtatctcttagatgggaaaatgcagccacctggcaaacttgctgctatggcatctataagacttcagggattacataaacctgtgtaccatgcactgagtgactgtggggatcatgttgttataatgaacacaagacacattgcattttctggaaacaaatgggaacaaaaagtatactcttcgcatactggctacccaggtggatttagacaagtaacagctgctcagcttcacctgagggatccagtggcaattgtaaaactagctatttatggcatgctgccaaaaaaccttcacagaagaacaatgatggaaaggttgcatctttttccagatgagtatattccagaagatattcttaagaatttagtagaggagcttcctcaaccacgaaaaatacctaaacgtctagatgagtacacacaagaagaaatagacgccttcccaagattgtggactccacctgaagattatcggctataagagaataagaattgcagaaaataacagtgaagtgattgaaactttcttctgatgagtttctctaacctacaggatggagtaaaacaactgctacagttcagcacctgttttatgtgccgaatcactgtggggaaaggtcaggaaggtatagtccttcaataggaaattgtaattaaaatataattttatagaaccatttttatgtaatctgatttgaatgttatagttgataataataaaatcacttacttggttgactaaaa

SEQ ID NO: 4232 - protein, 178 aa, Homo sapiens
  ref <308>: DATABASE ACCESSION NUMBER: Refseq / NP_054797
  ref <309>: DATABASE ENTRY DATE: 2002-05-30
MSSFSRAPQQWATFARIWYLLDGKMQPPGKLAAMASIRLQGLHKPVYHALSDCGDHVVIMNTRHIAFSGNKWEQKVYSSHTGYPGGFRQVTAAQLHLRDPVAIVKLAIYGMLPKNLHRRTMMERLHLFPDEYIPEDILKNLVEELPQPRKIPKRLDEYTQEEIDAFPRLWTPPEDYRL

SEQ ID NO: 4233 - DNA, 649 bp, Rattus norvegicus
  misc_feature (1)..(649): n=a, c, g or t
  ref <308>: DATABASE ACCESSION NUMBER: EMBL / AA799442
  ref <309>: DATABASE ENTRY DATE: 2000-03-03
actgaggatctcataatgctaggtgaaagtagcagagttccttttcacttttacaccagtgccaaagaccttttataaagaggttcattctactgaactagcctccactgattcttgggttaatcatcaggcacaattcttgcatatgctttttcacatacagcatagtgatataagccattaaacactccaatattatctgaaacaacagaggaacggccattgctttcatcccagtttgacaaaggagtaaccaatggagcataactcttccctttggcggcactggaacagtgtgatacttaactgctaagcgtccatttttataaaaagccaaagcactgggataggagaccccacaggctacgccgatcagtgagcttctcagaacacagctttcctggcttatattacctgattgcagagcatcagtcacaaagagcttgtaagtaacggcggtagccacaaatggaagggtantcagggatgcataggtcctcaaagcttcatacntaaccttgaaactgtatctgaatactagtttgcccatacgcagacaactactactaatcaanngataagttcacgtanatttaaatctggtcgttnantagatcaaacttctctcaaagattcaacgatatgggct

SEQ ID NO: 4234 - DNA, 1172 bp, Homo sapiens
  ref <308>: DATABASE ACCESSION NUMBER: Refseq / NM_018480
  ref <309>: DATABASE ENTRY DATE: 2002-05-15
aaaatggtggtgttcgggtatgaggctgggactaagccaagggattcaggtgtggtgccggtgggaactgaggaagcgcccaaggaaatgaaacacgatttccaaaatgaacttaatctttcatgagaaactgaggatagagatgtcaataagcagccactgtttccacctccccacctgaagagctaggagcgcccaagctttcggttctgagctcggactaagccatgtggattcaggtgtggatgacggtgggaactgaggaagcgcccaaggttttcaagatggcagcatctatgcatggtcagcccagtccttctctagaagatgcaaaactcagaagaccaatggtcatagaaatcatagaaaaaaattttgactatcttagaaaagaaatgacacaaaatatatatcaaatggcgacatttggaacaacagctggtttctctggaatattctcaaacttcctgttcagacgctgcttcaaggttaaacatgatgctttgaagacatatgcatcattggctacacttccatttttgtctactgttgttactgacaagctttttgtaattgatgctttgtattcagataatataagcaaggaaaactgtgttttcagaagctcactgattggcatagtttgtggtgttttctatcccagttctttggcttttactaaaaatggacgcctggcaaccaagtatcataccgttccactgccaccaaaaggaagggttttaatccattggatgacgctttgtcaaacacaaatgaaattaatggcgattcctctagtctttcagattatgtttggaatattaaatggtctataccattatgcagtatttgaagagacacttgagaaaactatacatgaagagtaaccaaaaaaatgaatggttgctaacttagcaaaatgaagtttctataaagaggactcaggcattgctgaaagagttaaaagtaactgtgaacaaataatttgttctgtgccttttgcctggtatatagcaaatactcaaaaagtattcaataattcaatcaataaatataagtttcatcttacacgtaagatacaggtcttatctcctgatggtgtgtccattttgcctggtatataacagataataaatatccagtgtcaataaatgtaacaataaaaaaaaaaa

SEQ ID NO: 4235 - DNA, 649 bp, Rattus norvegicus; identical to SEQ ID NO: 4233
  misc_feature (1)..(649): n=a, c, g or t
  ref <308>: DATABASE ACCESSION NUMBER: EMBL / AA799442
  ref <309>: DATABASE ENTRY DATE: 2000-03-03

SEQ ID NO: 4236 - DNA, 1172 bp, Homo sapiens; identical to SEQ ID NO: 4234
  ref <308>: DATABASE ACCESSION NUMBER: Refseq / NM_018480
  ref <309>: DATABASE ENTRY DATE: 2002-05-15

SEQ ID NO: 4237 - DNA, 649 bp, Rattus norvegicus; identical to SEQ ID NO: 4233
  misc_feature (1)..(649): n=a, c, g or t
  ref <308>: DATABASE ACCESSION NUMBER: EMBL / AA799442
  ref <309>: DATABASE ENTRY DATE: 2000-03-03

SEQ ID NO: 4238 - DNA, 1172 bp, Homo sapiens; identical to SEQ ID NO: 4234
  ref <308>: DATABASE ACCESSION NUMBER: Refseq / NM_018480
  ref <309>: DATABASE ENTRY DATE: 2002-05-15

SEQ ID NO: 4239 - protein, 219 aa, Homo sapiens
  ref <308>: DATABASE ACCESSION NUMBER: SWISS-Prot / AAF67658
  ref <309>: DATABASE ENTRY DATE: 2000-10-01
MWIQVWMTVGTEEAPKVFKMAASMHGQPSPSLEDAKLRRPMVIEIIEKNFDYLRKEMTQNIYQMATFGTTAGFSGIFSNFLFRRCFKVKHDALKTYASLATLPFLSTVVTDKLFVIDALYSDNISKENCVFRSSLIGIVCGVFYPSSLAFTKNGRLATKYHTVPLPPKGRVLIHWMTLCQTQMKLMAIPLVFQIMFGILNGLYHYAVFEETLEKTIHEE

SEQ ID NO: 4240 - DNA, 649 bp, Rattus norvegicus; identical to SEQ ID NO: 4233
  misc_feature (1)..(649): n=a, c, g or t
  ref <308>: DATABASE ACCESSION NUMBER: EMBL / AA799442
  ref <309>: DATABASE ENTRY DATE: 2000-03-03

SEQ ID NO: 4241 - DNA, 1172 bp, Homo sapiens; identical to SEQ ID NO: 4234
  ref <308>: DATABASE ACCESSION NUMBER: Refseq / NM_018480
  ref <309>: DATABASE ENTRY DATE: 2002-05-15

SEQ ID NO: 4242 - DNA, 649 bp, Rattus norvegicus; identical to SEQ ID NO: 4233
  misc_feature (1)..(649): n=a, c, g or t
  ref <308>: DATABASE ACCESSION NUMBER: EMBL / AA799442
  ref <309>: DATABASE ENTRY DATE: 2000-03-03

SEQ ID NO: 4243 - DNA, 1172 bp, Homo sapiens; identical to SEQ ID NO: 4234
  ref <308>: DATABASE ACCESSION NUMBER: Refseq / NM_018480
  ref <309>: DATABASE ENTRY DATE: 2002-05-15

SEQ ID NO: 4244 - DNA, 649 bp, Rattus norvegicus; identical to SEQ ID NO: 4233
  misc_feature (1)..(649): n=a, c, g or t
  ref <308>: DATABASE ACCESSION NUMBER: EMBL / AA799442
  ref <309>: DATABASE ENTRY DATE: 2000-03-03

SEQ ID NO: 4245 - DNA, 1172 bp, Homo sapiens; identical to SEQ ID NO: 4234
  ref <308>: DATABASE ACCESSION NUMBER: Refseq / NM_018480
  ref <309>: DATABASE ENTRY DATE: 2002-05-15

SEQ ID NO: 4246 - protein, 219 aa, Homo sapiens; identical to SEQ ID NO: 4239
  ref <308>: DATABASE ACCESSION NUMBER: SWISS-Prot / AAF67658
  ref <309>: DATABASE ENTRY DATE: 2000-10-01

SEQ ID NO: 4247 - DNA, 250 bp, Rattus norvegicus
  ref <308>: DATABASE ACCESSION NUMBER: EMBL / AA799448
  ref <309>: DATABASE ENTRY DATE: 2000-03-03
aagcattttcaaactttatttacaactgtcacagtgacaaaaagtagtttggaaaaaaaaaatgctagtttctccctgagcctcgatacagaacagacagaagtcacaggaggttcatctcacaacaggcatgtcactgaaatactaggattttttttttcaatacgatcagttagaaatacacacaaattacttaaagaaagaagaggaggaagaggaagaggaggggaggaggaggagagggaagagg

SEQ ID NO: 4248 - DNA, 497 bp, Homo sapiens
  ref <308>: DATABASE ACCESSION NUMBER: EMBL / BF109813
  ref <309>: DATABASE ENTRY DATE: 2000-10-23
tttttttaagcattttcaaactttatttacaactgtcacagtgacaaaaagtagtttggaaaaaaaaaatgctagtttctccctgagcctcaaaaaagaacagatagaagttacaaaaacctttttaaaaaattatatatacaatgtcaaccatagaagctttaagtaccttaaatcataaactctgtagtttgtatagtagtcttataaaaatatagttagctctcaaatgtttaatgccacttaagtcagttaaagtgcagattgtaaagcatattaggaaggtgcccagaataccaatgtctcctgcacttaacacattaatacaaagtttgccaattgttttgaatttccaaatgtattcctgaaaaaaaaaagaacctaaacactatattatagacatatgttagaaaagtcctagaaatgcacccaatttccttccattttactttcctacatggattgaagtcagcccctcaaaagcttttcggctgggc

SEQ ID NO: 4249 - protein, 295 aa, Homo sapiens
  ref <308>: DATABASE ACCESSION NUMBER: SWISS-Prot / P13726
  ref <309>: DATABASE ENTRY DATE: 2002-06-15
METPAWPRVPRPETAVARTLLLGWVFAQVAGASGTTNTVAAYNLTWKSTNFKTILEWEPKPVNQVYTVQISTKSGDWKSKCFYTTDTECDLTDEIVKDVKQTYLARVFSYPAGNVESTGSAGEPLYENSPEFTPYLETNLGQPTIQSFEQVGTKVNVTVEDERTLVRRNNTFLSLRDVFGKDLIYTLYYWKSSSSGKKTAKTNTNEFLIDVDKGENYCFSVQAVIPSRTVNRKSTDSPVECMGQEKGEFREIFYIIGAVVFVVIILVIILAISLHKCRKAGVGQSWKENSPLNVS

SEQ ID NO: 4250 - DNA, 250 bp, Rattus norvegicus; identical to SEQ ID NO: 4247
  ref <308>: DATABASE ACCESSION NUMBER: EMBL / AA799448
  ref <309>: DATABASE ENTRY DATE: 2000-03-03

SEQ ID NO: 4251 - DNA, 497 bp, Homo sapiens; identical to SEQ ID NO: 4248
  ref <308>: DATABASE ACCESSION NUMBER: EMBL / BF109813
  ref <309>: DATABASE ENTRY DATE: 2000-10-23

SEQ ID NO: 4252 - protein, 295 aa, Homo sapiens; identical to SEQ ID NO: 4249
  ref <308>: DATABASE ACCESSION NUMBER: SWISS-Prot / P13726
  ref <309>: DATABASE ENTRY DATE: 2002-06-15

SEQ ID NO: 4253 - DNA, 553 bp, Rattus norvegicus
  ref <308>: DATABASE ACCESSION NUMBER: EMBL / AA799449
  ref <309>: DATABASE ENTRY DATE: 2000-03-03
cacaactttaatagaatattctaactattctgtacaaattgaaaacaccgtattcagttacaaatgtgttattgggtaaggctgagcacgctctacatggctggtcactgtggacatggctgtcctggctaccagagacacaaccacacactcggaaacaccccccccccccacactaaccaccaactggtcaccaatcccaggtgtggccctggtgtgcacagtacaagctgaagctgtgctctacaggccagagatcctactgagggagaacttcctcgtagaacttagcttctatgtgcgcacacctcacctggagctgcttcagagcattaattcttcttttgacagctttaggtaaagtttctatgtaactagatggagtgtgagagacgttgtcaagacgttcctgcaaagctgccagcacttgtgggttctgcatcacctggtctgtgagtttttctgtattactggcatttttagcagcttccacagaatctgctgggcctccatctgaaagactgtttttctgcatctgaacacctttgcctcg

SEQ ID NO: 4254 - protein, 375 aa, Rattus norvegicus
  ref <308>: DATABASE ACCESSION NUMBER: Refseq / NP_032698
  ref <309>: DATABASE ENTRY DATE: 2002-08-18
MAENSLSDGGPADSVEAAKNASNTEKLTDQVMQNPQVLAALQERLDNVSHTPSSYIETLPKAVKRRINALKQLQVRCAHIEAKFYEEVHDLERKYAALYQPLFDKRREFITGDVEPTDAESAWHSENEEEDKLAGDMKNKVVIAEKEAATVEELNPKGIPEFWFTIFRNVDMLSELVQEYDEPILKHLQDIKVKFSDPGQPMSFVLEFHFEPNDYFTNPVLTKTYKMKSEPDKADPFSFEGPEIVDCDGCTIDWKKGKNVTVKTIKKKQKHKGRGTVRTITKQVPNESFFNFFSPLKASGDGESLDEDSEFTLASDFEIGHFFRERIVPRAVLYFTGEAIEDDDNFEEGEEGEEEELEGDEEGEDEDDADVNPKV

SEQ ID NO: 4255 - DNA, 2534 bp, Homo sapiens
  misc_feature (1)..(2534): n=a, c, g or t
  ref <308>: DATABASE ACCESSION NUMBER: EMBL / U77456
  ref <309>: DATABASE ENTRY DATE: 1999-02-15
ggcacgagcttgctcgcggagagaggagctaggagcctcggccaatgggagccggcgttgttggaggccacggcggcgcagccccaaagcgagcgaagctagggtcgccgccactgccgcaggaggcgtgaggggataaaaacattcagatggcagatcacagtttttcagatggggttccttcagattccgtggaagctgctaaaaatgcaagtaacacagaaaagctcacagatcaggtgatgcagaatcctcgagttctggcagctttacaggagcgacttgacaatgtccctcacaccccttccagctacatcgaaactttacctaaagcagtaaaaagaagaattaatgcattgaaacaacttcaggtgagatgtgctcacatagaagccaagttctatgaagaggtacatgacttggaaagaaagtatgcagcgctataccagcctctctttgacaagagaagagaatttatcaccggcgatgttgaaccaacagatgcggaatcggaatggcacagtgaaaatgaagaggaagagaaattggctggagacatgaaaagtaaagtagtcgtcacagaaaaagcagcggcaacggctgaagagccagatcccaaaggaattccagagttctggtttaccatcttcagaaatgtggacatgctgagtgaattagtccaggaatatgatgaaccaatcttgaaacacctgcaggatattaaagtgaaattttctgaccctggacagcctatgtcttttgtgttagagttccactttgaacccaacgactactttaccaactcagtcctgacaaaaacctacaagatgaaatcagaaccagataaggctgatcccttttcctttgaaggtcctgagattgtggactgtgacgggtgtactattgactggaagaaaggaaagaatgttactgtcaaaaccatcaagaaaaagcagaagcataagggtcgaggcactgttagaacaattacgaaacaagtacccaatgagtcctttttcaacttcttcaatccattgaaagcatccggggatggagaatcactggatgaagattctgaattcacattagcctctgattttgaaattggacactttttccgtgagcggatagtcccgcgggctgtgctgtacttcactggggaggccatagaagatgatgacaattttgaagaaggtgaagaaggagaagaggaggaattagaaggtgacgaggagggagaagacgaggatgatgcggaaattaaccccaaggtgtaatttttgtctgttaatcattcatacgtttctagaaggaacccagccagccggcggaatgcaagcagcagtaggaagcggaggcgggtgcctggcagaccggctgtcgggactccaggcctgtgggcggggcctcggtccttgccgcagcacaatcccgtggacagagcttactccatctaactcgttttcaagtgcatgattttcactttcacttttcctttttccttattattttgattaacttgtacagtggcaactgaaatgcatttcagaaataggaggtttcgtccagcaccctctgcagccttggtgcctgtagctctggacttccctgggcctttccctgtgggagggccctgtagacacatcagggtggggtgggggtcacttggcaaaaagggccgaggtctggtgatgtggttcccaggatcttggaacctctcccacccctcctgcagttggactgaattctaccctttcatccgaagaaacccacttgctgtttccagccgctgaatctgctgagtgtgcagcctgcatcacctgctgtatgccgatcatctcagaaagggctgtgtagagtagggccctgttctccttaggatgttgcttcttgatttttttttttttttaggggtgggtcagggttgtgacacaccagcccaggtgagagctgctgcgggtcacctcatatttatttatcccttcttgcctgtgaggactgcggcttttcgctgtggctcgtccttaacgtttctgaaccaccttggtgccctgagcaggaagatgtgccacttcctagcaggcgcaaggcctgtgcggaagaaacgccgctccctgccaccagggctgaagatgcgagcccgtcctcatgacgcaggcgccaccctgctgccggagccgggcttcggcatcttctccactgagggactgggctgggaagtcctgcgtttcagtggagcgtatgagcgtcaagtcctgctttctcagtagccccattgcggggccccaccattcatcctgtctgaaggtcctgggtttggtgtgaccgcttggcggctggtgggtggggttttcaagtgggtgacggcgctctccggcaaccggggatggccgtgtccgcactgaccaggcctgtggagagtgctcggcctaaccttagaacacaattgtaactgaaaacagtgttttcaatttgtacagaatagttagaatattctaataaagtggtgaaacattgaaaaaaaaanaaaaaaa

SEQ ID NO: 4256 - protein, 375 aa, Homo sapiens
  ref <308>: DATABASE ACCESSION NUMBER: SWISS-Prot / Q99733
  ref <309>: DATABASE ENTRY DATE: 2002-06-15
MADHSFSDGVPSDSVEAAKNASNTEKLTDQVMQNPRVLAALQERLDNVPHTPSSYIETLPKAVKRRINALKQLQVRCAHIEAKFYEEVHDLERKYAALYQPLFDKRREFITGDVEPTDAESEWHSENEEEEKLAGDMKSKVVVTEKAAATAEEPDPKGIPEFWFTIFRNVDMLSELVQEYDEPILKHLQDIKVKFSDPGQPMSFVLEFHFEPNDYFTNSVLTKTYKMKSEPDKADPFSFEGPEIVDCDGCTIDWKKGKNVTVKTIKKKQKHKGRGTVRTITKQVPNESFFNFFNPLKASGDGESLDEDSEFTLASDFEIGHFFRERIVPRAVLYFTGEAIEDDDNFEEGEEGEEEELEGDEEGEDEDDAEINPKV

SEQ ID NO: 4257 - DNA, 553 bp, Rattus norvegicus; identical to SEQ ID NO: 4253
  ref <308>: DATABASE ACCESSION NUMBER: EMBL / AA799449
  ref <309>: DATABASE ENTRY DATE: 2000-03-03

SEQ ID NO: 4258 - protein, 375 aa, Rattus norvegicus; identical to SEQ ID NO: 4254
  ref <308>: DATABASE ACCESSION NUMBER: Refseq / NP_032698
  ref <309>: DATABASE ENTRY DATE: 2002-08-18

SEQ ID NO: 4259 - DNA, 2534 bp, Homo sapiens; identical to SEQ ID NO: 4255
  misc_feature (1)..(2534): n=a, c, g or t
  ref <308>: DATABASE ACCESSION NUMBER: EMBL / U77456
  ref <309>: DATABASE ENTRY DATE: 1999-02-15

SEQ ID NO: 4260 - protein, 375 aa, Homo sapiens; identical to SEQ ID NO: 4256
  ref <308>: DATABASE ACCESSION NUMBER: SWISS-Prot / Q99733
  ref <309>: DATABASE ENTRY DATE: 2002-06-15

SEQ ID NO: 4261 - DNA, 553 bp, Rattus norvegicus; identical to SEQ ID NO: 4253
  ref <308>: DATABASE ACCESSION NUMBER: EMBL / AA799449
  ref <309>: DATABASE ENTRY DATE: 2000-03-03

SEQ ID NO: 4262 - protein, 375 aa, Rattus norvegicus; identical to SEQ ID NO: 4254
  ref <308>: DATABASE ACCESSION NUMBER: Refseq / NP_032698
  ref <309>: DATABASE ENTRY DATE: 2002-08-18

SEQ ID NO: 4263 - DNA, 2534 bp, Homo sapiens; identical to SEQ ID NO: 4255
  misc_feature (1)..(2534): n=a, c, g or t
  ref <308>: DATABASE ACCESSION NUMBER: EMBL / U77456
  ref <309>: DATABASE ENTRY DATE: 1999-02-15

SEQ ID NO: 4264 - protein, 375 aa, Homo sapiens; identical to SEQ ID NO: 4256
  ref <308>: DATABASE ACCESSION NUMBER: SWISS-Prot / Q99733
  ref <309>: DATABASE ENTRY DATE: 2002-06-15

SEQ ID NO: 4265 - DNA, 644 bp, Rattus norvegicus
  ref <308>: DATABASE ACCESSION NUMBER: EMBL / AA799465
  ref <309>: DATABASE ENTRY DATE: 2000-03-03
caataaccaagatattggactttattaaaattgaagattatattagtcaacttacctgttgctttgacaaaataccggatacaaagaactgtaggaaagaatgatttgttctggctcccagtccattgtaccagtaggagcagctcataactgtaacagcaggaacatgagagttcgctcacatctctgtcttgggagatggtgtcaggagaagctcaaggtcatcctcagggatgcagtgaactcaaggctagcctggggtacatgagaccagcatccaatcccgaacggcatttttccttcttgccggatcatccttcccagaaccctggggagaaatgccaagactgtcctgttcacgtcatcttgttttgcctggattttgtgggtgaggagccttcagtcttcctcgagaacacataggtacaagacttgtatgaatcttcagtctttcctcaagtctggatgacagatcccttctattgctgctcatcgtcttcaatttcgtcatctgggtgagcaccactggggacgggcgtatcccacgcagccacccgggcacgcacttagccaactgagaagcccaccaaacgccagttccgggccactgttggctccgacgccgttgggggctgcgcccctcc

SEQ ID NO: 4266 - DNA, 481 bp, Rattus norvegicus
  ref <308>: DATABASE ACCESSION NUMBER: EMBL / AA799467
  ref <309>: DATABASE ENTRY DATE: 2000-03-03
aaaatcatgattgtatttatataagtcgaatgcagagcaatttgccacagttcatacacaggtgtcagaatgaggtatataaaacatacagagaaatactttcataggaaagtaggaagttgttcagttctctcccacagtcagcaccaccgtgggaaccctgaggtccaggccccctcaacaaatggctctagagagcagcctggtgaggcctgctctcagtgtcaggagtagaggggctcctggtggggacactgccaaggccaggagactgggcgctctcggcaggacactcagaagctgcttttccctctctggaaaaccctttgggtccttcccagtgtttcagtgattgttttgtaccagttacacccttaaccttgtggaaggagctgtcccaagccttagggctgcctgcaagccaggttggactacaaagccagccccacccaccgtgcctttgttaccagcctctggctta

SEQ ID NO: 4267 - DNA, 577 bp, Rattus norvegicus
  ref <308>: DATABASE ACCESSION NUMBER: EMBL / AA799473
  ref <309>: DATABASE ENTRY DATE: 2000-03-03
ggggtgtgacaggtggagcgggaacctgggctgcatacatttgccggctgcgctggagggacaggccccactggttggtgccaaggggacactgtacttggattgtcaaacaccagatcacatgggctgaggacccgggatccctattcctgatgagtaagacacaggaggtttgtagtttacacaatggattcaacaataaaaacaggatgtgggggaggatgtgcgatgtgatttttaaccactgggagagaggagctaggggtaagagacaaggggctgcacagacagtaccgtgccaggggaccccacgggaagggcatattgcactgaggttggtgtggggctggacaggggacttgctgggatggcttgaggagaacagaggcgggccggggagggcacctcttcagccttggaggtggggtcacgacgatatttacagattctcttttgacagagtccatgtagcccagctggccttcagctggatacagctaaggatggcttgcactcctgctccttctgcctgttttccaagcgatggatggcagctgtgtgcctcccaatccgggtc

SEQ ID NO: 4268 - DNA, 687 bp, Rattus norvegicus
  misc_feature (1)..(687): n=a, c, g or t
  ref <308>: DATABASE ACCESSION NUMBER: EMBL / AA799474
  ref <309>: DATABASE ENTRY DATE: 2000-03-03
gagaaacttaatttattcccacaatgaaggctaaaggaagatcagaagcaagagtctggtctcctggccctggtatctgatgaaaaggggccaggcctgaaaggcctcggactgttcctggtctgctgagagcttgttcaggcaagatgacaagcagatactgaacagggtcacttgggtggccgataagccagctttcgactcttcaggactgaccacttatgccgcttcatggcataggtcaggggcagcagcaagcccatcatcaacaacatcttgagtcccatgcgttttcgatggtcatgctctggctctgatgcccagcgaaggaaggtggcaacatccttggctacttgtgacatggtagctggggtaccatcgtcatactccaagacttctgtgtagatgggaggagccatgccaatggcctggccaggaaagtaagggttgaaatagaggcttctcgcaatgacaccccagtgggaggttcacagtanncagtgagcaaaggaaacacatantcctcacaacgtgccttgctcgaacgatgtactgagtcaggggtaaagctccatgnntagcactctgcagctcagggtggggtatgntttggaaatatcaaacacttcctggcgcatgacatattccatcctcataggcatctgnacttcactcctaactaggctt

SEQ ID NO: 4269 - protein, 325 aa, Rattus norvegicus
MAAAAASLRRTVLGPRGVGLPGASAPGLLGGARSRQLPLRTPQAVSLSSKSGPSRGRKVMLSALGMLAAGGAGLAVALHSAVSASDLELHPPSYPWSHRGLLSSLDHTSIRRGFQVYKQVCSSCHSMDYVAYRHLVGVCYTEEEAKALAEEVEVQDGPNDDGEMFMRPGKLSDYFPKPYPNPEAARAANNGALPPDLSYIVRARHGGEDYVFSLLTGYCEPPTGVSLREGLYFNPYFPGQAIGMAPPIYTEVLEYDDGTPATMSQVAKDVATFLRWASEPEHDHRKRMGLKMLLMMGLLLPLTYAMKRHKWSVLKSRKLAYRPPK

SEQ ID NO: 4270 - DNA, 761 bp, Homo sapiens
  misc_feature (1)..(761): n=a, c, g or t
  ref <308>: DATABASE ACCESSION NUMBER: EMBL / AA643228
  ref <309>: DATABASE ENTRY DATE: 2000-03-03
tttatgttgagaaacttaatttattcccacactgagggctgaaggaagatcagaagcaagagtctggtctcctggcccttgtatctgatgaaaagggccaggcctgagaagcagtcggactgttcctgggctgctgagagcttgttctggcaagatgacaagcagatactgaacagggtcacttgggtggccgataagccagctttcgactcttcaggactgaccacttatgccgcttcatggcataggtcaggggcagcagcaggcccatcatcaacaacatcttgagacccatgcgttttcgatggtcatgctctggttctgatgcccagcgaaggaaggtggcgacatccttagctacttgtgacatggtagctggggtgccatcatcatactccaagacttctgtgtagatgggaggagccatgccaatggnctggccgggaaagtaagggttgaaatagaggccttctcgcaatgacaccccagtggggnnctcacagtagccagtgagcagggaaaatacgtagtcctcaccaccatgcctagctcgaacgatgtagctgaggtcagggggtaaagctccattgttagcagctcttgcagcctcagggttagggtatggttttggaaaatagtcagacaactgccctggccgcatgaacatctccccatcatcattagggccatcctggacctncancttcctcagcagcgcctggcttcttcctccgtgtagcacattcccacaggtggcggta

SEQ ID NO: 4271 - protein, 325 aa, Homo sapiens
MAAAAASLRGVVLGPRGAGLPGARARGLLCSARPGQLPLRTPQAVALSSKSGLSRGRKVMLSALGMLAAGGAGLAVALHSAVSASDLELHPPSYPWSHRGLLSSLDHTSIRRGFQVYKQVCASCHSMDFVAYRHLVGVCYTEDEAKELAAEVEVQDGPNEDGEMFMRPGKLFDYFPKPYPNSEAARAANNGALPPDLSYIVRARHGGEDYVFSLLTGYCEPPTGVSLREGLYFNPYFPGQAIAMAPPIYTDVLEFDDGTPATMSQIAKDVCTFLRWASEPEHDHRKRMGLKMLMMMALLVPLVYTIKRHKWSVLKSRKLAYRPPK

SEQ ID NO: 4272 - DNA, 633 bp, Rattus norvegicus
  misc_feature (1)..(633): n=a, c, g or t
  ref <308>: DATABASE ACCESSION NUMBER: EMBL / AA799475
  ref <309>: DATABASE ENTRY DATE: 2000-03-03
aaacactgcattgcactcatatttattgccataattgtgttatggagtcagaagatcaaactgggttctgagtcccctgccctcacccagtgtgccactggttatgcctgtccccaccccctgtacacgcacacacaaaatggacttgtactcctcagttgtgatgcaggcaacatatcaggacgcctaatatatcaaatgctgaatgatgggaatcagagggccagactatagggagctgtggggtgttcaggtggccaccattgctaaagacccaggctggtctcccactgattcatgagtcatgttgatcccctggttgctggggaaggtggtgtctgtggcttcagcttgccgagttgaaggatggagactgaacggctgagctgtgtcctcagcgaccctgagcctgaagccgctgcatctgcaggatctgactgagaatgcactgtacatcctcgtccatctgtccctgaatggcgtacaagagatgggtgcggtataaagccacacagtgcagtgttcctgggcctcctcctgtatctgctgttgcaaggctgtcacctngacacgcaggggcntctcctgctccttgganctggctggattggactgctgcaccttcaaaagctc

SEQ ID NO: 4273 - DNA, 848 bp, Homo sapiens
  ref <308>: DATABASE ACCESSION NUMBER: EMBL / BI769995
  ref <309>: DATABASE ENTRY DATE: 2001-09-27
ccacgggcaaggaggccgcccggctgcgcgcggagctggagcgggagcgtgtgtgcagcgtggcgctctcggagcacgaacgcatcgtgggcaccctgcaggccaacgtggcccagctggaggggcagctggaggagctgggacggcggcatgagaagaccagcgcagaggtcttccaggtgcagcgtgaggccctgttcatgaagagtgagcgacacgcagccgaggcacagctggccacagcagagcagcagctacgggggctacggaccgaggcggaaagggctcgccaggcccagagccgggcccaggaggctctggacaaggccaaggagaaggacaagaagatcacagaactctccaaagaagtcttcaatcttaaggaagccttgaaggagcagccggccgcctcgccacccctgaggtggaggctctccgtgaccaggtgaaggatttacagcagcagctgcaggaagctgccagggaccactccagcgtggtggctttgtacagaagccacctcctatatgccattcagggccagatggatgaagatgtgcagcggattctcagccagattctgcagatgcagagactccaggctcagggccgctgagaaaggccaggcccagtggctacactgaccacacccacgcagggacctcaaccccctgcaggccccttgcagaccggcttcacttggcttcacttggccctatccaggcccatgcacttggagaccagcctggttccctgcccgaacaccccaagtgggctccatcacccaactggtctctgacacgcacacactggtcagtcttgacccgggccgttgatgccctccccta

SEQ ID NO: 4274 - DNA, 681 bp, Rattus norvegicus
  ref <308>: DATABASE ACCESSION NUMBER: EMBL / AA799479
  ref <309>: DATABASE ENTRY DATE: 2000-03-03
gggatcagagtttctttatgggctataggggccacaaggctggccaggtggcaaggtcaccggtggcccggtcaccgatacaggtagtcagcctggatgttggccgcgatctcggcctcccacttgtcaccattgttgagtagcttctccttgttgtacagcaactcctcatgcgtctcggtggaaaactcaaagttggggccctccacgatagcgtcaacagggcaggcttcctggcagaaaccacagtacatacacttggtcatgtcaatgtcatagcgtgtagtccggcggctgccatctgctcttggctcagcctcaatggtgatggcctgtgcaggacagatggcctcacagagcttgcaggcgatgcaacgctcctccccagtacggtatcggcgcagtgcatgctccccacggaagcgcggactcagtgggcccttctcaaaggggtacttgatggtggccggctcccgaaatgagtacctacggtcatgcccagtctcggaagagtccgtcacatcagaaccgaactgcatgtcatcccagattctagtcaaaaaattcggtgccttcaatcaatactgttcgtacggccatgaagctagaggtttgcaataaaatccgtccaggccggcaaggcgggaaaatcaaccaggggaatctaataacccccgcaat

SEQ ID NO: 4275 - DNA, 747 bp, Homo sapiens
  ref <308>: DATABASE ACCESSION NUMBER: EMBL / U65579
  ref <309>: DATABASE ENTRY DATE: 1999-07-02
ctggcctgcttggcaaggcaagtagcggcggcgcttcaagatgcgctgcctgaccacgcctatgctgctgcgggccctggcccaggctgcacgtgcaggacctcctggtggccggagcctccacagcagtgcagtggcagccacctacaagtatgtgaacatgcaggatcccgagatggacatgaagtcagtgactgaccgggcagcccgcaccctgctgtggactgagctcttccgaggcctgggcatgaccctgagctacctgttccgggaaccggccaccatcaactacccgttcgagaagggcccgctgagccctcgcttccgtggggagcatgcgctgcgccggtacccatccggggaggagcgttgcattgcctgcaagctctgcgaggccatctgccccgcccaggccatcaccatcgaggctgagccaagagctgatggcagccgccggaccacccgctatgacatcgacatgaccaagtgcatctactgcggcttctgccaggaggcctgtcccgtggatgccatcgtcgagggccccaactttgagttctccacggagacccatgaggagctgctgtacaacaaggagaagttgctcaacaacggggacaagtgggaggccgagatcgccgccaacatccaggctgactacttgtatcggtgacgccccaccggcccgcagcccctgctgcccaataaaaccactccgaccccacggaaaaaaaaaaaaaaaaaaaa

SEQ ID NO: 4276 - protein, 210 aa, Homo sapiens
  ref <308>: DATABASE ACCESSION NUMBER: SWISS-Prot / O00217
  ref <309>: DATABASE ENTRY DATE: 2002-06-15
MRCLTTPMLLRALAQAARAGPPGGRSLHSSAVAATYKYVNMQDPEMDMKSVTDRAARTLLWTELFRGLGMTLSYLFREPATINYPFEKGPLSPRFRGEHALRRYPSGEERCIACKLCEAICPAQAITIEAEPRADGSRRTTRYDIDMTKCIYCGFCQEACPVDAIVEGPNFEFSTETHEELLYNKEKLLNNGDKWEAEIAANIQADYLYR

SEQ ID NO: 4277 - DNA, 681 bp, Rattus norvegicus; identical to SEQ ID NO: 4274
  ref <308>: DATABASE ACCESSION NUMBER: EMBL / AA799479
  ref <309>: DATABASE ENTRY DATE: 2000-03-03

SEQ ID NO: 4278 - DNA, 747 bp, Homo sapiens; identical to SEQ ID NO: 4275
  ref <308>: DATABASE ACCESSION NUMBER: EMBL / U65579
  ref <309>: DATABASE ENTRY DATE: 1999-07-02

SEQ ID NO: 4279 - protein, 210 aa, Homo sapiens; identical to SEQ ID NO: 4276
  ref <308>: DATABASE ACCESSION NUMBER: SWISS-Prot / O00217
  ref <309>: DATABASE ENTRY DATE: 2002-06-15

SEQ ID NO: 4280 - DNA, 673 bp, Rattus norvegicus
  ref <308>: DATABASE ACCESSION NUMBER: EMBL / AA799481
  ref <309>: DATABASE ENTRY DATE: 2000-03-03
ccatcacaataaaagtgacacagctttacaaaaataaatttttattaaaagcagtaaagtctgagcaggaagacagtacaaagaatgtaaacaatgtaaacaccactacattcagctcagcctgatcggatgctgaaagacaagtctaaatgctctagtccctttgctagcaagatacattaattctattttacacagacaacatattctaatttttactagggaaaaatagtttatcgaagtcgatcccaacgccaaatgctggcatcatcgcagacagctatgaggatgctgctatccctgctaaaactggtttgtcgaatagcagcgccacatttatgatgggtcagtgttgtgcatttggctttatgaggatcttctactttcaaatcccaaacatacagtttgacaacctgactgcccaatgcaagcattaggtttactttaaccatatcatcctcaatttggcaggtttcaacaaaaaaggcattttcacaaaactgggaaatacaaaacgcctaacatccttcaaatcaacataatccaagtagtccgggtaaaaaatcgggaatggatttcgggaataaaggccggaagtttgttgggtaaaaccaaaatcctaaccatcaaaatccttggtggtctcaaattagagggtcaacccgggaatatt

SEQ ID NO: 4281 - protein, 441 aa, Rattus norvegicus
  ref <308>: DATABASE ACCESSION NUMBER: Refseq / NP_068676
  ref <309>: DATABASE ENTRY DATE: 2002-01-07
MSEREVSTAPAGTDMPAAKKQKLSSDENSNPDLSGDENDDAVSIESGTNTERPDTPTNTPNAPGRKSWGKGKWKSKKCKYSFKCVNSLKEDHNQPLFGVQFNWHSKEGDPLVFATVGSNRVTLYECHSQGEIRLLQSYVDADADENFYTCAWTYDSNTSHPLLAVAGSRGIIRIINPITMQCIKHYVGHGNAINELKFHPRDPNLLLSVSKDHALRLWNIQTDTLVAIFGGVEGHRDEVLSADYDLLGEKIMSCGMDHSLKLWRINSKRMMNAIKESYDYNPNKTNRPFISQKIHFPDFSTRDIHRNYVDCVRWLGDLILSKSCENAIVCWKPGKMEDDIDKIKPSESNVTILGRFDYSQCDIWYMRFSMDFWQKMLALGNQVGKLYVWDLEVEDPHKAKCTTLTHHKCGAAIRQTSFSRDSSILIAVCDDASIWRWDRLR

SEQ ID NO: 4282 - DNA, 2032 bp, Homo sapiens
  ref <308>: DATABASE ACCESSION NUMBER: EMBL / AF099032
  ref <309>: DATABASE ENTRY DATE: 1999-01-25
tttgcggcaagctcgggccgggcttgcttgacggcggtgtggcggaggccccgccccaggcggcaggaacctggagggaggcggaggaatatgtccgagagggaagtgtcgactgcgccggcgggaacagacatgcctgcggccaagaagcagaagctgagcagtgacgagaacagcaatccagacctctctggagacgagaatgatgacgctgtcagtatagaaagtggtacaaacactgaacgccctgatacacctacaaacacgccaaatgcacctggaaggaaaagttggggaaagggaaaatggagttcaaagaaatgcaaatattctttcaaatgtgtaaatagtctcaaggaagatcataaccaaccattgtttggagttcagtttaactggcacagtaaagaaggagatccattagtgtttgcaactgtaggaagcaacagagttaccttgtatgaatgtcattcacaaggagaaatccggttgttgcaatcttacgtggatgctgatgctgatgaaaacttttacacttgtgcatggacctatgatagcaatacgagccatcctctgctggctgtagctggatctagaggcataattaggataataaatcctataacaatgcagtgtataaagcactatgttggccatggaaatgctatcaatgagctgaaattccatccaagagatccaaatcttctcttgtcagtaagtaaagatcatgctttacgattatggaatatccagacggacactctggtggcaatatttggaggcgtagaagggcacagagatgaagttctaagtgctgattatgatcttttgggtgaaaaaataatgtcctgtggtatggatcattctcttaaactttggaggatcaattcaaagagaatgatgaatgcaattaaggaatcttatgattataatccaaataaaactaacaggccatttatttctcagaaaatccattttcctgatttttctaccagagacatacataggaattatgttgattgtgtgcgatggttaggcgatttgatactttctaagtcttgtgaaaatgccattgtgtgctggaaacctggcaagatgaaagatgatatagataaaattaaacccagtgaatctaatgtgactattcttgggcgatttgattacagccagtgtgacatttggtacatgaggttttctatggatttctggcaaaagatgcttgcattgggcaatcaagttggcaaactttatgtttgggatttagaagtagaagatcctcataaagccaagtaagtatttagaaatttctgttcaaaatttcaggctttttctccacacttgtatgccaatgtagagaagatcatttatatttgcagtgccatccttaagtcatttttaacatttactgttttcagagttaaagttattcttttttattccaataatttttgtttttcctaagtaccttggtgacaagtcatttcttgtttttatacaaattatgtagtgcttgttgaacttaaaatatatctaaattttataaaatttgagactgagctcttagtgaagtatattctggttttaagtgcttttcgtatgacttggaacatctgcttattttctaatccgctgttttagggtagacactgacaacgttatgtgtggtctttaacctgttgtcatgttttttccctagatgtacaacactgactcatcataaatgtggtgctgctattcgacaaaccagttttagcagggatagcagcattcttatagctgtttgtgatgatgccagtatttggcgctgggatcgacttcgataaaatactttgcctaatcaaaattagagtgtgtttgttgtctgtgtaaaatagaattaatgtatcttgctagtaagggcacgtagagcatttagagttgtctttcagcattcaatcaggctgagctgaatgtagtgatgtttacattgtttacattctttgtactgtcttcctgctcagactctactgcttttaataaaaatttatttttg

SEQ ID NO: 4283 - protein, 401 aa, Homo sapiens
  misc_feature (1)..(401): Xaa=Unknown amino acid
MSEREVSTAPAGTDMPAAKKQKLSSDENSNPDLSGDENDDAVSIESGTNTERPDTPTNTPNAPGRKSWGKGKWSSKKCKYSFKCVNSLKEDHNQPLFGVQFNWHSKEGDPLVFATVGSNRVTLYECHSQGEIRLLQSYVDADADENFYTCAWTYDSNTSHPLLAVAGSRGIIRIINPITMQCIKHYVGHGNAINELKFHPRDPNLLLSVSKDHALRLWNIQTDTLVAIFGGVEGHRDEVLSADYDLLGEKIMSCGMDHSLKLWRINSKRMMNAIKESYDYNPNKTNRPFISQKIHFPDFSTRDIHRNYVDCVRWLGDLILSKSCENAIVCWKPGKMKDDIDKIKPSESNVTILGRFDYSQCDIWYMRFSMDFWQKMLALGNQVGKLYVWDLEVEDPHKAKX

SEQ ID NO: 4284 - DNA, 737 bp, Rattus norvegicus
  misc_feature (1)..(737): n=a, c, g or t
  ref <308>: DATABASE ACCESSION NUMBER: EMBL / AA799487
  ref <309>: DATABASE ENTRY DATE: 2000-03-03
aggataaaaactcatttatttcaaagagcaggtacaatcaagacaagaagtggccacggaacaatcacattcgtcttaataaataacaaaacgccatttatgtctcttaaaatctatataatacattatacatttaaaataaataaatccctgtgggtctagaaacagccccggtgtctgggacaagagggatggctatgtaagacccattgctcttgggtaaccaacagagtcccctccccagccactgtgctctctctcggttcttctggggaccgtagcacacgccggtgcttcgggactggccttcctagtgcccctgccttgtttgggggggcttattgcttcgcagacattcccatcttgacacggtcggtactgagcatggctctccgtgacagccgggcgtggactccatctccgtctctgactgggactgggttttcccatgctgtcggtcggttgctgagacatccgtgagcgacacgtcttctcctttcatnccaaacattcggggaaatgcngggcaagatggctgggactcacaggctatataacattcgcgctggatacctganaagggtgggctgcctgggtgctgcaagctaatcctaccggtcactgtgcaagctagaagtcagtggctaaagggaattacctcggcagcctgggctggtgggcactggtctggccgttaggaactcntgccaatttggctcaggtcaattccaatggtc

SEQ ID NO: 4285 - DNA, 654 bp, Rattus norvegicus
  ref <308>: DATABASE ACCESSION NUMBER: EMBL / AA799488
  ref <309>: DATABASE ENTRY DATE: 2000-03-03
acaaaggattttaattcattccacttaaaaaataaaggtagtctcctcaccccccataatgagtacattaagcacatattcacatacagaaaatgtacgtacattcaattgtttacaagatttgtcaccatgtaatccattgacattcaagtgaagtagatgaacttatctacatgtatatatttggaacttctgtaccccatccatccctttttaaacaaccaagataatacgtctattctctagaagtcagttcatagaggatgatttaaggttagaagtctcttttgaagaattacaatgaagtatttatacaataagggctcagaacttctaaacacaagcttgaagctacagctcactaccttaagttacatcacatccagtgtctgggatttttttttagcaggctgtttagtttgtaagccatttcaaatgtttcaaacaattacttgtgcatcaaggagaaaaagtacaaagagaatgattccttccttttttttttatattagataaaataacatatcatctaatccttctcaaatccaacattgtaacacattactacgcaatgttcaacttgagtttctgggaatcaagatcactaactagatgaaaacagaatttcatggtaccaaacaaagccgcctttaa

SEQ ID NO: 4286 - DNA, 2799 bp, Homo sapiens
  ref <308>: DATABASE ACCESSION NUMBER: EMBL / AK025159
  ref <309>: DATABASE ENTRY DATE: 2000-09-29
tatgactgtataaaatatgatgtccagcataatggttccttgaaattagaaaacacaatggaattatataggctttcgaaggcattagcagatattgttatccctcaggaatatggtataactaaagctgaaaaactggagattgccaaaggctactgtactcctctggttagaaaaattcgctcagaccttcagaggacacaagatgatgacactgtaaataaacttcatcctgtgtattctagaggtgttctgtctcctgaacgtcatgttcgtactagattatattttaccagtgaaagtcatgtacattctttgctgtctattcttcgctatggtgccttatgcaatgaatcaaaggatgaacagtggaaacgagctatggattatttaaacgttgtcaatgagctcaactacatgactcagattgttatcatgctttatgaggatcctaataaggatctttcctcagaagaacgctttcatgttgaattacactttagtccgggagccaaaggttgtgaagaagacaaaaatttgccatctggctatggatatagaccagcttccagagagaatgaaggcaggagaccttttaaaattgataatgatgatgaaccacatacttctaaaagagatgaagttgatcgagctgtgatattgtttaaaccaatggtatcagagccaattcatatacacaggaagtctccacttccaagatctaggaagacggctacaaatgatgttgtatctgaaaatgctaattacctgagaacaccaagaactcttgtggaacagaagcagaatcctactgtaggctttgaattgtattccatggtgccatctatttgtcctctagaaactcttcataatgccctatctttaaagcaagtggatgaatttcttgcttccattgcttctccatcatctgacgttccacggaagaccgctgaaatttcctctacagctttacgttccagtccaataatgagaaaaaaagtatctttaaatacgtatacacctgcaaagatcctcccaacaccaccagctaccttaaagagcactaaagcaagcagcaaaccagctacaagtggaccttctagtgcagttgttcctaatacctcatctcggaaaaagaatataactagcaaaacagaaacgcatgaacacaaaaaaaacactgggaaaaagaaatgaaatcttagcagaagctggaactttttatacttataaaaatagtatgttcttatgtttctccttatgcatttatgtgttcacttaaaaatgtttttaaatctaaggttttctttgtttatgttcaggtaaggaactgttgtcatgatctggaaatgtttaaaacaatgtttgttagcattctgtgagcagcaaaacttatagtgataaaaatcgattgttgttaatatgatgtttaccatgtgcacatagtaatgaaaaggaacataaaagcccagcaggctcgtaccaaagtcacagcagtaatgctatgtactgcagagtctgatgagctggcctttgtgcacacttttattttcatgggattgcatcttagctgttaaaacttctagattgaaatttgacagccagggttacatattggggacttttaaagtgtctttccaaagagatttcattaaccgtttagattagaatatctttcccaattgttacagtgacatatatgctgcaatatttaacaactggagtattagccacatgggttattttttcaatctgtgttttgaatttttttattgtgtgttatttaaaatattacatatgcagctgggagaactacacctttgtgcacatagatttatatattaatttgtagaaaatattttctttatatatttccttaccatacaaggtgccttgttcatcaggaaaacttttgttttgtattttgacaagaaaggcaccttcagagtttctttttaagtatagttgacaagtgtataaatgttacacttactttcagagttctttttagatctaaagaagtcagttcaaaaatggaaatcaacaatgttaggagaaatctgaattctgttaagttagtaagtattatgtatagcatctgtttttaaccatttccattcttatccctagtgtatcagttgatcacactaagaaagcttaaagattgagcatttgaaataaatgctctttataaatgattagatttttgaagggatattgaaatcattgcgctgtgatttcatctgtgatgtgaaaaatcaatttattatccttggtgctttcccccccaccaatgcacaaataattgtgaacagcttgaaatgacttaaactgtaatccaaatgggacaatctgataagaatttcatgcattggtagttaaataacttaaattgctaaagctttagcttgaaatttatgtttagaaaaactattgatttcccatggtatgaatataactattgtaattcttcaaatgagactcttctcaccttaaatagtcatatattaattaacttataggaaataagcatactatatgttagctgttttaaaaggtaccagatgtaagagtcataaatatatgcaattaaagaagttcatagatttcacatgaatgtaaatgtgttatatggagacatgtcttgtaaacagttgaatgtatgtaagttttctgtttgtgaaaatgtagttaatgtactcactgtggaggtcataaggaagctactttttttttaaagtggaacctaattaaaatatttccagaatcaaaaaaaaaaaaaaaaaaaaaaaaaaaaaa

SEQ ID NO: 4287 - DNA, 513 bp, Rattus norvegicus
  ref <308>: DATABASE ACCESSION NUMBER: EMBL / AA799497
  ref <309>: DATABASE ENTRY DATE: 2000-03-03
aaagccatacatggatggtgagagtaagcagctgtacagaggggacagcatcagtgtacatacattcatgtccagaacacttagcatacatcagggtttatacaaggtggcagaggctataggcacaatgatacaaaatataaagtatatttccatctataaatacacagccggggacttccctaggcaccaatcctggctccatcagtgcccttctctgccatctcacctccaacctcagatcttccgagtggccggaggctgtttgtacctgggctgttcctaaggggtcttgttaagggcatcactggccgccatgttctcctgtcacccctccccctctttcattcctgtctaagaatggacaacactctccctgttgatatagagattcaacaataaacaacaacatgacagatcattcacaaaagagcagtgggtaaaagtgctctcgtttaaaggaagtctttggcaagaatacagagttgcatacggagtgctctgcctcgtgcc

SEQ ID NO: 4288 - DNA, 513 bp, Rattus norvegicus; identical to SEQ ID NO: 4287
  ref <308>: DATABASE ACCESSION NUMBER: EMBL / AA799497
  ref <309>: DATABASE ENTRY DATE: 2000-03-03

SEQ ID NO: 4289 - DNA, 565 bp, Rattus norvegicus
  ref <308>: DATABASE ACCESSION NUMBER: EMBL / AA799499
  ref <309>: DATABASE ENTRY DATE: 2000-03-03
aatagttacaaaaaacccacagtttttcttgctttattaaaccatacagtattctttcaaggacagacacacagccaaggatgctatggtgagagaaatcttattttcatggaagacgtcacaggtgctctcttcagtgatgattcttatcctcatgggaagtcaggaaatactcgggccctaaagctaccataaacgcagcaaacccccatttgaatccttttaacattacgctcgtgaacgtgatattgtctgcaaagccgcccatgtatctccaagcctcattgcgagcccatggatccctcagccctcgtgcagcaagcttcttctgcattgcttcaaatggcgtcacttcaattttccactgtctgtaatctggaagttccattttaccatgaccatgtccgtgttcgtgaccatgttcaggagccatgtctgacagaatgttgacccccaggacaccaatattcaagcttcccctcggccggattctggcctcgaggtcaatttcctatgtggtccgattaaatcgtagtcatgtaaagtgttccgtgttaattgttcc

SEQ ID NO: 4290 - protein, 104 aa, Rattus norvegicus
  ref <308>: DATABASE ACCESSION NUMBER: Refseq / NP_079873
  ref <309>: DATABASE ENTRY DATE: 2002-01-07
MAAGHGHEHGHEHGHGHGKMELPDYRQWKIEGTPLETVQKKLAARGLRDPWARNEAWRYMGGFAGNITFPSVILKGFKWGFAAFVVALGAEYFLDSQNGDKKHH

SEQ ID NO: 4291 - DNA, 693 bp, Homo sapiens
  ref <308>: DATABASE ACCESSION NUMBER: EMBL / AF047183
  ref <309>: DATABASE ENTRY DATE: 1998-02-25
tccccgcccttctcttttctacagtatctgttacctcagtcagattgaggatgcacatatactgggaaaataatcgacttccagcgtccctcatgtagtctctacctgattcaggaatctctaacccagtatcggaacgttaagcggcttctccgctttcctgccgtgagaaactcgaggtgaccaacctccgtttccggttggctccggttgcagagttgagtgtcctgagaggtcagattgctgtcagacatggcccatgaacatggacatgagcatggacatcataaaatggaacttccagattatagacaatggaagatagaagggacaccattagaaactatccagaagaagctggctgcaaaagggctaagggatccatggggccgcaatgaagcttggagatacatgggtggctttgcaaagagtgtttccttttctgatgtattctttaaaggattcaaatggggatttgctgcatttgtggtagctgtaggagctgaatattacctggagtccctgaataaagataagaagcatcactgaagataatacctggaagcatcatagtggtttcttaactctccaaaataagatttcttctctgtagcctacttgtctggtttatcccttacagaatattagtaaagatttaatcaattaaaatatatataaaaaaaaaaaaaaaaa

SEQ ID NO: 4292 - protein, 97 aa, Homo sapiens
  ref <308>: DATABASE ACCESSION NUMBER: SWISS-Prot / O43676
  ref <309>: DATABASE ENTRY DATE: 2002-06-15
AHEHGHEHGHHKMELPDYRQWKIEGTPLETIQKKLAAKGLRDPWGRNEAWRYMGGFAKSVSFSDVFFKGFKWGFAAFVVAVGAEYYLESLNKDKKHH

SEQ ID NO: 4293 - DNA, 777 bp, Rattus norvegicus
  misc_feature (1)..(777): n=a, c, g or t
  ref <308>: DATABASE ACCESSION NUMBER: EMBL / AA799501
  ref <309>: DATABASE ENTRY DATE: 2000-03-03
aatctagcatgttgcttagaaaggcttgttgtgttgagtacaaatactcctccagcatgtctcctagagaccatttcacccactgctctgtttggctgctagcctcttgtctctctcttcagcaatggtaaggcggattccttttcctcggggaagagaaatccacggtttgttgcccttgccaataacaaaaatgttggaaagacgagtggcaaagctgttgccgttggcatctttcacatgaaccacatcaaaagagccaggatgtctctccctattggtgattacaccaattctccccaagttagcacctccagtcaccatacacaggttcccagtgtcgaacttgatgaaatcagttatcttgcctgtttccaaatcaatctgaatggtgtcattcaccttgatgaggggatcagggtatcgaatagtacgggcatcatgggtcaccagatgtgggattccctttgtgcccacanagatctttctcactttgcacaacttgtacttgggctcctcaggtgtaattcgatgaacagcaaagcgacccttggtgtcatagatcagacggaatttctctccagtcttgtcaatgcggaggacatccataaaaccaacaaggtangttataatcggtccggaattttccatctaaccttaatgaatcgcggcatgcaaatctttttaaatcaacctccagtcaggcaatacttaatcgggtccttaggaaatgattagggcaggattctccacattgtgtggacactgggtgtccag

SEQ ID NO: 4294 - protein, 115 aa, Rattus norvegicus
  ref <308>: DATABASE ACCESSION NUMBER: SWISS-Prot / Q63362
  ref <309>: DATABASE ENTRY DATE: 2002-06-15
AGLVKKTTGLVGLAVCDTPHERLTILYTKILDLLKHFPKHAAYRKYTEQITSEKLELVKLEPDVKKLENLLQGGEVEEVILQAEKELSLARKMLQWKPWEPLVEEPPANQWKWPI

SEQ ID NO: 4295 - DNA, 233 bp, Homo sapiens
  misc_feature (1)..(233): n=a, c, g or t
  ref <308>: DATABASE ACCESSION NUMBER: EMBL / AA083919
  ref <309>: DATABASE ENTRY DATE: 2000-03-03
tggattcatggatgtcatcagcattgacaagacgggagagaatttccgtctgatctatgacaccaagggtcgctttgctgtacatcgtattacacctgaggaggccaagtacaagttgtgcaaagtgagaaagatctttgtgggcacaaaaggaatccccncatctngtgnngcctcatgattncccgcaacaatncggtaacccgnattccctcatcnangngaatgntacc

SEQ ID NO: 4296 - DNA, 707 bp, Rattus norvegicus
  ref <308>: DATABASE ACCESSION NUMBER: EMBL / AA799507
  ref <309>: DATABASE ENTRY DATE: 2000-03-03
ccgttaaaagtctaacatttaactcaagggtgagcacagaagctgctaggatatagaaggacagtcacttggcagtgtgccctcaagtcctccagttgcccacagaaggacctcagacactgggctttcatctagcctctgtcttcaaggactttcgtgatgggtccagccacccgcccacaggtggctgcaccaggacatcactgcactaagcgagaagggcttgtgcagtaacatagctactgggttactgcccacagtacttcctgtatcaacagaccacagctgacaaacaccagttcctgctgtctggctgtcatgatggctagaagtagcccccgaggctacctcggtgagcagaagagagtgacagtcaaggctaaggggaaaaggtggcacaagagggacctggaatttgagaagcttgggttgctataaatacatacacgggagatgtgcacacaaaatacaacttgttatataaaagttgtacagaatctagattaaacttagtataaaatagtctatagggtataagatgtagtgaaaatataaagttacaacatttgaatacgggcaattccacaattggggtgctaaggcaaggtgctcccctacggtggaaagcattgggccacccctgaagcgtccttggttcccacccaaagtcacaacaagaccagggttcagcgggaaagttaataaac

SEQ ID NO: 4297 - DNA, 731 bp, Rattus norvegicus
  misc_feature (1)..(731): n=a, c, g or t
  ref <308>: DATABASE ACCESSION NUMBER: EMBL / AA799511
  ref <309>: DATABASE ENTRY DATE: 2000-03-03
gggtacaaaagtatttattttataaaacttgtatttaaaatagagcttatctgtcaactcacaaatcctaatttaaaacataacacattacccttagctaatctgatgttaacctttacaatcaacacccatttttggaattttattaagaacctgtactaaatgaagtttttaatcagaaaacattcccttttaccttaaaagtgcttcttaaatgaaggcaccaacaagaactactttcagatggtacagaatttcttatttcttgaagactctgtggttgaccacttcttcattagttacctgcagcaagacaccttccattttactaccaacaccactgaaggaagcaagaaaagctttattaatgatcacttggcttgcctcagctgttgaaatgaagcactttacagtctttgtggcaccagaatatacttgtccatggttcatatcaatgccatgggaagtgggaaaaactcaatacgggttcctccaccataaccccaattcctccactcctccaggacatagttcctccaacataggtccccccagtccggaacaacaaagttcaccctcatgacccttgtaaaggtgcgctcngccgctcggccaatctggcccaggcaaatcccaaaggggccataatccaacaggcaacgttccggggaatgttccgccaatccaaaaatacgggcaaagtaaccggggccaaagtgcaccacaatgtg

SEQ ID NO: 4298 - DNA, 1436 bp, Homo sapiens
  ref <308>: DATABASE ACCESSION NUMBER: EMBL / AK026373
  ref <309>: DATABASE ENTRY DATE: 2000-09-29
tgtgttgtctgcaattcatcaggattaaattatgtagataacttaagggatatctctgcaaggagaaacacctttttagatcttttagatgctgcttcttcaatgcaaggaaaggaaataaccccagcgaggtactcttcagggacacaggtctagtacaagagaactcttgacggctactaagttcagccagtcttaaaaaactgtgctgtttctacaaaactttaactacagtagtttataaggatgccaacgaaagctgagggtgtagagcaaaatagttctaagcttcagttaaacttctttaggtaagatcttatttacttttcctttcttaattttcctccctaaaagataaactaatactcttaaatggtctttcagtatagtggttcttacgtagtttaacatagctataaattgagtttaacaatttataaactcaagagaataatttttataaaccctgtttttcaatctgtcatttacttaaattattttggttgtttttccctttttttccttcttttcccaccccctccccctccatgtgaagatttgggtgcttaacatatcatttttttccctgccggaattttagcattgatatgaaccatggacaagtatattctgctgccacaaagactgtaaagtgcttcatttcaacagctgaggcaagccaagtgatcattaataaagcttttcttggttccttcagtggtgttggtagtaaaatggtaggtaaaagttaggctgcaagttcaataaatcatgagatttcccatcgttacacccttgtgtattcacatttcttggatcaaacattttgagtgaactaggggtttttattaaagacatttgttgtatttatggttgtaactgtacatgcttatcaggatgagactgaaagaaggtagggcaaaaatggttgaatctattttcagatagtagttcatacttgagtgaagtgtcttgtctgcattatgaagcctggtatgtatccagtactaaataggtgggttaaatgtggtaattctagttcagtgtcttaccctgaagagaaggttgtaggttggctgttgaaattcattccttagatatgatcagtttgattgcccggctttattgcctttacaggaatgtgatactcagggcttactctatacaccaatgagtcttctttgatcctaagaccaccactgaagttgtttaggttcttttggacaaacatgataaacttcttcagatactttttttttcctttggcaggaaggtgtcttgctgcaggtaactaatgaagaagtggtcaaccacagagtcttcaagaaataagaaattctgtaccatctgaaagtagttcttgttggtgccttcatttaaaaagcactctttaaaataaaagggaaatgttttctgataaaaaaaaaaaaaaaaaa

SEQ ID NO: 4299 - DNA, 731 bp, Rattus norvegicus; identical to SEQ ID NO: 4297
  misc_feature (1)..(731): n=a, c, g or t
  ref <308>: DATABASE ACCESSION NUMBER: EMBL / AA799511
  ref <309>: DATABASE ENTRY DATE: 2000-03-03

SEQ ID NO: 4300 - DNA, 1436 bp, Homo sapiens; identical to SEQ ID NO: 4298
  ref <308>: DATABASE ACCESSION NUMBER: EMBL / AK026373
  ref <309>: DATABASE ENTRY DATE: 2000-09-29

SEQ ID NO: 4301 - DNA, 601 bp, Rattus norvegicus
  misc_feature (1)..(601): n=a, c, g or t
  ref <308>: DATABASE ACCESSION NUMBER: EMBL / AA799515
  ref <309>: DATABASE ENTRY DATE: 2000-03-03
aatgtacttcttcaaataacagaggggatcctgtgcacactgcaatgttagcactgcctccataaagcatcaattaagaaaggcccaagagtaggatgctgtttcttttaaaataatttaaaatatattaactttcctaaggcagattttgtgtgaggcgtgttgaataggtagctgctaccgctgccaaagaacggtgcttggaaggggctgtctgttctgggcagttggagttggagggtaaatcccgtgaggtcaagcagcagagacaacgcacgtgacagcacaagccagtgatgtcaacactgactccacacggctaagacttggctcacaactgggccacttangaaccctggttcttagagacaattgagaaaacacagttgtaccttagtatctgctgagaagacacatagatatgatgctgatagtggccgttctggcgtcatgcatttgaggaacaccttgtatgatctgatatactcgcttgtccttgtctatacatgcacaccactgtttgaaaggaaataaaagcggcttatgttgctgaggagcacagccagttgggtgcacctagtacggagcaaatacaagtgct

SEQ ID NO: 4302 - DNA, 348 bp, Rattus norvegicus
  ref <308>: DATABASE ACCESSION NUMBER: EMBL / AA799525
  ref <309>: DATABASE ENTRY DATE: 2000-03-03
gaccgaatcctcggatatttaatagagcaccctccttcagtacaaaaccctggagaggacacaggtggcctgggtggcactaatagttgactgtcttggcaagcttggtttcctcgatctcagaagacagccagcggtaagtgcgatgtcgccggagcacctcgatggacttgagctccagtggtgtgggctgaacgccaagatcttccaggccgggcaggtcggtcgccatcacatctgagatatgtatccgctccaccttgtcctttgttgtccagggctcaaatggactcagcccgaagagtctgccaatccagctatacacaagccgtggcaaggggtaaggga

SEQ ID NO: 4303 - protein, 377 aa, Rattus norvegicus
  ref <308>: DATABASE ACCESSION NUMBER: Refseq / NP_079634
  ref <309>: DATABASE ENTRY DATE: 2002-01-07
MAAAVRFRVVRALPMSRPAITAAATSVFCGSSHRQLHHAVIPHGKGGRSSVSGVVATVFGATGFLGRYVVNHLGRMGSQVIIPYRCDVYDIMHLRLMGDPGQLTFLEWDARDKDSIRKAVQHSNVVINLIGREWETRNFDFEDVFVNIPRAIAQASKEAGVERFIHVSHLNASMKSSSKSLRSKAVGEKEVRSVFPEAIIIRPSDIFGREDRFLNHFANYRWFLAVPLVSLGFKTVKQPVYVADVSKGIVNATKDPDAVGKTFAFTGPNRYLLFHLVKYIFGMTHRTFIPYPLPLFVYSWIGKLFGLSPFEPWTTKDKVERIHISDVMPTDLPGLEDLGVQPTPLELKSIEVLRRHRTYRWLSSEIEETKPAKTVNY

SEQ ID NO: 4304 - DNA, 1507 bp, Homo sapiens
  ref <308>: DATABASE ACCESSION NUMBER: EMBL / L04490
  ref <309>: DATABASE ENTRY DATE: 1999-07-02
ggctgccgcacaatcccgggttgtccgggtcctgtcaatgtcacgttctgccattactgcaatagccacatctgtgtgtcacggcccaccctgtcgccagcttcatcatgccctcatgcctcatgggaaaggtggacgttcctcagtcagtgggattgtggccactgtgtttggagcaacaggattcctggggcgatatgttgtcaaccaccttggacgcatggggtcacaggtaatcataccctatcggtgtgataaatatgacatcatgcaccttcgtcccatgggtgacctgggccagcttctgtttctggaatgggacgcgagagataaagattctatccgacgagtagtacaacacagcaatgtggtcatcaatcttattggacgagactgggaaaccaaaaactttgattttgaggatgtttttgtgaagattccccaagcaattgctcaactgtccaaggaagctggagttgaaaaattcattcatgtttcacatctgaatgcgaatattaaaagctcttctagatatttgagaaataaggctgttggagagaaagtagtgagagatgcatttccggaagccattatcgtaaagccgtcggacatctttggaagagaggatagattccttaattcttttgcaagtatgcatcggtttggtcctataccccttggttccttgggctggaagacagttaaacaaccagtatatgtcgtagatgtatccaaaggaattgttaatgcagttaaggatcctgatgccaatgggaaatcctttgctttcgttggtcccagtcggtacctccttttccacctggtgaagtacatctttgctgtggctcacagattgttcctcccattccccttgccgctttttgcctatcgatgggtagcaagagtctttgaaataagcccatttgagccctggataacaagggataaagtggagcggatgcacatcacagacatgaaattgcctcacctgcctggcttagaagaccttggtattcaggcaacaccactggaactcaaggccattgaggtgctgcggcgtcatcgcacttaccgctggctgtctgctgaaattgaggatgtgaagccggccaagaccgtcaacatttagtgcctcctgagcagctcttggttttggcgtcttttgggtcggcccatgtggtttgagcacccagccaggcggtctctttagaggatcctgtacacagttccactattaaaacatttcaggttgaattctgcagtattttcttccttgatttacaaaatgagaaatgtagtcacttagaacttgagcatgatttttgttaaacatatttaataatgatatatatactatttattctctgaaatgccagagagtttgaattttcctatgacaaaccacttctagcatacgttctagaagacaaggaccctttttaatgtcaaagtattgtaaagaccccaagtgatatgtgattgttttttaatttccattaaatgagag

SEQ ID NO: 4305 - protein, 377 aa, Homo sapiens
  ref <308>: DATABASE ACCESSION NUMBER: SWISS-Prot / Q16795
  ref <309>: DATABASE ENTRY DATE: 2002-06-15
MAAAAQSRVVRVLSMSRSAITAIATSVCHGPPCRQLHHALMPHGKGGRSSVSGIVATVFGATGFLGRYVVNHLGRMGSQVIIPYRCDKYDIMHLRPMGDLGQLLFLEWDARDKDSIRRVVQHSNVVINLIGRDWETKNFDFEDVFVKIPQAIAQLSKEAGVEKFIHVSHLNANIKSSSRYLRNKAVGEKVVRDAFPEAIIVKPSDIFGREDRFLNSFASMHRFGPIPLGSLGWKTVKQPVYVVDVSKGIVNAVKDPDANGKSFAFVGPSRYLLFHLVKYIFAVAHRLFLPFPLPLFAYRWVARVFEISPFEPWITRDKVERMHITDMKLPHLPGLEDLGIQATPLELKAIEVLRRHRTYRWLSAEIEDVKPAKTVNI

SEQ ID NO: 4306 - DNA, 570 bp, Rattus norvegicus
  misc_feature (1)..(570): n=a, c, g or t
  ref <308>: DATABASE ACCESSION NUMBER: EMBL / AA799531
  ref <309>: DATABASE ENTRY DATE: 2000-03-03
aaggcggcagctgtttattttgaggtaactgtcacacagtactgttatatggtagaatagtcattatgtaatcttgagagaggttgtctaaggtaggatttggagccttccacacttatcagatgccttctcattagtttcttctagttttgcaattctagatccaaattgtatggcccgtttgggcagaagggcagaggatgagagaccaagttccacagctgcaaggcgtaaaatgagcttctcaccaactccacggggcaaagccaggtctaccttttcccaaactggcagagaattcaggaaagatacaacattttcatccagaaaaggaaatcttgcttcctttccatgatcagcaataactctatcatcacgaccaaggtttctagaagaaatgcgacccaattccattgctatttcctcattcaatccttctaggccaagagactgaaagcgggcacgatgacgggaataacctgccaactgctcatctgcnacaatcccagtgagaatcacctttgcactgctcttgntagactgcacagcatcctcggttcacaacaaaac

SEQ ID NO: 4307 - protein, 627 aa, Rattus norvegicus
  ref <308>: DATABASE ACCESSION NUMBER: SWISS-Prot / AAH13617
  ref <309>: DATABASE ENTRY DATE: 2003-02-01
MCGICCSVSFSIEHFSKELKEDLLHNLRRRGPNSSRQLLKSAVNYQCLFSGHVLHLRGVLTIQPVEDEHGNVFLWNGEVFNGVKVEAEDNDTQVMFNSLSACKNESEILLLFSKVQGPWSFIYYQASSHHLWFGRDFFGRRSLLWQFSNLGKSFCLSSVGTQVYGVADQWQEVPASGIFQIDLNSAAVSRSVILKLYPWRYISKEDIAEECGNDLTQTPAGLPEFVSVVINEANLYLSKPVVPLNKKLPESPLEIQCRNSSSTSGTRETLEVFLTDEHTKKIVQQFIAILNVSVKRRILCLAREENLASKEVLKTCSSKANIAILFSGGVDSMVIAALADRHIPLDEPIDLLNVAFVPKQKTGLPIPNIERKQQNHHEIPSEESSQSPAADEGPGEAEVPDRVTGKAGLKELQSVNPSRTWNFVEINVSLEELQKLRRARICHLVQPLDTVLDDSIGCAVWFASRGIGWLVTQDAVRSYKSSAKVILTGIGADEQLAGYSRHRARFQSLGLEGLNEEIAMELGRISSRNLGRDDRVIGDHGKEARFPFLDENVVSFLNSLPVWEKVDLTLPRGVGEKLILRLAAMELGLPASALLPKRAIQFGSRIAKLEKFNEKASDKCGRLQILP

SEQ ID NO: 4308 - DNA, 2448 bp, Homo sapiens
  ref <308>: DATABASE ACCESSION NUMBER: EMBL / AK000759
  ref <309>: DATABASE ENTRY DATE: 2000-02-22
aaaagaaagggtgagcgcggctggaagcgcgcatgcgctgtggctaatgccgtaggctccttcagggctgagccatcccgcgtgtcttgcgctcggtggaaatgcccagccgagggacgcgaccagaggacagctctgtgctgatccccaccgacaattcgaccccacacaaggaggatctaagcagcaagattaaagaacaaaaaattgtggtggatgaactttctaaccttaagaagaataggaaagtatataggcaacaacagaacagcaatatattctttcttgcagaccgaacagaaatgctgtctgagagcaagaatatattggatgaactgaaaaaagaataccaagaaatagaaaacttagacaagaccaaaatcaagaaatagtcaacctgatttcacataacaatgtgtggcatttgttgttctgtaaacttttctgctgagcatttcagtcaagatttaaaagaggacttactatataatcttaaacagcggggacccaatagtagtaaacaattgttaaagtctgatgttaactaccagtgtttattttctgctcacgtcctacacttgaggggtgttttgactacccagcctgtggaagatgaaagaggcaatgtgtttctatggaatggagaaatttttagtggaataaaggttgaagctgaagagaatgacactcaaattttgtttaattatctttcctcctgtaagaatgaatctgagattttgtcactcttctcagaagtacaaggtccctggtcatttatatattatcaagcatctagtcattatttatggtttggtagggatttttttggtcgccgtagcttgctttggcattttagtaatttgggcaagagtttctgcctctcttcagttggcacccaaacatctggattggcaaatcagtggcaagaagttccagcatctggacttttcagaattgatcttaagtctactgtcatttccagatgcattattttacaactgtatccttggaaatatatttctagggagaatattattgaagaaaatgttaatagcctgagtcaaatttcagcagacttaccagcatttgtatcagtggtagcaaatgaagccaaactgtatcttgaaaaacctgttgttcctttaaatatgatgttgccacaagctgcattggagactcattgcagtaatatttccaatgtgccacctacaagagagatacttcaagtctttcttactgatgtacacatgaaggaagtaattcagcagttcattgatgtcctgagtgtagcagtcaagaaacgtgtcttgtgtttacctagggatgaaaacctgacagcaaatgaagttttgaaaacgtgtgataggaaagcaaatgttgcaatcctgttttctgggggcattgattccatggttattgcaacccttgctgaccgtcatattcctttagatgaaccaattgatcttcttaatgtagctttcatagctgaagaaaagaccatgccaactacctttaacagagaagggaataaacagaaaaataaatgtgaaataccttcagaagaattctctaaagatgttgctgctgctgctgctgacagtcctaataaacatgtcagtgtaccagatcgaatcacaggaagggcgggactaaaggaactacaagctgttagcccttcccgaatttggaattttgttgaaattaatgtttctatggaagaactgcagaaattaagaagaactcgaatatgtcacttaattcggccattggatacagttttggatgatagcattggctgtgcagtctggtttgcttctagaggaattggttggttagtggcccaggaaggagtgaaatcctatcagagcaatgcaaaggtagttctcactggaattggtgcagatgagcaacttgcaggttattctcgtcatcgtgtccgctttcagtcgcatgggctggaaggattgaataaggaaataatgatggaactgggtcgaatttcttctagaaatcttggtcgtgatgacagagttattggtgatcatggaaaagaagcaagatttcctttcctggatgaaaatgttgtctcctttctaaattctctgccgatttgggaaaaagcaaacttgactttaccccgaggaattggtgaaaaattacttttacgccttgcagctgtggaacttggtcttacagcctctgctcttctgcccaaacgggccatgcagtttggatcaagaattgcaaaaatggaaaaaattaatgaaaaggcatctgataaatgtggacggctccaaatcatgtccttagaaaatctttctattgaaaaggagactaaattgtaatgtgattcacaatgtaacaatataaaaataagtttttatataattatataaaagtaaggtactctgctgctttactattgtataatatagtagttttaaagtt

SEQ ID NO: 4309 - protein, 644 aa, Homo sapiens
  misc_feature (1)..(644): Xaa=Unknown amino acid
MCGICCSVNFSAEHFSQDLKEDLLYNLKQRGPNSSKQLLKSDVNYQCLFSAHVLHLRGVLTTQPVEDERGNVFLWNGEIFSGIKVEAEENDTQILFNYLSSCKNESEILSLFSEVQGPWSFIYYQASSHYLWFGRDFFGRRSLLWHFSNLGKSFCLSSVGTQTSGLANQWQEVPASGLFRIDLKSTVISRCIILQLYPWKYISRENIIEENVNSLSQISADLPAFVSVVANEAKLYLEKPVVPLNMMLPQAALETHCSNISNVPPTREILQVFLTDVHMKEVIQQFIDVLSVAVKKRVLCLPRDENLTANEVLKTCDRKANVAILFSGGIDSMVIATLADRHIPLDEPIDLLNVAFIAEEKTMPTTFNREGNKQKNKCEIPSEEFSKDVAAAAADSPNKHVSVPDRITGRAGLKELQAVSPSRIWNFVEINVSMEELQKLRRTRICHLIRPLDTVLDDSIGCAVWFASRGIGWLVAQEGVKSYQSNAKVVLTGIGADEQLAGYSRHRVRFQSHGLEGLNKEIMMELGRISSRNLGRDDRVIGDHGKEARFPFLDENVVSFLNSLPIWEKANLTLPRGIGEKLLLRLAAVELGLTASALLPKRAMQFGSRIAKMEKINEKASDKCGRLQIMSLENLSIEKETKLX

SEQ ID NO: 4310 - DNA, 570 bp, Rattus norvegicus; identical to SEQ ID NO: 4306
  misc_feature (1)..(570): n=a, c, g or t
  ref <308>: DATABASE ACCESSION NUMBER: EMBL / AA799531
  ref <309>: DATABASE ENTRY DATE: 2000-03-03

SEQ ID NO: 4311 - protein, 627 aa, Rattus norvegicus; identical to SEQ ID NO: 4307
  ref <308>: DATABASE ACCESSION NUMBER: SWISS-Prot / AAH13617
  ref <309>: DATABASE ENTRY DATE: 2003-02-01

SEQ ID NO: 4312 - DNA, 2448 bp, Homo sapiens; identical to SEQ ID NO: 4308
  ref <308>: DATABASE ACCESSION NUMBER: EMBL / AK000759
  ref <309>: DATABASE ENTRY DATE: 2000-02-22

SEQ ID NO: 4313 - protein, 644 aa, Homo sapiens; identical to SEQ ID NO: 4309
  misc_feature (1)..(644): Xaa=Unknown amino acid

SEQ ID NO: 4314 - DNA, 524 bp, Rattus norvegicus
  misc_feature (1)..(524): n=a, c, g or t
  ref <308>: DATABASE ACCESSION NUMBER: EMBL / AA799534
  ref <309>: DATABASE ENTRY DATE: 2000-03-03
aatgttaccactccaactatttgccaacagtaacactggtatattttgtcaatgtacaatacagagagcacagcccctcatgactggtgccaggtcacatgcagcacagttcctcttccctgtcagacagtgtctttaactaaggacagacagtacgtggagcgtaagcaagggattcgggcactgtgaagcgggcagctcctcgccagctggccccagtcagatacactatggtggtcagttctttctgtgcagatgacaagggaaagatgaaccatgctgacagaggatggggcaggcgggtcgagccactgtgagtcagaaggctgacctccacgttgcaggatttgctctctgcanggatacagagtgctcagtttgcagatctgctggtacgtgacctcgatgatgacgacatgaatgggagggagatgggtgacccaagcaggccagcagagtgatgatgggccagagagggctcctgatctctcttgtggttgggcaggccccggtggctcatgagg

SEQ ID NO: 4315 - DNA, 499 bp, Rattus norvegicus
  ref <308>: DATABASE ACCESSION NUMBER: EMBL / AA799537
  ref <309>: DATABASE ENTRY DATE: 2000-03-03
ataaagtacagaaaactttattggaaatctcttgattatatttccaagtgtagctctcatttcctaacaaagcactggaggaggggcttcacagccacctggtcccagcctgagcttggctgcgggagttgtctagagcccgtttcttccattgtgtaggactgaggggcacaggccaccttgaaggatgcttcgctcagcttccctggcctctttcttaagaatctgggacataaaggctgctgtctagaggccactggctgagccctgaaaagaatccgtgccctcaccccccttttagtgctggccctggggggtaaatcctgttcagtaggctatgaatgtgcccctgacccaaaggctgcaatggcacttggccaccactgctgggcacatttctctgtggcagcaaaagcatgcacaggggaaaggctctagtgttacatgcagattactaacagcagttgagagcacctgctccaatgcgtaacggctgctg

SEQ ID NO: 4316 - DNA, 615 bp, Rattus norvegicus
  misc_feature (1)..(615): n=a, c, g or t
  ref <308>: DATABASE ACCESSION NUMBER: EMBL / AA799539
  ref <309>: DATABASE ENTRY DATE: 2000-03-03
actgcaaagtacctttaatgtgtttgcatctgcagcaagcattagatttgctcatttgggcaccataaattaggtgtagcactacacagacaccgagtcaccccaaccagtcaatccaggtgagtaagaaagctgaacaaaacacttctgaaaaggggtgcagtcacaaacccagtacagtttaattgtttcaatcaaaggcttccacttacaattgtttggttagtgataaataaagacagtttaaatgtttcagtaagtcagtaattcatcaaacctgggtttgaattattactgttactattcaactccatccaaataaacatcgatactgcactctcaaacagaaaagaaaaagggacagctgcggcaaatgctaagtttgcgttctgagcatttaaaagaaacaccccactctgcatcctttcctctgccactctgctttgataacgtgaatctgtcacattttacttcaacagataaagcactctgctgagaatataaaaagttataaaaatgtaatcataaaagactaattatggtacgcatgtgaacttttcttttantagaaacaaaaatagtcattgttatctagttaactaagtatcttggtat

SEQ ID NO: 4317 - DNA, 2344 bp, Homo sapiens
  ref <308>: DATABASE ACCESSION NUMBER: EMBL / AK000931
  ref <309>: DATABASE ENTRY DATE: 2002-08-06
tactagatggacaggctgaggtgtttggcagtgatgatgaccacattcagtttgtgcagaaaaagccaccacgtgagaatggccataagcagataagtagcagttcaactggatgtctctcttctccaaatgctacagtacaaagccctaagcatgagtggaaaatcgttgcttcagaaaagacttcaaataacacttacttgtgcctggctgtgctggatggtatattctgtgtcatttttcttcatgggagaaacagcccacagagctcaccaacaagtactccaaaactaagtaagagtttaagctttgagatgcaacaagatgagctaatcgaaaagcccatgtctcctatgcagtacgcacgatctggtctgggaacagcagagatgaatggcaaactcatagctgcaggtggctataacagagaggaatgtcttcgaacagtcgaatgctataatccacatacagatcactggtcctttcttgctcccatgagaacaccaagagcccgatttcaaatggctgtactcatgggccagctctatgtggtaggtggatcaaatggccactcagatgacctgagttgtggagagatgtatgattcaaacatagatgactggattcctgttccagaattgagaactaaccgttgtaatgcaggagtgtgtgctctgatccatatggtcaaaaaggactgaaaaattgtgatgtatttgatcctgtaacaaagttgtggacaagctgtgcccctcttaacattcggagacaccagtctgcagtctgtgagcttggcggttatttgtacataatcggaggtgcagaatcttggaattgtctgaacacagtagaacgatacaatcctgaaaataatacctggactttaattgcacccatgaatgtggctaggcgaggagctggagtggctgttcttaatggaaaactgtttgtatgtggtggctttgatggttctcatgccatcagttgtgtggaaatgtatgatccaactagaaatgaatggaagatgatgggaaatatgacttcaccaaggagcaatgctgggattgcaactgtagggaacaccatttatgcagtgggaggattcgatggcaatgaatttctgaatacggtggaagtctataaccttgagtcaaatgaatggagcccctatacaaagattttccagttttaacaaatttaagaccctctcaaactaacaggcttagtgatgtaattatggttagcagaggtacacttgtgaataaagagggtgggtgggtatagatgttgctaacagcaacacaaagcttttgcatattgcatattattaaacatgctgtacatactttttgggtttatttggaaaggaatgcaaagatgaaggtctgttttgtgtacttttaagactttggttattttactttttggaaaagaataaaccaagaattgattgggcacatcatttcaagaagtcccctctcctccacatttgttttgccaatttgcacattaaatgactcttccctcaaatgtgtactatggggtaaaaggggtagggtttaaagatgtagacagttgggtttttttaagggcccttcttcaataactggaacactctataacaaaggatacttatttaaatagatgacattgactatttttgtttttattaaaaggaagcttacatgcctaccaatatttaatcttttatgattgcctttttataactttttatattctcagcagagtgctttaccaattgaagtaaaatgtggcaggctggagttattgaagcagagtggcagtcttcagtttgcagagtaggggtctgtcttttaaactctgagtgcaaacttcagagttcttgccttggctgcagtttttttccttcaagaatgcagtactaacatttatttgagtggagttactgaacagtaacatagctgtgatttttggtatttgaaacactggttttaaatattttgacttgttgagggtatgttttatatagcaagacattatatagcagtaaaaaatggtgttttatcttctatataattcctgtttttattattaacaaaacagtcctaaatagcagccctcaattgtgaaaaaatttactttaaactacattaggttgtgaatgcaggttttatcagaactatgtttttgttcagtttatctgttcatatggataaatattggttgggatgacttggtgtctaatgtgtagtgctacacacctaacttatggggccaaaatagcatgtcctaatgcttgctgctgatttaaacacattaaaggtactttgcaggaaatccttgcaccatgggattaatatcc

SEQ ID NO: 4318 - protein, 673 aa, Homo sapiens
  ref <308>: DATABASE ACCESSION NUMBER: Refseq / NP_005997
  ref <309>: DATABASE ENTRY DATE: 2002-11-05
MDLTKMGMIQLQNPSHPTGLLCKANQMRLAGTLCDVVIMVDSQEFHAHRTVLACTSKMFEILFHRNSQHYTLDFLSPKTFQQILEYAYTATLQAKAEDLDDLLYAAEILEIEYLEEQCLKMLETIQASDDNDTEATMADGGAEEEEDRKARYLKNIFISKHSSEESGYASVAGQSLPGPMVDQSPSVSTSFGLSAMSPTKAAVDSLMTIGQSLLQGTLQPPAGPEEPTLAGGGRHPGVAEVKTEMMQVDEVPSQDSPGAAESSISGGMGDKVEERGKEGPGTPTRSSVITSARELHYGREESAEQVPPPAEAGQAPTGRPEHPAPPPEKHLGIYSVLPNHKADAVLSMPSSVTSGLHVQPALAVSMDFSTYGGLLPQGFIQRELFSKLGELAVGMKSESRTIGEQCSVCGVELPDNEAVEQHRKLHSGMKTYGCELCGKRFLDSLRLRMHLLAHSAGAKAFVCDQCGAQFSKEDALETHRQTHTGTDMAVFCLLCGKRFQAQSALQQHMEVHAGVRSYICSECNRTFPSHTALKRHLRSHTGDHPYECEFCGSCFRDESTLKSHKRIHTGEKPYECNGCGKKFSLKHQLETHYRVHTGEKPFECKLCHQRSRDYSAMIKHLRTHNGASPYQCTICTEYCPSLSSMQKHMKGHKPEEIPPDWRIEKTYLYLCYV

SEQ ID NO: 4319 - DNA, 553 bp, Rattus norvegicus
  ref <308>: DATABASE ACCESSION NUMBER: EMBL / AA799542
  ref <309>: DATABASE ENTRY DATE: 2000-03-03
caaggatttattaagtcatacatgcaaaacatactgctaactgcattagcaaaagatcaatgtaaaaacactccacaattctgcaactgtcaattgaaaaaagtttgttctagaggtcgaaaggcccaacactgtgttcttgccagtgagttaggttgtacagaacggcgttagcactaccgcttgacagaacctcacagacccaaaggtacgggaagcatgtgtccgcgtgggtgaggtctaaagggggcggcatcaatcacatgacagtgttggtactctggcaagacagtgatgtttcagaatatctaaaatagtttacaaactgtaaagccgcatcacgtgatttctacacccagttactacaaaacgacgggaagcactactcagctgattaaaggaaggtgaaaacaggaacgcacttctactatctaccagaaaatctccgaatgcattatcagaaagatcttatagaacaggtcagacatattgctcgttaagaagaggtcctaaagaaaacacttgctaagttagcaactgtgagggatggcac

SEQ ID NO: 4320 - DNA, 28567 bp, Homo sapiens
  ref <308>: DATABASE ACCESSION NUMBER: EMBL / AJ132695
  ref <309>: DATABASE ENTRY DATE: 2000-11-09
gtttcaccatgttggtgaggctggtctcaaactcctgaacttgtgatccacccacctgggccgcccaaccaaagtgctgggatgacagacgtgagccactgcgcccagccaccacaggttcctcttttttttttttttttttgagacggggtctcgctctgactccaggctggagtgcagtggcgccatctgggctcactgaaaccaccgcctcccaggttcaagagattctcctgcctcaggctcctgagtagctggaactacaggcgcgcgcctccacgccctgctaatctaatttttgtatttttagtagagacggggtttcaccatgttggccaggatggtctcgatctcttgaccttgtgatccgccctcctcggcctcccaaagtgctgggtttacaggcttgagccaccgcgccctgtctgacaggttcctcgtttttgtttttgtttttttttttgagacggagtttcgctcttgtcgcccaggctggagtgcaatagcaggatctcggctcactgcaaccactgcctcccgggttgaagtgattcacctgcctcagcctcctgagtagctgggattacaggcgcccaccaccacgccccgttaattttttgtatttttattagagacagtgtttcaccatgttggccaggctggtcttgaactcgtgacctcaggtgatccgcccgcctcagcctcccaaagtgttgggattacggacgtgagccaccgcgccgagctgacaggttcctcttaaagccctgagtcccagggaagggacctgcaggcccggccacgcccaggccgctttagcgcgcaagatggcggcatgcacgccccgcggccggagccgagtgggcccgagcgcttccgagcattcccgaagtccagagaaactccgggagcggcgcgggcgggagcggtcggccgggagcggccccgcccggaacctgggagcggcggcgccggcgcgggggaggggaggccggatgtgagtggagcggccatttcctgtttctctgcagttttcctcagctttgggtggtggccgctgccgggcatcggcttccagtccgcggagggcgaggcggcgtggacagcggccccggcacccagcgccccgccgcccgcaagccgcgcgcccgtccgccgcgccccgagcccgccgcttcctatctcagcgccctgccgccgccgccgcggcccagcgagcggccctgatgcaggccatcaagtgtgtggtggtgggagacgggtgagtgcgcggccggggccgggctggaggccgcgggatcgggcgcggaggggggttgggcccggactggggcccaggcaggccggcgtccgcgcggtctcgcgtaggcggtgggcctgggcctgtgtcgcggggcgggggccgcggcgggcgcccccaccggaccctgacggcccgggcggcgcgtgcctggttccggctctcgatggaggagggcctcgccgctcgccggctagagggaaaagtgaactccaccctccggctttcttcccggacgccgcccgccgccctcctcgggagcgctcgtagagcaagcgctcttggagattttgaccatttttccaaaaagggaccctttattttttttgcatgaacctctcgatccccttttgagaattgggttgggaacgcggcggtcaagtcgatcatatttgatgcatgcttgattgtacgggccgctttggtgcccccaaacttttctttaaaaaaatttttttttcatagacggggtctcgctgtgttgcccaggccggtctcgaactcctgggttcaagcaatcctcccatcccagcctccaaaatgctgggattacaggcgtgtgccaccacgcctggctaatctttaaaagttttttgtagaaatggggtctcactgtgttgtccaggctggtctcgaattcctgcgctcaagtgattctcctgcctctcagcctccaaaagcgctggggtgacaccgcgcccggcctctcaacttattttcgacaggttttttgacttacacttctgccactgttaggattcttaaaattgttttcgccctttccgtggagaaagttttgaagatgctggctgggaggagccggctgtaatgggggactgttttttcttttctttctttcttttttttttttaaacaacgtggtgtggtcattgacaaaaaaactgttctttgcttaacgcgttaggtatgggatgtagcagaactggccccctgtgactccaggcattgcttttcatgattgtccgtgatggttacaggccctagaggaagacaaaacttgtcttatgcagtttttttctcccatagaaacaagaatctcagtgtaacccgagcaaaatcgcgcgtctcagcgttgcttgtataggttagtgttagcgaggaagaattactaccagtttaatcaaactcaatgcaactggtacatgttgcagtaaagtccaaggaaagttctggcatcacggttaactggattgatattcttcaaacttatcattaggacagattttggttcttgcaattcagatgcaagaaggataattagacagctgatttttgtaagatgcccatctgtcggatttgtcttggaagtgtgaaggagtattagagtatgtaggctattcaggcttttttttttttttttttttttttgagacggagtttcactctgttgcccaggctggagtgcagtggcacgatttcggctcactacaacctccgcctcccaggttcaagcgatcctcctgcctcagtgtccttagtagctgggattacaggcacgcgccaccgtgtccggctaatttttgtattttttagtagagacggggtttcaccatgttggcctggctggtctcgaattcctgacctcaggtgatccacccgcctgggtctcccagagtgttgggattacaggcgtaagccacggcgcccggcccaattttttttttttttcttttcttttttttttttttgagacggggtctcactctgtcgcccaggctggagtgcaatggcgcgatctctgctcctgcaacctctgcctcccgggttcaagcgattctcgtgccttagtctcccaagtagctgggattacaggcgcaagccaccatgcccagctaatttgttttttttttttttttttgtatttttttggtggagacggagtttcaccatgttggtgaggctggtctcaaactcctgaccctcaagtgatccgcccgcctcggcctgtttttttttttttttttttttaagtcatattgctgataattatttgaaaatttctaaaactaaaacataagcatagcagatacgtttatttaatactaaccgattgtggacctctgctgtttgaattggctgttttatctagtcaaataacttgttgaatgtcatggaatctggaccgtcccttcaaatccccaccccaccgcttacatggggtaaccctaagcacatcccccacctcccaagagaggcggttcaatgggaggtcaacaagactaaacaagatgttggttattaactacctcgcaggtgccccttgctgaatgcttagtaaatgccaggtactgttattgcggtttctactactgagactctgtgagggagtattaggcttaaaagtctgtggccttgagttttcagtctgttttttttttttaattagttatgagcatttgaacaagcacagttattttttaatactatgtttagtattgatgttgactacagctaagtgatattagaagtgaaatgtacctggccaggtcaggtggctcacacctgtaacccagcattttgggaggccaaggtgggtggatcactagagcttaggagttcaagaccagcctgggcaacatggcgagaccctgtctctgctaaaaatacaaaaattagctaggtgtagacacatgtgcctgtagtcccagctactcgggaggctaaggtgggaggatcgcttgaaacccaggaggtggaggttgtagtgagctgagattgtgccattgcactccagcccgtgcgacagagtgagaccttgtctcaaaaaagcaaaaacaaaaactattagagatacgtctttggccgggcacggtagctcaagcctgtaatcccagcactttgggaggccgaggtgggcggttcacctgaggtcaggagtttgagaccagtctggccaatatggcgaaacctcgtctctactaaaaatagaaaaattagctgggcacgcctgtaatcctagctattcaggaggttgaggcaggagaatcgcttgaacttgggaggtggaggttgcagtgagccaagattgtaccattgcactccagcttgggtgacagagggaaactgtctttttttgtttgtttgtttttaaaggagatacatcttcatctgttcctgctttgaccctttgcctggaccatggcagtgtcctttcaggctgtacgtccctccatcctgccctcctgtgcctctgcttacactgggctcttaaggaaactcctgctccttgtctcatcatccctagggatggttctgtcttatcatttctagaattggatgccttgccatcttgtttgctccttaactctgcatacagggctgtgtaaataattccttcatgaaaatctctatttcaatcttctgggatgagttttttccttctgggaccctgactgatagagactgataatacacccgtatgaaaatatgtctgccaggtgcggtggctcatgcctgtaatctcagcactttgggaggccgaggcaggcggatcacctgaggtcaggagctcgagaccagcctggccaacatggcaaaaccctgtctctactaaaagtacaaaaattagccgggcgtggtggtgggcgcctgtaatcccagctactcaggatgctgaggcaggagaatcacttgaacccggaaggcggaagttgcagtgagctgagattgtgtcactgcactccagcctgggcgacaagagcaaggctctgtcttgaaaaaaaaagaaaaaaagtcagaaataatttgcaaagcatgttagaaaattctagatttcctgaatagcaatttaattgagattggccaagaaatattacatagggttgatactcttttattctaagatagtcctttctgagcatggggtctataatttttttttcctccaccttactgctgccccaccttttaactttcacttagtggacctttgccccaagattttctctcagcttttcctaggtaagacagcatcacccgggcgcgatggctcatgcctgtaatcccagaactttgggaggccaaggcaggcggattgcctgaagtcaggagttcgagaccagtctggccaatatggtgaaaccctgtctctactaaaaatacaaaaaaattagccaaggatggtggggggcgcctgtaatcctagctactcgggaggctgaggcaggggaattgtttgaatcaagggaggtggaagttgcagtgagccaatatcgtgccactgcactccagcctgggtaacagagtgagactccgtctcaaaaaggaaaaaaaagacagcatcttacattcaggtatttataaacaacttttattatttatttgtttttattttatattggctcactgcagcctccacctcctgggttcaagtgattctcctgcgtcagcctcccaagtagctggaactacacgtgcctgctaccatgccgaggtaattttttttttttttttttttttgagaaggagttttcgccctttttgcaaaggttggagtgcagtggtgcgatctcggctcactgcaacctcctcctcctgggttcaagcgattctcctgcctcagcttgtcgagtaggtgggattacagtcacgctccaccacactgactaatttcgtatttttaatagagacgaggtttctccttgttagccaggttggtctcaaacgcctgacctcaggttatccacctgccttagcctctcaaaaagtactgggattacaggcatgagccactacgcctggcaattttttgtatttttaatagagacagggtttcaccatgttgaccaggttggtttcgaactcctgaccttaggcgatctgcccgccttggcctcccaaagtgctgggattatgggcgtgagccatcgtccctggcctaaacaacagttttattattttattttttatttttttattgcttattactattttttgagatggagtctcgctctgtcacccaggccggggtgcagtggcatgatatgggctcatggcaacctctgcctcctgggttcaagcagttctcctgctttggcctcccaaagtgatggaattacaggcccgagccactgcgcccggccacaactattttaatagtgttgttttggtgttggttgattaaaggaatgggaacgaatgacttgaagccctctctgtttcactctttatacaaagtggagtccagattgggctagtggcctgtctagcccaatgtctgacttggacatacattactgtccaggagtttcttagctgaatgtgaaaaatgccttccgtgacatcatccttacaggaacattctttacatttattctttacttctgttgaacggtggtggcgtgaaccatgaatttgtttaagcttttcagctgttttgtgtgttttcctctcaaggcatggggtttcatatttttgacctgtggtaaaggtatttgaattctgcactggcctccaaatgtaggtgtagtatatggctctgatctttgttgatgattttatacataatgtggttttttttcttgataagccaaaaaaattatacataatgtgtgtgtgtgtgtgtgttttaatttcaaatgatagttacagtaaaagtttggagttgggctaagtgggaggagcatcaggaagccatttttagaaaccttaaattcaccctttataactttctgtctttttgcattagtcatctgataccttagtactgcctactttttcacatctccatcactacgtagctcttaaaattgtagtcttccttgaaaggagatgtttttgtcaagagtctttgccaccaaggcaggattgcatgtgatcagtaggaatattttcctgcaatgtcttaatatgaaaaatttcaaacagactagtggaaagcattgtacagtcaacatgcacatacccatggcctggattctatgacagtattttgctctacttgttcattttgctgtatttgctttatcatgtcttcctgttatcagagggaaccttttaagaggatttatagaggagttgattttgttttttgttttgttttgttttgctctttttgaggtggagtcttgctctgttgcccaggctggagtgcaatggcatgatctctgctcactgcaatctccgcatcccaggttcaggcgattctcctgcctcagcctcctgagtagctgggcttacaggcacccaccaccatgcctggctaatttttgtattcttagttgagacaggtttcaccatcttggccaggctggtctggaactcctgacctcaggtgatccacctgcctcggcctcccaaagtgatgggattacaggcgtcagccaccatgcccggcctgattttgaaaaagaatagggactgtgtgcagttacatataaattcttatttttgaactcttgtgtgttcagctggcttgtatcaactacaccagggttagccttgattctggaagggtggattcagacttcagctcagttgtacatagtgtcttcagcctaagtgagaaactttatgcactatcttaattttttgaagcttctagtggtaataattgctggctttttttttttttttttggtagaaacagagtcttgctctgtcgccaggctggagtgcagtggcacgaaatcagctcactgcaacctctgcctcccaggttcaagcaattctcctgcctcagcctcctgagtagctgagattacaggcgtgtgccaccacacccagctaatttcttttgtattttagtagagacggggtttcactgtgctgcccaggctggtcttgaactcctaaggtcagacagtccgcccaccttgccctcctaaagtgctaggattacaggcatgagccaccgtgcctggcttatggctagctttctttacattgattgtgaagtcagatattggtagtagaacatcataattttagattgggttttgtgtttatttagcactgcactactctagtggtgtatttttctggacagattttatctgcatagttaacgcagttatatataaggcctaccgttacagaatccccataccttgtttgtcagtgtaaatcgaggaccttcatgcgaggtctttaatttattcaataagtaggaatatatatttgacagttactaaattctactgccttgtccttaagatctacatacttttttttgttttttgagtcagagagtctcgctctgttgctcaggctggagtgcagtgatgcgatctcagctcactgcaacctctaccccgtggcctcaagcgatacttctgcctcagcctcctgagtagctgggattacaggcgcctgccaccacactcagctaattttttgtatttttaatagagatgcagtttcgctgtgttggtcagtctggtctcgaactcctggcctgaagtgatccacccgccttggcctcttgctgggattacagggaagagccactgcgcctggccaagatctactcacttttagacagcaatatatgctctgtattttggtttgcaattgtaattgtcattggaagagtttggcttttctgtcctgagatcaacgtgtctttaaaagaaggcagtgcagaaagttgttattttttgagcttcttggatcttttatttttttaacgtgaggaaattcctagcgtttctagatttgttgattgtgcttttaagttttggtttatagatttcaggaagtaacactaaagtttaccctactctcctcaaaaagtaagtaaaaagttctcttggctgggcgtggtggctcacgcctgtaaccccagcactttgggaggccgatggggtggatctcctgaggtcaggaattcgagaccagtctggccaacatggcaaaaccctgtctctactgaaaatacaacaacaaaaaaaaattagctggatgtggtggtgcttacgtgtagtcccagctacttgggaggctgaggcaggagaattgttcgaacccagcaggcagaggttgtggtaagccaggattgcaccattgggctccagcctggaagacagagccaagactccgtcttaaagttctcttaatggaaaaatgaagaacataatagcaacataagttatttgctttcattgtggttatttctacaggacagggcaggggaagcacagataggttaaaaaaaattgtagcatcatgagctagggggaaatccaatgtagaaatggcatgaactttcttccagccgactcatgttcgtttcctagagtgatgacattgctcgatgattgaaaagaggttgaactgagcagttaattatataaagttagaaattccaaagaagtagtaactaccagaaattctccagcagtatcagtcaagacttgtggccaaatacggcttccattcttcatgagggaaaggccatggaaaggctgtcacattgcccagtgcagatgttgacttggtttgtggaagcgcagcgtggacaaggaatgaatatacactaataggagtggaataacctttttcttttacctatttgaataaattaagtaaaagttttaatcagaagacttaaagaggagtcgattttatcttttgattgcactaagcttaaatataaggttgcactttaagaattctgtagtttaataatcatattcttataagacatagatttgtaacaaatagtgattggtaataaaatttcagtcagtatcagattatgccagtaccttgaatttcttcccggttgagcctttctcagctaaagatgtcattcaggaaaggaagtttagaggattttagacacagctggttgcctttatattagtagttttgttcctcatatacatagagacttaggacagaatagtaaaagaagtgataatgacattttatcataacagtcaaaaccttcatagcagcttatccttgacactgagtggcaactattgttaaggtttttacacaacctttatctttttttttttttttttttttttttttttttttttgagacggagttttgctcttgttgcccaggctggagtgcaatggcgcaatctcggctcactgcaacttccgcctcccgggttcaagcgactctcctgcttcagcctcccgagtagctgggattacaggcatgcacgcccggctaattttgtatttttagtagagaggggtttctccatgttggtcaggctcttctcgaattcctgacctcaggtgatccgcccgccttggcctcccaaagtgctgggattacatgtgtgagccaccgagcccagccaacctttatcatttttaaaaaggtcccttagagccttaggctccactttcttcctcagctgccacatccaaaccatgggtaagcgatgcttgatctgcctccaagttcaagcagtccaggaaacagcccacttatgttcactgtccagtccccattcttggtccaggccaccatggatggctcctggactgtagcaacagcttccatgtgtgtctgccttgactgagtccctggcgtcctcaggcttcctgccacactgcagttggaggcttcttctaaaatccagtgctttctgggcaatttaaaacctgtgactttccaagtaggatctagtccccatgtccttaacaagaagaggtaacgtatttccctatgccactgcccacttatttttttattgttgagatgggatcgtgctttgtcacctaggctgggtggagtggtgtgatcacagctcactgctgccctgaattcctgggctgaagggatcctcttgcttcagcctcctgagtagctgggactacaggcaagagccaccacttatttttgaattttttgtggaaacaaggtctccctatgttgcccaggctggtcttgaactcctgggctcagcgatcctcccacctcaggcccctgtgctgggattatagcctcctgtgctgggattacaggcctaagccactgcaccaggcttttattttttaatttaaaaaaatttatttttttgagacagggtctcactttgtccctcagactggatgcactggtgcaatcttgtttcactgcagccttgacctccctcctgggttcaagtgatcctcgtgcctcagccccccaagtagctgagactactgctgcacaccgccacacccacctaatttttgtatttttagtagagaacgggtttctccatgttggcccagctggtcttgaactcctgggctcaagcgatccacccacctcagcctcccaaagtgctaggattacaggcatgagccaccatgcctggcctaaaaatatttttttcagctctagaaatgttagctcttttgctgtacatttccagagctgctttaataatgacagttatcacacgcataatttcatgtgatgattgcattcttaatttttaaatttaacaactgcacttacttcatgaggtcttgttcattgatacatctttagcacctagtgtgcttctggtgtagcacacggttgatataaattgaaattgaattaatgctcacagtagtttggggatggagctggtagttctgcattaattttgcaggtgaaaaaaaaaggcatgaggaagttgaaacttgccaaaaaatacagccagtacgtgctagaattggccctgggtctcaaatctgggcttctgactccaaagcttaggctcctgctcatacaggtttattttcacattctaagcttttaacgaaatgtatgtccaatgagtcatttctgtttagaaagcctttaggagttggaagctacttcctggtgatgtaatgtttgactctctaaagtctttggaatggggagttccaacttttgttaagccctcaataatgtcatgagtgaatgaatattggcaagactggctgggcctgtaatctgccttgagtgtgagggaaaatggaaaagcgcttaactttatggtgaattctaatttatagtagttgagattgaacgacaaaaatcttaaaattatgatgctgatgtgtcattgtgaccttggtaaactgacagcacagcagagagaagggctcattaaggagagcacttggctaactgaaccctcaggatgccagagacttgaattctcatgtaagcccttaagcttgccttgtcaatgctgtaaaaattggagacctttatgttttgctaatgatgtggtgaccttagttattaggtgatagcctcttgaaaaacattccaggtggttgggagactttcagccaccactcttctgcctggcggcacactggtaatattaggattagtctctacccattgccagttgtgcaggtggtgctcctttctctgaagtatttctacacacttctctgtttggcaagtttaactcccatcgtctctgagctgttaattaaatgtctgggatgtattgtgatagtccctgcttatagacttatggtgctgtgtgaggattggggctgggggaggtggcatttaaatacagctgaatcaatgtgatggcagttacgtgtggtagtttattgactaagcactttctctcaagagaacagtcattgctgattgccataggggaggctgtagggatgtggtgggattttgagctgtcccacttaaggcagcagaataagttacttaaagaggaaggctgtgtttgtatattagtgttaattaaaatacctttaggctgggtgtggtggctccagcctgtaatcccagcactttgggaggtccaggtgggcggatcacttgaggtcaggagttcgagaccagcctggccaacatggcgaaaacccatctctactaaaaatacaaaaaaattatccaggcgtggtggtggacagctgtaatcccagctacttgggaggctgaggcaggagaatcgcttgaacctgggaggcagaggttgcagtgagccaagatggtgcctctgcactgcactccagctggggcgacagcacgagactcggtctcaaaaaaaaaaaaaaaagaaaaaaaagaaaaaaagaaaatatcttcaggatcaaacttaagattcttgatgagaggctctacagatgttcacagaagagacgtgaagttttaaaatcttgtttctcttgagtcttgtagctaggtgacaactgtttcttgactattaatgctaacaccgggtacctaaacagaatgtgatggctcctgactctatctttctgagaaattctagtttgtttactttaaatttcagggtaccaatgtgtatgtggtgataaagggttatagaaaacattttctttaatgctaagtatgtgatgtatatgccttgattttttttctctagaaattattttaacttaatagtgaaagctaagattacattcatgttgactaagcaaccttttttctctttctctttagagctgtaggtaaaacttgcctactgatcagttacacaaccaatgcatttcctggagaatatatccctactgtgtaagtatcttaaattgggaattaacctgtttgtgttacgggtttcacatttctttgaccatttgttttgctgtaaagccatctttaatcctcatatgaacagatactaattttttcttaaacattcactgaaacctaattataaggtatattaggcttttaaaaaatagggctgggggtggtgatctcagcactttgggagactgaggcgggtggatcaactgagggtcaggagttcgagaccagcatggtcaacgtgatgaaaccccatctctactaaaaatacaaaaaattagccaggtgtggtggcgggtgcctgtaatcccacatacttgggaggctgaggcaggagaatcactcgaaccgtggaggcggaggttgcagtgagccaagatcacgccactgcactccagcctgggcaatgagagcgaaactccatctcaaaagaaaaaaaaaaaagaaacttagggtaatataaacttttcacaactttgctagttgatttttagacatccagaaagcaaactttaactgtctgtgaggtacagagactggatgatgttaaagaaaaccatagttggacacaagaactctgaccaaaagtctgatcagaaacagtccttgtcagtgcacgagtttcagatacactggctttctgggaactggaaagggaaagattccattacgttttaattggccttttctgataagtcatcagttggttacatgtccgcattgaggtgtagggctttggaattgaaacttgggtgtgtgtgttgaagggggaatgggagggtggaattggctattgaattgcttactccctataggcagcagaattgggtggagacaggaaagtgctgctctggtgatgggttacccgggagcgcacgtagctgagcctcataatgcaccatcctgcagctgctgtgagtcctccctgtgcaggctggggaggtgtcgcctcctccccacctgtgttcacctcctcaggcacaacacacacccaggtgctctctgaagtgtcgtacccatgtttttgttgttgttgttgttgttttccttttttttttttttttttggagttagtctctctctcttgcccaggatggagtgctgtgatgcgatctcagctcactgcagcgtctgcctcctgggttcaagtgattctctgcctcagcctcccaggtagctgtgattacaggcatacaccaccacacctggctaatttttgtttctttagtagagacgggtttcaccatgttggccaggttggtctcaaactcctgacctcaggtgatctgcccacttcagcctcccaaagtgctgggattacaggcgtgagccacggcacccattttttactgtaagtggaatcatgctgtccctgttgtcctaaatttatgggggagattttccttatctacatatgtagataaaggtttaatcattaatgattaatgattttgaagtactataactgatttaacccactggtcacttggactcttggtgttaacaaacattgctgggttcagtgttgtcccttatgtctttgtgtacacttgatagattattagaagcaaaatcgtgccaaatcaaaagacaatggatgttttaaattttggtagatacagctgggcgtgattgctcacgcctgtaatcccagcactttgggaggccaagacggaaggatcacttgaggtcaggagttcgagaccaacctggccaacatgttaaaacccccacctctgctaaaaatacagtagttagccgggtgtggtggtgcactcctgtagtcccagctactcaggaggctgaggcatgagaattgcttgaacccgggaagcagaggttgcagtgagccaagattgtgccactgcacttcagcctgggtaacagagtgagactctgtctcccaaaaaaaaaaaaaaattaaaaaattattttttggtagataactaccaaattgctgtctataaagctgtcactttgctggccttgacttaagtggcctcttagtacacactgccattaacgtgggttgaagttatctaaccgttttcatttccaatcacagatgtggttaaaatcttttgaattttttttttttttaattaaaaaagtttgctcacgcctgtaatcccagcacttggggaggctgagctgggcggatcactgaggtaaggagtttgagaccaacttggccaagatggtgaaaccctgtctctactaaaaatacaaaaattagctgggcatggtggcacatgactataatcccagctattcgggaggctgaggcaggaggattgcttgaacctgggaggtggaggttgcagtgagccaagattgtgcctctgcactccagcctgggcaacagaacaagacattgtctccaaaaaagaaaaaaaaaatatgtgtttttgtagagctatgttttgctatattgcccaggctggtcttgaagacctggcctcaggtgattctccaccttggtctcccgaagtgttgggattacaggcgtgagccaccacacctggctcttttgaatgtttactgtacatttttagtctcttgtgaattgtctgtttaaatcttttgtatttttctactgaaattttttcttactgatggaacatttccttccttccttccctccctccctctctccctcccttcctcccttcctttcttccctccctcctcctctccctccctctctccctccttccctcctctcctactccttccctccttccctccttccttctcctttcttttcccctccctcccttgctccctccctccctccctttttttttttttttttttttgagatggggtcttgcagtattgcccaggccggacttgaagtactggtccttccacctcagcctattgagtagcatgctccactgcacgtagcctgatggaacgttttgtaaataatcctcagtctgtcatttgtctttgtacttcattatggtgtcttctgccatatagaaatttagcatttaatgtaaataataccaccttacccgggcacggtggctcacacctgtaattccagcactttgggaagctgaggtgggcgcattatgaggtcaggagatcaagaccagcctgatcaacatggtgaaaccccatctctactaaaaatacaaaaattaaccgggcatggtggcgtgcacctgtaatcccagctcctcaggaggctgaggcaggagaatcacttgaacccaggaggtggaggttgcagtgagccgagatcgcaccactgcactccagcctgggtgacagtgagattctgtctcaaaaaaaaaataataataataatgataataccacctctccctcagaattgtatgttgtacttagaaaggcctttcctacttaaataatgcaaaagtatgctctagtatttttttctaggatttttgtggctaaaatttttatctttaattcatttaggacttatttttggtatagaatgaggcaaggacctgattctttttcccttatggggaaaaaaagtcacaatactatttatccaataatttttttcttatggaaatataattaacatgtccatcaccatcacaccttttctttcttcttcttcttttttcttgagaccgagtttcgcacttgttgcccaggccggagtgcagtggcgcaacttggcccactgcaacctctgcttcccgggttcaagcgattctcttgcctcagcctcccaagtagctgggactacaggtgcctgtcaccacgccctggctaatttttgcatttttagtagacacaaagtttcgtcatgttggccaggctggtctcgaactcttgacctcaggtgatccgcccacctcggcctcccaaagtgctgggattacaggcgtgagccaccgtgcccagcctctgctttttattatatttttcctttttttttttttcttttttgccttcctgtgcagaggaaacactattttcttctaaagcttggtttctgctgaccagtagcaatttttaacatcagtctgatttccctctgtcagcctataggctttgctgggttatctctcctgactaatttgtgtagcaacttcacatgaatttaaacatttgtatcatcagttaacactcactttgaaaatgttattgggaggcttgttaagtcaggtgtattttgtgtgactgctctacactcaggccttctggaaaccctgcagagggtagctctagtggccagctagctctcttgctgaaaatgagcaacataagtacatgaaaaacccaacaagtaggatttgaaagcggggctaattgtacccttatttcttctggggataaaagtcttaaactttgtttaaagtaaaatgtttttatttctgacggtgatttgtttcacttaaatagcttgttgtttgtttctttcatttctcttaagttttgggttgggtttggtttgtttcccgcaagttttgcccgtgccgccttcctccttgtgcctgcagggacatttgctggtgtggcagcctccaggcccgtccccagcctttttcttggcacaccttctctaggatggctgggacagtgacttagcttctacacctgtgactaaccattttcattccattctacagctttgacaattattctgccaatgttatggtagatggaaaaccggtgaatctgggcttatgggatacagctggacaagaagattatgacagattacgccccctatcctatccgcaaacagtaaggattgcagctgacttttaatgtgtcttttagagtatataattctcgagcgcttaattagtgcatgttacctatggacttgcttatattgccatcatttgggtattgagtaaatagcaaacagggtgggattggttccatgtaaacatccccctagatgcaagcccaggggttttgtgttttgagcgttaccagctgttccattgttgggcattttacagtcttccatttagctttagaataaccgtatgaaagagctactttttgtttttgcaaaccagtttttaacaccaattagtttgaaggcaggtttgctgtgtgacatttttgtaccacagaatcaaattaggcagttaagattcaggtttctttaaaccaagttagtaactaatctcacaggtttaatacattttttcccacaaaatacataatttgtatggattttgtgaaccatacaatagaacctaaatttattcaatgtagattgaagttttggttttgtaaaatgtatccactgtgtctaatcagaaaaaaaagtttacttttgcttctgtatcagacaactaagtgatttatttaccaaagctaattagagcagtagctggtgaaaatgggtacttagaagacattgttgtcgttaaaagttacttttctttaagcagcggttttacttgtgtatcatttgcttatcttgttacatgtttgttcttcatttttaaaagtatctttggaagcaaaagttaaatatgcttgagattccttgggttgataacctgtgtgcatgtcctagctctgtgacttcaggcaggcttcatcctctctccagtctttgcctgtttccttgtagggtgagatgagtacgtgtcacgcacgcataacagtcctgggcacatagcacacactgtggggccagccgctgtcagaattctcctgttcctcagtgtgcgggtgggtcggcctaaagagtgctgctttccacgttgtgcccaaatgagtggaagttgtgtggtgctcagcacacctgggttggccggagggattggggttggggttgggttgaggtcaggaagacatcctagagaaaggctggctttgagccctgattgatgatgaggcagcctgtgattgattcaaccagtacttcgttgtagggggtaatatgggtgaaataacttagtggttaagtctgctgtattaaaaatcagtctataatccccagacaattcaaattcttcagtatcttaggaaactcttctatacccagtggatgtttaataattcagattgtaaatggatttaaaaacatactggctggtagagtaggagacttcagcccactggacacatgtggaagggtgtggtgtcattctgagaaacaagagccaccctgctgtgactcagggggtaccgggcagggtgaggcctctctaaggaaggcctcacagtaagtcaagggtgacttggcaggagtcccactttgtgttctgaggaacacacagataaggaaagagaactctcctcagcttgaacaaagctgtagagtgtgacgcctggtatcaaagtaggtgttgtcctcatagggctagaacttaaacttcatgtttcctctgtgtgagactgtggactgctttcctataaaatatttgaggagcaagggagggagtgggacatggttcttgccctcaggtagttcacagaaaagtcccataaactgtgtaagacaccctgtgctagcaagggggtgagccgggcgcttaaggagcaagaggggcgagcacccacccagcagtggaagcattcctgtctggactccttcagagataaggaaattatcttgacaactcaggggcaggccacagatgctcagataccagtgtctggaaggtctcatccctttgagccacactgtcctaagaagaactggatctggtagtaacatgctggcacctgggtctcttgttgataaaggggaaacctctaaattttgtactacatggaatgtggtccctgattgctggctctgtggtctgcagacctgttgatgtagctcatccaagactgcttagacactctcctgaaggaccagttggaagatttcttatctagggtgtcctaaaaagagatgttacatttcttgtggtcatttaacattggcatcctctctattgggcagctctgtcggctaagtctgttcagaccattcatttcttcttcgttctccaaagatggtgagcaggtagtcgccattcttagttgaaattgcccttcaggtttttatttcccgaattacgtaatccttacattattttctcttgaaaatctttgctaagttctgcatactcatcttcagttgctatgcacagaatcaagtcttgtcagagtaacgctcaagtccagcatcttcccttgtgtagatcacctgtatttatttgcctgcttgtaccagcattggtggtgtgagtgggagcctaagtgacctgtcagtgtcacagcgagtcctgagccctgtgtgtgtcctgagactcaggctgtgcagcgggttcgctgagatgctgagcctccatgttggggtcagccaggaccccagtgcgtcatgccagttgtttcattttctctctaggctaaaagttgttgttgttgttgttgttgtttgagacagagtttcgctcttgttgccaggctggagtgcaatgggtgtgatcttggctcactgcaacctccgcttcccaggttcaagtgactttcccgccctagtctctcaagtagctgggactacaggcatgtgctaccatgcctggctaattttgttttgtattttattttttttgagacagagcgagactctgtctcaaaaaaaaaaaagaaaacaaagaaaaaagaaaagcttgagtgagatgaaattaaaataattttctcattttgagacagggtctcgctctgtcacccagactggagtgcagtgtcacaatctcgcctcactgcaacctccacctcccgggttcaagcagttctctgcctcagcctcccgagtagctgggattacaggtgcctgccaccatgcccggctaattttttgtatttttagtagacacagggtttcaccatcttggccaggttggccttgaactcctgacctcgtgatccacctgcctcggcctcccaaggtgttgggattagaggcgtgagcgcttttcttaaaagagttccagggttctatgttggaagagcgagtttgtcagtttttattggaacaaagaaatgaattgacagcattgtgataaacactggaagtgtcacttctaaaatttgtccatggctgaaagtggtggctcatgcctgtaatcccagcacgttgggaagccaaggtgggtggagcacctgaggtcaagagtttgagaccagcctggccaacatggtgaaacctggtctctactaaaaatacaaaaaattagctgggcgtggtggtgtgtgcctgtagtcccagctacttgggaggctaaggcaggagaatcgcttgaacccaggaggcagaggttgcagtgagctgagatctcaccattgcactccagcctgggcaacagagcaagactccgtctcaaaaacgcttgtccttaaggggtggcttcccccagacctacaaagtagcccagaattggaggtcttagtgtcagcaacagtgctgattttgataatgcaagtctgtacattcaaaccagtctcccagaactaggtggaagataggaacatttctgcataggagacttggaatgttctggcagcattaaaaccctgaggcccggctatgttctgggagagccctttggcaggcatcatttacagacgggtccttttcctgtatgctgtggcttcaactaggctgtgtctgagaactcggatggagcacttgaaagtgcccgtggctcccgcctgcctttgcggtaagggacagtgcagaacatctccggctgtgccagctgttgtagattctggtgggtgctgccatgggaggaggagcacgttgttgccccccctcaggatctccctgacctctgtcttcaccatcgttgaacttaacgcctgcttttgaccaggtagcgtggagtgtttcagtggcatttgtcatcgaagatatgttagaatctattgtatgcttttggatctctccggagggttaagacaaaattctaataaagaatcgataagaggttatattgatttttgttgtcctcagtctgtactaaactcaaaccaagttctcatgcattactaggttggagaaacgtacggtaaggatataacctcccggggcaaagacaagccgattgccgtatgtaaaactttcagtccacttcagtttcaagctttctctgttctctcatttcacttcgttttcctaggattttttattaagcctcaagctccttgagtgttttatatttaattcactcaaggttggggttttgcttgatgaaataaacttcattagagtgtgatagtttacccaccggcttgaattaaagcagtttgtgaactgtgatcttctcctcccaagtgaaaggaggggacagtgagagggcccctctcctggctggttggagatgcagatatggagactcctcccggaagcccacctggctgtgagccgagccggagcaggaccaaccttgttgccggggccttctttctccgcttgggtgtcccgtgtggtggggctgtctgggcgtggctgtgcagtgctgctgagctaaccccaccgtgcttgagatggtgtgctgggtgccgcggtgattcttggacgagcttgtgcatgcgccagcactcttcaaatgccagttataaaaagctgttgtgtgggatgtttctttccctttcaggtacaaggtatcagctggagggttgaaagtgtagcttgggaattgtgtgcatttcataaagtagcataattgcctttttccaggagaatattttagaaatctagcattttagaattcttgggcatttttaaatacaggtgaatatttgaatttggtttgacacaaaatacagaatggatgaagcatgcagatgtttggcgtgtgccccgaagcaccctctactctgtcctctgcacccaccctttgcgcctctgcgtcagccacagctgccccgggagcgagttctcctgaggccctggctgtgctgactctagggcagcgtgagggtggttgtcagctgtgaaggtgccacttacacactaagtcctccttccttgtggagggaagggctcaagtagcaaatattggagcccccgcttggtgctgggagctgtgacaggcagctcctgaagaagcagtttaattggaaccagtgaccatctaaaactgtttgtactctaaaccagattttacagaaatattggaatcatacctttatacttgattttttctttttagatagttaggcgtaaaggaagcctcctgagggtctggtctgatcctcctgatccttgaagagcttccagcatcattctcccttcatgctccccattttcataagtaactggtggcttgacatgctgggtttggtttgggagccctctgacaaactgaaagggtggatcaggaagcgtctgaccacaccactggtagacacgctctgcgtccaacaagtccttcccagcaacatgtagaaagcaaagtgcatgcttcattctaaggttgttgtctaaatgtttccctgtgtttcctttttgtaggatgtgttcttaatttgcttttcccttgtgagtcctgcatcatttgaaaatgtccgtgcaaaggtaggtggggatttaaaatgtgtatgtaagttatagaatgatcctctcagaaataaatactttaaaatatcacttagcctaggaatttttagttatttaaattggttttagcaatttgctacttaggtacatgattgggtttttttttttcttttgagacggaggtctcactctgttgtgtccaggctggagttgtactggtgacatcagagctcactgtagccttgaactcctgggctcaaacagttctcctgccccagcctcctgagttgctgggaccataaatgtgcaccaccatgcgtggctaatcttaaaagaatttttgtatggctggttttgtagaccctggcttgtctcaaactcctgggttgaagtgatctttcagcttcagcctcccaaagtggtgggattatagctgtgagccactgcatctggcccatcagcagtttattttatttatttatttttgagagagtctttttttttgcttttgtttttgtttttgagatggagtttcactcttgttgcccaggctggagtgcagtgacgcaatcttggctcactgcaacttccgcctcctgggttcaagtgattctcatgcctcagcctcccgagtagctgggattacaggcatgcaccaccacgcccggctaattttgtatttttagtagaaatgtggtttctccacgtcagtcaggctggtctcgaactcccgacctcaggtgatccgcgcgtctcggcctcccaaagtgctgggattacaggcgtgggccaccgtgcccggctgagacagaatcttgcgctgtcatccaagctggagtgcagtggcacaatcttgggtcactgcaacctccccctcccggttcaagcaattctcctgcctcagccttcttagtagctgggattacaggtgcccgacaacacacctggctaatttttgtacttttagtagagacggggtttcaccatgtttgccaggctggtctcgaacccctggcctcaagtgatccacccgccgcagactcccagagtgctgggatttcaggtgtgagccactatgcccggcctaatacgtggatttttaaagcttcaggttctggttcagaagtttcctgggtctcattaaaataatgaggcactcagaattggtctaataaaaataacgaccatttctttctactccagtctctttcacaaacttcttagtgaaaatgacaagtgaggcccttcagtaggggcattttcagtggagataatagcggcagacctgagaccttgggctaggtagtttattctcatttctgaacagatgatgaattttctcagatgaccctaagaaattgttttaccaaaaacaaagtgatctatttgctttgggaggaactcccttccttttgtttctcttcccttccccccctcccctgcggttgtagagcccgttctgtccggtcgtggttctgtccagccatgatccgggagtcctagcttgctaatggaacacctgagatgttccttatggctcaaggcttgaattgaaggtgggaaccacctgaagcctccgtggggaggccttgcctgaggttaggtgtctggcatgagtgccgccggctgggtgtgatttaggtgaaggacatctgtaaaggagcgtgtcacaacctctgttccttcttcacatctagtggtatcctgaggtgcggcaccactgtcccaacactcccatcatcctagtgggaactaaacttgatcttagggatgataaagacacgatcgagaaactgaaggagaagaagctgactcccatcacctatccgcagggtctagccatggctaaggagattggtatggaatcctgtgtttttcctcctccttgtacctcttttattgtagtgacagagactggagtccagtctgggaaaggagggtgtgtgtctcccactcagggcctggtgtactcttggggaaccagctggcaaggccctgtgggtcttaacgtcagcgttggaaggtggaagcagggctgggagccggcagaaggcgcccgggccccaggagctgcctcccgctggtggtgtgatcagaagagagtggggtcgagtgtacattgccgtgtggtcgtgtttcctgtaggtgctgtaaaatacctggagtgctcggcgctcacacagcgaggcctcaagacagtgtttgacgaagcgatccgagcagtcctctgcccgcctcccgtgaagaagaggaagagaaaatgcctgctgttgtaaatgtctcagcccctcgttcttggtcctgtcccttggaacctttgtacgctttgctcaaaaaaaaacaaaaaaaaaaaacaaaaaaaaaaaacaacggtggagccttcgcactcaatgccaactttttgttacagattaatttttccataaaaccattttttgaaccaatcagtaattttaaggttttgtttgttctaaatgtaagagttcagactcacattctattaaaatttagccctaaaatgacaagccttcttaaagccttatttttcaaaagcgccccccccattcttgttcagattaagagttgccaaaataccttctgaactacactgcattgttgtgccgagaacaccgagcactgaactttgcaaagaccttcgtctttgagaagacggtagcttctgcagttaggaggtgcagacacttgctctcctatgtagttctcagatgcgtaaagcagaacagcctcccgaatgaagcgttgccattgaactcaccagtgagttagcagcacgtgttcccgacataacattgtactgtaatggagtgagcgtagcagctcagctctttggatcagtctttgtgatttcatagcgagttttctgaccagcttttgcggagattttgaacagaactgctatttcctctaatgaagaattctgtttagctgtgggtgtgccgggtggggtgtgtgtgatcaaaggacaaagacagtattttgacaaaatacgaagtggagatttacactacattgtacaaggaatgaaagtgtcacgggtaaaaactctaaaaggttaatttctgtcaaatgcagtagatgatgaaagaaaggttggtattatcaggaaatgttttcttaagcttttcctttctcttacacctgccatgcctccccaaattgggcatttaattcatctttaaactggttgttctgttagtcgctaacttagtaagtgcttttcttatagaaccccttctgactgagcaatatgcctccttgtattataaaatctttctgataatgcattagaaggtttttttgtcgattagtaaaagtgctttccatgttactttattcagagctaataagtgctttccttagttttctagtaactaggtgtaaaaatcatgtgttgcagctttatagtttttaaaatattttagataattcttaaactatgaaccttcttaacatcactgtcttgccagattaccgacactgtcacttgaccaatactgaccctctttacctcgcccacgcggacacacgcctcctgtagtcgctttgcctattgatgttcctttgggtctgtgaggttctgtaaactgtgctagtgctgacgatgttctgtacaacttaactcactggcgagaatacagcgtgggacccttcagccactacaacagaattttttaaattgacagttgcagaattgtggagtgtttttacattgatcttttgctaatgcaattagcattatgttttgcatgtatgacttaataaatccttgaatcatacgactggtaatactggtgtttttgagacttgatgaacaagttcctggtgtgtgtttgtttgccttgctttaaagtcctgggttgttggagacagtcattttcaatgcgtgtctccacacaggagggacagggagtgccacctccaggggagaactgggtgagcccaaatacggcaggagtggaggtgacattcatgtttggacctgtcgaacagtggcgaagctctgagggagaagcgcctatcggggtgtgtgtgcacatcctggcccagagctaggggctgaagatggagatgttgggaccctagactggccctggaagagtagaggttggtgaaccacatgcccttaagatcctttccagaggctgagtgcgtggcttacgcctctaagcccgacgctttgggaggctgacacaggaggagcgcttaagcccaggagttctagaccagcctggac

SEQ ID NO: 4321 - protein, 192 aa, Homo sapiens
  ref <308>: DATABASE ACCESSION NUMBER: SWISS-Prot / CAA10733
  ref <309>: DATABASE ENTRY DATE: 2002-06-15
MQAIKCVVVGDGAVGKTCLLISYTTNAFPGEYIPTVFDNYSANVMVDGKPVNLGLWDTAGQEDYDRLRPLSYPQTDVFLICFSLVSPASFENVRAKWYPEVRHHCPNTPIILVGTKLDLRDDKDTIEKLKEKKLTPITYPQGLAMAKEIGAVKYLECSALTQRGLKTVFDEAIRAVLCPPPVKKRKRKCLLL

SEQ ID NO: 4322 - DNA, 623 bp, Rattus norvegicus
  misc_feature (1)..(623): n=a, c, g or t
  ref <308>: DATABASE ACCESSION NUMBER: EMBL / AA799550
  ref <309>: DATABASE ENTRY DATE: 2000-03-03
acttttattaacatgtaagattttgttttcaacatggtaagggttttgacctcaaatgcttatcaggtctgccacacatttatagcttgactacatatgaaccttgaagacgcctcttccttgaagttttgggtccattgcaggttttccttctcagtacacaaagggtattgcaaggatctttcattttacgcccaggatctcctcaaatatatggggataccaacttgtacagacgaacaagacctcatctcccataccgggttccgtttcatttaaaaatgagttaggctgtcccaacaaactcatcaggcaggttataatagatagtgtagcacataaaatttaaaatttgcacaaaatacatctctcctcctttggtctcacacagaaattaaagtccccccatagaaacaatacaatcctccgacccttctcccaggtcatcagtcctagccgtgtaaggcccatccacagtcccagatgaagtctgggcccttcttctgccattgctgcatggagtcctcttctagaattaacgcagcttcctcagaactttcagangcggtgagctccaactccaagtctcaagtgtcacagggggaccaagttcagggagctag

SEQ ID NO: 4323 - DNA, 616 bp, Rattus norvegicus
  ref <308>: DATABASE ACCESSION NUMBER: EMBL / AA799551
  ref <309>: DATABASE ENTRY DATE: 2000-03-03
cacgggtcccggccgccggggtggatcaggaccctgagtctttccggggagccccgcaaggccgcagacaagatgaacattctggcccccgtgcggagggaccgcgtcctggcggtcctgccccagtgcctgaagaaggaggccgctttgcacgtgcgcatatacttccagccccgggtcacttgcgcctgccagcagcaccggacaggcaccgtaggatttaaaagatccaaggtcatcgttgtgggggacctacctgtggggaacacctgtcttagtaataggttctgcaacgacaccttccataagaattacaaggctaccatctgagtggcttttgacatgcgaacgattcgagtcctgggtgtcaccttcagtctccacctttgggacactgctggtcaggagaggttcacgtgcatcgcatccacctactacagaggagcacatgccatcatcattgtcgtcaacctgaatgacgtagcatccctgttgcactccaagcagtggctcgctgatgccctcaacgacaatgacccttctagagtgcttctcgtccatgtgggttccaagagagatcggagtactcctgcttcagtattccctaatggagaac

SEQ ID NO: 4324 - protein, 201 aa, Rattus norvegicus
  ref <308>: DATABASE ACCESSION NUMBER: PIR / S06147
  ref <309>: DATABASE ENTRY DATE: 2001-02-02
MNPEYDYLFKLLLIGDSGVGKSCLLLRFADDTYTESYISTIGVDFKIRTIELDGKTIKLQIWDTAGQERFRTVTSSYYRGAHGIIVVYDVTDQESYANVKQWLQEIDRYASENVNKLLVGNKSDLTTKKVVDNTTAKEFADSLGVPFLETSAKNATNVEQAFMTMAAEIKKRMGPGAASGGERPNLKIDSTPVKSASGGCC

SEQ ID NO: 4325 - DNA, 780 bp, Homo sapiens
  ref <308>: DATABASE ACCESSION NUMBER: EMBL / AF322067
  ref <309>: DATABASE ENTRY DATE: 2001-02-19
atgaacattctggcacccgtgcggagggatcgcgtcctggcggagctgccccagtgcctgaggaaggaggccgctttgcacgggcacaaagacttccacccccgcgtcacctgcgcctgccaggagcaccggacaggcaccgtgggatttaagatctccaaggtcattgtggtgggggacctgtcggtggggaagacttgcctcattaataggttctgcaaagacacctttgataagaattacaaggccaccattggagtggacttcgagatggaacgatttgaggtgctgggcattcccttcagtttgcagctttgggataccgctgggcaggagaggttcaaatgcattgcatcaacctactatagaggagctcaagccatcatcattgtcttcaacctgaatgatgtggcatctctggaacataccaagcagtggctggccgatgccctgaaggagaatgacccttccagtgtgcttctcttccttgtaggttccaagaaggatctgagtacccctgctcagtatgcgctgatggagaaagacgccctccaggtggcccaggagatgaaggctgagtactgggcagtctcatctctcactggtgagaatgtccgagaattcttcttccgtgtggcagcactgacctttgaggccaatgtgctggctgagctggagaaatcgggggctcgacgcattggggatgttgtccgcatcaacagtgatgacagcaacctctacctaactgccagcaagaagaagcccacatgttgcccatga

SEQ ID NO: 4326 - protein, 259 aa, Homo sapiens
  ref <308>: DATABASE ACCESSION NUMBER: SWISS-Prot / Q9BZG1
  ref <309>: DATABASE ENTRY DATE: 2002-06-15
MNILAPVRRDRVLAELPQCLRKEAALHGHKDFHPRVTCACQEHRTGTVGFKISKVIVVGDLSVGKTCLINRFCKDTFDKNYKATIGVDFEMERFEVLGIPFSLQLWDTAGQERFKCIASTYYRGAQAIIIVFNLNDVASLEHTKQWLADALKENDPSSVLLFLVGSKKDLSTPAQYALMEKDALQVAQEMKAEYWAVSSLTGENVREFFFRVAALTFEANVLAELEKSGARRIGDVVRINSDDSNLYLTASKKKPTCCP

SEQ ID NO: 4327 - DNA, 604 bp, Rattus norvegicus
  ref <308>: DATABASE ACCESSION NUMBER: EMBL / AA799560
  ref <309>: DATABASE ENTRY DATE: 2000-03-03
cacagcagaagttgtgtgagacaggaggtcacaccctacacacaagagtatggtcagagtctgaggtagcccttcccaccctgatgccaaaccccaagcagtcggacctaagttctttcccccagtcccactttaggtgcacactgacagctattaaagttagtgcggccaaaggacccgggcccctccctaatgcccctgcttcaatgtgtttaccattgttcttcactggccaccatctcccgttctgactttctttttacatgctggatatgtctatcacgttaaggatcagtaacacaccagcaaatattcccctgagagacatccatttaggagcattgccttcagaggccttaaacgtcaaggcactgtgtcagctttgggggaatggagctcctcatatcccaccaccaaccctacacatacacacactctcctacccttgcaaatatgggctaaagagggggagtgatggcatccccgtgacagctaaaacaacttattgttcctcacctatagaaacaagtcagagagggaacataaaagccttcccaggacaaaacgggagaggagatacttagggggctggatcctaagaata

SEQ ID NO: 4328 - DNA, 2016 bp, Homo sapiens
  ref <308>: DATABASE ACCESSION NUMBER: EMBL / AK057843
  ref <309>: DATABASE ENTRY DATE: 2001-10-31
gcgggaagcccgagccggggcgggcccgagtcaaaggcaagtgaaggtggaagcggccgcggcggcagcaggccaccatggcggagctgcaggaggtgcagatcacagaggagaagccactgttgccaggacagacgcctgaggcggccaaggaggctgagttagctgcccgaatcctcctggaccagggacagactcactctgtggagacaccatacggctctgtcactttcactgtctatggcacccccaaacccaaacgcccagcgatccttacctaccacgatgtgggactcaactataaatcttgcttccagccactgtttcagttcgaggacatgcaggaaatcattcagaactttgtgcgggttcatgtggatgcccctggaatggaagaggtagcccctgtgttccctttgggatatcagtacccatctctggaccagcttgcagacatgatcccttgcgtcctgcagtacctaaatttctctacaataattggagttggtgttggagctggagcctacatcctggcgagatatgctcttaaccacccggacactgttgaaggtcttgtcctcatcaacattgatcccaatgccaagggttggatggattgggcagcccacaagctaacaggcctcacctcttccattccggagatgatccttggacatcttttcagccaggaagagctctctggaaattctgagttgatacaaaagtacagaaatatcattacacatgcacccaacctggataacattgaattgtactggaacagctacaacaaccgccgagacctgaactttgagcgtggaggtgatatcaccctcaggtgtcctgtgatgctggtggtaggagaccaagcacctcatgaagatgcagtggtggaatgtaactcaaaactggaccccacccagacctcgttcctcaagatggctgactccggaggtcagccccagctgactcagccaggcaagctgaccgaggccttcaagtacttcctgcaaggcatgggctacatggcctcatcctgcatgactcgcctgtcccggtctcgtacagcctctctgaccagtgcagcatccgttgatggcaaccggtcccgctctcgcaccctgtcccagagcagcgagtctggaactctttcttcggggcccccggggcacaccatggaggtctcctgttgaatggcccttgttgccctagagtgggacccagccctcacctcccccagagctaacctgggaggtgctgaaggggcattgggccaccgtaagcaagggaaaaagggcagatcatgcggggagatgaccttgatctttgattgctaccctaaccttgacctttaacccgtgattccccccagctcctggaagagatgtcctaatatctcttagggacccagacccctaaattctcctcctcccccattttggtgttaaggtggagagggcatatgcatcctctgtcctgatctaggtgtctatagctgaggggtaagaggttgttgtagttgtcctggtgcctccatcagactctccctacttgtcccatatttgcaaggggaggggatttggggctggggctccattcaccaaagctgaggtggcttctcattaaccctttaggactctgaagggtatggacctacgtgaatgtgtgtcagggggagacttgctggtgggttagtggtcctcaggatgtgatagaaacatccagtgtaaaaaggaagttggaatgggagttggcgggcagtgaacgagtgtggggaaggattggtgctggggcaacaggaaggggcctggggccgtttggctgcactaactttggtagctcagtgtgcatctagagtgggactggggagggagctaagcttgggctgggctgcttggggcttggcatagggtggaaagggctaccctggggctctgaccacactgtagtatgtgtggagggtgccctcccgtctcccacaacttctgctataacaataaactgtagaggaatctg

SEQ ID NO: 4329 - protein, 371 aa, Homo sapiens
  ref <308>: DATABASE ACCESSION NUMBER: SWISS-Prot / Q9UN36
  ref <309>: DATABASE ENTRY DATE: 2002-06-15
MAELQEVQITEEKPLLPGQTPEAAKEAELAARILLDQGQTHSVETPYGSVTFTVYGTPKPKRPAILTYHDVGLNYKSCFQPLFQFEDMQEIIQNFVRVHVDAPGMEEGAPVFPLGYQYPSLDQLADMIPCVLQYLNFSTIIGVGVGAGAYILARYALNHPDTVEGLVLINIDPNAKGWMDWAAHKLTGLTSSIPEMILGHLFSQEELSGNSELIQKYRNIITHAPNLDNIELYWNSYNNRRDLNFERGGDITLRCPVMLVVGDQAPHEDAVVECNSKLDPTQTSFLKMADSGGQPQLTQPGKLTEAFKYFLQGMGYMASSCMTRLSRSRTASLTSAASVDGNRSRSRTLSQSSESGTLSSGPPGHTMEVSC

SEQ ID NO: 4330 - DNA, 595 bp, Rattus norvegicus
  misc_feature (1)..(595): n=a, c, g or t
  ref <308>: DATABASE ACCESSION NUMBER: EMBL / AA799566
  ref <309>: DATABASE ENTRY DATE: 2000-03-03
gcccattacaaaagtctttattcgctggcaggtgcattcatgtaacacacatccctagttctcaaggtcacactcaactggattggcccttcagcagcacagccacgtagtgtcctgataggacacaggagagcccaagatcttttcctcaaatacaagtctcagtctcttcaacaatccattagaaatcatggctcttggaaaagagttttgcacagccatgcaggagaggcccagcatttgtactgcatccatgggcgggcaggccagtgggtggtcttgccttgtgggatggctcaatattagtacttgcgggttanattgtcaggagggtttaggtgaggaccaagggctcagctcccagggctccccagtaggaaccattctccccttgctgacactgcttccttgcgcacaagtctcttcttgtcatccagaggcttggctaaagctcggatcacctgagatttgaatggcagcaacacagaagtggggtaccgagtgagagcatgcatacactgcagagcagcaatccggacggccattgaatgactggaactgaaggtcaggagtttcgtgccaagttatcacatga

SEQ ID NO: 4331 - protein, 1031 aa, Rattus norvegicus
  ref <308>: DATABASE ACCESSION NUMBER: SWISS-Prot / AAK52670
  ref <309>: DATABASE ENTRY DATE: 2003-02-01
MAAATGLEEAVAPMGALCGLVQDFVMGQQEGPADQVAADVKSGGYTVLQVVEALGSSLENAEPRTRARGAQLLSQVLLQCHSLLSEKEVVHLILFYENRLKDHHLVVPSVLQGLRALSMSVALPPGLAVSVLKAIFQEVHVQSLLQVDRHTVFSIITNFMRSREEELKGLGADFTFGFIQVMDGEKDPRNLLLAFRIVHDLISKDYSLGPFVEELFEVTSCYFPIDFTPPPNDPYGVQREDLILSLRAVLASTPRFAEFLLPLLIEKVDSEILSAKLDSLQTLNACCAVYGQKELKDFLPSLWASIRREVFQTASERVEAEGLAALHSLTACLSCSVLRADAEDLLGSFLSNILQDCRHHLCEPDMKLVWPSAKLLQAAAGASARACEHLTSNVLPLLLEQFHKHSQSNQRRTILEMILGFLKLQQKWSYEDRDERPLSSFKDQLCSLVFMALTDPSTQLQLVGIRTLTVLGAQPGLLSAEDLELAVGHLYRLTFLEEDSQSCRVAALEASGTLATLYPGAFSRHLLPKLAEELHKGESDVARADGPTKCSRHFRCLQALSAVSTHPSIVKETLPLLLQHLCQANKGNMVTESSEVVAVCQSLQQVAEKCQQDPESYWYFHKTAVPCLFALAVQASMPEKESSVLRKVLLEDEVLAALASVIGTATTHLSPELAAQSVTCVVPLFLDGNTSFLPENSFPDQFQPFQDGSSGQRRLVALLTAFVCSLPRNVEIPQLNRLMRELLKQSCGHSCPFSSTAATKCFAGLLNKQPPGQQLEEFLQLAVGTVEAGLASESSRDQAFTLLLWVTKALVLRYHPLSACLTTRLMGLLSDPELGCAAADGFSLLMSDCTDVLTRAGHADVRIMFRQRFFTDNVPALVQGFHAAPQDVKPNYLKGLSHVLNRLPKPVLLPELPTLLSLLLEALSCPDSVVQLSTLSCLQPLLLEAPQIMSLHVDTLVTKFLNLSSSYSMAVRIAALQCMHALTRLPTSVLLPYKSQVIRALAKPLDDKKRLVRKEAVSARGEWFLLGSPGS

SEQ ID NO: 4332 - DNA, 2181 bp, Homo sapiens
  ref <308>: DATABASE ACCESSION NUMBER: EMBL / AK025496
  ref <309>: DATABASE ENTRY DATE: 2000-09-29
aatggagctatgaagacaaagatcaaaggcctctgaatggcttcaaggaccagctgtgctcactggtattcatggctctaacagaccccagcacccagcttcagcttgttggcatccgtacactgacagtcttgggtgcccagccagatctcctatcttatgaggacttggagctggcagtgggtcacctgtacagactgagcttcctgaaggaggattcccagagttgcagggtggcagcactggaagcatcaggaaccctggctgctctctaccctgtggccttcagcagccacctcgtacccaagctcgctgaggagctgcgtgtaggggagtcaaatttgactaacggagatgagcccacccaatgctcccggcatctgtgctgtctgcaagccttgtcagctgtatcaacacatcccagcatcgtcaaggagacactgcctctgctgctgcagcatctctggcaagtgaacagagggaatatggttgcacaatccagtgacgttattgctgtctgtcagagcctcagacagatggcagaaaaatgtcagcaggaccctgagagttgctggtatttccaccagacagctataccttgcctgcttgccttggctgtgcaggcctctatgccagagaaggagccctcagttctgagaaaagtactattggaggatgaggtgttggctgccatggtgtctgtcattggcactgctacaacccacctgagccctgagttagctgcccagagtgtgacacacattgtgcccctcttcttggatggcaacgtgtcctttctgcctgaaaacagcttcccgagcagattccagccattccaggatggctcctcagggcagaggcggctgattgcactgcttatggcctttgtctgctccctgcctcgaaatgtggaaatccctcagctgaaccaactcatgcgggagcttttggaactgagctgctgccacagctgccccttttcttccaccgctgctgccaagtgctttgcaggactcctcaacaagcaccctgcagggcagcagctggatgaattcctacagctagctgtggacaaagtggaggctggcctgggctctgggccctgtcgtagtcaggccttcactcttcttctctgggtaataaaggccctagtgctcagataccatcctctcagctcctgccttacagcccggctcatgggcctcctgagtgacccagaattaggtccagcagcagctgatggcttctctctgctcatgtctgactgcactgatgtgctgactcgtgctggccatgctgaagtgcggatcatgttccgccagcggttcttcacagataatgtgcctgctttggtccagggcttccatgctgctccccaagatgtgaagccaaactacttgaagggtctttctcatgtacttaacaggctgcccaagcctgtactcttgccagagctgcccacggccctgtcctgccctgactgtgtggtgcagctctccaccctcagctgccttcagcctcttctactggaagcaccccaagtcatgagtcttcacgtggacaccctcgtcaccaagtttctgaacctcagctctagcccttccatggctgtccggatcgccgcactgcagtgcatgcatgctctcactcgcctgcccacccctgtgctgctgccgtacaaaccacaggtgattcgggccttagccaaacccctggatgacaagaagagactggtgcgcaaggaagcagtgtcagccagaggggagtggtttctgttggggagccctggcagctgagccctcagtcctggcctagactgttctgacaatctaacctgggattactaactgttgagccatcttccccaaagcagggaaaccactggtctctgactgcctttcccacagacacagcacaaatgctaggcctctgttgcatggctgtacaaagaacataagagtccatatttctagtggatttgtaaaataagtgtgtgtgagacacttgcgtttgaagaaagatctagggtcctgggtctcttgcatttatatgtcagaaaaggggcgatatgctgctgaggggtgagtgcatatgagtgtggccctgaggaccagggctggcagatgttgtctacctgctgaagaataaagatttcttttggtaaaaaaaaaaaaaaaaaaa

SEQ ID NO: 4333 - protein, 293 aa, Homo sapiens [sequence omitted]

SEQ ID NO: 4334 - DNA, 595 bp, Rattus norvegicus; identical to SEQ ID NO: 4330
  misc_feature (1)..(595): n=a, c, g or t
  ref <308>: DATABASE ACCESSION NUMBER: EMBL / AA799566
  ref <309>: DATABASE ENTRY DATE: 2000-03-03

SEQ ID NO: 4335 - protein, 1031 aa, Rattus norvegicus; identical to SEQ ID NO: 4331
  ref <308>: DATABASE ACCESSION NUMBER: SWISS-Prot / AAK52670
  ref <309>: DATABASE ENTRY DATE: 2003-02-01

SEQ ID NO: 4336 - DNA, 2181 bp, Homo sapiens; identical to SEQ ID NO: 4332
  ref <308>: DATABASE ACCESSION NUMBER: EMBL / AK025496
  ref <309>: DATABASE ENTRY DATE: 2000-09-29

SEQ ID NO: 4337 - protein, 293 aa, Homo sapiens [sequence omitted]

SEQ ID NO: 4338 - DNA, 595 bp, Rattus norvegicus; identical to SEQ ID NO: 4330
  misc_feature (1)..(595): n=a, c, g or t
  ref <308>: DATABASE ACCESSION NUMBER: EMBL / AA799566
  ref <309>: DATABASE ENTRY DATE: 2000-03-03

SEQ ID NO: 4339 - protein, 1031 aa, Rattus norvegicus; identical to SEQ ID NO: 4331
  ref <308>: DATABASE ACCESSION NUMBER: SWISS-Prot / AAK52670
  ref <309>: DATABASE ENTRY DATE: 2003-02-01

SEQ ID NO: 4340 - DNA, 2181 bp, Homo sapiens; identical to SEQ ID NO: 4332
  ref <308>: DATABASE ACCESSION NUMBER: EMBL / AK025496
  ref <309>: DATABASE ENTRY DATE: 2000-09-29

SEQ ID NO: 4341 - protein, 293 aa, Homo sapiens [sequence omitted]

SEQ ID NO: 4342 - DNA, 595 bp, Rattus norvegicus; identical to SEQ ID NO: 4330
  misc_feature (1)..(595): n=a, c, g or t
  ref <308>: DATABASE ACCESSION NUMBER: EMBL / AA799566
  ref <309>: DATABASE ENTRY DATE: 2000-03-03

SEQ ID NO: 4343 - protein, 1031 aa, Rattus norvegicus; identical to SEQ ID NO: 4331
  ref <308>: DATABASE ACCESSION NUMBER: SWISS-Prot / AAK52670
  ref <309>: DATABASE ENTRY DATE: 2003-02-01

SEQ ID NO: 4344 - DNA, 2181 bp, Homo sapiens; identical to SEQ ID NO: 4332
  ref <308>: DATABASE ACCESSION NUMBER: EMBL / AK025496
  ref <309>: DATABASE ENTRY DATE: 2000-09-29

SEQ ID NO: 4345 - protein, 293 aa, Homo sapiens [sequence omitted]

SEQ ID NO: 4346 - DNA, 595 bp, Rattus norvegicus; identical to SEQ ID NO: 4330
  misc_feature (1)..(595): n=a, c, g or t
  ref <308>: DATABASE ACCESSION NUMBER: EMBL / AA799566
  ref <309>: DATABASE ENTRY DATE: 2000-03-03

SEQ ID NO: 4347 - protein, 1031 aa, Rattus norvegicus; identical to SEQ ID NO: 4331
  ref <308>: DATABASE ACCESSION NUMBER: SWISS-Prot / AAK52670
  ref <309>: DATABASE ENTRY DATE: 2003-02-01

SEQ ID NO: 4348 - DNA, 2181 bp, Homo sapiens; identical to SEQ ID NO: 4332
  ref <308>: DATABASE ACCESSION NUMBER: EMBL / AK025496
  ref <309>: DATABASE ENTRY DATE: 2000-09-29

SEQ ID NO: 4349 - protein, 293 aa, Homo sapiens [sequence omitted]

SEQ ID NO: 4350 - DNA, 595 bp, Rattus norvegicus; identical to SEQ ID NO: 4330
  misc_feature (1)..(595): n=a, c, g or t
  ref <308>: DATABASE ACCESSION NUMBER: EMBL / AA799566
  ref <309>: DATABASE ENTRY DATE: 2000-03-03

SEQ ID NO: 4351 - protein, 1031 aa, Rattus norvegicus; identical to SEQ ID NO: 4331
  ref <308>: DATABASE ACCESSION NUMBER: SWISS-Prot / AAK52670
  ref <309>: DATABASE ENTRY DATE: 2003-02-01

SEQ ID NO: 4352 - DNA, 2181 bp, Homo sapiens; identical to SEQ ID NO: 4332
  ref <308>: DATABASE ACCESSION NUMBER: EMBL / AK025496
  ref <309>: DATABASE ENTRY DATE: 2000-09-29

SEQ ID NO: 4353 - protein, 293 aa, Homo sapiens [sequence omitted]

SEQ ID NO: 4354 - DNA, 588 bp, Rattus norvegicus
  misc_feature (1)..(588): n=a, c, g or t
  ref <308>: DATABASE ACCESSION NUMBER: EMBL / AA799575
  ref <309>: DATABASE ENTRY DATE: 2000-03-03
gctaatgcccggaaaacactttattacacaaattacattcagattctgaaaaatagtgttctaacagtgtaaccatctaaaaataagacatcccggaaacacaccaactgaggagaaatttaaaaaaagaatttaaatagagactttttaaaatttcccccattgcaatataatgttagtgattttaaaaaaatagaaggagatttagcagcttttcgtcgtgtggcaggttggttcccttcactgccacaggctgagaatgctgaacaggaaaggcaccaatgaaagacactggcaatgggtgtggactgggaaaatactgtgttcaagcagagaatagggctatttaaatccaccaactaaaacgtctccaaatgtgaatgacctaaatttccctcgggggttggagcgctaccttggaaaaggaggggggcttctccacccaagttcatagaaagacaatgcacgggcgtgaccggggggggaaccctcacctagaaacaaaaccaacgggcccaaggaattaaataggtgtgtaatcccaacggaggagtaaattaaaatcattgcaaaaaatttacacccctn

SEQ ID NO: 4355 - protein, 976 aa, Rattus norvegicus; identical to SEQ ID NO: 2372
  ref <308>: DATABASE ACCESSION NUMBER: SWISS-Prot / P14925
  ref <309>: DATABASE ENTRY DATE: 2002-06-15

SEQ ID NO: 4356 - DNA, 1417 bp, Homo sapiens
  ref <308>: DATABASE ACCESSION NUMBER: EMBL / AF035320
  ref <309>: DATABASE ENTRY DATE: 2000-07-10
gtcggatccagtgttttaaaactgacaccaaagaatttgtgagagagattaagcattcatcatttggaagaaatgtatttgcaatttcatatataccaggcttgctctttgcagtgaatgggaagcctcattttggggaccaagaacctgtacaaggatttgtgatgaacttttccaatggggaaattatagacatcttcaagccagtgcgcaagcactttgatatgcctcatgatattgttgcatctgaagatgggactgtgtacattggagatgctcataccaacaccgtgtggaagttcaccttgactgagaaattggaacatcgatcagttaaaaaggctggcattgaggtccaggaaatcaaagaagccgaggcagttgttgaaaccaaaatggagaacaaacccacctcctcagaattgcagaagatgcaagagaaacagaaactgatcaaagagccaggctcgggagtgcctgttgttctcattacaacccttctggttattccggtggttgtcctgctggccattgccatatttattcggtggaaaaaatcaagggcctttggaggaaagggaagtggaggcttaaaccttggtaatttctttgcaagccgtaagggctacagtcgaaaagggtttgaccggcttagcactgagggcagtgaccaagagaaagaggatgatggaagtgaatcagaagaggagtattcagcacctctgcctgcgctcgcaccttcctcctcctgaaaaccaagctttgatttagattgagtaagatttacccagaatgtcagattcctttccctttagcacgtttaaagttctgtgtatttaattgtaaactgtactagtctgtgtgggactgtacacactttatttacttcgttttggttaagttggcttctgtttctagttgaggagtttcctaaaagttcataacagtgccattgtctttatatgaacatagactagagaaaccgtcctctttttccatcataattctaatctaacaatggaagatttgcccatttacacttttgagactttttggtggatgtaaataaccccattctttgcttgaacacagtattttcccaatagcactttcattgccagtgtctttctttggtgcctttcctgttcagcattcttagcctgtggcaataaagagaaactttgtgctacatgacgacaaagctgctaaatctcctatttttttaaaatcactaacattatattgcaatgaaggaaataaaaaagtctctatttaaattcttttttaaattttcttcagttggtgtgtttttgggatgtcttatttttagatggttacactgttagaacactattttcagaatctgaatgtaatttgtgtaataaagtgttttcagagcaaaaaaaaaaaaaaaaaa

SEQ ID NO: 4357 - protein, 974 aa, Homo sapiens [sequence omitted]

SEQ ID NO: 4358 - DNA, 523 bp, Rattus norvegicus
  ref <308>: DATABASE ACCESSION NUMBER: EMBL / AA799593
  ref <309>: DATABASE ENTRY DATE: 2000-03-03
aaaagataggtgttctccaacctcattgacttaacccttgtggaatatagcacttctaaactaaaaacacacatcaagagaaaggttagtccagtgggacattcaaaatgtcttcagaaggtcttacattggctacgtctactgctctggtttcggcaaaaatacagagcagagctgctctctaaacggtctccaaattccctccagagtcaggtctcaaactgccgggcacactggatggcagttggccggtaacagccagccaggcacttcaagctgtctgtctgtctgtctgtcggttactgcagagggagaaagtggtgtcccctcaacctgcctccatgacaatttactaaagtggttcttcccacttcgagccactttggtacaaaaacttcagttggtttcaactgttacccatttcaaatttaggagttttgggtctcgggtaccacactacccaattccaaagcattggcagcttcggaggaaaactaactggagttcaagtttgtccaagctc

SEQ ID NO: 4359 - protein, 183 aa, Rattus norvegicus
  ref <308>: DATABASE ACCESSION NUMBER: SWISS-Prot / AAH08517
  ref <309>: DATABASE ENTRY DATE: 2002-11-28
MSSPSPGKRRMDTDVVKLIESKHEVTILGGLNEFVVKFYGPQGTPYEGGVWKVRVDLPDKYPFKSPSIGFMNKIFHPNIDEASGTVCLDVINQTWTALYDLTNIFESFLPQLLAYPNPIDPLNGDAAAMYLHRPEEYKQKIKEYIQKYATEEALKEQEEGTGDSSSESSMSDFSEDEAQDMEL

SEQ ID NO: 4360 - DNA, 1579 bp, Homo sapiens
  ref <308>: DATABASE ACCESSION NUMBER: Refseq / NM_003344
  ref <309>: DATABASE ENTRY DATE: 2002-11-05
ccgggccgtgacagacggccggcagaggaagggagagaggcggcggcgacaccatgtcatctcccagtccgggcaagaggcggatggacacggacgtggtcaagctcatcgagagtaaacatgaggttacgatcctgggaggacttaatgaatttgtagtgaagttttatggaccacaaggaacaccatatgaaggcggagtatggaaagttagagtggacctacctgataaataccctttcaaatctccatctataggattcatgaataaaattttccatcccaacattgatgaagcgtcaggaactgtgtgtctagatgtaattaatcaaacttggacagctctctatgatcttaccaatatatttgagtccttcctgcctcagttattggcctatcctaaccccatagatcctctcaatggtgacgctgcagccatgtacctccaccgaccagaagaatacaagcagaaaattaaagagtacatccagaaatacgccacggaggaggcgctgaaagaacaggaagagggtaccggggacagctcatcggagagctctatgtctgacttttccgaagatgaggcccaggatatggagttgtagtagaaaaagcacctgcttttcagaaagactattatttcctaaccatgagaagcagactataatattcatatttaaacaaagcaattttttttattactaaacaaggtttttatgaataatagcattgatatatatatattatatatcaccctttagatcttgatttcttggtcatttctcaacctgaggtgcatagcatattcccacattccatttggtagcaatatgcggtctgaatgcatgcattcatgagtccatgtggccaagtcagcctgtgtgctactgaactgtcgaaggaaatagccgctctgataggtagatgtgagtaaaaagaacaggaaaaaattgcttcttttattggtttccaaagaaacaaaccaaaccaaccagctcttggatgtgaagataaaatagtgcttttttgaaatggagaggaaaaacttggggaggaagaggcctgctgtgggggcatcggagccagccatgtaagaatcagagctgctccttcctgtgaatcctaggtggccctatgtcttctgtggagttacagtataaagcagggagctaattaagagtattaaaacttaaaaccattttttgactctgattttaagtacatttttatatgtcagttgctgcccttcacactaccaggccctgcagccacagtgttctgttggagaaacttggggaagtgttttctgaaccagttctttttcttggggtagagcgtgaaatccagacctgtttttgaaaggacagcacaggaggagaaaagtgactgggacgatgcttcctctcatccaaaacacatgcagagtcacatcctcatcctagtgtttggcagtttgagaccgctaccctgaacttaagagctttaaatatgagggttgtgtttctgggggggttatttttttggtgtgtgtgtgtgtgtattgtgcttagaaaggttgcagatttcatcttcacctacc

SEQ ID NO: 4361 - protein, 183 aa, Homo sapiens; identical to SEQ ID NO: 4359
  ref <308>: DATABASE ACCESSION NUMBER: SWISS-Prot / P37286
  ref <309>: DATABASE ENTRY DATE: 2002-06-15

SEQ ID NO: 4362 - DNA, 591 bp, Rattus norvegicus
  ref <308>: DATABASE ACCESSION NUMBER: EMBL / AA799600
  ref <309>: DATABASE ENTRY DATE: 2000-03-03
cacagtctgtgcagcttttatttcaacagggaagtaataagatctatatacagtctaaaaccactagaaaaggtgagtaaaaaggacccatggtccatctgggtccaaccaggggcggtggcacatgcctttactcccatcacttgggaggtggaggcaggcagatctgtgagtttgaggccagcctggttgacagtgagttccaggcaagccagagctacatactgagaccctgtctcaaaacaaaagtctatggagtgatatgaatggtggggccgggcaagcatcgtacctggcgtccagagcagggcctgggcatttctctggtacatgtaggagtgaggccttatgaaagaccccgcactgagcagaggcacagaggacactgcctacctgtttgagctgtctacctgtctccacaggacaggcggacattccaatgccatcatcgtaggtccagcctgacttacacacccagaagggatcaagcctggcctgcattctgtaaggatgttcagaacttcacggtgctattcagagcccccgagaatagccggtcgcgggagatcaccagtggagtgtaaatgtcct

SEQ ID NO: 4363 - protein, 409 aa, Rattus norvegicus; identical to SEQ ID NO: 36
  ref <308>: DATABASE ACCESSION NUMBER: SWISS-Prot / P43035
  ref <309>: DATABASE ENTRY DATE: 2002-06-15

SEQ ID NO: 4364 - DNA, 359 bp, Homo sapiens
  ref <308>: DATABASE ACCESSION NUMBER: EMBL / L13388
  ref <309>: DATABASE ENTRY DATE: 1999-07-01
cgttaatcacactatagaggcataagtggtatcagttttcatttttctaattgtttaaactgtgttttataccagtgtttgcaagtaattgggtgttagcttgagatggttaaaggtggtttggggagggacttcgttgtaatggttttgctgtaaaaaatgtttccaactccgctgaaatgttgctgaaaagcatggtgctggtaacagttcaacaatccgtggctgctcattcttgcctactttactctcccactgaagcaggttagcgttgaaggtggtatggaaaagcctgcatgcctgttccattctggggggaagtttattttgagttgtgctgatgacaagaccccacgggt

SEQ ID NO: 4365 - DNA, 687 bp, Rattus norvegicus
  misc_feature (1)..(687): n=a, c, g or t
  ref <308>: DATABASE ACCESSION NUMBER: EMBL / AA799601
  ref <309>: DATABASE ENTRY DATE: 2000-03-03
aaaagcatgtttatgtgactgcacataaatgtctgtgtaaaaagggcattatgacagttgataccacaaagattacagtaagaaaagcactttatgacaatatttcacaaattcacaaggatcactttaatatacaaagtaactgctaccattctgaacacaaagcagccagtatgtacatagtgttaataaaatgcatggtgtcttggtacttttattctttacacataaagcacaaaaagatttaggtaaaaaatttaaacagggacatttctagattgtgggaacgttattagaaatgtatgtcccttctcatagttattagtattcttctccaataggaacatcagagttaaagctcataccctgttttgtgctaacagttccggggaggtattttctactccagtactcaaggaaaacccaaaaagccaaacaccattctaggacttccctggttattttgtttttcaaaagtttcaagtgacatgtctaggttggaaatgatcccttccactggggcattataaccgatgtgtacagatcagttgaagacagctttacacagaaaactgctaactagcacacttcttcaccatcctaataaatctacacacacagaaaaatgttgacaaaatttcccacnttntatataaataattttattacatacacattgaagtggca

SEQ ID NO: 4366 - DNA, 193 bp, Homo sapiens
  ref <308>: DATABASE ACCESSION NUMBER: EMBL / AA731950
  ref <309>: DATABASE ENTRY DATE: 2000-03-03
tttttttttttttttttttttttttttttttgagtttttaaaagcatgtttatgtgactgcacataaatgtttgtgtaaaaagagcattatgacagttgataccacaaagattacagtaagaaaaagcactttatgacaatatttcacaaattcacaaggatcactttaatatacaaagcaaactgctactat

SEQ ID NO: 4367 - DNA, 663 bp, Rattus norvegicus
  ref <308>: DATABASE ACCESSION NUMBER: EMBL / AA799609
  ref <309>: DATABASE ENTRY DATE: 2000-03-03
aagaaagtacttcagaaagaggaaaataatctagatcatttatatatatattttttaataaaaacctttacataatcttcatgcataaagacccaggggtggccatattgtctgtgacagccccaaatatccgctctttcaggctagtgcctgggacttcccatagccagcagcaatgtggtgaaggccttccctatctgcccctgggcccagccagacctgtcgcagtgacagctttaccttctgagaaatgttcttggctagatgggagggcagggaggaacacccttgacattcttcatctaaactcctctggcaaatcgaggaaaatgactgatgatcaagggtcagagcagttctggggcttctcaagagttgttctctgtagcttggggccactgcacatgatagcatggtgtccaaaggatatacaaggcatgagtaaaagccttgaagatctccgcctccatggtagacagcccttctttcttaaatatgtcaaagaacaaggtccaactctcttgattcccaaacacactgttaactgagaaatctacttgagagacaaatctatagtaagggaaggtcagtcagtcatatatctggggtgagagtcagaactctgggtgtggaaaagaattccctgggttttgggaggttctg

SEQ ID NO: 4368 - DNA, 663 bp, Rattus norvegicus; identical to SEQ ID NO: 4367
  ref <308>: DATABASE ACCESSION NUMBER: EMBL / AA799609
  ref <309>: DATABASE ENTRY DATE: 2000-03-03

SEQ ID NO: 4369 - DNA, 708 bp, Rattus norvegicus
  misc_feature (1)..(708): n=a, c, g or t
  ref <308>: DATABASE ACCESSION NUMBER: EMBL / AA799612
  ref <309>: DATABASE ENTRY DATE: 2000-03-03
caagaggttcaacagaatttacttgtatattttccattttctatactacttgaaggcataggatagcttcatcttagctttctacaatactgtgttttaagtctacccagtaaactaagaggcagtacaacttgaatacaactgaggaggtgagaagcaactcggcaggccctggtgctcaacagttccggaataaacaggtagcgcgcagccgcattaaaaggtagtttgcaaatattcaagttacaccgagattccttccaaacctctgccttgctcaaaccagcgcacctggccactgctaacaccgcggcacggcatttggtgaatggtgatggttttactttcttcttaatcaaaagcctgtggaggtgctgccacgcagcagagtaagtcagctctgctcgaggacgaggtgccaattgtgaagtcacaaaaggtacagtttacatgagaaacgcacattaacaagtggcccaaatacagagctggacagaaccagaccagtaagtctatagttactcaactgaactaacataagtacattcaaaataaagccggagatcagaataggttttagaatcaaatttgcagactttcttgataaaacagaagagtgaccttctgcagttggaaatgaggctctcacctggcgaanagcanagacttggcagtccctcctgcacaggtaaggaaataagtgacaaa

SEQ ID NO: 4370 - protein, 152 aa, Rattus norvegicus; identical to SEQ ID NO: 3781
  ref <308>: DATABASE ACCESSION NUMBER: SWISS-Prot / P23567
  ref <309>: DATABASE ENTRY DATE: 2002-06-15

SEQ ID NO: 4371 - DNA, 1355 bp, Homo sapiens; identical to SEQ ID NO: 3782
  ref <308>: DATABASE ACCESSION NUMBER: EMBL / BC005979
  ref <309>: DATABASE ENTRY DATE: 2001-07-13

SEQ ID NO: 4372 - protein, 152 aa, Homo sapiens; identical to SEQ ID NO: 3781

SEQ ID NO: 4373 - DNA, 539 bp, Rattus norvegicus
  ref <308>: DATABASE ACCESSION NUMBER: EMBL / AA799633
  ref <309>: DATABASE ENTRY DATE: 2000-03-03
gactgcaaacaaagacatctgctttatttgttttccatcagtagcacatactgtttcttgagcatggcagccccatgctcagaggcatatgggtgctcagtcagagactgcagggcatggggaccatggtctgtggtctcatgatcggtcccttcttcaaggctccaggaaggatgctgctcctcagcccttgcgggcggtgctcacacagtgctggtatgccttggccaggtcggagcatagaagtacctcatgcagatggtcacggtagcagcggaggatctgggcctgtaggccagagcatacaggctccactctgcggggctttattgtgctctctgcttttgaagccgcctcgtggaattgttgagaagacagtttatacagctcagcattcttctcttggatgcgttcctgctgctccttgtagtaagtgtcacggcggctgagctcggcctctctgttcttcagttccctggtctgtcaagtggagcaaagaaacaacttgggtccccagaggttgaagaatccaaaaatcc

SEQ ID NO: 4374 - protein, 273 aa, Rattus norvegicus
  ref <308>: DATABASE ACCESSION NUMBER: SWISS-Prot / BAB29792
  ref <309>: DATABASE ENTRY DATE: 2001-06-01
MGSAESAEARRWSLEMDEEERVRVLQGIRLSESVVNRMKDCSQPSAGEQLVPGFGPSSSAPVPTVPLPAISVPTVPAPTTPVPTAPSSSVRGLPGGTCKGPLTDVKVPSAESGGGLQSSAVKEDLKKFQQEQLAVQDEMVRVAKKEKEAAEKHLKASLPKKKASLTHEQQQSARLARELEDREAELSRRDTFYKEQQGRIQEKNAELYKLSSQQFHEAASKAESTIKPRRVEPVCSGLQAQILRCYRDHLHEVLLCSDLVKAYQHCVSTARKG

SEQ ID NO: 4375 - DNA, 984 bp, Homo sapiens
  ref <308>: DATABASE ACCESSION NUMBER: EMBL / BC006123
  ref <309>: DATABASE ENTRY DATE: 2001-07-13
ctcgggtctggtggctgccggccctgcggcatctcgccatggggagcacggagagcagcgagggccgcagggtgtccttcggagtggacgaggaggagcgggtccgggtgctgcagggtgtccggctgtctgaaaacgtggtgaaccgcatgaaggagcccagctctccaccccctgctcccacatcttctacctttggccttcaagatggcaacttgagagcccctcacaaagaatccacactgcccaggtcggggagcagtggtggccagcagccctcagggatgaaggagggtgtcaagaggtatgaacaggagcatgctgctatccaggataagctcttccaggtggcaaagagggaaagagaggctgccaccaagcactccaaggcatccctgcccacgggcgaaggcagcatcagccatgaggagcagaagtcagtccggctggccagggagctggagagcagagaggcagagctaagacgccgtgacaccttctacaaggagcagctggagcgtattgagaggaagaatgctgagatgtataaactgtcttcagagcaattccatgaggcagcctcaaagatggagagcacaataaagccccgcagggtggagcccgtctgctcagggttgcaggcccagattctccactgctaccgagatcgcccgcatgaggtgctgctgtgctcggacctggtcaaggcataccagcgctgcgtgagcgccgcccacaagggctgaggagcagacatcattccctgccctggcagtgacttggagccctgaagaagggaccaatcatgggaccacagccactgtgccctgccgtttcctgctgggcccctgcatatgcccctgagcctggggctgccacgtgtttaggaaacaaagtatgcgctactgtctgaaaacaaataaagcagatgcctttgttttcagtcaaaaaaaaaaaaaaaaaaaaaaaaaaaaaaaaaaaaaa

SEQ ID NO: 4376 - protein, 236 aa, Homo sapiens
  misc_feature (1)..(236): Xaa=Unknown amino acid
MGSTESSEGRRVSFGVDEEERVRVLQGVRLSENVVNRMKEPSSPPPAPTSSTFGLQDGNLRAPHKESTLPRSGSSGGQQPSGMKEGVKRYEQEHAAIQDKLFQVAKREREAATKHSKASLPTGEGSISHEEQKSVRLARELESREAELRRRDTFYKEQLERIERKNAEMYKLSSEQFHEAASKMESTIKPRRVEPVCSGLQAQILHCYRDRPHEVLLCSDLVKAYQRCVSAAHKGX

SEQ ID NO: 4377 - DNA, 571 bp, Rattus norvegicus
  ref <308>: DATABASE ACCESSION NUMBER: EMBL / AA799637
  ref <309>: DATABASE ENTRY DATE: 2000-03-03
aagcaaaagtagatgagggtggatcaggttaagtaatattggttaaaagaaagagaaaaaagacaccaaaagttatttccttcctaaggtctcagatagtttcttaagtcttttcttcagctccaaaggaaatttctcgtagcacttcttacagactggtttcatgtcaaactccacaaatttattccacagagaagcagtgagaatggtgtggaagggatagaacggttacagacacactggctttctctttctctgcttctctttatcccttgcttctctctcccgtctggcaagtcgcctcttaagctcttctggcattttctcataacagtatttgcagactggctttagatcaattgcaacaaacttatccttgagtgttagtttggtattgcaagtggaacaggcaaagcagctcacacaccaagccttgttgagggcagagaccacgtcaccttctatgacacggttgcaatggaaacaaacatcaccaaatagctgattatagtgagtctcacaataggccaagcccttcctctcataatggcgatgtccaagaaatgggttt

SEQ ID NO: 4378 - protein, 457 aa, Rattus norvegicus
  ref <308>: DATABASE ACCESSION NUMBER: SWISS-Prot / AAD13197
  ref <309>: DATABASE ENTRY DATE: 2003-02-01
MDSFKVVLEGPAPWGFRLQGGKDFNVPLSISRLTPGGKAAQAGVAVGDWVLSIDGENAGSLTHIEAQNKIRACGERLSLGLSRAQPAQSKPQKALTPPADPPRYTFAPSASLNKTARPFGAPPPTDSALSQNGQLLRQLVPDASKQRLMENTEDWRPRPGTGQSRSFRILAHLTGTEFMQDPDEEFMKKSSQVPRTEAPAPASTIPQESWPGPTTPSPTSRPPWAVDPAFAERYAPDKTSTVLTRHSQPATPTPLQNRTSIVQAAAGGGTGGGSNNGKTPVCHQCHKIIRGRYLVALGHAYHPEEFVCSQCGKVLEEGGFFEEKGAIFCPSCYDVRYAPSCAKCKKKITGEIMHALKMTWHVPCFTCAACKTPIRNRAFYMEEGAPYCERDYEKMFGTKCRGCDFKIDAGDRFLEALGFSWHDTCFVCAICQINLEGKTFYSKKDKPLCKSHAFSHV

SEQ ID NO: 4379 - DNA, 1236 bp, Homo sapiens
  ref <308>: DATABASE ACCESSION NUMBER: EMBL / U09284
  ref <309>: DATABASE ENTRY DATE: 2001-03-23
tagttcaagacaacagagacaaagctaagatgaggaagttctgtacagtttaggaaatagaggctttcaaagataattcgcagtgatgtgaaactggcctcccaagccctgataacaacatggccaacgccctggccagcgccacttgcgagcgctgcaagggcggctttgcgcccgctgagaagatcgtgaacagtaatggggagctgtaccatgagcagtgtttcgtgtgcgctcagtgcttccagcagttcccagaaggactcttctatgagtttgaaggaagaaagtactgtgaacatgactttcagatgctctttgccccttgctgtcatcagtgtggtgaattcatcattggccgagttatcaaagccatgaataacagctggcatccggagtgcttccgctgtgacctctgccaggaagttctggcagatatcgggtttgtcaagaatgctgggagacacctgtgtcgcccctgtcataatcgtgagaaagccagaggccttgggaaatacatctgccagaaatgccatgctatcatcgatgagcagcctctgatattcaagaacgacccctaccatccagaccatttcaactgcgccaactgcgggaaggagctgactgccgatgcacgggagctgaaaggggagctatactgcctcccatgccatgataaaatgggggtccccatctgtggtgcttgccgacggcccatcgaagggcgcgtggtgaacgctatgggcaagcagtggcatgtggagcattttgtttgtgccaagtgtgagaaaccctttcttggacatcgccattatgagaggaaaggcctggcatattgtgaaactcactataaccagctatttggtgatgtttgcttccactgcaatcgtgttatagaaggtgatgtggtctctgctcttaataaggcctggtgcgtgaactgctttgcctgttctacctgcaacactaaattaacactcaagaataagtttgtggagtttgacatgaagccagtctgtaagaagtgctatgagaaatttccattggagctgaagaaaagacttaagaaactagctgagaccttaggaaggaaataagttcctttattttttcttttctatgcaagataagagattaccaacattacttgtcttgatctacccatatttaaagctatatctcaaagcagttgagagaagaggacctatatgaatggttttatgtcatttttttaaa

SEQ ID NO: 4380 - protein, 325 aa, Homo sapiens
  ref <308>: DATABASE ACCESSION NUMBER: SWISS-Prot / P48059
  ref <309>: DATABASE ENTRY DATE: 2002-06-15
MANALASATCERCKGGFAPAEKIVNSNGELYHEQCFVCAQCFQQFPEGLFYEFEGRKYCEHDFQMLFAPCCHQCGEFIIGRVIKAMNNSWHPECFRCDLCQEVLADIGFVKNAGRHLCRPCHNREKARGLGKYICQKCHAIIDEQPLIFKNDPYHPDHFNCANCGKELTADARELKGELYCLPCHDKMGVPICGACRRPIEGRVVNAMGKQWHVEHFVCAKCEKPFLGHRHYERKGLAYCETHYNQLFGDVCFHCNRVIEGDVVSALNKAWCVNCFACSTCNTKLTLKNKFVEFDMKPVCKKCYEKFPLELKKRLKKLAETLGRK

SEQ ID NO: 4381 - DNA, 571 bp, Rattus norvegicus; identical to SEQ ID NO: 4377
  ref <308>: DATABASE ACCESSION NUMBER: EMBL / AA799637
  ref <309>: DATABASE ENTRY DATE: 2000-03-03

SEQ ID NO: 4382 - protein, 457 aa, Rattus norvegicus; identical to SEQ ID NO: 4378
  ref <308>: DATABASE ACCESSION NUMBER: SWISS-Prot / AAD13197
  ref <309>: DATABASE ENTRY DATE: 2003-02-01

SEQ ID NO: 4383 - DNA, 1236 bp, Homo sapiens; identical to SEQ ID NO: 4379
  ref <308>: DATABASE ACCESSION NUMBER: EMBL / U09284
  ref <309>: DATABASE ENTRY DATE: 2001-03-23

SEQ ID NO: 4384 - protein, 325 aa, Homo sapiens; identical to SEQ ID NO: 4380
  ref <308>: DATABASE ACCESSION NUMBER: SWISS-Prot / P48059
  ref <309>: DATABASE ENTRY DATE: 2002-06-15

SEQ ID NO: 4385 - DNA, 665 bp, Rattus norvegicus
  ref <308>: DATABASE ACCESSION NUMBER: EMBL / AA799641
  ref <309>: DATABASE ENTRY DATE: 2000-03-03
gaatcagataaggcaaagaatgggaactgttttgaaatttaggacttttagaggtaaccatggtcccctactgttaaaaacaggtatttgtctctcacggttttaagattaagggccagaactatctgcttcacaaatccttgttactctgatttccacatatgatcctaaaggttggacagtggtcccaacagcccgtcaggcccagcttcccgagcctccaactctacttagctgtccatattacgattatcagcttaattctctaagatgtaataaactgacatgcctttgacttctacacactcattaacaagatcattacataacactgcagtgtttcccaagtcaagtgttctttttaatcagatctacaaagcatttactgggatgacatttctgacaaagccacagacttctatcaagcagcatcagtgtagtataaaaagtaagcaaaggaacaaaatagccttcttctttcagcctcatgagcagctgcatttctggggaaggacctacacacatagtaattccttgccaagaaccaggacctctgaaggagggaaatgtggattaatgcattcctttttggtttttaaggagactgtaatagaaatatattaaagatagccttaaatatccaacaatcttctgacttacaactt

SEQ ID NO: 4386 - protein, 472 aa, Rattus norvegicus
  ref <308>: DATABASE ACCESSION NUMBER: Refseq / NP_036162
  ref <309>: DATABASE ENTRY DATE: 2002-09-19
MGAVLAVFSLASWVPCLCSGASCLLCSCCPISKNSTVTRLIYAFILFLGTIVSCIMMTEGIQTQLKKIPGFCEGGFQIKMVDTKAEKDCDVLVGFKAVYRINFAVAIFFFAFFLLMLKVKTSKDPRAAVHNGFWFFKIAAIIGIMIGSFYIPGGSFTEVWFVAGMLGASFFIIIQLVLLVDMAHSWNELWVNRMEEGNPRLWYAALLSFTSLFYILSIVFAALLYVFYTKPDDCTENKVFISLNLIFCVAVSIVSILPKVQEHQPRSGLLQSSIITLYTLYLTWSAMTNEPERSCNPSLMSIITHLTSPTVSPANSTTLAPAYRPPSQSGHFMNLDDIWGLIIFVFCLIYSSFRTSSNSQVNKLTLSGSDSVILGDTTNGANDEEDGQPRRAVDNEKEGVQYSYSFFHLMLCCASLYIMMTITSWYSPDAKFQKVSSKWLAVWFKMGSSWLCLLLYLWTLVAPLVLTGRDFS

SEQ ID NO: 4387 - DNA, 1892 bp, Homo sapiens
  ref <308>: DATABASE ACCESSION NUMBER: Refseq / NM_006811
  ref <309>: DATABASE ENTRY DATE: 2002-11-05
ggcacgagctcagctggcagttaccaccgtgttagaaagcagcctcaggaccggccacctccatcactggcgtcaccatgggggctgtgctgggtgtcttctccctcgccagctgggttccatgcctctgcagcggtgcctcatgtttgctgtgtagttgctgtcctaacagtaagaattccacggtgactcgcctcatttatgctttcattctcctcctgagcactgtcgtatcctatatcatgcagagaaaagagatggaaacttacttgaagaagattcctggattttgtgaagggggatttaaaatccatgaggctgatataaatgcagataaagattgtgatgtgctggttggttataaagctgtgtatcggatcagctttgccatggccatctttttctttgtcttttctctgctcatgttcaaagtaaaaacaagtaaagatctccgagcggcagtacacaatgggttttggttcttcaaaattgctgcccttattggaatcatggttggctctttctacatccctgggggctatttcagctcagtctggtttgttgttggcatgataggggccgccctcttcatcctcattcagctggtgctgctggtagattttgctcattcttggaatgaatcatgggtaaatcgaatggaagaaggaaacccaaggttgtggtatgctgctttactgtctttcacaagcgccttttatatcctgtcaatcatctgtgtcgggctgctctatacatattacaccaaaccagatggctgcacagaaaacaagttcttcatcagtattaacctgatcctttgcgttgtggcttctattatatcgatccacccaaaaattcaggaacaccagcctcgctccggcctcttgcagtcctccctcatcaccctctacactatgtacctcacctggtcagccatgtccaatgaacctgatcgttcctgcaatcccaacctgatgagctttattacacgcataactgcaccaaccctggctcctggaaattcaactgctgtggtccctacccctactccaccatcaaagagtgggtctttactggattcagataattttattggactgtttgtctttgttctctgcctcttgtattctagcatccgcacttccactaatagccaagtagacaagctgaccctgtcagggagtgacagcgtcatccttggtgatacaactaccagtggtgccagtgatgaagaagatggacagcctcggcgggctgtggacaacgagaaagagggagtgcagtatagctactccttattccacctcatgctctgcttggcttccttgtacatcatgatgaccctgaccagctggtacagccctgatgcaaagtttcagagcatgaccagcaagtggccagctgtgtgggtcaagatcagctccagctgggtctgcctcctgctttacgtctggacccttgtggctccacttgtcctcaccagtcgggacttcagctgaacctctgagtgccaaggacaccactggaactcacaaaggtctccttcaccgaaaacccatataccttttaagtttgtttcaactaaaatattaagtgaatgctttgcaagtttgactgtatgcaggtttatatcagaaggtgagattgaataatgcttgatgcagaatcgaaacttctcatttatctgtatattatgtttacttctaaggatatagcacaaagggaacattttttgtttaaagtgaactacagctgtgctgtgaagagagttctttataaagcctgtaggttcttttaactttggtttaaaatgtaagataggaaaatgttggatatttgaggccatgcttaatatatttatattgcagtatcctttaaaagcaaaaaaaaaa

SEQ ID NO: 4388 - protein, 473 aa, Homo sapiens
  ref <308>: DATABASE ACCESSION NUMBER: Refseq / NP_006802
  ref <309>: DATABASE ENTRY DATE: 2002-11-05
MGAVLGVFSLASWVPCLCSGASCLLCSCCPNSKNSTVTRLIYAFILLLSTVVSYIMQRKEMETYLKKIPGFCEGGFKIHEADINADKDCDVLVGYKAVYRISFAMAIFFFVFSLLMFKVKTSKDLRAAVHNGFWFFKIAALIGIMVGSFYIPGGYFSSVWFVVGMIGAALFILIQLVLLVDFAHSWNESWVNRMEEGNPRLWYAALLSFTSAFYILSIICVGLLYTYYTKPDGCTENKFFISINLILCVVASIISIHPKIQEHQPRSGLLQSSLITLYTMYLTWSAMSNEPDRSCNPNLMSFITRITAPTLAPGNSTAVVPTPTPPSKSGSLLDSDNFIGLFVFVLCLLYSSIRTSTNSQVDKLTLSGSDSVILGDTTTSGASDEEDGQPRRAVDNEKEGVQYSYSLFHLMLCLASLYIMMTLTSWYSPDAKFQSMTSKWPAVWVKISSSWVCLLLYVWTLVAPLVLTSRDFS

SEQ ID NO: 4389 - DNA, 665 bp, Rattus norvegicus; identical to SEQ ID NO: 4385
  ref <308>: DATABASE ACCESSION NUMBER: EMBL / AA799641
  ref <309>: DATABASE ENTRY DATE: 2000-03-03

SEQ ID NO: 4390 - protein, 472 aa, Rattus norvegicus; identical to SEQ ID NO: 4386
  ref <308>: DATABASE ACCESSION NUMBER: Refseq / NP_036162
  ref <309>: DATABASE ENTRY DATE: 2002-09-19

SEQ ID NO: 4391 - DNA, 1892 bp, Homo sapiens; identical to SEQ ID NO: 4387
  ref <308>: DATABASE ACCESSION NUMBER: Refseq / NM_006811
  ref <309>: DATABASE ENTRY DATE: 2002-11-05

SEQ ID NO: 4392 - protein, 473 aa, Homo sapiens; identical to SEQ ID NO: 4388
  ref <308>: DATABASE ACCESSION NUMBER: Refseq / NP_006802
  ref <309>: DATABASE ENTRY DATE: 2002-11-05

SEQ ID NO: 4393 - DNA, 591 bp, Rattus norvegicus
  ref <308>: DATABASE ACCESSION NUMBER: EMBL / AA799645
  ref <309>: DATABASE ENTRY DATE: 2000-03-03
caagaaggaaaaccgagttttattggaggtctgagcagcaaggggtgtccgagaagcagggctgatgcaggggacgctggaggtggtcacaggcgagcagctgggtggggagaggtgtcaggtgccaagggggctctggctgagtttcctggagccaggtggaggttctaccgcctgcgggtggacagacggcggatggagctgcggaaagttccctcctcttcgtcgggttccccagttctctgctgttggttgaatttgcaccggcatcttttgctaaggatgataaggatgcccaagatgaagaggatcccagcgatagtgaggccgccgatccgcagggtgtggtaatcgtaggtgaatggatctggttcctgcggagcttctgcactggccatggagaggagacacacacagacaatcaggatgtggccgggagatgccattgccccttgaaagggaagcaagctatctccggacacaggtggaatgctgtgagacaaacaggacatgcccagcctcacctgcccctacacacctcagccagtggtctctccgtactcaggcagtcccagttctcctgccctcggc

SEQ ID NO: 4394 - protein, 92 aa, Rattus norvegicus
  ref <308>: DATABASE ACCESSION NUMBER: SWISS-Prot / O08589
  ref <309>: DATABASE ENTRY DATE: 2002-06-15
MAPLHHILIVCVCLLSMASAEAPQEPDPFTYDYHTLRIGGLTAGILLFILGILIILSKRCRCKFNQQQRTGEPDEEEGTFRSSIRRLSTRRR

SEQ ID NO: 4395 - DNA, 279 bp, Homo sapiens
  ref <308>: DATABASE ACCESSION NUMBER: EMBL / U72245
  ref <309>: DATABASE ENTRY DATE: 1999-07-01
atggcacctctccaccacatcttggttttctgtgtgggtctcctcaccatggccaaggcagaaagtccaaaggaacacgacccgttcacttacgactaccagtccctgcagatcggaggcctcgtcatcgccgggatcctcttcatcctgggcatcctcatcgtgctgagcagaagatgccggtgcaagttcaaccagcagcagaggactggggaacccgatgaagaggagggaactttccgcagctccatccgccgtctgtccacccgcaggcggtag

SEQ ID NO: 4396 - protein, 92 aa, Homo sapiens [sequence omitted]

SEQ ID NO: 4397 - DNA, 591 bp, Rattus norvegicus; identical to SEQ ID NO: 4393
  ref <308>: DATABASE ACCESSION NUMBER: EMBL / AA799645
  ref <309>: DATABASE ENTRY DATE: 2000-03-03

SEQ ID NO: 4398 - protein, 92 aa, Rattus norvegicus; identical to SEQ ID NO: 4394
  ref <308>: DATABASE ACCESSION NUMBER: SWISS-Prot / O08589
  ref <309>: DATABASE ENTRY DATE: 2002-06-15

SEQ ID NO: 4399 - DNA, 279 bp, Homo sapiens; identical to SEQ ID NO: 4395
  ref <308>: DATABASE ACCESSION NUMBER: EMBL / U72245
  ref <309>: DATABASE ENTRY DATE: 1999-07-01

SEQ ID NO: 4400 - protein, 92 aa, Homo sapiens [sequence omitted]

SEQ ID NO: 4401 - DNA, 641 bp, Rattus norvegicus
  ref <308>: DATABASE ACCESSION NUMBER: EMBL / AA799650
  ref <309>: DATABASE ENTRY DATE: 2000-03-03
gatgtcaagtatcttaatgtttatttttattctttacatccagcacttgaagaaaagaaaatgacatagtgttttagaaacatagtccttcatgattataactcatcaataccttagaacacacaaggacactgtgagttaatgactacactaaaaaataatgggaaattcagcataattaacaaaaatccaagaggaaatttcaggaccttgatcagaagctttcactaagtgctggcactatatgctacttcatttcactaagtgctggcgctatgtgctacttcatttcactaagtactggtgctatgtgctacttcactgtagaccaagcttcagggcaggctaagaaatcttaaccctctgaagacatgatctaagaaatggggaccaagcacttgtagagaattggtagccatcaagaagtccctagtaaggacagctatggaaggagctggccacctttaacctgaacctgtcttaaaattacaaagcccatggagcagtacttataaacacaagcatggtgaggttttgccattctataaataatcttcaggattccagctggggctctcttttggcatgagaagcttcaggtaaacagcagacataggatgacctattattgatggaccttc

SEQ ID NO: 4402 - protein, 257 aa, Rattus norvegicus
  ref <308>: DATABASE ACCESSION NUMBER: Refseq / NP_071985
  ref <309>: DATABASE ENTRY DATE: 2002-11-05
MAAAAGRLLWSSVARPASTIFRSISASTVLRPVASRRTCLTDMLWSACPQAKFAFSTSSSFHTPAVTQHAPHFKGTAVVNGEFKELSLDDFKGKYLVLFFYPLDFTFVCPTEIVAFSDKANEFHDVNCEVVAVSVDSHFSHLAWINTPRKNGGLGHMNITLLSDLTKQISRDYGVLLESAGIALRGLFIIDPNGVIKHLSVNDLPVGRSVEEPLRLVKAFQFVETHGEVCPPNWTPESPTIKPSPTASKEYFEKVHQ

SEQ ID NO: 4403 - DNA, 1542 bp, Homo sapiens
  ref <308>: DATABASE ACCESSION NUMBER: Refseq / NM_006793
  ref <309>: DATABASE ENTRY DATE: 2000-11-02
ctgaagatggcggctgctgtaggacggttgctccgagcgtcggttgcccgacatgtgagtgccattccttggggcatttctgccactgcagccctcaggcctgctgcatgtggaagaacgagcttgacaaatttattgtgttctggttccagtcaagcaaaattattcagcaccagttcctcatgccatgcacctgctgtcacccagcatgcaccctattttaagggtacagccgttgtcaatggagagttcaaagacctaagccttgatgactttaaggggaaatatttggtgcttttcttctatcctttggatttcacctttgtgtgtcctacagaaattgttgcttttagtgacaaagctaacgaatttcacgatgtgaactgtgaagttgtcgcagtctcagtggattcccactttagccatcttgcctggataaatacaccaagaaagaatggtggtttgggccacatgaacatcgcactcttgtcagacttaactaagcagatttcccgagactacggtgtgctgttagaaggttctggtcttgcactaagaggtctcttcataattgaccccaatggagtcatcaagcatttgagcgtcaacgatctcccagtgggccgaagcgtggaagaaaccctccgcttggtgaaggcgttccagtatgtagaaacacatggagaagtctgcccagcgaactggacaccggattctcctacgatcaagccaagtccagctgcttccaaagagtactttcagaaggtaaatcagtagatcacccatgtgtatctgcaccttctcaactgagagaagaaccacagttgaaacctgcttttatcattttcaagatggttatttgtagaaggcaaggaaccaattatgcttgtattcataagtattactctaaatgttttgtttttgtaattctggctaggaccttttaaacatggttagttgctagtacaggaatcgtttattggtaacatcttggtggctggctagctagtttctacagaacataatttgcctctatagaaggctattcttagatcatgtctcaatggaaacactcttctttcttagccttacttgaatcttgcctataataaagtagagcaacacacattgaaagcttctgatcaacggtcctgaaattttcatcttgaatgtctttgtattaaactgaattttcttttaagctaacaaagatcataattttcaatgattagccgtgtaactcctgcaatgaatgtttatgtgattgaagcaaatgtgaatcgtattattttaaaaagtggcagagtgacttaactgatcatgcatgatccctcatccctgaaattgagtttatgtagtcattttacttattttattcattagctaactttgtctatgtatatttctagatattgattagtgtaatcgattataaaggatatttatcaaatccagggattgcattttgaaattataattattttctttgctgaagtattcattgtaaaacatacaaataacatatttaaacaaaaaaaaaaa

SEQ ID NO: 4404 - protein, 256 aa, Homo sapiens
  ref <308>: DATABASE ACCESSION NUMBER: SWISS-Prot / P30048
  ref <309>: DATABASE ENTRY DATE: 2002-06-15
MAAAVGRLLRASVARHVSAIPWGISATAALRPAACGRTSLTNLLCSGSSQAKLFSTSSSCHAPAVTQHAPYFKGTAVVNGEFKDLSLDDFKGKYLVLFFYPLDFTFVCPTEIVAFSDKANEFHDVNCEVVAVSVDSHFSHLAWINTPRKNGGLGHMNIALLSDLTKQISRDYGVLLEGSGLALRGLFIIDPNGVIKHLSVNDLPVGRSVEETLRLVKAFQYVETHGEVCPANWTPDSPTIKPSPAASKEYFQKVNQ

SEQ ID NO: 4405 - DNA, 520 bp, Rattus norvegicus
  ref <308>: DATABASE ACCESSION NUMBER: EMBL / AA799654
  ref <309>: DATABASE ENTRY DATE: 2000-03-03
ttcaggcccaaacagttcatgagtgcagcatgcagcacccatggtccactgcaggccactccatcagtagcaagacccgaattatcagagaccggtgcctgtggcctgccacccagggtacactcaagacgccaagggtgtgggtttggctgagtatgaaaggtaccaggcagaggtcagcttggggctatgtgagctggccaacccaagggaagagggtaggtgaacagggtttccagtgtcccgtgtaccccacggcggccaagaggctaacatggggtctctggtgctgccaacaaggcctaccctagtgctaagcctgcggctgagtgagcaggttgtgtgttggggtcaggatgcccctcctaaggcgttactgctataagctactctgtcccagggcagtaaggaaccacaggggacattttccccacgaggttccaatgggtcaaatcactgaagccttcagcgcctatggctggcacaccaggggaacaagggcgtgggcgtgggtgtggag

SEQ ID NO: 4406 - protein, 573 aa, Rattus norvegicus
  ref <308>: DATABASE ACCESSION NUMBER: SWISS-Prot / AAH10776
  ref <309>: DATABASE ENTRY DATE: 2002-10-01
MDEGGLPLLPDSLVYQIFLSLGPADVLAAGLVCRQWQAVSRDEFLWKEQFYRYYQVARDVPRHPAATSWYEEFRRLYDMVPCVEVQTLKEHTDQVLHLSFSHSGYQFASCSKDCTVKIWNNDLTISLLHSADMRPYNWSYTQFSQFNQDDSLLLASGVFLGPHNSSSGEIAVISLDSFALLSRVRNKPYDVFGCWLTETSLISGNLHRIGDITSCSVLWLNNAFQDVESENVNVVKRLFKIQNLNASTIRTVMVADCSRFDSPDLLLDASDQAGLPCRVFDLGGDTEEEATDPGLHTSGSDHVKKGLRRVFDSVLDGHGQLSDCALETKVAELLAQGHTKPPECNDADTRNKYLIFTTGCLTYSPHQIGIKQILPHQMTTAGPVLGEGRGSDAFFDALDHVIDVHGHIIGMGLSPDNRYLYVNSRAWPPGSVVADPMQPPPIAEEIDLLVFDLKTMREVKRALRAHRAYTPNDECFFIFLDVSRDFVASGAEDRHGYIWDRHYNICLAKLRHEDVVNSVAFSPQEQELLLTASDDATIKAWRSPRIVRVLQAPRPRPRPRPRPFFSWFASHRR

SEQ ID NO: 4407 - DNA, 1966 bp, Homo sapiens
  ref <308>: DATABASE ACCESSION NUMBER: EMBL / AL137631
  ref <309>: DATABASE ENTRY DATE: 2000-02-18
ggaacaagccctatgacgtgtttggctgttggctcaccgagaccagcctcatctcggggaacctgcaccgcatcggagatatcacctcctgctcggtgctgtggctcaacaatgccttccaggatgtggagtcagagaacgtcaacgtggtgaagcggctgttcaagatccagaacctcaatgccagcaccgtccgcacggtgatggtggccgactgcagccgcttcgacagccctgacctgctgctggaagccggtgacccggccacgtccccctgccgcatctttgacctgggcagcgacaacgaggaggtggtggctggcccggcccccgcccacgccaaggagggcttgcggcactttctggaccgcgtgctggaggggcgggcgcagccacagctgtcggagcgcatgctagagaccaaggtggccgagctgctggcccagggccacaccaagccacccgagcgcagtgccacaggcgccaagagcaagtacctcatcttcaccactggctgcctcacctactccccacaccagatcggtacacccctgccgccatgctgcccgcctcggtcctaggagcttgggggaggccgggcaggggtcctgaggggcagacagcaagcaagtccacaggcaaagctgggatcgttcactcgcccctggggtcacaagctcagacctggggcctgtgggatgagcagtgaaaacaaacgcaggcagggccgctggccagcaagcaaccgacgggcctgattcaggtctggggcccccggagcaggcagtgcccacggacctctgtggtgctcacagccccagagacaccactgaggcatcaagcagatcctgccacaccagatgaccacggcagggcccgtgctgggtgagggccggggctccgatgccttcttcgacgcgctggaccacgtcatagacatacacggacacatcatcggcatgggcctgtcgcccgacaacaggtacctgtacgtgaacagccgcgcctggcccaacggtgcggtggtggccgaccccatgcagccgccaccaatcgcggaggagattgacctgctggtgttcgacctcaagaccatgcgggaggtgaggcgggctctgcgtgcgcaccgcgcctacacgcccaacgacgagtgcttcttcatcttcctggacgtcagcagggacttcgtggccagcggggcggaggaccggcacggctacatctgggaccgccactacaacatctgtctggccaggctgcggcacgaggatgtggtcaactcagtggtcttcagtccccaggagcaggagctgctgctcacggccagcgacgacgccaccatcaaagcctggcgctccccacgcaccatgcgcgtcctccaggcacctcgcccacggcctcgcaccttcttctcctggcttgccagccagaggcgctgaggtgtgctgggtgcactggagccaccgggaccccttgaggacatcgccaggctctgtggctttttcccgagcgggagaggtggagatgcttatagcagttacgccttaggaaggggacaaccaggccccgccacacgctcacacacaaacctgctcacgcagctgtgatgcttggcacggggtggccagtgcagatggagcccaaggccccctcggcctcctgggcaacttggggtacacaggatactgggggtgccgctcctcactcaaccccaggctaggggtacacctgacccagctggcctcggcccggggcaccttcggctggtcctgtggggccctggacggtggcccagtggtggcaggggctgctcctggctgtggttgtgcgcccggggcttgggagcggccggtcacgctgctgtgggcccgagtgtgttgcatgtccacgcaccacccgttcagggccctgaataaacagttggcaacagcaaaaaaaaaaaaaaaaaaaaaaaaaaaaaaaaaaa

SEQ ID NO: 4408 - DNA, 520 bp, Rattus norvegicus; identical to SEQ ID NO: 4405
  ref <308>: DATABASE ACCESSION NUMBER: EMBL / AA799654
  ref <309>: DATABASE ENTRY DATE: 2000-03-03

SEQ ID NO: 4409 - protein, 573 aa, Rattus norvegicus; identical to SEQ ID NO: 4406
  ref <308>: DATABASE ACCESSION NUMBER: SWISS-Prot / AAH10776
  ref <309>: DATABASE ENTRY DATE: 2002-10-01

SEQ ID NO: 4410 - DNA, 1966 bp, Homo sapiens; identical to SEQ ID NO: 4407
  ref <308>: DATABASE ACCESSION NUMBER: EMBL / AL137631
  ref <309>: DATABASE ENTRY DATE: 2000-02-18

SEQ ID NO: 4411 - DNA, 610 bp, Rattus norvegicus
  ref <308>: DATABASE ACCESSION NUMBER: EMBL / AA799656
  ref <309>: DATABASE ENTRY DATE: 2000-03-03
ttttcaacagtttaaataaaaatttttcctcatgatgttaagtgaatgttattttctttgagaatatctcttttttcattaaaataatttctgaaccactctatatgctcgaccttctgtctaacgctcagatatgggtttttcgagaggccacaggtcaccagctccatgaacaggcgaattggtccttgcttggggaaatcctccaggtgcttctccaaaaatatatgctcatggaactctgagccatcatcgtcaagacctgcttcattgttaactgggaactcccacagtttcccctcctttgtccactgtatcatctcctcaaacccattcccaaacggctgttcgcttactgtggctaattgcttagcaaattctatctcccagagagaaggtgctgcttctggttcaggtgcttcgtcgtcaaacgccttaacatcaaaaatcgaaagtcttttccccttgaacaaacatttcctccttctgaaatcagctggcttctcctggctaagcgaactgtccacttcttcgtcaaactgaatctggtgctgtggtcttgaactaactctcatcgaaggggatttggcaattttcatattcgatatta

SEQ ID NO: 4412 - DNA, 1202 bp, Homo sapiens
  ref <308>: DATABASE ACCESSION NUMBER: EMBL / Z68747
  ref <309>: DATABASE ENTRY DATE: 1996-09-16
cggcgatgtttcctagagtctcgacgttcctacctcttcgccccctttcccgccaccctttgtcctctggaagcccggagacatcagcggctgcgattatgctactcactgttcggcacggaacagtcaggtaccgcagttcagcgctgttggcccggacaaaaaataacatccaaagatattttggcactaacagtgtgatctgtagcaagaaagataagcagtctgttcgaactgaggagacttccaaggagacttcagagagccaagacagtgaaaaggaaaatacgaaaaaagacttgttaggcattattaagggcatgaaagttgaattaagcacagtaaatgtacgaacaacaaagccccccaaaagaagaccacttaaaagtttggaagctacacttggcaggcttcgaagagctacagaatatgctccaaagaagagaattgagcccctgagtcctgagttggtggcagctgcatctgctgtggcagattctctcccttttgataagcaaacaaccaagtcagagctgctgagccagctccagcagcatgaggaagagtcaagggcacagagagatgcaaagcgacctaaaattagtttcagtaacataatatcagatatgaaagttgccagatctgctacagctagagttcgttcaagaccagagcttcggattcagtttgatgaaggctatgacaattatcctggccaggagaagacggatgatcttaaaaaaaggaaaaatatattcacagggaaaagacttaatatttttgacatgatggcagttactaaagaagcacctgaaacagacacatcaccttcactttggaatgtggaatttgctaagcagttagccacagtaaatgaacaaccccttcagaatggatttgaagagctgatccagtggacaaaagaggggaaactatgggagttcccaattaacaatgaagcaggttttgatgatgatggttcagaatttcatgaacatatatttctggagaaacacctggagagctttccaaaacaaggaccaattcgccacttcatggagctggtgacttgtggcctttccaaaaacccatatcttagtgttaaacagaaggttgaacacatagagtggtttagaaattattttaatgaaaaaaaggatattctaaaagaaagtaacatacagttcaattaagaccatgga

SEQ ID NO: 4413 - protein, 396 aa, Homo sapiens
  misc_feature (1)..(396): Xaa=Unknown amino acid
MFPRVSTFLPLRPLSRHPLSSGSPETSAAAIMLLTVRHGTVRYRSSALLARTKNNIQRYFGTNSVICSKKDKQSVRTEETSKETSESQDSEKENTKKDLLGIIKGMKVELSTVNVRTTKPPKRRPLKSLEATLGRLRRATEYAPKKRIEPLSPELVAAASAVADSLPFDKQTTKSELLSQLQQHEEESRAQRDAKRPKISFSNIISDMKVARSATARVRSRPELRIQFDEGYDNYPGQEKTDDLKKRKNIFTGKRLNIFDMMAVTKEAPETDTSPSLWNVEFAKQLATVNEQPLQNGFEELIQWTKEGKLWEFPINNEAGFDDDGSEFHEHIFLEKHLESFPKQGPIRHFMELVTCGLSKNPYLSVKQKVEHIEWFRNYFNEKKDILKESNIQFNX

SEQ ID NO: 4414 - DNA, 610 bp, Rattus norvegicus; identical to SEQ ID NO: 4411
  ref <308>: DATABASE ACCESSION NUMBER: EMBL / AA799656
  ref <309>: DATABASE ENTRY DATE: 2000-03-03

SEQ ID NO: 4415 - protein, 384 aa, Rattus norvegicus
  ref <308>: DATABASE ACCESSION NUMBER: SWISS-Prot / CAA87087
  ref <309>: DATABASE ENTRY DATE: 2002-06-15
MLHRIPAFLRPRPFSGLPLSCGNRDVSVAVLPAAQSGAVRTENNIQRHFCTSRSICSKKVDQSVPANEISQKAAESQGRGKETLKKDLLDIIKDMKVDLSTANVKTPKPRGRKPSASLEATVDRLQKAPEDPPKKRNEFLSPELVAAASAVADSLPFDKQTTKSELLRQLQQHEEELRAQKDREKRRISFTHIISNMKIAKSPSGRASTRPQHQIQFDEDMDSSLKQEKPTDFRKRKYLFKGKRLSIFADKAFADEPPEPEASPSLWEIEFAKQLASVADQPFENGFEEMIQWTKEGKLWEFPVNNEAGLDDDGSEFHEHIFLDKYLEDFPKQGPIRLFMELVTCGLSKNPYLSVKQKVEHIEWFRNYFNEKRDILKENNIAFT

SEQ ID NO: 4416 - DNA, 1202 bp, Homo sapiens; identical to SEQ ID NO: 4412
  ref <308>: DATABASE ACCESSION NUMBER: EMBL / Z68747
  ref <309>: DATABASE ENTRY DATE: 1996-09-16

SEQ ID NO: 4417 - protein, 395 aa, Homo sapiens
  ref <308>: DATABASE ACCESSION NUMBER: SWISS-Prot / CAA92951
  ref <309>: DATABASE ENTRY DATE: 2002-06-15
MFPRVSTFLPLRPLSRHPLSSGSPETSAAAIMLLTVRHGTVRYRSSALLARTKNNIQRYFGTNSVICSKKDKQSVRTEETSKETSESQDSEKENTKKDLLGIIKGMKVELSTVNVRTTKPPKRRPLKSLEATLGRLRRATEYAPKKRIEPLSPELVAAASAVADSLPFDKQTTKSELLSQLQQHEEESRAQRDAKRPKISFSNIISDMKVARSATARVRSRPELRIQFDEGYDNYPGQEKTDDLKKRKNIFTGKRLNIFDMMAVTKEAPETDTSPSLWNVEFAKQLATVNEQPLQNGFEELIQWTKEGKLWEFPINNEAGFDDDGSEFHEHIFLEKHLESFPKQGPIRHFMELVTCGLSKNPYLSVKQKVEHIEWFRNYFNEKKDILKESNIQFN

SEQ ID NO: 4418 - DNA, 610 bp, Rattus norvegicus; identical to SEQ ID NO: 4411
  ref <308>: DATABASE ACCESSION NUMBER: EMBL / AA799656
  ref <309>: DATABASE ENTRY DATE: 2000-03-03

SEQ ID NO: 4419 - DNA, 1202 bp, Homo sapiens; identical to SEQ ID NO: 4412
  ref <308>: DATABASE ACCESSION NUMBER: EMBL / Z68747
  ref <309>: DATABASE ENTRY DATE: 1996-09-16

SEQ ID NO: 4420 - protein, 396 aa, Homo sapiens; identical to SEQ ID NO: 4413
  misc_feature (1)..(396): Xaa=Unknown amino acid

SEQ ID NO: 4421 - DNA, 610 bp, Rattus norvegicus; identical to SEQ ID NO: 4411
  ref <308>: DATABASE ACCESSION NUMBER: EMBL / AA799656
  ref <309>: DATABASE ENTRY DATE: 2000-03-03

SEQ ID NO: 4422 - protein, 384 aa, Rattus norvegicus; identical to SEQ ID NO: 4415
  ref <308>: DATABASE ACCESSION NUMBER: SWISS-Prot / CAA87087
  ref <309>: DATABASE ENTRY DATE: 2002-06-15

SEQ ID NO: 4423 - DNA, 1202 bp, Homo sapiens; identical to SEQ ID NO: 4412
  ref <308>: DATABASE ACCESSION NUMBER: EMBL / Z68747
  ref <309>: DATABASE ENTRY DATE: 1996-09-16

SEQ ID NO: 4424 - protein, 395 aa, Homo sapiens; identical to SEQ ID NO: 4417
  ref <308>: DATABASE ACCESSION NUMBER: SWISS-Prot / CAA92951
  ref <309>: DATABASE ENTRY DATE: 2002-06-15

SEQ ID NO: 4425 - DNA, 502 bp, Rattus norvegicus
  ref <308>: DATABASE ACCESSION NUMBER: EMBL / AA799657
  ref <309>: DATABASE ENTRY DATE: 2000-03-03
gctgggcaaacgacctttatttataaaggaaacagtttccgcgtcattataaacagtaagccacatggtgtgaaggcacttggttggggagatgggggcctcacacaggccccaaggcttctgggagaaatggaggctgctgggaagaacggggacttccaggtgagaggaagaaaggactcagagagaaatgaaggggtgggtagcctcccaggctcagctgggatagtgcagtggcttgctgccagtaggaggcacttagaaccagatctgatttggcaagtgtgtgtgttgggggtggggtgggagttcctgcccccaaatgtccccagcccaacctcaccccaatgcttaaggcagcttcataatcttcagtctggggctgccctcccttgagccgcccttgagcagagaatttccggtgcaggcagaacctctgaagaatagccgcatattacttagatggatccggcaggtctgggtggcaagcatgctggcggtg

SEQ ID NO: 4426 - DNA, 2620 bp, Homo sapiens
  ref <308>: DATABASE ACCESSION NUMBER: Refseq / NM_006663
  ref <309>: DATABASE ENTRY DATE: 2001-12-10
gcggccgcgtcgacaaacaagtgagtctcggctggagtgcagtggtgcagtggtgcaatctcggctcactgcaacctccgcctcctgggttcaagcgattcctgtgcctcggccttccgagtagctgggattgcaggcgtgtgccaccacgcccggctaatttttttttttttttttttttttttgtatttttagtagagacagggttcttaccatgttggccaggctggtctcaaactcctgatctcaagagatgtggcctgcctccggcctcccaaagttctgggattacagggtgttgagccactctgactcagccaataatgcatatttttatttccacctgctttactgtcagaatgagtaagacagagaagaaatcattaaacaccaggattctacttgcctgctggagttttctgcctgagatgttaggagaggaaactctcaggatctcagaaaatcacatctatcacggttggtagaagtagattctagagtcagccagaatgagttcaagtcccaactgcatggctttgggcaactgactgtcctctctgaggcccagattccctttcggtaatgtggagatggcagtgtatctacctcacaaagcagtggtgagattacaataaggtaggcatgtaaagcgccaggcacatactaactgctcaataaatgggaggcatcataattgtatattattcacagcccaaggaaagtgtagcccagagagggcaaggaacttgaccctgaggtcaacacagaaaatcatgtgctggttgtatgccctggaagttgtggagagggagtgttgggtgtcttcctggggacctgtcctctgatgggctcttgttccggctaggaccccccaaaccccccaccgagctggagcctgagccggagatagaggggctgctgacaccagtgctggaggctggcgatgtggatgaaggaccctgtagcaaggcctctcagccccacgaggctgcagccagcactgccaccggaggcacagtcggtgcccgagctggaggaggtggcacgggtgttggcggaaattccccggcccctcaaacgcaggggctccatggagcaggcccctgctgtggccctgccccctacccacaagaaacagtaccagcagatcatcagccgcctcttccatcgtcatggggggccagggcccggggggcggagccagagctgtcccccatcactgagggatctgaggccagggcagggccccctgctcctgccccaccagctcccattccaccgcccggccccgtcccagagcagcccaccagagcagccgcagagcatggagatgcgctctgtgctgcggaaggcgggctccccgcgcaaggcccgccgcgcgcgcctcaaccctctggtgctcctcctggacgcggcgctgaccggggagctggaggtggtgcagcaggcggtgaaggagatgaacgacccgagccagcccaacgaggagggcatcactgccttgcacaacgccatctgcggcgccaactactctatcgtggatttcctcatcaccgcgggtgccaatgtcaactcccccgacagccacggctggacacccttgcactgcgcggcgtcgtgcaacgacacagtcatctgcatggcgctggtgcagcacggcgctgcaatcttcgccaccacgctcagcgacggcgccaccgccttcgagaagtgcgacccttaccgcgagggttatgctgactgcgccacctacctggcagacgtcgagcagagtatggggctgatgaacagcggggcagtgtacgctctctgggactacagcgccgagttcggggacgagctgtccttccgcgagggcgagtcggtcaccgtgctgcggagggacgggccggaggagaccgactggtggtgggccgcgctgcacggccaggagggctacgtgccgcggaactacttcgggctgttccccagggtgaagcctcaaaggagtaaagtctagcaggatagaaggaggtttctgaggctgacagaaacaagcattcctgccttccctccagacctctccctctgttttttgctgcctttatctgcacccctcaccctgctggtggtggtccttgccaccggttctctgttctcctggaagtccagggaagaaggagggccccagccttaaatttagtaatctgccttagccttgggaggtctgggaagggctggaaatcactggggacaggaaaccacttccttttgccaaatcagatcccgtccaaagtgcctcccatgcctaccaccatcatcacatcccccagcaagccagccacctgcccagccgggcctgggatgggccaccacaccactggatattcctgggagtcactgctgacaccatctctcccagcagtcttggggtctgggtgggaaacattggtctctaccaggatccctgccccacctctccccaattaagtgccttcacacagcactggtttaatgtttataaacaaaatagagaaactttccttataaataaaagtagtttgcacagaaaaaaaaaaaacacaaccttcggccgccccaccaagctctgtctccaaaaaaaaaaaaaaaaaaaaaaaaa

SEQ ID NO: 4427 - DNA, 478 bp, Rattus norvegicus
  ref <308>: DATABASE ACCESSION NUMBER: EMBL / AA799663
  ref <309>: DATABASE ENTRY DATE: 2000-03-03
ccagcctcaaagttttattatcaactgtgcacattcgagttcacatcccatggtgtacagcttataacacggacagtgagagacggcaggggctgcgtgagccatttggtgaaatggtcttgctcagaacccacagtcctgggcaagcaggggcctaagagatcccaggttccacacctcagcattgagcaaatgcacacagagtccttgtgcatacggaactactgaacgcaaacaaatacagggtctccagtttctggtgccataggtggcagagcggacacacacagctgcatacttgctcagtattggctgaatatactcctggccctggtcctcaatggctgggtctggcagctgtgcctcctcattgttgaggacttctaggagctgggtgacaagaatgtccttagggagtgactcgctccgctccactgcttccgtgaagagttgcttgccaaagcacagcttcttccag

SEQ ID NO: 4428 - protein, 276 aa, Rattus norvegicus
  ref <308>: DATABASE ACCESSION NUMBER: SWISS-Prot / CAA52612
  ref <309>: DATABASE ENTRY DATE: 2002-06-15
MCIIFFKFDPRPVSKNAYRLILAANRDEFYNRPSKLADFWGNNSEILSGLDMEEGKAGGTWLGISTRGKLGALTNYLQPRQEPDARGRGELVSHFLTSDMDSLSYLKKVSTEGHLYNGFNIIAADLSTSKGDVVCYYGNRGEPEPIVLTPGTYGLSNALLETPWKKLCFGKQLFMEAVEQSEALPKDVLVTQLLDVLNNEEAQLPDPAIEDQGQEYVQPILNKYAAVWCRCASYGTRTNTIILVDANGHVTFTERSMLDKDTSRWETNTYEFTLQS

SEQ ID NO: 4429 - DNA, 661 bp, Homo sapiens
  ref <308>: DATABASE ACCESSION NUMBER: EMBL / BG699621
  ref <309>: DATABASE ENTRY DATE: 2001-05-08
agcggagtcggcggcggtggcggaggcgacctcgcgacctgtgtcagcagagccgccctgcaccaccatgtgcatcatcttctttaagttgatcctagccctgtttccaaaaacgcgtacaggtaaccccctcgctctgcatctgctgcgccctgcagggtcctgggtgcccagccagttctcatgccacccaagctgctgtgtgcaggaaggtgtgtgggccaggacggggctgcacaggcctggcactgccctccaggacagggtcactcagtgtgggatgctgtcagaatgcctctcggggcggggactccagtcaatgtacaaagacgtgaagactcagccacagaaggcagccacaggctcatcttggcagccaacagggatgaattctacagccgaccctccaagttagctgacttctgggggaacaacaacgagatcctcagtgggctggacatggaggaaggcaaggaaggaggcacatggctgggcatcagcacacgtggcaagctggcagcactcaccaactacctgcagccgcagctggactggcaggcccgagggcgagcacctacgggctgagcaacgcgctgctggagactccctggaggaagctgtgctttgggaagcagctcttcctggaggctgtggaacggag

SEQ ID NO: 4430 - DNA, 478 bp, Rattus norvegicus; identical to SEQ ID NO: 4427
  ref <308>: DATABASE ACCESSION NUMBER: EMBL / AA799663
  ref <309>: DATABASE ENTRY DATE: 2000-03-03

SEQ ID NO: 4431 - protein, 276 aa, Rattus norvegicus; identical to SEQ ID NO: 4428
  ref <308>: DATABASE ACCESSION NUMBER: SWISS-Prot / CAA52612
  ref <309>: DATABASE ENTRY DATE: 2002-06-15

SEQ ID NO: 4432 - DNA, 661 bp, Homo sapiens; identical to SEQ ID NO: 4429
  ref <308>: DATABASE ACCESSION NUMBER: EMBL / BG699621
  ref <309>: DATABASE ENTRY DATE: 2001-05-08

SEQ ID NO: 4433 - DNA, 478 bp, Rattus norvegicus; identical to SEQ ID NO: 4427
  ref <308>: DATABASE ACCESSION NUMBER: EMBL / AA799663
  ref <309>: DATABASE ENTRY DATE: 2000-03-03

SEQ ID NO: 4434 - protein, 276 aa, Rattus norvegicus; identical to SEQ ID NO: 4428
  ref <308>: DATABASE ACCESSION NUMBER: SWISS-Prot / CAA52612
  ref <309>: DATABASE ENTRY DATE: 2002-06-15

SEQ ID NO: 4435 - DNA, 661 bp, Homo sapiens; identical to SEQ ID NO: 4429
  ref <308>: DATABASE ACCESSION NUMBER: EMBL / BG699621
  ref <309>: DATABASE ENTRY DATE: 2001-05-08

SEQ ID NO: 4436 - DNA, 478 bp, Rattus norvegicus; identical to SEQ ID NO: 4427
  ref <308>: DATABASE ACCESSION NUMBER: EMBL / AA799663
  ref <309>: DATABASE ENTRY DATE: 2000-03-03

SEQ ID NO: 4437 - protein, 276 aa, Rattus norvegicus; identical to SEQ ID NO: 4428
  ref <308>: DATABASE ACCESSION NUMBER: SWISS-Prot / CAA52612
  ref <309>: DATABASE ENTRY DATE: 2002-06-15

SEQ ID NO: 4438 - DNA, 661 bp, Homo sapiens; identical to SEQ ID NO: 4429
  ref <308>: DATABASE ACCESSION NUMBER: EMBL / BG699621
  ref <309>: DATABASE ENTRY DATE: 2001-05-08

SEQ ID NO: 4439 - DNA, 541 bp, Rattus norvegicus
  ref <308>: DATABASE ACCESSION NUMBER: EMBL / AA799667
  ref <309>: DATABASE ENTRY DATE: 2000-03-03
ataggcccacttgcccagcaggttgcaggtgatgggttcacattttctaggctcaaggatgggcggcctctgcataccacaggtgtctgagtggcagcatggagcttgctgggcaggaggtaggcgcagatcaactgggtcagctatttaaaggtggtctccagcactggccaaaggggcacttgaatgaagcactgtcacataggtgccccacaagcaagcccagaaaagcagctcagcctggggagcctggcgcctctcccacagtgagggccaggccaggcagagggtgctccacgtttgtcaggaagggctcccttgttcaaatcacattcataggcacagcttcagacgtcagcaggacatggagaaagcaggctgacccggccacagccccacatgacccacccatcctctttaggtgctggtgtttcaatgaggccctgaggggaatggccagctgtcttccacccaggaccacgcataggcctcccagcttctctctccccaacagggcactgtgcaggaagtccagaaaaat

SEQ ID NO: 4440 - protein, 229 aa, Rattus norvegicus
  ref <308>: DATABASE ACCESSION NUMBER: SWISS-Prot / CAB56623
  ref <309>: DATABASE ENTRY DATE: 2002-03-01
GTRIASVDHIKFDLEIAVEQQLGAQPLPFPGMDKSGAAVCEFFLKAACGKGGMCPFRHISGEKTVVCKHWLRGLCKKGDQCEFLHEYDMTKMPECYFYSKFGECSNKECPFLHIDPESKIKDCPWYDRGFCKHGPLQHRHTRRVICVNYLVGFCPEGTSCKFMHPRFELPMGTTEQPPLPQQNSSNKPKPPRSLGPAKSNTMQATGTPAPEQFLATICEKEDMCFRWFP

SEQ ID NO: 4441 - DNA, 1717 bp, Homo sapiens
  ref <308>: DATABASE ACCESSION NUMBER: Refseq / NM_006693
  ref <309>: DATABASE ENTRY DATE: 2002-11-05
tcgctcgctcctccttcgcttcgcctcgccgccgccatgcaggaaatcatcgccagcgtggaccacatcaagtttgacttggagatcgcggtggagcagcagctgggggcgcagccgctgcccttccccggcatggacaagtcgggcgctgctgtctgtgaattctttttgaaagctgcctgcggcaaagggggcatgtgtccgtttcgccacatcagtggtgagaagacagttgtgtgcaaacactggctgcgtggcctatgcaagaaaggggaccagtgtgagttcctgcatgagtatgacatgaccaagatgcccgagtgctacttctactccaagttcggggagtgcagcaacaaggaatgtcccttcctgcacatcgaccccgagtccaagatcaaggactgtccttggtatgaccgcggcttctgcaagcacggtcccctctgcaggcaccggcacacacggagagtcatctgtgtgaattacctcgtgggattctgcccggaggggccctcgtgtaaattcatgcaccctcgatttgaactgcccatgggaaccaccgagcagcccccactgccacagcagacacagcctccagcaaagcaaagtaacaatccgccattacaaaggtcgtcctccttgatccagttaacgagtcagaactcttctcccaatcagcagagaaccccgcaggtcatcggggtcatgcagagtcaaaacagcagcgcgggcaaccggggaccccggccactggagcaggtcacctgttacaagtgtggcgagaaaggacactacgccaacagatgcaccaaagggcacttggcctttctcagtggacagtgacagcagctggagccagctccgagcagcccgggggccccgctgttgggagtgtgcatttaactgtttcatgcgcttgttggcgcgactgtggctcgagctggcccgcagacacgtgggtttcatcactctgaggggccacgtctgttagtttcctatcattttgccgtagtattttttgaaaaagggacatgtgtcctgtgggtccctgcagtcgacatcatgtttggctgggcatcgatgcctcctttctgggactcccggcacaactcccctcatccagggagggaggcagctgctggggaggggcttggctaggtagttctgtgtggcggtggtcattcccctcattaaacaccagttcttggtgacgccaggggctggtaggtcattcaaagctgtggccagctcacgcctgcttcctccctccctgccctgctgaatcctaaagctgtgcctatatctgtgatttgaatgagggagccctttggggcaaattcaggtgcccccattgcctcaggctggccctggtcccaggtggcagcggttgaggaggggtacagggctctcaagcctgaggttttcttctctgggcttaattttctcttggggtacgtgcctgacagtgtttaaggtgtccgttgaactggagttgcagacttttaaatagatgaccccttcagatcatctgtgcctacctcctgcccatcaggcgtctacactgtcactcagacacctgtggcatgtggaggagactgccctgtcctgagcctggaaaatgtgaaactgtctcctgcaacctgctgggcatgtgggcctggctgtgttcaattgcaagaacaatttttatgaaatggattaaagcttgtttttt

SEQ ID NO: 4442 - protein, 269 aa, Homo sapiens
  ref <308>: DATABASE ACCESSION NUMBER: Refseq / NP_006684
  ref <309>: DATABASE ENTRY DATE: 2002-11-05
MQEIIASVDHIKFDLEIAVEQQLGAQPLPFPGMDKSGAAVCEFFLKAACGKGGMCPFRHISGEKTVVCKHWLRGLCKKGDQCEFLHEYDMTKMPECYFYSKFGECSNKECPFLHIDPESKIKDCPWYDRGFCKHGPLCRHRHTRRVICVNYLVGFCPEGPSCKFMHPRFELPMGTTEQPPLPQQTQPPAKQSNNPPLQRSSSLIQLTSQNSSPNQQRTPQVIGVMQSQNSSAGNRGPRPLEQVTCYKCGEKGHYANRCTKGHLAFLSGQ

SEQ ID NO: 4443 - DNA, 616 bp, Rattus norvegicus
  ref <308>: DATABASE ACCESSION NUMBER: EMBL / AA799672
  ref <309>: DATABASE ENTRY DATE: 2000-03-03
aaccttatgaagcagtttaattaggttgttaacaattagaacaccagtttgtgagggtacatgccgttcgtcagggagaactgagaccgcaggtagccctggagctgggggacagctttgatctttggcaaaatctgcgagtccacagctttctgatcagcctttcgctgctctgtaatttcgtatttctccttctctgtgtcgaagatctcaccctcctgatgcctgggcttgcgaagtggcttcttcttgaagtaagcatcagtcaggtgtttgggaattttaaccttgctgatatcaacttttgtagaggtggcgatgacaaacttctggtgtgtcctacgcagaggaactctgttgagggcaagaggtccagtcacaagtagcaaggaccttttctttcttcttcttcttctcaacctttgtcttggcagcagagtatttccttttgtacaaggcctttctggaatacatagcagatcgtgaatacctgccgattcctctcaccaggacagggttccggctgcaatggggcttactcttcctcagctttttagccttagaactactctttttgaccgcaccagcgggccgggcccggggggcagtagcatca

SEQ ID NO: 4444 - protein, 296 aa, Rattus norvegicus
  ref <308>: DATABASE ACCESSION NUMBER: SWISS-Prot / P21533
  ref <309>: DATABASE ENTRY DATE: 2001-10-16
AGEKAEKPDKKEQKPAAKKAGGDATAPRAGAWCVKKSSSKAKKLRKSKPHCSRNPVLVRGIGRYSRSAMYSRKALYKRKYSAAKTKVEKKKKKEKVLATVTKTVGGDKNGGTRVVKLRKMPRYYPTEDVPRKLLSHGKKPFSQHVRRLRSSITPGTVLIILTGRHRGKRVVFLKQLGSGLLLVTGPLALNRVPLRRTHQKFVIATSTKVDISKVKIPKHLTDAYFKKKPLRKPRHQEGEIFDTEKEKYEITEQRKADQKAVDSQILPKIKAVPQLQGYLRSQFSLTNGMYPHKLVF

SEQ ID NO: 4445 - DNA, 252 bp, Homo sapiens
  misc_feature (1)..(252): n=a, c, g or t
  ref <308>: DATABASE ACCESSION NUMBER: EMBL / AA307406
  ref <309>: DATABASE ENTRY DATE: 2000-03-08
tgcaagatggcgggtgaaaaagttgagaagccagatactaaagagaagaaacccgaagccaagaaggttgatgctggtggcaaggtgaaaangggtaacctcaaagctaaaaagcccaaganggggaagccccattgcagccgcaaccctgtccttgtcagaggaattngcaggtattcccgatctgccatgtattccagaaaggccatgtacaagaggaagtactcagccgctaaatccaaggttgaaaag

SEQ ID NO: 4446 - DNA, 461 bp, Rattus norvegicus
  misc_feature (1)..(461): n=a, c, g or t
  ref <308>: DATABASE ACCESSION NUMBER: EMBL / AA799681
  ref <309>: DATABASE ENTRY DATE: 2000-03-03
ggatacggttgctgtttggcatctctcaagatccctcgtcctactgtgtgtgatgcataaggaaacggcagctcctggagggtacaatggagccacatagacagtcggggattggtcttggactgacaactgcatggatctaagaaaacagccgtacctaggctctccccgggtacagagaaaggggtctccaattctctggtccaggggaagtggtttaggctttagataacacggcatggtgattctgtggtctttactggagacttcaggctctgggggatggtctgttccatccgagagaagagttcctggtggctgggcatcctggatggccgtgacgaacttgccaccgtgatcccccacggtgtccaccagggctacctgcgattcctccccatctcggtaagtcagatggatcgatagatggtcacttcagcanctaaactgacagaacatan

SEQ ID NO: 4447 - DNA, 628 bp, Rattus norvegicus
  ref <308>: DATABASE ACCESSION NUMBER: EMBL / AA799691
  ref <309>: DATABASE ENTRY DATE: 2000-03-03
agaactttactcttctactaacaaagtcatacaaaggcaaaagcctataaaaaggaaaacatgaaactgatctgaatggccacagttaccaggaacacggagtctgcgagataaggaggctggacactcttgacaggcagctcttgtaagcagtgacccagaacctgaaagggccacctgcccaaggcattcctgacagctgggagcagcgccccacctgctctgctctagacatcgagggctcaggagtctgagccaagtccagtgctgagtcaaaagcaggtgtggaaatcactaccctgatggggacacacaccgggcagcagttacttggcaagcctacctctggctgcctaacaaagtctgaagaaactgtgcaggtgcaaacttggcttctaccctaaccagaacgtcgtgagtgtggacggggttgattctctcggaggaagccagagatgcccagagcctggcagcacggggcatccacacagaagctatctctatcaagcttccccagggagggttaaataaataaatatgccacacacaatgtgaggaacggatcactgctgttgcccacagcctgtgaacaaaccatgacctacagaacagaatgcccaaagggtaa

SEQ ID NO: 4448 - protein, 1083 aa, Rattus norvegicus
  ref <308>: DATABASE ACCESSION NUMBER: SWISS-Prot / AAD38328
  ref <309>: DATABASE ENTRY DATE: 2003-02-01
MPTNFTVVPVEARADGAGDEAAERTEEPESPESVDQTSPTPGDGNPRENSPFINNVEVERESYFEGKNMALFEEEMDSNPMVSSLLNKLANYTNLSQGVVEHEEDEDSRRREVKAPRMGTFIGVYLPCLQNILGVILFLRLTWIVGAAGVMESFLIVAMCCTCTMLTAISMSAIATNGVVPAGGSYYMISRSLGPEFGGAVGLCFYLGTTFAGAMYILGTIEIFLTYISPSAAIFQAETADGEAAALLNNMRVYGSCALALMAVVVFVGVKYVNKLALVFLACVVLSILAIYAGVIKTAFAPPDIPVCLLGNRTLANRNFDTCAKMQVVSNGTVTTALWRLFCNGSSLGATCDEYFAQNNVTEIQGIPGVASGVFLDNLWSTYSDKGAFVEKKGVSSVPVSEESRPGGLPYVLTDIMTYFTMLVGIYFPSVTGIMAGSNRSGDLKDAQKSIPTGTILAIVTTSFIYLSCIVLFGACIEGVVLRDKFGEALQGNLVIGMLAWPSPWVIVIGSFFSTCGAGLQSLTGAPRLLQAIARDGIIPFLQVFGHGKANGEPTWALLLTALICETGILIASLDSVAPILSMFFLMCYMFVNLACAVQTLLRTPNWRPRFKFYHWTLSFLGMSLCLALMFICSWYYALFAMLIAGCIYKYIEYRGAEKEWGDGIRGLSLNAARYALLRVEHGPPHTKNWRPQVLVMLNLDSEQCVKHPRLLSFTSQLKAGKGLTIVGSVLEGTYLDKHVEAQRAEENIRSLMSAEKTKGFCQLVVSSNLRDGASHLIQSAGLGGMKHNTVLMAWPEAWKEADNPFSWKNFVDTVRDTTAAHQALLVAKNIDLFPQNQERFSDGNIDVWWIVHDGGMLMLLPFLLRQHKVWRKCRMRIFTVAQVDDNSIQMKKDLQMFLYHLRISAEVEVVEMVENDISAFTYEKTLMMEQRSQMLKQMQLSKNEREREAQLIHDRNTASHTTATARTQAPPTPDKVQMTWTKEKLIAEKHRNKDTGPSGFKDLFSLKPDQSNVRRMHTAVKLNGVVLNKSQDAQLVLLNMPGPPKSRQGDENYMEFLEVLTEGLNRVLLVRGGGREVITIYS

SEQ ID NO: 4449 - DNA, 637 bp, Rattus norvegicus
  ref <308>: DATABASE ACCESSION NUMBER: EMBL / AA799700
  ref <309>: DATABASE ENTRY DATE: 2000-03-03
ccaacaaagtcccttttatttagttagctgttaagaaattttttttattaattaaatctctggaaattttcagtgtaagatttagtatcttaacggccgccaacacctggctctgaggtttgatcagccgctcccagtccttattaggagttagagggagaaacatcattatcagagaccaagtcaggtggctatggccttcctttcctggctggacaagttgctcaactcttgctcagaacaggaaaagaggcagttgctcagaaaaataattaatgacaaatttgacaataaatcagtaagagttctcctaacaatttagacttatcaatatgttggtccagataatttttttcatgttgcagtttacttttttctgtatgtaatcttaataatcttactccctgtgcagaaatgaatcaactcagtgcaaaaaatccctaaaactggaatagcctcatcttgctttgggaaaaggtttttttactcctcattctctcaacagatgagcacacatcccctgcacttctgggtctggatgtacacaggcagcttttgatggaactagcaaaagtacctagaggcactatgccggcagcctttggaaaggtcttaaaatcaaccctggccaacagtc

SEQ ID NO: 4450 - protein, 452 aa, Rattus norvegicus
  misc_feature (1)..(452): Xaa=Unknown amino acid
  ref <308>: DATABASE ACCESSION NUMBER: Refseq / NP_033292
  ref <309>: DATABASE ENTRY DATE: 2002-01-07
MAEAAAAGASGETMAALVAAEGSLGPAGWSAGRSFSNYRPFEPQTLGFSPSWRLTSFSGMKGXGCKVPQETLLKLLEGLTRPALQPPLTSGLVGGQEETVQEGGLSTRPGPGSAFPSLSIGMDSCVIPLRHGGLSLVQTTDFFYPLVEDPYMMGRIACANVLSDLYAMGITECDNMLMLLSVSQSMSEKEREKVTPLMIKGFRDAAEEGGTAVTGGQTVVNPWIIIGGVATVVCQQNEFIMPDSAVVGDVLVLTKPLGTQVAANAHQWLDNPEKWNKIKMVVSREEVELAYQEAMFNMATLNRTAAGLMHTFNAHAATDITGFGILGHSQNLAKQQKNEVSFVIHNLPIIAKMAAISKASGRFGLLQGTSAETSGGLLICLPREQAARFCSEIKSSKYGEGHQAWIVGIVEKGNRTARIIDKPRVIEVLPRGASAAAAAAPDNSNAASEPSS

SEQ ID NO: 4451 - DNA, 2253 bp, Homo sapiens
  ref <308>: DATABASE ACCESSION NUMBER: Refseq / NM_012248
  ref <309>: DATABASE ENTRY DATE: 2002-11-08
gtgcatgccgtgggtctgacggcttgagtagcgctagggagaatccctgcaggtaatatttgacttttgcttcatattaatctgagtggaaaataaaagggccctcttctcctctcgcttccctgccgggcaggcgccatggcggaagcctcggcgacgggcgcctgcggagaggcgatggcagcggcggaaggctcctcgggcccggcgggcttgactctgggccggagcttctcgaactaccggcccttcgagccccaggcgttgggcctcagcccgagctggcggctgacgggcttctccggcatgaagggctgaggctgcaaggtcccgcaggaggcgctgctcaaactcctggcgggactgacgcggccggacgtgcggcccccgctgggccggggcctggtgggtggccaggaagaggcgtcccaggaagccggcctgccggcaggagcgggccccagccccacctttccagccctgggcatcgggatggactcctgcgtcatccccctgaggcacgggggcctgtcactggtgcagaccacggacttcttttaccccttggtagaagatccctacatgatggggcgcatagcttgtgccaacgtgctgagtgacctctacgccatggggattactgagtgtgacaacatgttgatgttactcagcgtcagccagagtatgagtgaggaggaacgcgaaaaggtaacgccactcatggtcaaaggctttcgggatgcggctgaggaaggagggacggcagtgaccggtgggcaaacggtggtcaacccttggattataatcggtggagttgccactgtagtatgccaaccaaatgagttcataatgccggacagcgccgtcgttggggacgtgctggtgttaaccaaaccgttaggaacccaggttgctgtcaatgcccaccaatggctggataatcctgaaagatggaataaagtaaagatggtggtctccagagaagaggtggagctggcctatcaggaagccatgttcaatatggctaccctcaacagaactgctgcaggtttaatgcacacatttaatgcccatgcggccacagatatcacaggctttggcattctaggacactcccagaaccttgcaaaacaacaaagaaatgaagtgtcctttgttattcataatctgccaataattgccaagatggctgccgtcagcaaggccagtggacggtttgggcttcttcaaggaacctcagctgaaacctctgggggattactgatttgtctgccaagagaacaggcggctcgcttttgttctgaaatcaaatcctccaagtacggagagggtcaccaagcgtggatcgttggcattgtggaaaagggaaaccgaacggcccggatcattgacaagccgcgagttattgaagtcctgcctcgtggggccacagctgctgttcttgctcctgacagttcaaatgcctcctctgagcctagctcgtgagatgaaagaacagaagttgtttggaccttagagccattgtccacaatcacggatggttctcaagagttgattgtaagaaatttccaaagaaggctgcctgcatagtggttccggctgccctttctaggtgattggaatcagcccatctaaagcagtctttatatgcattccgaggccagagtaacattttgaactttggggggatatttgttcatcacttgggtagaagaggagcaaaaatacttctgttttctcttgccaaagtaagatgaagctattccaggttgagggatttttctttgcacggggttgattaatttctgcacagggagtgagattattaaagtaacacacacacaaagtaaattgcaaaatgaaaaaaattagaagcaaatgagttttggaccaatattgttgataaatctaaattgttaagagagatcttataatgcaacatcaaattctttattcaattttactgaagtactggctctttcctgctctggacaagaattgagcaacttgtctgatgactgggaaaggaggacctgcaaccatctgacttggtctctgttaatgacgtctctccctctaaaccccattaaggactgggagaggcagagcaagcctcagagcccaggcctcagtggtcattaagatgttaagtcttttgcggcagattcctggtgatttgatcaataaagagtaatttcttgctaaataaataaaagaaaccttgttgaaaaactaaaaaaaaaaaaaaaaaaa

SEQ ID NO: 4452 - protein, 448 aa, Homo sapiens
  ref <308>: DATABASE ACCESSION NUMBER: SWISS-Prot / Q99611
  ref <309>: DATABASE ENTRY DATE: 2002-06-15
MAEASATGACGEAMAAAEGSSGPAGLTLGRSFSNYRPFEPQALGLSPSWRLTGFSGMKGCGCKVPQEALLKLLAGLTRPDVRPPLGRGLVGGQEEASQEAGLPAGAGPSPTFPALGIGMDSCVIPLRHGGLSLVQTTDFFYPLVEDPYMMGRIACANVLSDLYAMGITECDNMLMLLSVSQSMSEEEREKVTPLMVKGFRDAAEEGGTAVTGGQTVVNPWIIIGGVATVVCQPNEFIMPDSAVVGDVLVLTKPLGTQVAVNAHQWLDNPERWNKVKMVVSREEVELAYQEAMFNMATLNRTAAGLMHTFNAHAATDITGFGILGHSQNLAKQQRNEVSFVIHNLPIIAKMAAVSKASGRFGLLQGTSAETSGGLLICLPREQAARFCSEIKSSKYGEGHQAWIVGIVEKGNRTARIIDKPRVIEVLPRGATAAVLAPDSSNASSEPSS

SEQ ID NO: 4453 - DNA, 586 bp, Rattus norvegicus
  ref <308>: DATABASE ACCESSION NUMBER: EMBL / AA799711
  ref <309>: DATABASE ENTRY DATE: 2000-03-03
aagtaagtacactgtcgctgtcttcagacacaccagaaaaggggatcagatctcattacagatggttgtgagccatcacgtggttgctgggatttgaactcaggacctctggaagagcattcagtgctattaactgctgagccatctctccagctcctgacctagttttaaatgtcaattcccacaggtttcagatttctgcccaagctttaagtgatccttgtctaaacagcatttctaattgtaggcttttctgtaacggtgccttgtggcaagtctaatggagtgcagccagctcccaggtaggtgtgttcatgggcccgttactatttcatgtgtatgtgaaagcacctcactcttgtcttttacacggttcttagacggctcagcttccccaagaactatcagtgaacaaggattaggcggttggtgccctcaagtgcacagtgtttcttttttttaaaaaaggttttgcttctctgtgtacaagtatcttgcttacacatatgtgcaccctggtgtctgaagcaaccagaagtcagtgctgtatcctctgtggctaaagctccagtcagctgtgaagtat

SEQ ID NO: 4454 - DNA, 586 bp, Rattus norvegicus; identical to SEQ ID NO: 4453
  ref <308>: DATABASE ACCESSION NUMBER: EMBL / AA799711
  ref <309>: DATABASE ENTRY DATE: 2000-03-03

SEQ ID NO: 4455 - DNA, 571 bp, Rattus norvegicus
  ref <308>: DATABASE ACCESSION NUMBER: EMBL / AA799718
  ref <309>: DATABASE ENTRY DATE: 2000-03-03
caaaaagagcaaacatgtaaaaatccagggtgctagaaatacaaactcaattcagattcaagcttgtctagaccctggtcataattcccagtgaggtgcctatgagcaccaagtcagggaacgggacaggagtgaatcggaggccaagagaaagggtggggaggggatctcctaggtctcccggtgttcacccctacagtggtatctccatcttcccaatgacttgaagatctgccaggcccagtcctcttggccccaacctcaccctaaccagagcatgaaggccgatggcaatcggttctcccttcccttgctcagtactcacttgctctggcttctagccttattcttgtcctccacattcttctccgtgattagtagcaggttgggttctgtagaaagccacagtgaggctgggggccagaagaggtggggtggagacgggatgaagacgagggaagagctgtcccaggacccctttcttcatgggatcccaaactgtacaaccagctcttctttcgcatccacgcggatctgagaaagtgcactataggcataagcagctatcctg

SEQ ID NO: 4456 - DNA, 461 bp, Homo sapiens
  ref <308>: DATABASE ACCESSION NUMBER: EMBL / AA806443
  ref <309>: DATABASE ENTRY DATE: 2000-03-03
tttttttttttctgtgaactcagattcaagttttaagaaataaacaaagtttggccttttctagtccaagatccctaagaggggaaaggagctggagcatgacttggacactattcccctggtgtggtgatctcaatttaaccagtattttaaaagcttcttatgtgcctagcatgatgctctgtcttcctgttgcttgctgtgatagaatcgtagatcaccaaagctggaaaggtcttcagtgaaggggcaactaaggctgagagagaggcaagtcagtggcagtgctggtacccaggcccacactcctgaccctcagatcacagctccttttcagtgtgatgccctgtatgtctgtactgcctggcacggtccatgtactcatgctgctccatgccctgtgagtctgcagcagacacatcaatgatgttgctggctgtcttggcaaggatggaagagag

SEQ ID NO: 4457 - DNA, 640 bp, Rattus norvegicus
  ref <308>: DATABASE ACCESSION NUMBER: EMBL / AA799724
  ref <309>: DATABASE ENTRY DATE: 2000-03-03
aaacaaaagcgagaatttattaggcaaacagacttgcagagattccaaaagctgtaatgggtcaatagctagagccacattttcctataggacagaacatgctgtagtcaccaattctagttctgggctctgtaccatcctgagggtggtcctgcttgtaccctgcacgagggactagagcgtgggttcgtttttgcttgcctttttatctttatagtcctttacgctggcctcaaacttgacaagcacatgctggcagacattcaagagctcattcaggcctttctgaaacggctcaacagctggaagtgcaccccgtgtctgaattcgcaaattaattttgctctctgaaggatgggtcgtagtgtaaccacaaaattccacttccgggttcttcatgattatgtaccgcagacaatttcctagtgtatggtcctcctcgtgtagtacaaatgtcacacactgtctatctgttccagctgcctggaccatttccagggctgtcttcctctcgccttcagccattgaggtcttcaatcctgatatttttctctccagctcctgatcgtcctccatcgcggggggcggctccgggaaatcctcaggtggcgctggcgaaaaggaagctcttccccatgtc

SEQ ID NO: 4458 - protein, 133 aa, Rattus norvegicus
  ref <308>: DATABASE ACCESSION NUMBER: Refseq / NP_033113
  ref <309>: DATABASE ENTRY DATE: 2002-01-07
MEDDQELERKISGLKTSMAEGERKTALEMVQAAGTDRQCVTFVLHEEDHTLGNCLRYIIMKNPEVEFCGYTTTHPSESKINLRIQTRGALPAVEPFQKGLNELLNVCQHVLVKFEASIKDYKAKKASKKEPTF

SEQ ID NO: 4459 - DNA, 726 bp, Homo sapiens
  ref <308>: DATABASE ACCESSION NUMBER: Refseq / NM_015972
  ref <309>: DATABASE ENTRY DATE: 2002-11-19
gccttccttcctgcttcgcctccgcgcctcgcgctatgggacagagcccccgatccgccagcaccacctgaggatccagaaaccgccccagcgatggaagaggatcaggagctggagagaaaaatatctggattgaagacctcaatggctgaaggcgagaggaagacagccctggaaatggtccaggcagctggaacagatagacactgtgtgacatttgtattgcacgaggaagaccataccctaggaaattctctacgttacatgatcatgaagaacccggaagtggaattttgtggttacactacgacccatccttcagagagcaaaattaatttacgcattcagactcgaggtacccttccagctgttgagccatttcagagaggcctgaatgagctcatgaatgtctgccaacatgtgcttgacaagtttgaggccagcataaaggactataaggatcaaaaagcaagcagaaatgaatccacattctagtcctttatgcagtatacaaggagaactgtcctgtaggatattctcttcctgatggtgcagaacccagaattagaagtttgtggttacagcatactctgtccttcagaaaggcgtgattctagctgttgaccccttgcagctgttggaatctctgcaagaacctctgtattcttctaataaattccctcttttatttaaaaaaaaaaaaaaaaaaaaaaaaaaaaaaaaaaa

SEQ ID NO: 4460 - protein, 133 aa, Homo sapiens
  ref <308>: DATABASE ACCESSION NUMBER: SWISS-Prot / Q9Y2S0
  ref <309>: DATABASE ENTRY DATE: 2002-06-15
MEEDQELERKISGLKTSMAEGERKTALEMVQAAGTDRHCVTFVLHEEDHTLGNSLRYMIMKNPEVEFCGYTTTHPSESKINLRIQTRGTLPAVEPFQRGLNELMNVCQHVLDKFEASIKDYKDQKASRNESTF

SEQ ID NO: 4461 - DNA, 503 bp, Rattus norvegicus
  ref <308>: DATABASE ACCESSION NUMBER: EMBL / AA799726
  ref <309>: DATABASE ENTRY DATE: 2000-03-03
gacatttcacagtcaatttctacatgacttcacactttcttagaagaactcacatttggtagtctctaccctaaggagtcgcttcagtatatgggcagaagcaatgtgtctgctgaaggagtcataccagaaaagataggtcagacagtaccataatcaataaaaacagtgtagtacattacaaatgacagtgcattctataaccaatttcagtcgggaacctttctaactgtgtccgatattgccaatacaactgacaagggttctcctgtgggctggtctgagttaaaattgactcctcaccttgagaaaacaacggccctacataatgcttcagaagagctcatagcatgcactaaggccattgctactcacagccttgggcaaccaatgaagattcttctggtccactccagactttctctaagtgctggtctgctctcgggcctcaaaggattctctactggagtctgtctgcctccagctgctccaggaacagagca

SEQ ID NO: 4462 - DNA, 4221 bp, Homo sapiens
  ref <308>: DATABASE ACCESSION NUMBER: EMBL / AB051524
  ref <309>: DATABASE ENTRY DATE: 2001-02-07
agggcagtccagatgaaaagagtaccaatgaatctgcctccagctgaataaaccatggagaggaaaaacccatccagagagagccccagaagactctctgccaaagtaggcaaaggcacagagatgaagaaagtggctcgtcagcttgggatggctgctgctgagtcagacaaggactctggcttttcagatgggagctcggaatgtctgagctctgcagagcagatggagtccgaggacatgctgagcgccttaggctggagcagagaagacaggccgaggcagaactccaaaactgcaaagaatgccttccctaccctgtctcccatggtcgtcatgaagaatgtgcttgtcaaacagggcagcagctcatcccagctccagtcgtggactgtccagccctcctttgaagtgatctcagcacagccacagctcttattccttcatccacctgtaccatctcctgtcagtccatgtcacactggtgagaaaaagtccgactccaggaactacttgcccattctgaattcttacaccaaaatagccccacatccaggcaaaaggggcctttcccttggcccagaagaaaaaggaacaagtggagtgcagaagaaaatctgtactgagagacttgggcctagcttgtcttccagtgagccaaccaaggctggtgctgtcccatccagtccctcgacgccagcaccacccagcgccaaacttgccgaggactcagctctgcagggtgtgccctctctggtggcaggtggaagtccacagactcttcagccggtatccagcagtcacgtggctaaagctcccagtctgaccttcgcttcccccgccagtcctgtctgcgcatcagacagcactctccatgggttagagagcaactctcccctttcaccactgtccgctaattatagctcacctttatgggctgcagagcacctctgccgcagcccagatatcttttcagagcagcggcagagcaaacataggcgctttcagaataccctagtagtcctacataaatctggtttgctggagatcactttgaaaaccaaggagttgattcgtcagaatcaggcaactcaggtagaactagaccagctaaaggagcaaacccagctgtttatagaagccaccaagagcagggcccctcaggcttgggccaagctgcaggcatctttaacacctgggtccagtaatacaggcagtgacctagaagcattctctgatcacccagccatatagcacagaggcatattttcctgttacttgagtggttcttttagctcatttgctgttacctactcctgtttcccaaagcttatgtaagagcttttccttctaaacttaaactgtgttgtggttcacttaggaagccacgtgccaatacctggctgctgtcttaactcgtagtctgggcacaggatacatatgtccccgtcccactgaggacctcagtttgggagtgcccttgagccccttttccttagcctgcaggtgcttcaatggatcatggggcaaagcaggagatgattgtgtggggctcttcctgctgtcacctcccatcatcccactctctcaccaggatcaagggtacagtaacacgaatgagcatacagagcaacgcctgttgagccagggagtaggtgacacaaggaaaccttcatggatcttcccttgcctgtcttagtcacagagagaaataagaggaggttgtttgcatcccacaaggcatcgtactagttgggcgagacctaaaattccctgggcacaggttgcacctgggtgtgagcacttaatcactcaacgctttgttttcttacacttgaaaatcaagggaaagactagtaccatctgactcctacactttcattacaagtcagatttttcttaaactagcaggcaaaaacagtacttccaaattttaaggtatggaatgaatgcagtacatctggaattgtagtcgatgaattgcttttttgacttagaagctgaagaaaatagacatagccggcatatctcatggtcaggagctggacgattctggtaacttaggctttttttctctcttcttttgaaacagtgtaacctgttttatgtctaaatatcttaaggatagtttcagtggttcctgggatgtagtataagttaactctgctgccatcttgtttttttttttttcctttattttgataagtgattattatgcttgataaactttgaattaaatacagttgtcttgagggtatgataagtccacaaaaaattggaaagcatcttacccattttcttcacatcccaaatttttatttgttccatgtcatagtgatgggaagcagttacagagcagcgtcttctgtgtttccttcatgtgttagatattggcaacaaagccagaggtgtaatgttggttatatgaagttcatctcaaaatggagaccatgaccagagtttccagatgatacacgttcttttcagcttcattaaataggcaactatgtttctaaatagtaaagtttcaaaatattctctcaatttaaaatttcatcctcttgaaaatctttgttctttacaaaattatcttaataagttctatatggtcagcttcatcttccttttttttttttttgagatggagtttcgctcttgttgcccaggcggagtacaatggtgggatctcggctcactgcaacctccgcctcctgggttcaagtgattctcctgccacagcctcccaagtagctgggattacaggtgcctgccaccatgcccagctaatttttgtatttttagtagaaatggggttttaccgtgttggccaggctggtctcgaactcctgacctcagttgatccgcctgcctcagcctcccaaagtgctgggcttacaggcctgagccaccacgctcagctcagcttcaccctgtctgcaaagaaaagttttaccaagaccagaagtgaaatatgacatttcctaggtagttgtaactctaacatagtttaaaaagtatgtggcttcagattgcctatactttgttcacaaacgtgtgatttagatatgactgatttagaagtgaacaacttggtaacatccctagactccactcatgaacgcagaattattacctgctgtttgctttctgaaagaatttcagaaatcagagcaaatgtgtctttaggcagattcagctccttttaatatttttctcttggcccactctctttgcctcccctgaatctgtgtggtactatagcagctctactctgtgcaccatgctaggaagcttcctttttggcagaatatgtttggcagcaaagctatagagacaggtgcattcagaacatcctgggcaccagtcatgagtcttactgtgtcaaaaatctgaaaacacttgctgagaaccaaatttattccattggaaaaaccctctgtggagctataagcctcttggactcttcttcctagattaaggcttgcatttccctccctgtttcagtaaaagatgatgaaagccactatcaatcctcactgctgagtggcagggagaagcagcaccactctcagctcttttctaatcttgtaacttagtgctagaagtctctccaggctattaccatgggcatttgttctctgttggagctgtaagcagatgaacccaagtagagaagatagatcttggaaggagagatccattgagtccagaagccagatcagcaaatggaggaacctcggaggtgaccagaaagatctccatcggttgcccaaggctgtaagtagtgatggttttagcgatgaataacgtaattggctatgaagtactgtggcagagctgctgttttctgaaggtgagaagccatttttagctcagagcaacccttaagagaacttttggcagattttgttggcattattgaaatatatatagaaaagttgctgattgcaatggttatgggaatggaatttaatgacatttgtaatttattacactcattggtttttattgattatagtattgtctgactttttattttctactatggttcctttagcagaaaagtaacttttgtgcatatattgaagtggtttttcagctatgaattctttagggtagaaatttatttagcaaatgtgaattcttttgagaaagtatgaagttttgcagaaattgactgtgaaatgtcagagaaaaataaaagtcacttacttgaaacct

SEQ ID NO: 4463 - DNA, 579 bp, Rattus norvegicus
  ref <308>: DATABASE ACCESSION NUMBER: EMBL / AA799732
  ref <309>: DATABASE ENTRY DATE: 2000-03-03
aggccatactgggcttgggttttgtagcttcttccaccgagggtgggggctgtcaagggaggtgctacacaggaacaaggcaaagcccaagcctggagggatatgcccagagggacccacattcccactcagcattcagtcatggggccttctcatgacaccattcctattgcttggaccttcccctccaaatctgatcagtgggtggcagcgggcatagccagggtctagtcagctcctcagagagatcaggcctgttggcagccggacagtcagtagcccccacacagacaaggctgtggtgccagccatcctaggcaacagaggacagcgaggaccgcccacttggtcacagagccggctttcccatttggcagcccctctgttgcagcttcctgatgagttccagtaagttcatctgcagcgtcagctcctgaggattagtggtcacatagaaaccagctacccctgccttctccagtgtgctctgctggtcagcaaccttccggtccagctccaggacaatctttcggtccattgcctgctgctcctcccggatccggtgttccaaggcctcta

SEQ ID NO: 4464 - DNA, 1080 bp, Homo sapiens
  ref <308>: DATABASE ACCESSION NUMBER: EMBL / X96484
  ref <309>: DATABASE ENTRY DATE: 1996-05-03
cggtccgggacatcccaaaggagccaaggctgggtaccagcccaggggggacggtgcccggcagcaggagcgacactaccagctgctgtcggcgttacagagcctggtgaaggagttgcccagctcattccagcagcgcttgtcctacaccacgctgagcgacctggccctggcgcttctcgacggcaccgtgttcgaaatcgtgcaggggctactggaggatccagcacctcaccgaaaagagcctgtacaaccagcgcctgcgcctacagaacgagcatcgagtgctcaggcaggcgctgcggcagaagcaccaggaagcccagcaggcctgccggccccataacctgcctgtgcttcaggcggctcagcagcgagaactagaggcggtggagcaccggatccgtgaggagcagcgggcgatggaccagaagatcgtcctggagctggaccggaaggtggctgaccagcagagcacactggagaaggcgggggtggctggcttctacgtgaccaccaacccacaggagctgatgctgcagatgaacctgctggaactcatccggaagctgcagcagaggggctgctgggcagggaaggcagccctggggctaggaggtccctggcagttgcctgctgcccagtgtgaccagaaaggcagccctgtcccaccatagccacaggcagcagaagtctgggcagagttcatcttcttgacctttggccactgccttcccagctgcccgcagggggttccccctgctgaggagagaccaggtggaccccagctgcctgtcacccttcatctgggacttgctgtcaaaccctaggatagtctcataaaggggaggctgggccagcctgctgctgtctgcttcagggccaggcagagagtgaggctgggggttctcacaccttactccaccgggcacatcccaacctgcactggggcccactcgagtgcttgttctggtctcagccgctcccttggcagctgcagcccccatgcagaagaggctcccaggcccaagctctgtgtgacccagagaaataaagatgcctcagtggcccaaaaaaaaa

SEQ ID NO: 4465 - protein, 220 aa, Homo sapiens
  ref <308>: DATABASE ACCESSION NUMBER: SWISS-Prot / Q14129
  ref <309>: DATABASE ENTRY DATE: 2002-06-15
MERYAGALEEVADGARQQERHYQLLSALQSLVKELPSSFQQRLSYTTLSDLALALLDGTVFEIVQGLLEIQHLTEKSLYNQRLRLQNEHRVLRQALRQKHQEAQQACRPHNLPVLQAAQQRELEAVEHRIREEQRAMDQKIVLELDRKVADQQSTLEKAGVAGFYVTTNPQELMLQMNLLELIRKLQQRGCWAGKAALGLGGPWQLPAAQCDQKGSPVPP

SEQ ID NO: 4466 - DNA, 581 bp, Rattus norvegicus
  ref <308>: DATABASE ACCESSION NUMBER: EMBL / AA799735
  ref <309>: DATABASE ENTRY DATE: 2000-03-03
aacataaataaaggctttattgttcagttcggatgaatgacagactggcataagctcgattaattgttccacacatttaagaccccaggatgacagcaaaagctatgcttattggcaatgggcaacagggagggagggggtgggaaggacctgaaggcctctgaagttcaagaaagctatcgggaccgaaaccaacgtcctagaagcaggtccaggatggaaaagggatcatccaaagctgaagatcttggaggatctggatcacttctggaactgtcatgggcttcttgatgggtcactgtggtctctctccggccctcactgtccaccacagtgcggtgttcctccactgtcccatctggcttagtgatcttggtcacagagatgcttttgaaataggatttaggctggggttgaagaagtggacccagaccttcctgggaaacctgggagtcaagatccttgtcctctctggctctagaatggggactcacaggccatgtatcatccaacctatgaaaaggtccctgggacccccaatctggagctggtttggaggattcaggttttgcatgactctc

SEQ ID NO: 4467 - protein, 280 aa, Rattus norvegicus
  ref <308>: DATABASE ACCESSION NUMBER: SWISS-Prot / AAH06688
  ref <309>: DATABASE ENTRY DATE: 2002-11-28
MSVFDLFRGFFGFPGPRSHRDPFFGGMTRDDDDDDDDDDEAEEDRGAWGRESYAFDGSQPPEEFGFSFSPRGGMRFHGNFGFDDLVRDFNSIFSEMGAWTLPSHSPELPGPESETPGERLREGQTLRDSMLKYPDSHQPRIFEGVLESHAKPESPKPAPDWGSQGPFHRLDDTWPVSPHSRAKEDKDLDSQVSQEGLGPLLQPQPKSYFKSISVTKITKPDGTVEERRTVVDSEGRRETTVTHQEAHDSSRSDPDSQRSSALDDPFSILDLLLGRWFRSR

SEQ ID NO: 4468 - DNA, 1225 bp, Homo sapiens; identical to SEQ ID NO: 1254
  ref <308>: DATABASE ACCESSION NUMBER: EMBL / Y17829
  ref <309>: DATABASE ENTRY DATE: 1999-01-07

SEQ ID NO: 4469 - protein, 355 aa, Homo sapiens
  misc_feature (1)..(355): Xaa=Unknown amino acid
MGEQPIFSTRAHVFQIDPNTKKNWVPTSKHAVTVSYFYDSTRNVYRIISLDGSKAIINSTITPNMTFTKTSQKFGQWADSRANTVYGLGFSSEHHLSKFAEKFQEFKEAARLAKEKSQEKMELTSTPSQESAGGDLQSPLTPESINGTDDERTPDVTQNSEPRAEPTQNALPFSHSSAISKHWEAELATLKGNNAKLTAALLESTANVKQWKQQLAAYQEEAERLHKRVTELECVSSQANAVHTHKTELNQTIQELEETLKLKEEEIERLKQEIDNARELQEQRDSLTQKLQEVEIRNKDLEGQLSDLEQRLEKSQNEQEAFRNNLKTLLEILDGKIFELTELRDNLAKLLECSX

SEQ ID NO: 4470 - DNA, 581 bp, Rattus norvegicus; identical to SEQ ID NO: 4466
  ref <308>: DATABASE ACCESSION NUMBER: EMBL / AA799735
  ref <309>: DATABASE ENTRY DATE: 2000-03-03

SEQ ID NO: 4471 - protein, 280 aa, Rattus norvegicus; identical to SEQ ID NO: 4467
  ref <308>: DATABASE ACCESSION NUMBER: SWISS-Prot / AAH06688
  ref <309>: DATABASE ENTRY DATE: 2002-11-28

SEQ ID NO: 4472 - DNA, 1225 bp, Homo sapiens; identical to SEQ ID NO: 1254
  ref <308>: DATABASE ACCESSION NUMBER: EMBL / Y17829
  ref <309>: DATABASE ENTRY DATE: 1999-01-07

SEQ ID NO: 4473 - protein, 355 aa, Homo sapiens; identical to SEQ ID NO: 4469
  misc_feature (1)..(355): Xaa=Unknown amino acid

SEQ ID NO: 4474 - DNA, 658 bp, Rattus norvegicus
  ref <308>: DATABASE ACCESSION NUMBER: EMBL / AA799740
  ref <309>: DATABASE ENTRY DATE: 2000-03-03
accagaaacaaagctgttattttattctatagaaaggaggagaacacattttgcaggtgacttgtttagagggcttggggacataaacaatagcaccttttcaggcctgtcattcaaagacgggcaggaacaaagaccctttgtaagtctgctatagcatacgtaatggtacattgattgattttcttccacagaaatgatgcgtctacgaaccgaggcgccacaaatattcttacaaatgtctactgtgttgtgagtctctgaggttctctatacacatcaataaccgtgatggccatgatgcactaaacgtcgccgatcaatcagggcacgcagagaacactggcgtctacatgactctgcgtagcatcgtttgttactcgggctgctgagcgattacgttcccgagcattcgacaaaggttatttttgtgtctcgacgtctgatttagctgtaagatgtaaaaagcctacagtcaggcgatgtgctgggtcatgagaaatggcttaagtgtaaaaatgacctactaggtaattccatacataaatccttggtgctaaatccttaggataaaaatatccattggcaaagaaatccttacttaaaggggaaaagaacagcgaagagggtggaatgtgccccgaaactccaggctcaa

SEQ ID NO: 4475 - DNA, 568 bp, Rattus norvegicus
  ref <308>: DATABASE ACCESSION NUMBER: EMBL / AA799745
  ref <309>: DATABASE ENTRY DATE: 2000-03-03
aagccttccttgataaccagaagaagcaactgtgccttaggctgagagccacagagccactcagacttcttgcagaggtcacaatgaatgctggtgccaccactcaggtggcccttccttgtggctctgcctccaggtctgctggcttcttgctggtgaggtccagcaataccagcctgggctgtcccaccccccaccaggaagctgggtggaggacacagagggagcacgtcacacagaggtccccatcaggttcacaggacggccgttgtatctcttggagatgtcagcttcaatcagcttcttcagagaggggatctcatagttgacattccgaaccaggaggctagagagttccactaaataggtgttgtccttctcatacaggcttatgatctcctgccaatccttcatccgctgtgaagagtagcggccaaaaatatttttggtggaagcctcggtacctttaagaaggtccactattcttaggcagtggaagtagtggatgtaggaaccagagagcagctgggcaatctcttggctctctggcatgtcctggatggcggtg

SEQ ID NO: 4476 - protein, 504 aa, Rattus norvegicus
  ref <308>: DATABASE ACCESSION NUMBER: SWISS-Prot / AAF60222
  ref <309>: DATABASE ENTRY DATE: 2003-02-01
MQDHQHVPIDIQTSKLLDWLVDRRHCNLKWQSLVLTIREKINTAIQDMPESQEIAQLLSGSYIHYFHCLRIVDLLKGTEASTKNIFGRYSSQRMKDWQEIISLYEKDNTYLVELSSLLVRNVNYEIPSLKKQIAKCQQLQQDYSRKEEEGQAGAAEMREQFYHSCKQYGITGDNVRRELLALVKDLPSQLAEIGAGAQSLGEAIDLYQACVEFVCDSPTEQVLPMLRYVQPKGNSTVYEWRTGTEPSVVERPQLEDPPEQVQEDEIDWGDFGLEAVSDSGNIISAETPGIDWGISLESESKDAGADKIDWGDNAVASEITVLETGTEAPEGVARGSDALTLLEYPETRNQFIDELMELEIFLSQRAVEMSEEADILSVSQFQLAPAILQGQTKEKMLSLVSTLQHLIGQLTSLDLQHLFMILASPRYVDRVTELLQQKLKQSQLLALKKDLMVEKQQEALQEQAALEPKLDLLLEKTRELQKLIEADISKRYNGRPVNLMGTSV

SEQ ID NO: 4477 - DNA, 568 bp, Rattus norvegicus; identical to SEQ ID NO: 4475
  ref <308>: DATABASE ACCESSION NUMBER: EMBL / AA799745
  ref <309>: DATABASE ENTRY DATE: 2000-03-03

SEQ ID NO: 4478 - protein, 504 aa, Rattus norvegicus; identical to SEQ ID NO: 4476
  ref <308>: DATABASE ACCESSION NUMBER: SWISS-Prot / AAF60222
  ref <309>: DATABASE ENTRY DATE: 2003-02-01

SEQ ID NO: 4479 - DNA, 568 bp, Rattus norvegicus; identical to SEQ ID NO: 4475
  ref <308>: DATABASE ACCESSION NUMBER: EMBL / AA799745
  ref <309>: DATABASE ENTRY DATE: 2000-03-03

SEQ ID NO: 4480 - protein, 504 aa, Rattus norvegicus; identical to SEQ ID NO: 4476
  ref <308>: DATABASE ACCESSION NUMBER: SWISS-Prot / AAF60222
  ref <309>: DATABASE ENTRY DATE: 2003-02-01

SEQ ID NO: 4481 - DNA, 568 bp, Rattus norvegicus; identical to SEQ ID NO: 4475
  ref <308>: DATABASE ACCESSION NUMBER: EMBL / AA799745
  ref <309>: DATABASE ENTRY DATE: 2000-03-03

SEQ ID NO: 4482 - protein, 504 aa, Rattus norvegicus; identical to SEQ ID NO: 4476
  ref <308>: DATABASE ACCESSION NUMBER: SWISS-Prot / AAF60222
  ref <309>: DATABASE ENTRY DATE: 2003-02-01

SEQ ID NO: 4483 - DNA, 671 bp, Rattus norvegicus
  misc_feature (1)..(671): n=a, c, g or t
  ref <308>: DATABASE ACCESSION NUMBER: EMBL / AA799751
  ref <309>: DATABASE ENTRY DATE: 2000-03-03
acacctaatacatgaaaagaactctgaattgaaatccagccatctagaaataattctggtcataaaatgcacaattatcccatgtgtccaaagtctgctgagtttgctctgaagtttgtatttactccaatatctagaatgtctcaggaccacatgctgatactacacagaacagaagggagctgagcagaaccacacgtaaatgcaaacttaagaactttatggtattgctctggtgccttatgtcttaagcactgaccagagagttaagtgtgagctagaaaagttttcagagaaatgagctgcagaacttcctaccccacccctaggttattcagagcaaggagggctgatgtgggggatgagaacctacagactgaacatcctgctttcttcctacctcagtccgacgctggacatcctggagtgtaaggcactagaactggcctgagaagtgctccaagcttcagttcttggtgtgcaaaagaaattgtggcatagatcttttgaaacataataaaataactcccccctcctcttatattctgttattcacagacaaaaagacaaggaggtanatgtttgcaaagattaaaaaacaggtgaatcaaaatatgaagaaagtgtgtatacntattcagatatggagaaccacttagagggcaanagtc

SEQ ID NO: 4484 - DNA, 648 bp, Homo sapiens
  misc_feature (1)..(648): n=a, c, g or t
  ref <308>: DATABASE ACCESSION NUMBER: EMBL / AV724415
  ref <309>: DATABASE ENTRY DATE: 2000-10-05
gagggttttttagcatctctttcaaaagatgtatgtcagaatttcctttgcacaccaagaactggagcttagagccccactattctctaagccaggttctagtgccttacactccagaatgtcagatggtgggtgcagatgggaagaaagagaaaagttcatctcggtgtgtgggttcccatccgccccacatagcctctccttcttcggaacaatgggcgtggggtagaaagctctttcagtgaagggtgttctagcagctcagttaacactttactctccagtcaacacttgggacatataaaaatgccattgtaactactgtagagtcctgtgactcatcgtttgtgtttgtcagtgtgcagttcagcttagcccttccctgttcctgtgtagttacaatctggccctgaagacatccgaggcacttcagtaagtgggatcttttctagagatcctgggtgactttgggtgcacagggtgaccgagcatttctgcccctgtgaatgtggcactaacactgtgcactgtctncaccaagcaaggtttccactgaagttcttctcatggtactgggtttggtaatgaaataacacattttaacttacaaaaaaaaaaaaaaannaaaaaaaananaaaaaaaaaaaa

SEQ ID NO: 4485 - DNA, 646 bp, Rattus norvegicus
  ref <308>: DATABASE ACCESSION NUMBER: EMBL / AA799764
  ref <309>: DATABASE ENTRY DATE: 2000-03-03
caaactttaattgatagactaatcttacaggataaacaatgacagctagtcaagattacatattaaaaaaaaaatccagcagcgcaaatctaatagactaaatacgtttatctcctcccaaacaggcattttgatttaaaaacaaacaagaacagagtgtacaccacaaggaaacatagtacttacatattgtcaaatactctgtagaagtctgtaggaaaggtaaagaaggttctcagtcaccaagaaagcagaaccacccaccctggcaggtaaatcaccagctgatttgtacactagagcactcctgtccacttttaggcctatgaagaaggaaatgggcctgatcctgactggaagtaacttcattacaaagtctaaagacagagagaccatccttttccaaggaacagggctgaacaatagcaagaagcgagagaaagttggtagatgggtgaaaagaaagcctggccttggcatacatctatctttcccttcccttcttggctcctggtaaataaagggccggccaactgcaacagctcacagcactcctccaggcacattgaagaggaaaaattcctttctgggtgagatatggcaacttttctgagacatggcaatgtaacaaagttcatctctttgg

SEQ ID NO: 4486 - DNA, 1509 bp, Homo sapiens
  ref <308>: DATABASE ACCESSION NUMBER: EMBL / BC007880
  ref <309>: DATABASE ENTRY DATE: 2001-06-08
ggcacgaggtggaagaccttgctggacgctctcgggagagcagacatagcaccagaagccactgggagaagtgttttcgatccgtgtctgggccacagtagtattcactgtttagtctttgagttccgtaagcagtctcttcacacatttcttacagtctggagtgtactgactaaatctgtgtaagcaaattgaaatactctttcttttaggtagcgtcacagtggttttttttttcctcaggataatttctatacaatttccttactgtcagagggaccagatctttccctcactgtggcaggggccgtgcaggtggataaaggaagagctggtttccggagagtgactgtaacagcgttgactcgaagctagagatggagggggtggccgtctcttagacattggacacctctcagagcctcctgagggcttctttgtcttttagaatctctaccggtggtcctcctgcaggttctggctcacagacatcatcatgcctttttttccctccctgaggcgccttggcagaagagcgtgaccctgtgagccaggccccccttagctctgcttcagatcacagaacacagacagactcgcgagttgctggacctctttggtattaagtgtttgaatccatggtgggccttttgcaagtagcgttagctctttttaaatgttgaactgagctaaggatgcactttcttgtggacatagaaggggcccacgtaaggccctgagtaggctccttagttgctgctttacctgatgagggccaaagagattaactctgcctcgttgccatgtctcagaaaagttgccatatttcacccagaaggggctcgttttcctcttactcttactttaaccatgtgcctggaggagccattctgggctcttgcacttgcccagcctttctttgccaggggcagagaagggaaagggggtagattgagtgtgccaagggccgtgcaagggcaggcttgctttccacccatctgctgagggagccctctcctctcgctccttgcctctgttcacacctgttgtcttggaagaggatggtccctttgtcttaaggctttgtgataaagtcatctccagttaggatctgcacctgtttccttcgtaatagtgcctggcggcctttctgaagttacaggtggttgggagccctctcgcatgcagaacatctggtagattgatctgccaggctgggtggttctactgctttctcaatttctaagaaccttttttttttcttaaagagttctgctgaattatttgacaatatttgtaagtaccatgtttccttgtggtgtatgctctgttctggtttctgttttcaaatcaaatgcctgtttgggaggagatgaacgtatttagtctattagatttgcactgctggattttttttttaaagtgtaaccttgaatagctgtcttattgtttatcctgtaagattagtcaatcgattaaagtttgataattaaaaaaaaaaaaaaaaaa

SEQ ID NO: 4487 - DNA, 567 bp, Rattus norvegicus
  ref <308>: DATABASE ACCESSION NUMBER: EMBL / AA799766
  ref <309>: DATABASE ENTRY DATE: 2000-03-03
gatgcctgacaattggacaagtccctttctgacaacagaccattatgttgaatcctgcctgcaagacaagctgctcgaattcacttaaggagctggagggcagtgctgaagggggccaggttctcacaggacttaagccaccgctgcacattggtgggcgctgccccactgcttcccccagtctgctggagcacggaccacagcaccacatctgccacagtgagctcattcccaaccaaccacgggcttttccccaaagcggagttcatagagcggaaaacagccgctttttccttactgctcccttctctcagctgaaacatggcgatatccacccagctgtcgatgagggttaggtggacagcgttatgcttctgaccaaatagagagaacaggaagcgtgcgatgttcccttctccttcaatggggcacatcgtttgtacactgaacttcatctgtgtcttgggcacgttcttccaaatcagagtgaagcccagctgatactcgtggcgggactgttttctagcctgctccccgaagcacttgagaagattctcaggtacattc

SEQ ID NO: 4488 - DNA, 1221 bp, Homo sapiens
  ref <308>: DATABASE ACCESSION NUMBER: Refseq / NM_006303
  ref <309>: DATABASE ENTRY DATE: 2000-11-02
ccgaacgcccgcagcagggtcagaagggaggtggccggtctccgtcgtgacctctgacggtttctgagcgttggcctttggcacgcgctacacccttttgctttggttctgccatgccgatgtaccaggtaaagccctatcacgggggcggcgcgcctctccgtgtggagcttcccacctgcatgtaccggctccccaacgtgcacggcaggagctacggcccagcgccgggcgctggccacgtgcaggaagagtctaacctgtctctgcaagctcttgagtcccgccaagatgatattttaaaacgtctgtatgagttgaaagctgcagttgatggcctctccaagatgattcaaacaccagatgcagacttggatgtaaccaacataatccaagcggatgagcccacgactttaaccaccaatgcgctggacttgaattcagtgcttgggaaggattacggggcgctgaaagacatcgtgatcaacgcaaacccggcctcccctcccctctccctgcttgtgctgcacaggctgctctgtgagcacttcagggtcctgtccacggtgcacacgcactcctcggtcaagagcgtgcctgaaaaccttctcaagtgctttggagaacagaataaaaaacagccccgccaagactatcagctgggattcactttaatttggaagaatgtgccgaagacgcagatgaaattcagcatccagacgatgtgccccatcgaaggcgaagggaacattgcacgtttcttgttctctctgtttggccagaagcataatgctgtcaacgcaacccttatagatagctgggtagatattgcgatttttcagttaaaagagggaagcagtaaagaaaaagccgctgttttccgctccatgaactctgctcttgggaagagcccttggctcgctgggaatgaactcaccgtagcagacgtggtgctgtggtctgtactccagcagatcggaggctgcagtgtgacagtgccagccaatgtgcagaggtggatgaggtcttgtgaaaacctggctccttttaacacggccctcaagctccttaagtgaattgccgtaactgattttaaagggtttagattttaagaatggtgctctttcatgcctattatcagtaaggggacttgtattagagtcagagtctttttatttaggccagttgtcaagtgtcaataaaagcgcatcatgtaattta

SEQ ID NO: 4489 - protein, 320 aa, Homo sapiens
  ref <308>: DATABASE ACCESSION NUMBER: SWISS-Prot / Q13155
  ref <309>: DATABASE ENTRY DATE: 2002-06-15
MPMYQVKPYHGGGAPLRVELPTCMYRLPNVHGRSYGPAPGAGHVQEESNLSLQALESRQDDILKRLYELKAAVDGLSKMIQTPDADLDVTNIIQADEPTTLTTNALDLNSVLGKDYGALKDIVINANPASPPLSLLVLHRLLCEHFRVLSTVHTHSSVKSVPENLLKCFGEQNKKQPRQDYQLGFTLIWKNVPKTQMKFSIQTMCPIEGEGNIARFLFSLFGQKHNAVNATLIDSWVDIAIFQLKEGSSKEKAAVFRSMNSALGKSPWLAGNELTVADVVLWSVLQQIGGCSVTVPANVQRWMRSCENLAPFNTALKLLK

SEQ ID NO: 4490 - DNA, 631 bp, Rattus norvegicus
  ref <308>: DATABASE ACCESSION NUMBER: EMBL / AA799771
  ref <309>: DATABASE ENTRY DATE: 2000-03-03
actagacacctttgataatgatagaatgagtatcttgtcttaaacattctcagcactatgcccttattacatatgacatctaaaaacaagatactcattctatcattatcaaaggtgtctagtaaaaaaggaaagattgacattgaagatgggactagaaacccctacttaggggccttcaaacggtttctcacacacatctgtgaggtaggttattatccacattttgtacaagagaaaactacacaaggttacataccttgtgctgccataatagcaaacagggaattagatccaattagatccggtccttagctttgcatttcttttctttataaactttaaaatataaagactgctagtaattgcattcattttaaaagcataagaaggcagccaaatagtttcccgggtggctttacaaagtgaaacaaatgaacagaaaatgcattcagtgaagacattccaatggtgacgctgtaaggtctggtcaagtggaaccaaaaggcagaagcaaaccacgtgaccgcctgtgggacaggtctcaggaaaacgggggagctgggggcagcagactttgaacacacgtttacggctactctgcaagtatttgagaatgcaccaggtactc

SEQ ID NO: 4491 - DNA, 765 bp, Homo sapiens
  ref <308>: DATABASE ACCESSION NUMBER: EMBL / BG779035
  ref <309>: DATABASE ENTRY DATE: 2001-05-17
taagccaagatcatgccactgcatgccagcctgggtgacagcacaagactgtctcaaaaaaaaacaaaaaaaggaaaaagaaaactagccccagtccctgtctaaattgttatagtttttgactattatctgaattagtcttatccaaatttcatatgcagattgatttttcattttgtatgtatattacatgatataactattttcatagaatatatttctaatttacaaacactgaattattagcttgatagagtttctcccaaaccttataaaactttgaaatgtacttatgtttgagctttaaaaattataaaaacttcatttaaacaagttgctggcatcattactagcctttccacctataattatgatgcatttgatgccactgaacagtaatagcacaaagaacaggtcacacagtctagactggattgagttttaattaaacttcttcatccatagcctgataagaatcaggctgggtctagaagagttatcagactgtaggcctgtattaattttgcaagctaatgttaatggtttactgccagccttgcatagcaatgccagttgcagttgtgactatgatgtgacttttggtaaaaatggtttatatctaaagtaggtttagattttactggaaggtggtcttgagtgtttggacaagcagggtagggtaaaattcaattacgtttgaagtgtaattaaatcctagaatagagcatcttccagaaaaaaactggaacaagactttggagaata

SEQ ID NO: 4492 - DNA, 631 bp, Rattus norvegicus; identical to SEQ ID NO: 4490
  ref <308>: DATABASE ACCESSION NUMBER: EMBL / AA799771
  ref <309>: DATABASE ENTRY DATE: 2000-03-03

SEQ ID NO: 4493 - DNA, 765 bp, Homo sapiens; identical to SEQ ID NO: 4491
  ref <308>: DATABASE ACCESSION NUMBER: EMBL / BG779035
  ref <309>: DATABASE ENTRY DATE: 2001-05-17

SEQ ID NO: 4494 - DNA, 615 bp, Rattus norvegicus
  ref <308>: DATABASE ACCESSION NUMBER: EMBL / AA799773
  ref <309>: DATABASE ENTRY DATE: 2000-03-03
ccacatgtgcaaaagtttcccagagagttgggccccacaatgtgtaaaaaagacccccaatggggcagagctgtgtaaccataaaaaaaaaatagtaagagaaatcagtttcccaggaggcctggcttgggtggagcatgtcactcagggccagtccgcatgcggtgtgctgtttgttctggaactgctttcttctgattgttctttcttttccaagccccttactctagggctatggccaccagacggcctgacagagtcctcaggcatggtggtttgtgaggatgacttctttcacacacagataccccaactcagtgcttgcccactggcatcagccccactatgatccccagggcttccccccaacccgtttaaccccttatatcacagtctcggcccccagcttcaccaagtcttccctcaggacacctttgagggacactgaaacaaaacagataaaggcccggccccccacccaccaagtggcacagtggggtacgggggattgtatcaccccgtcacacctaaggcaggtgttttagtgtctgattctgtgagtgtggataggggggtggcacatctgtgtgggtatgactttggcaggaagtgggg

SEQ ID NO: 4495 - DNA, 615 bp, Rattus norvegicus; identical to SEQ ID NO: 4494
  ref <308>: DATABASE ACCESSION NUMBER: EMBL / AA799773
  ref <309>: DATABASE ENTRY DATE: 2000-03-03

SEQ ID NO: 4496 - DNA, 568 bp, Rattus norvegicus
  ref <308>: DATABASE ACCESSION NUMBER: EMBL / AA799778
  ref <309>: DATABASE ENTRY DATE: 2000-03-03
actcataataaagcagtgctatttcagagtatgaaacttacaaattctgtttcaaacattttattgtaagatgttttaactaattacaagtttaaactataacttggtaatttctgttgggcagcgagttgctgcaaattgcttactcaaatgtgatcagacaactccgaatacagagcaaggatcagaaatagggttaagccactaaatggaccttgatcatttcttaggaaaggtacaccacaatttcattagacagcaatacagaaagagttcttcaagtagagtagttctcatttaagttaaccctctctggctatcacaactgagatagacacattcacataattggctgagcttgagccttctttgcaagcatctttagatctccgatgcacttggcaatggtctccttttcctgctgtgcagaaatgctctgtatcacatgcttctccacccagtttatcatgtgctctccctccttgcgacgcatcatgtcctgtacagaaatatggtagtccaggcgattctttacctccttatatgctttatgtagtcgttcccggta

SEQ ID NO: 4497 - protein, 256 aa, Rattus norvegicus
  ref <308>: DATABASE ACCESSION NUMBER: SWISS-Prot / P19511
  ref <309>: DATABASE ENTRY DATE: 2002-06-15
MLSRVVLSAAATAAPCLKNAAVLGPGVLQATRVFHTGQPRLAPLPPLPEYGGKVRLGLIPEEFFQFLYPKTGVTGPYVLGTGLSLYFLSKEIYVITPETFSTISVVGLIVYVIKKYGASIGEFIDKLNEEKIAQLEEIKQSSMKQIQDAINREKAQQALVQKRHYLFDVQRNNIALALEVTYRERLHKAYKEVKNRLDYHISVQDMMRRKEGEHMINWVEKHVIQSISAQQEKETIAKCIGDLKMLAKKAQAQPIM

SEQ ID NO: 4498 - DNA, 842 bp, Homo sapiens
  misc_feature (1)..(842): n=a, c, g or t
  ref <308>: DATABASE ACCESSION NUMBER: EMBL / BI461802
  ref <309>: DATABASE ENTRY DATE: 2001-08-24
agcggatctccacggttccaactccaacctagactcaaactggacgccggccggagactcagctccggcagcaaaccccacgtggtgcacctctgagcctccgcccctctcccgagggaaccgcaactctacttctcgcgagaattgcttctatggctccatcctgctttccggctgtcgccctcatgcgataggctctcagcgttacttgactcttctcgcgataatttttttaaaaaatctcccaaggaaagttgaaggaagagtacaaaattttcatctcgcgagacttgtgagcggccatcttggttctgccctgacagattctcctatcggggtcacagggacgctaagattgctacctggactttcgttgaccatgctgtcccgggtggtactttccgccgccgccacagcggccccctctctgaagaatgcagccttcctaggtccagggtattgcaggcaacaaggacctttcatacagggcagccacaccttgtccctgtaccacctcttcctgaatacggaggacaagttcgttatggactgatccctgaggaattcttccagtttctttatcctaaaactggtgtaacaggaccctatgtactcggaaactgggcttatctttgtacgctttatccaaagaacatatatgtgattaggcgcagagaccttcactgccctatncagtactaaggtgtcactgtgtctaatgggcattccacccaattatggtccctttgttgccagactttgctgataaactccaatgagcaaaaaaattggcccaaattagaagaagggaagcagggttccatccaaaagatccagaaatc

SEQ ID NO: 4499 - protein, 256 aa, Homo sapiens
  ref <308>: DATABASE ACCESSION NUMBER: Refseq / NP_001679
  ref <309>: DATABASE ENTRY DATE: 2002-11-05
MLSRVVLSAAATAAPSLKNAAFLGPGVLQATRTFHTGQPHLVPVPPLPEYGGKVRYGLIPEEFFQFLYPKTGVTGPYVLGTGLILYALSKEIYVISAETFTALSVLGVMVYGIKKYGPFVADFADKLNEQKLAQLEEAKQASIQHIQNAIDTEKSQQALVQKRHYLFDVQRNNIAMALEVTYRERLYRVYKEVKNRLDYHISVQNMMRRKEQEHMINWVEKHVVQSISTQQEKETIAKCIADLKLLAKKAQAQPVM

SEQ ID NO: 4500 - DNA, 679 bp, Rattus norvegicus
  ref <308>: DATABASE ACCESSION NUMBER: EMBL / AA799779
  ref <309>: DATABASE ENTRY DATE: 2000-03-03
caagactgctttattagacaacacagtgacatgaatgccgctggcagccatcatggtgggacagtcacactgacattcccatgctctcctcctcctggcagaagcacggctcacgggtctcaaggagacagacgtcacatcttcctctcagcgcccatttgtggcagagtaagtcctttgtgactgtcattatggaactgtgttttctgtaactgctccatgattatcatagttttgcagtggctggttttcctattggcttcttacatccgagcatttcttctaacttgcttgtggcaggcccgttgacataatacacatatttactgtctaccttattcttttctaccaccccgagtctcacgaaggctgctaaggcattcttctgaagttcagaggacagcgcgtcgtaacactgacaggcatcttgatccagaagctggcgggtgaacttcctggctgtgaccaagtactccttctcactgaagtagtcctcttcatgcaagaggcatttggaaagtatctgatacgattccacaaaaggtttaaagagtcctgtgaggaactgtaatacagcattccctttgtctgtgaggatgatgtccttcccagtcatctgcataacctcagttttacacagcaagtaacagccttcctcaaagtccctgagtgtgtttcc

SEQ ID NO: 4501 - protein, 678 aa, Rattus norvegicus
  ref <308>: DATABASE ACCESSION NUMBER: SWISS-Prot / Q9ES71
  ref <309>: DATABASE ENTRY DATE: 2001-10-16
MDVPSSSSSRFSVGSASPSSVLLYAKDLKKWDEFEDLLEERRQVSDFKFAMKCYTPPLYRGITPCKPSDIKSIVLNSEEINYVIKQLSRESLTGVDVLREEANEILEEMSHKLRIGAIRFFAFVLSKVFKQIFSKVCVNEEGIQKLQRAIQEHPVILLPSHRSYIDFLMLSFVLYNYDLPVPVIAAGMDFLGMRVVSELLRMSGAFFMRRTFGGNKLYWAVFSEYVKTMLRSGYAPVEFFLEGTRSRAAKTLTPKFGLLNIVMEPFFKREVFDTYFVPISISYDKILEESLYAYELLGIPKPKESTTGLLKARRILSENFGSIHVYFGDPVSLRSLAAGRLSRNTYNLVPRCIPQKQPEDVQAFVTEVAYKMQLLQIENLALSPWLLVVAILLQNQLCMDFDALVEKTLWLKGLTQVFGGFLLWPDNKLPEEVVQSSILLHSNLATLVKDQVVLKVDSESSQMVNGLVPQHIAFLMCSAYRNQLLNVFARPSLVAVALHMTPGLRKEDVFSCFSFLRNVFSDEFIFLPGNTLRDFEEGCYLLCKTEVMQMTGKDIILTDKGNAVLQFLTGLFKPFVESYQILSKCLLHEEDYFSEKEYLVTARKFTRQLLDQDASQCYDALSSELQKNALAAFVRLGVVEKNKVDSKYVYYVNGPATSKLEEMLGCKKPIGKPATAKL

SEQ ID NO: 4502 - DNA, 2470 bp, Homo sapiens
  ref <308>: DATABASE ACCESSION NUMBER: Refseq / NM_014236
  ref <309>: DATABASE ENTRY DATE: 2002-11-05
gaattcggcacgagccgggatcctgtgtagcggctgcagagggtgccgccgccctaggcgaagtagggccgtcctgagcgaaagaaccgcccccagcaggagcaccaccacggcttagcaaagaatcccagaccccgcccgggaaggcagccgcaccatggagtcttccagttcatctaactcttatttctccgttggcccaaccagtcccagcgctgtcgtgctcctctactcgaaggagctcaaaaagtgggatgagtttgaagatattttagaagagaggaggcatgtcagtgacttgaaatttgcaatgaaatgctacacacctcttgtctataagggaattactccatgtaaaccaattgatattaaatgtagtgttctcaattctgaggagattcattatgtcattaaacagctttccaaggaatcccttcaatctgtggatgtcctccgagaggaagtgagtgagatcttagatgaaatgagtcacaaactgcgtcttggagccattcggttttgtgccttcaccctgagcaaagtatttaaacaaattttctcgaaggtgtgtgtaaatgaagaaggtattcagaaactacaaagagccatccaggagcatcctgttgttctgctgcctagtcatcgaagttacattgacttcctcatgttgtcttttcttctatacaattatgatttgcctgtgccagttatagcagcaggaatggacttcctgggaatgaaaatggttggtgagctgctacgaatgtcgggtgcctttttcatgcggcgtacctttggtggcaataaactctactgggctgtattctctgaatatgtaaaaactatgttacggaatggttatgctcctgttgaatttttcctcgaagggacaagaagccgctctgccaagacattgactcctaaatttggtcttctgaatattgtgatggagccattttttaaaagagaagtttttgatacctaccttgtcccaattagtatcagttatgataagatcttggaagaaactctttatgtgtatgagcttctaggggttcctaaaccaaaagagtctacaactgggttgctgaaagccagaaagattctctctgaaaattttggaagcatccatgtgtactttggagatcctgtgtcacttcgatctttggcagctgggaggatgagtcggagctcatataacttggttccaagatacattcctcagaaacagtctgaggacatgcatgcctttgtcactgaagttgcctacaaaatggagcttctgcaaattgaaaacatggttttgagcccctggaccctaatagttgctgttctgcttcagaaccggccatccatggactttgatgctctggtggaaaagactttatggctaaaaggcttaacccaggcatttggagggtttctcatttggcctgataataaacctgctgaagaagttgtcccggccagcattcttctgcattccaacattgccagccttgtcaaagaccaggtgattctgaaagtggactccggagactcggaagtggtcgatgggcttatgctccagcacatcactctcctcatgtgctcagcttataggaaccagctgctcaacatttttgtgcgcccatccttagtagcagtagcattgcagatgacaccagggttcaggaaagaggatgtctacagttgctttcgcttcctacgtgatgtttttgcagatgagttcatcttccttccaggaaacacactaaaggactttgaagaaggctgttacctgctttgtaaaagtgaagccatacaagtgactacgaaagacatcctagttacagagaaaggaaatactgtgttagaatttttagtaggactctttaaaccttttgtggaaagctatcagataatttgcaagtaccttttgagtgaagaagaggaccacttcagtgaggaacagtacttggctgcagtcagaaaattcacaagtcagcttctcgatcaaggtacctctcaatgttatgatgtattatcttctgatgtgcagaaaaacgccttagcagcctgtgtgaggctcggagtagtggagaagaagaagataaataataactgtatatttaatgtgaatgaacctgccacaaccaaattagaagaaatgcttggttgtaagacaccaataggaaaaccagccactgcaaaactttaataatcaacaaatagttatggaaaattcggtcacgtaattactctcatcgaaggactcattacaacaaacagggaagtaaaggaagagacacatcctctcatactccctgagactctgagaacagtggacgcagagggaagagatgatcattggaagcaatcagtttactcttccccaccacagtggttaaaaggcgtttgtatctgacactatgtgtgtgttttaaaataaacttttggaaacatgaaaaaaaaaaaaaaaaaactcgag

SEQ ID NO: 4503 - protein, 680 aa, Homo sapiens
  ref <308>: DATABASE ACCESSION NUMBER: SWISS-Prot / O15228
  ref <309>: DATABASE ENTRY DATE: 2001-10-16
MESSSSSNSYFSVGPTSPSAVVLLYSKELKKWDEFEDILEERRHVSDLKFAMKCYTPLVYKGITPCKPIDIKCSVLNSEEIHYVIKQLSKESLQSVDVLREEVSEILDEMSHKLRLGAIRFCAFTLSKVFKQIFSKVCVNEEGIQKLQRAIQEHPVVLLPSHRSYIDFLMLSFLLYNYDLPVPVIAAGMDFLGMKMVGELLRMSGAFFMRRTFGGNKLYWAVFSEYVKTMLRNGYAPVEFFLEGTRSRSAKTLTPKFGLLNIVMEPFFKREVFDTYLVPISISYDKILEETLYVYELLGVPKPKESTTGLLKARKILSENFGSIHVYFGDPVSLRSLAAGRMSRSSYNLVPRYIPQKQSEDMHAFVTEVAYKMELLQIENMVLSPWTLIVAVLLQNRPSMDFDALVEKTLWLKGLTQAFGGFLIWPDNKPAEEVVPASILLHSNIASLVKDQVILKVDSGDSEVVDGLMLQHITLLMCSAYRNQLLNIFVRPSLVAVALQMTPGFRKEDVYSCFRFLRDVFADEFIFLPGNTLKDFEEGCYLLCKSEAIQVTTKDILVTEKGNTVLEFLVGLFKPFVESYQIICKYLLSEEEDHFSEEQYLAAVRKFTSQLLDQGTSQCYDVLSSDVQKNALAACVRLGVVEKKKINNNCIFNVNEPATTKLEEMLGCKTPIGKPATAKL

SEQ ID NO: 4504 - DNA, 679 bp, Rattus norvegicus; identical to SEQ ID NO: 4500
  ref <308>: DATABASE ACCESSION NUMBER: EMBL / AA799779
  ref <309>: DATABASE ENTRY DATE: 2000-03-03

SEQ ID NO: 4505 - protein, 678 aa, Rattus norvegicus; identical to SEQ ID NO: 4501
  ref <308>: DATABASE ACCESSION NUMBER: SWISS-Prot / Q9ES71
  ref <309>: DATABASE ENTRY DATE: 2001-10-16

SEQ ID NO: 4506 - DNA, 2470 bp, Homo sapiens; identical to SEQ ID NO: 4502
  ref <308>: DATABASE ACCESSION NUMBER: Refseq / NM_014236
  ref <309>: DATABASE ENTRY DATE: 2002-11-05

SEQ ID NO: 4507 - protein, 680 aa, Homo sapiens; identical to SEQ ID NO: 4503
  ref <308>: DATABASE ACCESSION NUMBER: SWISS-Prot / O15228
  ref <309>: DATABASE ENTRY DATE: 2001-10-16

SEQ ID NO: 4508 - DNA, 679 bp, Rattus norvegicus; identical to SEQ ID NO: 4500
  ref <308>: DATABASE ACCESSION NUMBER: EMBL / AA799779
  ref <309>: DATABASE ENTRY DATE: 2000-03-03

SEQ ID NO: 4509 - protein, 678 aa, Rattus norvegicus; identical to SEQ ID NO: 4501
  ref <308>: DATABASE ACCESSION NUMBER: SWISS-Prot / Q9ES71
  ref <309>: DATABASE ENTRY DATE: 2001-10-16

SEQ ID NO: 4510 - DNA, 2470 bp, Homo sapiens; identical to SEQ ID NO: 4502
  ref <308>: DATABASE ACCESSION NUMBER: Refseq / NM_014236
  ref <309>: DATABASE ENTRY DATE: 2002-11-05

SEQ ID NO: 4511 - protein, 680 aa, Homo sapiens; identical to SEQ ID NO: 4503
  ref <308>: DATABASE ACCESSION NUMBER: SWISS-Prot / O15228
  ref <309>: DATABASE ENTRY DATE: 2001-10-16

SEQ ID NO: 4512 - DNA, 679 bp, Rattus norvegicus; identical to SEQ ID NO: 4500
  ref <308>: DATABASE ACCESSION NUMBER: EMBL / AA799779
  ref <309>: DATABASE ENTRY DATE: 2000-03-03

SEQ ID NO: 4513 - protein, 678 aa, Rattus norvegicus; identical to SEQ ID NO: 4501
  ref <308>: DATABASE ACCESSION NUMBER: SWISS-Prot / Q9ES71
  ref <309>: DATABASE ENTRY DATE: 2001-10-16

SEQ ID NO: 4514 - DNA, 2470 bp, Homo sapiens; identical to SEQ ID NO: 4502
  ref <308>: DATABASE ACCESSION NUMBER: Refseq / NM_014236
  ref <309>: DATABASE ENTRY DATE: 2002-11-05

SEQ ID NO: 4515 - protein, 680 aa, Homo sapiens; identical to SEQ ID NO: 4503
  ref <308>: DATABASE ACCESSION NUMBER: SWISS-Prot / O15228
  ref <309>: DATABASE ENTRY DATE: 2001-10-16

SEQ ID NO: 4516 - DNA, 609 bp, Rattus norvegicus
  ref <308>: DATABASE ACCESSION NUMBER: EMBL / AA799783
  ref <309>: DATABASE ENTRY DATE: 2000-03-03
catccctccccaaaaagacatgggtcggtacagcaatcataaaaaggagatacaaacacaagagtcaaatgtctcccgcactgacacttacaaaaaaccgggaattatacacagggtttccaaacaggacctgcagcagctactaatgtccctttacaagagtcacacatgcctattagtacagtatttacagacaccccactctggaactaatctacagggacatcccaacacccacccctctatgcccagaaaaataccaaaacacacccaaagtgcatttgtttgtttatatcaaaacatctctccctctccccggcccaccccagacccacccccattgaagattggcctgcaagtctattttaaccatttagttattttttatactttatgaaaataaattatacagcaactattttaataaattaagcacagagggagaataaggaggaaactaaatgggaagacaaaagccaggccacactttggctaggagggcaggggtggcttagcaggacagagtggttgtgggggtacggctccccggtggtgaagatcccccaaccactgagtccagactgacacccctcagcacggagtttctga

SEQ ID NO: 4517 - DNA, 249 bp, Homo sapiens
  ref <308>: DATABASE ACCESSION NUMBER: EMBL / AI682207
  ref <309>: DATABASE ENTRY DATE: 2000-03-04
ttttttttttttttaatttctaaacatttttatttcaaatcttttttcacccctccccaaaaagacatgggtaggtacagcaatcataaaaaggagatacaaacacaagagtcaaatgtctctcgcactgacacttacaaaaaactgggaattgtacatggggttagggatgtccctgtagattagttccagaatggggtgtctgtatatactgtattaataggcatgtttgactctcgtaaagggacg

SEQ ID NO: 4518 - DNA, 673 bp, Rattus norvegicus
  ref <308>: DATABASE ACCESSION NUMBER: EMBL / AA799784
  ref <309>: DATABASE ENTRY DATE: 2000-03-03
ggcagcaaaattgtgttaaaaaaaaaaatctagaccatgaacatgttttactgcttcagtttaagaatcccaagccaaataaaaagagcagcacagaaagcagcaagctggttacttccagacaaataaaaaggatcaaatgcaacagcaggaagacaaacactcccccttttccagaaatcacaattccttcaaataaagaatgtgaaccatgtgccatattgaattgatatttatttcaggacatgccatgtcaaaataaaacaaaagagtcaatccctgcttttaacaataatatgtattataaaagcactttacaactctatcccatgtttgagtataagttacagggtatgtgggctaatgattatctgaaagtatttctctattcagatccataatccaagtgctctccaagtgttacaaggtgacagtacgtagaagtggaggaggacagggaggggagtcgggctttccagttaggaattttgttgcaatgaggaggtgaggaagtatgaagttatttttgttaccttttcatctttatactgtgttaagtaatgcttacaacataaaccccgcaggcttcttctgagttagaactcagaattttttccctgcaaataatgtatttacaaatgtgtttattaacttacacagcaatctcaacctc

SEQ ID NO: 4519 - protein, 140 aa, Rattus norvegicus
  ref <308>: DATABASE ACCESSION NUMBER: SWISS-Prot / AAD38018
  ref <309>: DATABASE ENTRY DATE: 2001-10-16
TAGQERFRSLIPSYIRDSTVAVVVYDITNVNSFQQTTKWIDDVRTERGSDVIIMLVGNKTDLADKRQVSIEEGERKAKELNVMFIETSAKAGYNVKQLFRRVAAALPGMESTQDRSREDMIDIKLEKPQEQPVNEGGCSC

SEQ ID NO: 4520 - DNA, 3084 bp, Homo sapiens
  ref <308>: DATABASE ACCESSION NUMBER: EMBL / AL136727
  ref <309>: DATABASE ENTRY DATE: 2001-03-10
ggggcactcagcaggttgggctgcggcggcggcggctggggaagccgaagcgccgcgcgtgagagatcccggatacatctgcggtttgggctccgccaccctccgtctctctcccgcaggtctctgagccgggtgcggaaggagggaacggccctagccttgggaagccaaagcacacccctggctcccgccgacaccgccctccttcccttcccagccgcgggcctcgctccgtgctcggctactctgccgggaggcggcggcggctgccagtctgtggcgagccctgctgccctccagccgggcttctccagccgggctcctccaccggcccttgcaggggcacagagagctcggcgcccgcccttccgctcgcctttttcgtcagccggctggaggagcatcggtccgggaggtctctgggctgaggcggcgacagctcctctagttccaccatgtccgcgggcggagacttcgggaatccgctgaggaaattcaagctggtgttcctgggggagcaaagcgttgcaaagacatctttgatcaccagattcaggtatgacagttttgacaacacctatcaggcaataattggcattgactttttatcaaaaactatgtacttggaggatggaacaatcgggcttcggctgtgggatacggcgggtcaggaacgtctccgtagcctcattcccaggtacatccgtgattctgctgcagctgtagtagtttacgatatcacaaatgttaactcattccagcaaactacaaagtggattgatgatgtcagaacagaaagaggaagtgatgttatcatcacgctagtaggaaatagaacagatcttgctgacaagaggcaagtgtcagttgaggagggagagaggaaagccaaagggctgaatgttacgtttattgaaactagggcaaaaactggatacaatgtaaagcagctctttcgacgtgtagcagcagctttgccgggaatggaaagcacacaggacggaagcagagaagacatgagtgacataaaactggaaaagcctcaggagcaaacagtcagcgaagggggttgttcctgctactctcccatgtcatcttcaacccttcctcagaagcccccttactctttcattgactgcagtgtgaatattggcttgaaccttttcccttcattaataacgttttgcaattcatcattgctgcctgtctcgtggaggtgatctattagcttcacaagcacaaaaaaagtcagcgtcttcattatttatattttacaaaaagccaaattatttcagcatattccggtgataactttaaaaattagatacattttcttaacatttttttcttttttaatgttatgataatgtacttcaaaatgatggaaatctcaacagtatgagtatggcttggttaacgagcagtatgttcacagcctgctttatctctccttgctcttctcacctctcccttaccccgttccctatttccgtgttcttacctagcctccccccacttcctcaaaacaaacaagagatggcaaagcagcagtccgaccaagcccactggaattatcctttaattttacagataccacttgctgtaggctgtggaccaagatgtccagaattattcttgagcactgatgtaaattacttagatcttctttgaggtcagaattcagcgatcacggtaggcagtgcttgaatgagaaaagcctcctggtgcatcttcaaaatgagtcctaaagaacatactgagtacttataagtagcagaacataaaatgtatttctgactaacacaaatggtcctttcacatgtgctttattagactctgggagagaaaagtaaccaagtgcttcagaacaggtttttagtatttacttcttcatggtaagataatgaagttctaatgaactatttctcccaaggttttaaaattgtcaagagttattctgtttgtttaaaaagtaagaaacctctgtaagcaatagattttgcttgggttttctttcttaaaaaaataatactatgcaggcaagacaccataaaagtttaattccttacagaagaaccagtggaagaatttaaatttggcactacgatcaaaactactgaattagcagaaataacgatatctaaagcttaccagcaaaagaaccctcagcagaatagcaaaaactttgctcaggacatttgaggtcaaattgaagacggaagacggaaaccggaaaccgttttcttgtaagcccctagaggcagatcaggtaagcatacatagtagagggaaaggagagaatggaaataaaactgaatattatgcagatttatgccttattttttagcattttttaaggttgggtctttcaggctggttttggtttgtattagatctgtatagtttagtgatttagttttatatttaagctacgattaatattttttctttggcgatatttctttgctttttttttttaacaactttccatttttagatgtttcgttgaatctatttagagcttcaccatggcaatatgtatttcccttaaaacactgcaaacaaatatactaggagtgtgcccttttaatctttactagttattgtgagactgctgtgtaagctaataaacacatttgtaaaaacattgtttgcaggaagaaaacttcgagttacaggtcaggaaaagcctgctgaatttatgttgtaaacgttacttaacacagtataaagatgaaaagacaacaaaagtatcttcatacttcctcatcccctcattgcaacaaaaccttaaactgggagaaccttagtcccctctctttcctcttcctcctccacttcccacttattgccactttgtaatattcagagagcacttggattatggatctgaatagagaaatgcttacagataatcattagcccacataccagtaacttatacttaaagatgggatggagttataaagtgcttttataatccaatataattgctaaaggcaagggttgactctttgttttattttgacatggcatgtcctgaaataaatattggttcactatgaaaaaaaaaaaaaaaaaaaa

SEQ ID NO: 4521 - protein, 208 aa, Homo sapiens
  ref <308>: DATABASE ACCESSION NUMBER: SWISS-Prot / AAH03617
  ref <309>: DATABASE ENTRY DATE: 2003-02-01
MSTGGDFGNPLRKFKLVFLGEQSVGKTSLITRFMYDSFDNTYQATIGIDFLSKTMYLEDRTIRLQLWDTAGQERFRSLIPSYIRDSAAAVVVYDITNVNSFQQTTKWIDDVRTERGSDVIIMLVGNKTDLADKRQVSIEEGERKAKELNVMFIETSAKAGYNVKQLFRRVAAALPGMESTQDRSREDMIDIKLEKPQEQPVSEGGCSC

SEQ ID NO: 4522 - DNA, 582 bp, Rattus norvegicus
  ref <308>: DATABASE ACCESSION NUMBER: EMBL / AA799804
  ref <309>: DATABASE ENTRY DATE: 2000-03-03
aacgatcaaaaaacactttgcacttataaataaacgcttctttgatcaatattaaatgaaaactacccagaaccttacaggcctttcagcaggcggcagacatgatgttcggaagatagatgttagcttgctgtgatcagaaggatagcgctttgctgtaatttatttaaaatgtacctaacagcttccctcacagtaacttgactgaaattacaacaggaaaagaaacccagcatttattcctaggtttagacataacccacacaaagttccaactatatggcttctatactttttcgtgaaggtgcgcaaaagaaattcggatctcactttagaccaagaatttcagatgcaataaggcaacctctgaagtccaaagttcaatgaatgcacaacagttcaagcagcagataccacctcagaggaaatatttagtttgcttctttgtttccctccagtgttaatcctgctaatgtctgctaaggtcaaccatgactggaacacatgctgctgatccagttgttcaagaccagcctgggcaacacggcgagacactgcctcagaacaaggagtgaaaacaga

SEQ ID NO: 4523 - DNA, 475 bp, Rattus norvegicus
  ref <308>: DATABASE ACCESSION NUMBER: EMBL / AA799814
  ref <309>: DATABASE ENTRY DATE: 2000-03-03
agtaaagacaattttgttcatacaaaacaacagtttacaacagtctgagtgttgaacacaccatcaaggacatgggaggagctgcagacatctgggccctgccccaggcccagagatgcccaggagcccctcctccaccaacccctgagggagacacccctcctccagcacgaggggcatgggggaccatggcacaaagactcgtccccaactgctccgcctcaatcctggggagcccccacccaggttgagtagttagagggtaaggtggctggtgggcagggacagagtcaagacatctttggtgcgaagactgtcccacccaccagaccccgtgctggaaatcgagaagaccacacgtggtcctgcccttgccaaacggaggttggcaagtaccccatagttcaggggagatgcatgaaatgcaactgcctttctgggtagataaccttcccagggtcacccatgggactgg

SEQ ID NO: 4524 - DNA, 2258 bp, Homo sapiens
  ref <308>: DATABASE ACCESSION NUMBER: EMBL / U12779
  ref <309>: DATABASE ENTRY DATE: 1999-06-30
gatatcacagcaacattgaaatgctaaaaagtttttaaacactctcaatttctaattcaccatgtcacagactggtgaaaaaaaaaaaaaaagcggccgcttccccccggccgggcccccgccgccccgcggtccccagagcgccaggcccccggggggagggagggagggcgccgggccggtgggagccagcggcgcgcggtgggacccacggagccccgcgacccgccgagcctggagccgggccggctcggggaagccggctccagcccggagcgaacttcgcagcccgtcggggggcggcggggagggggcccggagccggaggagggggcggccgcgggcacccccgcctgtgccccggcgtccccgggcaccatgctgtccaactcccagggccagagcccgccggtgccgttccccgccccggccccgccgccgcagccccccacccctgccctgccgcaccccccggcgcagccgccgccgccgcccccgcagcagttcccgcagttccacgtcaagtccggcctgcagatcaagaagaacgccatcatcgatgactacaaggtcaccagccaggtcctggggctgggcatcaacggcaaagttttgcagatcttcaacaagaggacccaggagaaattcgccctcaaaatgcttcaggactgccccaaggcccgcagggaggtggagctgcactggcgggcctcccagtgcccgcacatcgtacggatcgtggatgtgtacgagaatctgtacgcagggaggaagtgcctgctgattgtcatggaatgtttggacggtggagaactctttagccgaatccaggatcgaggagaccaggcattcacagaaagagaagcatccgaaatcatgaagagcatcggtgaggccatccagtatctgcattcaatcaacattgcccatcgggatgtcaagcctgagaatctcttatacacctccaaaaggcccaacgccatcctgaaactcactgactttggctttgccaaggaaaccaccagccacaactctttgaccactccttgttatacaccgtactatgtggctccagaagtgctgggtccagagaagtatgacaagtcctgtgacatgtggtccctgggtgtcatcatgtacatcctgctgtgtgggtatccccccttctactccaaccacggccttgccatctctccgggcatgaagactcgcatccgaatgggccagtatgaatttcccaacccagaatggtcagaagtatcagaggaagtgaagatgctcattcggaatctgctgaaaacagagcccacccagagaatgaccatcaccgagtttatgaaccacccttggatcatgcaatcaacaaaggtccctcaaaccccactgcacaccagccgggtcctgaaggaggacaaggagcggtgggaggatgtcaaggggtgtcttcatgacaagaacagcgaccaggccacttggctgaccaggttgtgagcagaggattctgtgttcctgtccaaactcagtgctgtttcttagaatccttttattccctgggtctctaatgggaccttaaagaccatctggtatcatcttctcattttgcagaagagaaactgaggcccagaggcggagggcagtctgctcaaggtcacgcagctggtgactggttggggcagaccggacccaggtttcctgactcctggcccaagtctcttcctcctatcctgcgggatcactggggggctctcagggaacagcagcagtgccatagccaggctctctgctgcccagcgctggggtgaggctgccgttgtcagcgtggaccactaaccagcccgtcttctctctctgctcccacccctgccgcctcacctgcccttgttgtctctgtctctcactgtctcttctgctgtctctctactgtcttctggctctctctgtacccttcctggtgctgccgtgcccccaggaggagatgaccagtgccttggccacaatgcgcgttgactacgagcagatcaagataaaaaagattgaagatgcatccaaccctctgctgctgaagaggcggaagaaagctcgggccctggaggctgcggctctggcccactgagccaccgcgccctcctgcccacgggaggacaagcaataactctctacaggaatatattttttaaacgaagagacagaactgtccacatctgcctcctctcctcctcagctgcatggagcctggaactgcatcagtgactgaattc

SEQ ID NO: 4525 - protein, 400 aa, Homo sapiens
  ref <308>: DATABASE ACCESSION NUMBER: SWISS-Prot / P49137
  ref <309>: DATABASE ENTRY DATE: 2001-10-16
MLSNSQGQSPPVPFPAPAPPPQPPTPALPHPPAQPPPPPPQQFPQFHVKSGLQIKKNAIIDDYKVTSQVLGLGINGKVLQIFNKRTQEKFALKMLQDCPKARREVELHWRASQCPHIVRIVDVYENLYAGRKCLLIVMECLDGGELFSRIQDRGDQAFTEREASEIMKSIGEAIQYLHSINIAHRDVKPENLLYTSKRPNAILKLTDFGFAKETTSHNSLTTPCYTPYYVAPEVLGPEKYDKSCDMWSLGVIMYILLCGYPPFYSNHGLAISPGMKTRIRMGQYEFPNPEWSEVSEEVKMLIRNLLKTEPTQRMTITEFMNHPWIMQSTKVPQTPLHTSRVLKEDKERWEDVKEEMTSALATMRVDYEQIKIKKIEDASNPLLLKRRKKARALEAAALAH

SEQ ID NO: 4526 - DNA, 610 bp, Rattus norvegicus
  ref <308>: DATABASE ACCESSION NUMBER: EMBL / AA799822
  ref <309>: DATABASE ENTRY DATE: 2000-03-03
gacgttctccaccaatccctttatttacttacgacaacattctaaaggcagatatgcccattttgatgaacccagcccagcttccccatccctacaaatcctgcaccctctaggacccagggaactacacctaacctgtaagttgatttcaggaagccttgcaggggcccatggttagattgtaccttggtccccacatccaggaccaacaattccagcccctgcctttaacaccaacgtgtaatatggggtacccaggggctgcaagtgcagaacagaagcagccaaacacaggttgtctccaaggcgtgcaaacctgtgggcagcggcactgctcagcctacagagggctgggatgaacacacccctccactgtgcttactactttggcaaaagaacaaaatcaccaggagttttaagaacatgagtaaacttcaggagacagaaaaataaaacagcagcctgtacagaggctcaaggctgcccagtcagccgcactgcctgcttgccgccagcttcctcactgcggaaggatgtaagcgtttgctgccagcagccagagtgactgactcaggctccctttgttagccaccgtgactctcccttggag

SEQ ID NO: 4527 - protein, 196 aa, Rattus norvegicus
  ref <308>: DATABASE ACCESSION NUMBER: SWISS-Prot / AAH10524
  ref <309>: DATABASE ENTRY DATE: 2002-06-01
MDDTLFQLKFTAKQLEKLAKKAEKDSKAEQAKVKKALQQKNVECARVYAENAIRKKNEGVNWLRMASRVDAVASKVQTAVTMKGVTKNMAQVTKALDKALSAMDLQKVSAVMDRFEQQVQNLDVHTSVMEDSVSSATTLTTPQEQVDSLIVQIAEENGLEVLDQLSQLPEGASAVGESSVRSQEDQLSRRLAALRN

SEQ ID NO: 4528 - DNA, 610 bp, Rattus norvegicus; identical to SEQ ID NO: 4526
  ref <308>: DATABASE ACCESSION NUMBER: EMBL / AA799822
  ref <309>: DATABASE ENTRY DATE: 2000-03-03

SEQ ID NO: 4529 - protein, 196 aa, Rattus norvegicus; identical to SEQ ID NO: 4527
  ref <308>: DATABASE ACCESSION NUMBER: SWISS-Prot / AAH10524
  ref <309>: DATABASE ENTRY DATE: 2002-06-01

SEQ ID NO: 4530 - DNA, 630 bp, Rattus norvegicus
  ref <308>: DATABASE ACCESSION NUMBER: EMBL / AA799824
  ref <309>: DATABASE ENTRY DATE: 2000-03-03
caccgtgcacaggttcttttattctgtcctgtgggtgtcaacagtgctgacaggatagtgttggaacattcggaaagcacacacctgaatgttgttacattgcactacatcacaacttggtaactactgaacagttatgtctactaatacagtgaatgaaacatctgctcacaccattccctgtaaacaaggctgtgcactacagtaacacaggattatgcataccatgatatcaaggaggaaaatacctctttaaataaactattctatttataaataaactctgattttctcagtacacatttacagacctgatcaataaaaagaaacaatatatatatatatatttttttttctttaaaaagcaaatgttgagatatggaccacatagaaatccacctggggaagggtagggagcaagcatggggcaggagagttatgagttaactctgtgagcacacaccaacacgaggacaggactgactgggaggagcttgtttttacttgaattccagcaagttgcaatcaatcttgtagtacacataggggtagtattcttgctgactcaggttcaggccaggaatatccataggagcatcaatgatggcagctgcactgctgtccagatgc

SEQ ID NO: 4531 - protein, 382 aa, Rattus norvegicus
  ref <308>: DATABASE ACCESSION NUMBER: SWISS-Prot / AAC83084
  ref <309>: DATABASE ENTRY DATE: 2002-06-15
MTEFWLISAPGEKTCQQTWEKLHAATTKNNNLAVSSKFNIPDLKVGTLDVLVGLSDELAKLDAFVEGVVKKVAQYMADVLEDSKDKVQENLLASGVDLVTYITRFQWDMAKYPIKQSLKNISEIIAKGVTQIDNDLKSRASAYNNLKGNLQNLERKNAGSLLTRSLAEIVKKDDFVLDSEYLVTLLVVVPKLNHNDWIKQYETLAEMVVPRSSNVLSEDQDSYLCNVTLFRKAVDDFRHKARENKFIVRDFQYNEEEMKADKEEMTELSTDKKKQFGPLVRWLKVNFSEAFIAWIHIKALRVFVESVLRYGLPVNFQAMLLQPNKKSVKKLREVLHELYKHLDSSAAAIIDAPMDIPGLNLSQQEYYPYVYYKIDCNLLEFK

SEQ ID NO: 4532 - DNA, 1618 bp, Homo sapiens
  ref <308>: DATABASE ACCESSION NUMBER: EMBL / J05682
  ref <309>: DATABASE ENTRY DATE: 2000-03-04
tccaagttcaatattcctgacttaaaggttggcacgttggatgtcttggttggcttgtcagacgaactggctaaactggatgcatttgtagaaggagtggttaagaaagtagctcaatacatggctgatgtattggaagatagcaaagacaaagttcaagagaatctgttggctaatggagtggacttggttacttatataacaaggttccagtgggacatggccaaatatccaatcaagcagtccctgaaaaatatttctgaaataattgccaagggagtaactcagattgataatgacctgaaatctcgagcatctgcatacaataacctgaaaggaaatcttcagaatttggaacgaaagaatgcaggaagtttgctaactagaagtctagcagaaattgtgaagaaggatgactttgttcttgattcagagtatctcgtcacattactggtagtagttcccaagttaaaccacaacgactggattaagcagtatgaaacactagccgaaatggtagttccaaggtctagcaatgttctttcagaggaccaagacagttacctgtgtaatgtcaccttgtttaggaaggcagttgatgacttcagacacaaagccagagaaaacaaattcattgttcgtgacttccagtataatgaagaggagatgaaagcagataaagaagaaatgaacaggctttctactgataagaaaaaacaatttggaccacttgtacggtggctgaaagtgaattttagtgaagcatttattgcatggattcacgtgaaagcattacgggttttcgttgagtctgttttaaggtatggcttgccagtgaacttccaagcaatgctacttcagcccaataagaaaactttgaagaaactgagagaagtattacatgaattgtataaacatctagacagcagtgcagcagctattattgatgctcctatggatattccaggtttaaacctgagtcaacaagaatactacccctatgtgtactacaagattgattgcaacttgctggaattcaagtgaaaatgggctccttccccgacaatcctgtccttgtgtttgtgtgtgctaacagaaataagttgcagtatggtcgtacttttaactctagtatcctttgcttgcttcttaccccctttcctaggtgaattctcccacagtggtctgtatctcaacattttctttttaaaggaaaaaatatatatatatagtttctttttattgatcaggtctgtaaatgtgtactaaaaaaatcagagtttatttataaacagaatagtttatttaaagagaaggtctcttccttattgatatcatggtatgcattaattccatttgttactattgtgcacaaaagccctgttcacaggggaatggtgtaaaaatttatactgttttgttcactgtatttagtagacataactgttgaatagttactgaatcatgatgtaaagaatatgtgaccatcttcaggtatgggatttctgaacgtttcaaatttcaatcaatgagcactgtcaacacccacaggagagaataaaattacctgtgcaaaggtgtattgtggtgtgtgtaacttaagattacagtggaattc

SEQ ID NO: 4533 - protein, 382 aa, Homo sapiens; identical to SEQ ID NO: 2233
  ref <308>: DATABASE ACCESSION NUMBER: SWISS-Prot / P21283
  ref <309>: DATABASE ENTRY DATE: 2002-06-15

SEQ ID NO: 4534 - DNA, 427 bp, Rattus norvegicus
  ref <308>: DATABASE ACCESSION NUMBER: EMBL / AA799854
  ref <309>: DATABASE ENTRY DATE: 2000-03-03
actgggactttccccatcagtgcaaatcgtttattgtgttggtttccatggtggctggggtcatgggacggctttggctacagagctagagatctggtctgggcaaagctgctctgcagcccttgggcttcaggagcaacaaggcacaaggtgagaccttcatcaggtaagcaccacagagtagggaggggatgtgcctgctgtgccagggtgcagggagtggaaaagccttcgtcagcacaggacctggtggaattgttactgctgttggtgtttttataaagaaagagaacgtcctgaacctcgtccctgtctacgtctcccagagccagaaagtcgtacgtgactgcatagtcgtagtccagcctccacttgtcctcagaggacggtcggtctgggcatgggatgatgaaagagaggacaaaca

SEQ ID NO: 4535 - DNA, 207 bp, Rattus norvegicus
  ref <308>: DATABASE ACCESSION NUMBER: EMBL / AA799858
  ref <309>: DATABASE ENTRY DATE: 2000-03-03
aaaaattcaaagtcttctttattgcaaaaaatatgtctttgacctgaggaaaggagttgtcttccaaaacctttgcgtaagggaaagggaaatcagcaccagtgacccaaaaagcaggcgcatcaaggaattttaatgcagggccttccaaaattcccgcaaaaatctcagccccgaccccaaattgggggcaacccccttccaaag

SEQ ID NO: 4536 - protein, 359 aa, Rattus norvegicus
  ref <308>: DATABASE ACCESSION NUMBER: SWISS-Prot / P49432
  ref <309>: DATABASE ENTRY DATE: 2002-06-15
MAGVAGLVRGLCGRLSGLLKRLFHCSAPAAVQLTVREAINQGMDEELERDEKVFLLGEEVAQYDGAYKVSRGLWKKYGDKRIIDTPISEMGFAGIAVGAAMAGLRPICEFMTFNFSMQAIDQVINSAAKTYYMSAGLQPVPIVFRGPNGASAGVAAQHSQCFAAWYGHCPGLKVVSPWNSEDAKGLIKSAIRDDNPVVMLENELMYGVAFELPTEAQSKDFLIPIGKAKIERQGTHINVVCYSRPVGHCLEAAAVLSKGGIECEVINLRTIRPMDIEAIEASVMKTNHLVTVEGGWPQFGVGAEICARIMEGPAFNFLDAPAVRVTGADVPMPYAKILEDNSIPQVKDIIFAIKKTLNI

SEQ ID NO: 4537 - protein, 359 aa, Homo sapiens [sequence omitted]

SEQ ID NO: 4538 - DNA, 499 bp, Rattus norvegicus
  ref <308>: DATABASE ACCESSION NUMBER: EMBL / AA799861
  ref <309>: DATABASE ENTRY DATE: 2000-03-03
ggtaacccaaccaattctttattgtaaagatgagtgctacaaaggaggcctagtgtgtagggagtggggggtcaccttctttcaagggactccacaaggtccactagagatgacatatagccaaggaataagcctgagccagggcagcagtggttctgaactctattggaagttggggttctgaatcaagcccactgacccaggtccatgaggaagtgttcaatgtcatcgtagagactattggtgctagacaagcacaggccaagactgctgctgtccagagaggacacaccctcacgctgcacgccttccagatgtgtcttgcacagccatggctccagcttcaccaggatcaggctcttctccttgggcctccctgctgacaagtcttgcccaaaacccaggtagatggtgtaatgtggtgatccttgtcgcctccgggcccggaactcctccagttctcggaagaaatgctgaagtcaaagatgggagtatggca

SEQ ID NO: 4539 - protein, 457 aa, Rattus norvegicus
  ref <308>: DATABASE ACCESSION NUMBER: Refseq / NP_058546
  ref <309>: DATABASE ENTRY DATE: 2002-09-19
MAEVRGVQRVLFGDWLLGEVSSGQYEGLQWLNEARTVFRVPWKHFGRRDLDEEDAQIFKAWAVARGRWPPSGVNLPPPEAEAAERRERRGWKTNFRCALHSTGRFILRQDNSGDPVDPHKVYELSRELGSTVGPATENREEVSLSNALPTQGVSPGSFLARENAGLQTPSPLLSSDAGDLLLQVLQYSHILESESGADPVPPQAPGQEQDRVYEEPYAAWQVEAVPSPRPQQPALTERSLGFLDVTIMYKGRTVLQAVVGHPRCVFLYSPMAPAVRTSEPQPVIFPSPAELPDQKQLHYTETLLQHVSPGLQLELRGPSLWALRMGKCKVYWEVGSPMGTTGPSTPPQLLERNRHTPIFDFSTFFRELEEFRARRRQGSPHYTIYLGFGQDLSAGRPKEKTLILVKLEPWVCKAYLEGVQREGVSSLDSSSLGLCLSSTNSLYEDIEHFLMDLGQWP

SEQ ID NO: 4540 - DNA, 1864 bp, Homo sapiens
  ref <308>: DATABASE ACCESSION NUMBER: EMBL / U73036
  ref <309>: DATABASE ENTRY DATE: 2000-03-04
tcggcacgaggggctctggcacccagggtccggcctgcgccttcccgccaggcctggacactggttcaacacctgtgacttcatgtgtgcgcgccggccacacctgcagtcacacctgtagccccctctgccaagagatccataccgaggcagcgtcggtggctacaagccctcagtccacacctgtggacacctgtgacacctggccacacgacctgtggccgcggcctggcgtctgctgcgacaggagcccttacctcccctgttataacacctgaccgccacctaactgcccctgcagaaggagcaatggccttggctcctgagagggcagccccacgcgtgctgttcggagagtggctccttggagagatcagcagcggctgctatgaggggctgcagtggctggacgaggcccgcacctgtttccgcgtgccctggaagcacttcgcgcgcaaggacctgagcgaggccgacgcgcgcatcttcaaggcctgggctgtggcccgcggcaggtggccgcctagcagcaggggaggtggcccgccccccgaggctgagactgcggagcgcgccggctggaaaaccaacttccgctgcgcactgcgcagcacgcgtcgcttcgtgatgctgcgagataactcgggggacccggccgacccgcacaaggtgtacgcgctcagccgggagctgtgctggcgagaaggcccaggcacggaccagactgaggcagaggcccccgcagctgtcccaccaccacagggtgggcccccagggccattcctggcacacacacatgctggactccaagccccaggccccctccctgccccagctggtgacgagggggacctcctgctccaggcagtgcaacagagctgcctggcagaccatctgctgacagcgtcatggggggcagatccagtcccaaccaaggctcctggagagggacaagaagggcttcccctgactggggcctgtgctggaggcccagggctccctgctggggagctgtacgggtgggcagtagagacgacccccagccccgggccccagcccgcggcactaacgacaggcgaggccgcggccccagagtccccgcaccaggcagagccgtacctgtcaccctccccaagcgcctgcaccgcggtgcaagagcccagcccaggggcgctggacgtgaccatcatgtacaagggccgcacggtgctgcagaaggtggtgggacacccgagctgcacgttcctatacggccccccagacccagctgtccgggccacagacccccagcaggtagcattccccagccctgccgagctcccggaccagaagcagctgcgctacacggaggaactgctgcggcacgtggcccctgggttgcacctggagcttcgggggccacagctgtgggcccggcgcatgggcaagtgcaaggtgtactgggaggtgggcggacccccaggctccgccagcccctccaccccagcctgcctgctgcctcggaactgtgacacccccatcttcgacttcagagtcttcttccaagagctggtggaattccgggcacggcagcgccgtggctccccacgctataccatctacctgggcttcgggcaggacctgtcagctgggaggcccaaggagaagagcctggtcctggtgaagctggaaccctggctgtgccgagtgcacctagagggcacgcagcgtgagggtgtgtcttccctggatagcagcagcctcagcctctgcctgtccagcgccaacagcctctatgacgacatcgagtgcttccttatggagctggagcagcccgcctagaacccagtctaatgagaactccagaaagctggagcagcccacc

SEQ ID NO: 4541 - protein, 503 aa, Homo sapiens [sequence omitted]

SEQ ID NO: 4542 - DNA, 499 bp, Rattus norvegicus; identical to SEQ ID NO: 4538
  ref <308>: DATABASE ACCESSION NUMBER: EMBL / AA799861
  ref <309>: DATABASE ENTRY DATE: 2000-03-03

SEQ ID NO: 4543 - protein, 457 aa, Rattus norvegicus; identical to SEQ ID NO: 4539
  ref <308>: DATABASE ACCESSION NUMBER: Refseq / NP_058546
  ref <309>: DATABASE ENTRY DATE: 2002-09-19

SEQ ID NO: 4544 - DNA, 1864 bp, Homo sapiens; identical to SEQ ID NO: 4540
  ref <308>: DATABASE ACCESSION NUMBER: EMBL / U73036
  ref <309>: DATABASE ENTRY DATE: 2000-03-04

SEQ ID NO: 4545 - protein, 503 aa, Homo sapiens [sequence omitted]

SEQ ID NO: 4546 - DNA, 510 bp, Rattus norvegicus
  misc_feature (1)..(510): n=a, c, g or t
  ref <308>: DATABASE ACCESSION NUMBER: EMBL / AA799889
  ref <309>: DATABASE ENTRY DATE: 2000-03-03
acaagagccttttcaagttgtagagaaatttaatagaagtatatacaaattagacactgctagtatgtacaaaagtattttctacatttttgaacaatatcaactatgccacttgcagtaaacaggatgttacaaaatcatccaataaagcattttctattaagcacattacacaacataattcaattttattaaaaaaataacttcaaaatacagaatgatcctggttaggaagaaaagccatttctgtagttcacttgggtataaacagcaaggctgacactactgaatatgagcgcctgtctggtacaggttaaaccctgtccacagtggcagtaggtggtaggtggatgcccttcctctccctatgctaatccccagaacctgccaatgtctctaactcctctggggccatgggactgcaagtagagatttatctctggggtttggtatagttacattgacccttaaagcaggaggaaggcanagattttgaagaaagacgaagat

SEQ ID NO: 4547 - protein, 1482 aa, Rattus norvegicus
  ref <308>: DATABASE ACCESSION NUMBER: Refseq / NP_035048
  ref <309>: DATABASE ENTRY DATE: 2002-01-07
MVTLGSGGAGRAFSGAVRPARRRPAAALAMGAQDRPQCHFDIEINREPVGRIMFQLFSDICPKTCKNFLCLCSGEKGLGKTTGKKLCYKGSTFHRVVKNFMIQGGDFSEGNGKGGESIYGGYFKDENFILKHDRAFLLSMANRGKHTNGSQFFITTKPAPHLDGVHVVFGLVISGFEVIEQIENLKTDAASRPYADVRVIDCGVLATKLTKDVFEKKRKKPTCSEGSDSSSRSSSSSESSSESEVERETIRRRRHKRRPKVRHAKKRRKEMSSSEEPRRKRTVSPEGYSERSDVNEKRSVDSNTKREKPVVRPEEIPPVPENRFLLRRDMPAITVEPEQNIPDVAPVVSDQKPSVSKSGRKIKGRGTIRYHTPPRSRSHSESKDDDSSETPPHWKEEMQRLRAYRPPSGEKWSKGDKLSDPCSSRWDERSLSQRSRSWSYNGYYSDLSTARHSDGHHKKHRKEKKFKHKKKAKKQKHCRRHRQTKKRRIVMPDLEPSRSPTHRMKSSCVRERRSRASSSSSHHSSKRDWSKSDQDDGSASTHSSRDSYRSKSHSRSDSRGSSRSRAVSKSSSRSLNRSKSRSSSRSGPRRTSISPKKPAQLSENKPVKTEPLRPSVPQNGNVLVQPVAAENIPVIPLSDSPPPSRWKPGQKPWKPSYERIQEMKAKTTHLLPVQSTYSLTNIKATVSSSSYHKREKPSESDGSAYSKYSDRSSGSSGRSGSKSSRSRSSSRSYTRSRSRSLPTSRSLSRSPSSRSHSPNKYSDGSQHSRSSSYTSVSSDDGRRAMFRSNRKKSVTSHKRHRSNSEKTLHSKYVRGREKSSRHRKYSESRSSLDYTSDSDQSHVQVYSAPEKEKQGKVEALNDKQGKGREEGKPKPEWECPRSKKENSEDHSRDDSVSKGKNCAGSKWDSESNSEQDVTKSRKSDPRRGSEKEEGEASSDSESEVGQSHIKAKPPAKPPTSTFLPGSDGAWKSRRPQSSASESESSCSNLGNIRGEPQKQKHSKDDLKGDHTKRAREKSKAKKDKKHKAPKRKQAFHWQPPLEFGDDEEEEMNGKQVTQDPKEKRHVSEKCEAVKDGIPNVEKTCDEGSSPSKPKKGTLEQDPLAEGGHDPSSCPAPLKVEDNTASSPPSAQHLEEHGPGGGEDVLQTDDNMEICTPDRTSPAKGEVVSPLANHRLDSPEVNIIPEQDECMAHPRAGGEQESSMSESKTLGESGVKQDSSTSVTSPVETSGKKEGAEKSQMNLTDKWKPLQGVGNLSVSTATTSSALDVKALSTVPEVKPQGLRIEIKSKNKVRPGSLFDEVRKTARLNRRPRNQESSSDDQTPSRDGDSQSRSPHRSRSKSETKSRHRTRSVSYSHSRSRSRSSTSSYRSRSYSRSRSRDWYSRGRTRSRSSSYGSFHSHRTSSRSRSRSSSYDLHSRSRSYTYDSYYSRSRSRSRSQRSDSYHRGRSYNRRSRSGRSYGSDSESDRSYSHHRSPSESSRYS

SEQ ID NO: 4548 - DNA, 550 bp, Homo sapiens
  ref <308>: DATABASE ACCESSION NUMBER: EMBL / AI628792
  ref <309>: DATABASE ENTRY DATE: 1999-04-26
ttttttatttttttttttagactaaggatatattttaatttctacaagggcccctttcaagttttagggaaatttaactgaagtgtatacaaattagacattgctaatatgtacaaaagtattttatacagtttttgaacgatactagctatttgcaataaacaggatgttacaaaaacagtccaataatgcatttcctattaagaagcacaatacacaacataattcaattttattaaaaaaataacttcaaaatgtagaacaatcccctttaggaagaaaagctatttctgtagttcactctgtcagtaaacacacaagttgaacgctgcagcagagggctgtctttttccatggagaaaagaaatgaggcttctagggcctatcttttctgggtaaaaattccacctacagctgagatgggcagttattgcctgtggtaggcagaatttgaaaatgcccctccccctttcaatgagctaatctccagaacccgtgaatatgatgagatgagacagtactcctgcaattatgttctatcgcacaatca

SEQ ID NO: 4549 - protein, 656 aa, Homo sapiens
  ref <308>: DATABASE ACCESSION NUMBER: PIR / A47328
  ref <309>: DATABASE ENTRY DATE: 1999-09-24
MVNEARGNSSLNPCLEGSASSGSESSKDSSRCSTPGLDPERHERLREKMRRRLESGDKWFSLEFFPPRTAEGAVNLISRFDRMAAGGPLYIDVTWHPAGDPGSDKETSSMMIASTAVNYCGLETILHMTCCRQRLEEITGHLHKAKQLGLKNIMALRGDPIGDQWEEEEGGFNYAVDLVKHIRSEFGDYFDICVAGYPKGHPEAGSFEADLKHLKEKVSAGADFIITQLFFEADTFFRFVKACTDMGITCPIVPGIFPIQGYHSLRQLVKLSKLEVPQEIKDVIEPIKDNDAAIRNYGIELAVSLCQELLASGLVPGLHFYTLNREMATTEVLKRLGMWTEDPRRPLPWALSAHPKRREEDVRPIFWASRPKSYIYRTQEWDEFPNGRWGNSSSPAFGELKDYYLFYLKSKSPKEELLKMWGEELTSEASVFEVFVLYLSGEPNRNGHKVTCLPWNDEPLAAETSLLKEELLRVNRQGILTINSQPNINGKPSSDPIVGWGPSGGYVFQKAYLEFFTSRETAEALLQVLKKYELRVNYHLVNVKGENITNAPELQPNAVTWGIFPGREIIQPTVVDPVSFMFWKDEAFALWIERWGKLYEEESPSRTIIQYIHDNYFLVNLVDNDFPLDNCLWQVVEDTLELLNRPTQNARETEAP

SEQ ID NO: 4550 - DNA, 510 bp, Rattus norvegicus; identical to SEQ ID NO: 4546
  misc_feature (1)..(510): n=a, c, g or t
  ref <308>: DATABASE ACCESSION NUMBER: EMBL / AA799889
  ref <309>: DATABASE ENTRY DATE: 2000-03-03

SEQ ID NO: 4551 - protein, 1482 aa, Rattus norvegicus; identical to SEQ ID NO: 4547
  ref <308>: DATABASE ACCESSION NUMBER: Refseq / NP_035048
  ref <309>: DATABASE ENTRY DATE: 2002-01-07

SEQ ID NO: 4552 - DNA, 550 bp, Homo sapiens; identical to SEQ ID NO: 4548
  ref <308>: DATABASE ACCESSION NUMBER: EMBL / AI628792
  ref <309>: DATABASE ENTRY DATE: 1999-04-26

SEQ ID NO: 4553 - protein, 656 aa, Homo sapiens; identical to SEQ ID NO: 4549
  ref <308>: DATABASE ACCESSION NUMBER: PIR / A47328
  ref <309>: DATABASE ENTRY DATE: 1999-09-24

SEQ ID NO: 4554 - DNA, 523 bp, Rattus norvegicus
  ref <308>: DATABASE ACCESSION NUMBER: EMBL / AA799893
  ref <309>: DATABASE ENTRY DATE: 2000-03-03
aaaaagtttattgtaaaaaaagtaagccattcacaaaattgaatgatttttagcagtacagctaaaacccaactgcatggcagtgagaagtagtagagtggcccagaataaaggctcttctcttaaggatgttccttttagccaataacttctgtagcatgttttttaaacaaattttatgacagcagttaagcctcatagcagattccttcctaaaaaagcaaacaacatttagaactagccttttgtggggccaattcccatcattaaactagtcccaccccctcccattaacaatccacccaccctcccaccattttggggaaatgtatctaatattactttgagccattgctttaagaaaatgggtcaaaggaaggttaaataaaattaaagggccaaaacatattgtcacaatagaaatgtattcattcccttcaagtaggacttaataggcattaattaaataaaaacaattcatctccagaaaaaccaagtgcagcttaactggactagttttggc

SEQ ID NO: 4555 - DNA, 523 bp, Rattus norvegicus; identical to SEQ ID NO: 4554
  ref <308>: DATABASE ACCESSION NUMBER: EMBL / AA799893
  ref <309>: DATABASE ENTRY DATE: 2000-03-03

SEQ ID NO: 4556 - DNA, 452 bp, Rattus norvegicus
  ref <308>: DATABASE ACCESSION NUMBER: EMBL / AA799964
  ref <309>: DATABASE ENTRY DATE: 2000-03-03
ggtaaacaaaatttaatgtaaccatatagtcaaataatgtttaaaagacattagatacaacttttaaaaatttaaactacggaagaagtgcaattaaacaaaaacgtaagcatttactatactgcagcggaactgaggacaaggacgtagaaaacattcttttctcactgtgaagattcaaactctaggcaagaggtgtgcggcagttacagtaaagcacatacacttgttcagatctgaaagtcttacctcagctctggaggcttagacactgcagggggtaggggtgggggtggggagatgaagaggaagttgctttctcaaaaagcctagagcagaactattgatataatgacaagcagaaataactacacgtacttttttcactatttcaaatgaccttaggagagcctaatgggtatttaactgagtagtttacagagcacctaggt

SEQ ID NO: 4557 - DNA, 2550 bp, Homo sapiens
  ref <308>: DATABASE ACCESSION NUMBER: EMBL / AK024270
  ref <309>: DATABASE ENTRY DATE: 2002-08-06
tttagcagtctgtgatgatcagcaaaaaagcacataaagtaaaaattagttgaccatgctaaattcaattctggaatttttttttatttgggcatttctagaactttttacatttgaaagtacatgatgagtattagtaacgatgacttatgtataatcagaatctttatgacaatttagttttacaaggtcaaaagagatgagtttgctaaacccagctgtgatacctcagttggaaagggaattcaaaggtatgctttgtagaacagaaaagtatagtttttttttcatgaactttaatcattttctgtttttcctctatgtgagtcagctacaaaagtggtctaatttttacaacagtagaacttcctccttttctactgtaatcttcccactgactttactgcacaggtatgaaatactagtgtattggatcttcagtaacctttttatttcctagatgattgaaatataggtatttactccatttaaaccaggtgataagatgatgtaaatactcagggagggtattaacttgttacttttgctcgtttggggtgtaaagtgccatgactgaataatcttcaattcatgattctagagtaagtttaatttggaaaaaggggcttcacacatggtggtggttgaacattgattcttttatacttaaaaagatgaaaatgttttgtggactgatacattttatcttactgaatatgaattgtttatgtatctctactgtcaaatagcctttttgaaactcaggaaagacaaaggttcaattacaccacttttgtcaataagcaaaccaggtattttttttttctcctgttgtctggatatggcaatagattttttaaattgctgtgagaacccatatatgaaaagagaggagttgaattgtgtgtgccttttatgtcttgagatttatatgtggaaaagacgacatctacttcaaactgtatttttttcgtttttttttttttttggggaaggggggagaacggggtcttgctctgtcgcccaggctggagtgcagtggcgcgatctcagctgactgcaacctccacctcccgggttcaagggattctgcctcagcctcccgagtagctgagaccacaggtgcgtgccaccacacccggctaatttttttgtatttttagtagagacggggtttagtagagacggatcactcctgaccacgtgatccgcccacctcggcctcccaaagtgctgggattacaggcgtgagccaccacccccggcctgtattttcagagaggagagcttggtgtttttgtggtgccaagtggtaagataatgtctctttgaggcttcctatggactgcctttattttagtaaactcaagacaccagttaacctcaacagagttttggccttattagaatttgttgtgcatcttattgaaagccaggtttacatcacctcaccccattattctttttagttaaataaatttaccatgccaagtaaccagaatggagcaaattggttgatctttaaggcagtaggtttgactagctagctatcattattgtcacatctaatgctaggcaccagaaaccatttgagccaggagtgtgaatgaataattccagagacactttagacattttttaatgttttatatgaacattttacatttgtgtgattgccttagatattaaattttcctagtgctgataaaaacagcaacattcataacttattttatatattgttccaaagaaaagaatttgttttaatggtttcaaaataactgcacctgaatttgtttatgtgccttaagttctctagtgctatttcaacttttttttcaatctaaatgaagcttaccttagataaggttcatatttgtttcctatagagtaaataaacttccccttcttaaattgtgtaataagcaccaacgtgtggttgcttggcagaatgagaatgttaagggagattgttggatgtttggagtttcattatattttttgtttttattttttgatacctaggtgctttttaaaatattcagacaaatatctatcttacattgattaaacccgtgtaaattcatttgcagtatctacatcgaatgtcaaaaaagtatacttatttttgttccatacttatgtacaattttttccctcttcaggctttttcatttacctttttgaaaaagcacttactctccccttccctatcacccctcccccaaggtttctttatttaaatttttattgagagttgttggagctctaagacaatacaaatttagagttgaacaaaagtataatctgctttacaactagtatagacctaaggtcatttgctttcaattagaggctccagagtcttcatagtggaaagaatgctttgtatttaattgttcttagttaagttgtagcacgtgaatacttacttacatgttttgtttaaatatacttcttgcatagtttaattttttaaaagttgtatctaataaaatgtcttttaaccattattacttgactatatggttgtattaaattttgtttacg

SEQ ID NO: 4558 - DNA, 551 bp, Rattus norvegicus
  ref <308>: DATABASE ACCESSION NUMBER: EMBL / AA799980
  ref <309>: DATABASE ENTRY DATE: 2000-03-03
gaaaatcacaccaaaaagtactatgtcaggctgtttaaaatcgatcctttattcaggtaacaagttgcctatggtcaccgtattgtaggaaacatcagaataccatcctggaagggactatgagtacaggtgggatcagtggggacaggttaacaatgacccatttgcattcttcctccccatcttttaacaacccccaaacccccagtaaagggacaagtagtttttaacaccatcatgtgaagcacttcaactgacaaggctaaaatctaaagaataaataaaatatattgtggcagtaattcctttgagagcaaaaatcaggtgcacaagaaatcaagtgatcaggaaaactgtattcgaatgtgtggctccccaaacacagcctcaggaaaatgatacagaaaataccatacattccatttcatacaggaccagataatgactcatgttcagctacacacagaggcaattacaacctgctgaaacacaattaaaacatggggaaatgtttacaaagcatccacaacatgtaaatcatgtacagatgg

SEQ ID NO: 4559 - protein, 390 aa, Rattus norvegicus
  ref <308>: DATABASE ACCESSION NUMBER: PIR / S20392
  ref <309>: DATABASE ENTRY DATE: 2001-06-15
MGAFLDKPKTEKHNAHGAGNGLRYGLSSMQGWRVEMEDAHTAVVGIPHGLEDWSFFAVYDGHAGSRVANYCSTHLLEHITTNEDFRAADKSGFALEPSVENVKTGIRTGFLKIDEYMRNFSDLRNGMDRSGSTAVGVMISPTHIYFINCGDSRAVLCRNGQVCFSTQDHKPCNPMEKERIQNAGGSVMIQRVNGSLAVSRALGDYDYKCVDGKGPTEQLVSPEPEVYEILRAEEDEFVVLACDGIWDVMSNEELCEFVNSRLEVSDDLENVCNWVVDTCLHKGSRDNMSIVLVCFANAPKVSDEAVKRDLELDKHLESRVEEIMQKSGEEGMPDLAHVMRILSAENIPNLPPGGGLAGKRNVIEAVYSRLNPNKDNDGGAGDLEDSLVAL

SEQ ID NO: 4560 - DNA, 382 bp, Homo sapiens
  ref <308>: DATABASE ACCESSION NUMBER: EMBL / AW665936
  ref <309>: DATABASE ENTRY DATE: 2000-04-09
tttgagacagagccttggtgtgtcgcccaggcgacaaaagtgctaggattacaggcatgagctaccgtgcctggcctgtctatatttttaaaaagcatttgtcttaccttcaacccgtgattccaagtgcttatccaactctgaatcttttttcaccgcttcatctgagaccttgggagcatttgaaaagcaaactagtacaatactcatgttatctcgacttccctgtgtattaaagaaaaaaaagaaaaaaaattgtatttctacaatcaactattatttactttaaaatactttaagcaattatagtttatttaatcatccagaacgtttatgtttaacacattcatttttattccaatgaattactaaaaacacaact

SEQ ID NO: 4561 - protein, 479 aa, Homo sapiens
  ref <308>: DATABASE ACCESSION NUMBER: SWISS-Prot / O75688
  ref <309>: DATABASE ENTRY DATE: 2002-06-15
MGAFLDKPKTEKHNAHGAGNGLRYGLSSMQGWRVEMEDAHTAVVGIPHGLEDWSFFAVYDGHAGSRVANYCSTHLLEHITTNEDFRAAGKSGSALELSVENVKNGIRTGFLKIDEYMRNFSDLRNGMDRSGSTAVGVMISPKHIYFINCGDSRAVLYRNGQVCFSTQDHKPCNPREKERIQNAGGSVMIQRVNGSLAVSRALGDYDYKCVDGKGPTEQLVSPEPEVYEILRAEEDEFIILACDGIWDVMSNEELCEYVKSRLEVSDDLENVCNWVVDTCLHKGSRDNMSIVLVCFSNAPKVSDEAVKKDSELDKHLESRVEEIMEKSGEEGMPDLAHVMRILSAENIPNLPPGGGLAGKRNVIEAVYSRLNPHRESDGASDEAEESGSQGKLVEALRQMRINHRGNYRQLLEEMLTSYRLAKVEGEESPAEPAATATSSNSDAGNPVTMQESHTESESGLAELDSSNEDAGTKMSGEKI

SEQ ID NO: 4562 - DNA, 712 bp, Rattus norvegicus
  misc_feature (1)..(712): n=a, c, g or t
  ref <308>: DATABASE ACCESSION NUMBER: EMBL / AA799991
  ref <309>: DATABASE ENTRY DATE: 2000-03-03
acaatcagtaatataatcaaatacacaattatatacaaggattatatacattttgcccagacttttacatcacagtacatagtttccattaaaaatattgtttacatttatcaccaaacaataaaacccaacaacagtagtgttacagcacctgttagtacagacagctttttcataaattacatcataagaaaatatacggctgtaaattgggcttttaaaaatgtctttttataaaatctgaacatacaatgtttcattcacagaatgtttttttttttcaatgttctgactgtacccttgtgcataaaacaaccagctggaatatttagtaaatgctaccctccctctaaaactataagcactgtttgaattacttaggctgagctttctttatgatgagtctggcatggagtttggtgagaaaacaacgctggctttgctataanaaagtcatatgatggtaattaaatctaaagattccaggaaataatacatagggaattgattcagaaggcatattttcattagaatactacacgtaagaaaaggaaaggaaatgcaataatgtccaaaagtaaaccttcggaccataaaggttnagaaaaaaacattcaattccgccaaatccagattacatctccattatttaggaaaatcaacagctaattcagggttagggaaacacattcaggaaatttgctanaccgtg

SEQ ID NO: 4563 - DNA, 6298 bp, Homo sapiens
  ref <308>: DATABASE ACCESSION NUMBER: EMBL / AF288393
  ref <309>: DATABASE ENTRY DATE: 2001-05-09
ccgcgttctgcctggtgtcggccacctccgtgtggacggcgggggccgagcccatgagtagggaggagaaacagaagcttgggaatcaagtactggaaatgtttgatcatgcttatggtaactatatggaacatgcttaccctgctgatgaactcatgcctttaacctgtagaggtcgagttagaggccaagagccaagtcgcggtgacgttgatgatgccttgggaaaattttctctgacactgattgattctttggacactcttgtggttttaaataaaactaaagaatttgaagatgcagtgagaaaagttttaagagatgttaatttagataacgatgtagtcgtatcagtctttgaaacaaacatcagagttcttgggggtcttttgggtgggcactccctggcaatcatgctgaaagaaaaaggtgaatatatgcagtggtacaatgatgaacttctccaaatggcaaagcagttaggttacaaacttttaccggctttcaacactaccagtggccttccttatccaagaattaatttaaagtttggcatcagaaaaccagaagctcggacaggaactgagacagatacctgtacagcttgtgcaggtaccttgatccttgaatttgctgctttaagtcgattcacaggagcaacaatatttgaggaatatgccagaaaagctcttgattttctctgggaaaaaagacagcgaagtagtaatttagtgggcgtgactataaatattcatactggagattgggtacgaaaagatagtggagttggagcagggattgattcatattatgaatatctgttgaaagcctatgtcttgcttggagatgacagttttctggaaagatttaacacacactatgatgccataatgaggtatattagccagccacctcttctacttgatgtgcatatccacaaaccaatgctgaatgctcggacttggatggatgctttgcttgccttcttcccaggcttgcaggtgttaaagggggatattagacctgctattgaaactcatgaaatgttatatcaggtgattaaaaaacacaattttctaccagaggcatttaccacagatttcagagtacactgggctcaacatcctttaaggccagaatttgcagaaagtacctacttcttatataaagctacaggagatccttactaccttgaagtagggaagacacttattgaaaatttaaataaatatgctagagtgccttgcggatttgctgccatgaaggatgttcgtactggaagtcatgaggacagaatggattctttcttcttggctgaaatgtttaaatatctttacctgttatttgctgataaagaagacattatttttgacatagaagattacatctttacaacagaagctcatctgttacctctttggctctctactacaaatcaaagcatctctaaaaagaacacaacctcggaatatacagaactggatgacagtaacttcgattggacttgtccaaatactcagatcctctttcctaatgacccattgtatgctcaaagtattcgtgagcccttgaaaaatgtggtggataagagctgtcctagaggcatcatcagagtagaggagagtttcaggagtggagctaaaccccctctgagagccagagatttcatggccactaaccctgagcatttagaaatcctgaagaagatgggggtgagtttgattcacctcaaagatgggagagtccagttggtccaacatgcaatccaagctgctagttcaatcgacgctgaagatgggttgaggttcatgcaggagatgattgaattgtcaagtcagcaacaaaaagaacagcagctgcctccacgagctgtacaaattgtttcccacccattttttggcagggtagtattgactgctggaccagctcagtttgggctggatctgtctaaacataaagagacaagaggatttgttgcaagcagtaaaccatccaatggttgttcagagcttactaacccagaggcagtgatgggaaaaatcgcactgatacaaagaggacagtgcatgtttgcagaaaaggcacgcaacatccagaatgctggagccattggtggcattgttattgatgacaatgaggggagcagcagtgatactgcccctctgttccagatggcaggtgatggaaaggatacagatgacatcaagatccccatgctgttcttattcagcaaagaaggaagtatcatactggatgccatccgggaatatgaggaggtagaagtgctcctctctgataaagcaaaagatcgagatcctgaaatggaaaatgaagaacaaccatcctctgaaaatgattctcagaatcagagtggtgaacagatttcatcaagttctcaggaggttgatttggttgatcaagagtcttctgaggaaaattctctaaattctcacccagaatcattatctctagcagatatggacaatgctgcaagcatttccccttctgaacagacttctaatcccacagaaaaccatgagactacaaatcttaatggtgaatgtacagatttagataaccagcttcaagaacaatcagaaactgaggaagattccaatcctaatgttagctggggtaaaaaggtccagcctatagactccatattagcagactggaatgaagatatagaagcatttgaaatgatggagaaggatgagctatgacttgctaaacaatctgttggtaggtatttaaaaagaaaaggtaaactgtgtgtggttaatagacatcctaatactaagcaggctttctaatgggaggctttaagtatggtgatgaacaaccacgttctgactggcgtagttatcgtaggaatctggagcatgctgtgttagaattgaccttgtttaaaactgtcccatcaaaaatggaaatccacagttcccccttcaaatgcagcactgcaccaccctgcaacacctcaggccagggaaagattactgagcattcctgcgaaccagatttctgttgtctctggatagacaagaaacaaaattcatttagtagtggagtggggaataggagtttggatagccttctaattaaaggaagctcgcctttcttggttttgggggttagaggctcttttgggaagatgcatccgagtattgtggcattctgattatgctgccttcacaaaacactctaagtgacctaagtggttatgaagcaaatgcatttatggtgaaaacagtctttgctcattgctttctcttgtttcatttagtgacaaatgatcaagatgacttgattttttttccttcttaacaatgtcttttttatttaaaccaaaggtgaagccagtgtactttctcagtgagttctctgcataaagactaatcagtgggaccaggtaaaaaggtcatataatacattgtggagattgcttacttaatacttctgaaaaatggagtaagggagaaactgtaatgttgcaatatgaacctcccattgggccttccatagggaaagctgtgactactctgaaatggaacctagcattatatccttgtagggtagattataaatcatttccagttcatttctcttagaggtgattacctctagccatcagccttactccatcccatgtttggtatgcaatttgagccacaaggctcgtatcgccaacagctatatacattttgttccatttttctgtcttacagagccatgataaaactgtggttagtgagttaaaattcctggagtaactactgtttttctcctttgaaacttaggtttctaaagttgcacctaaggaatctgtcacattttctgttgaatcatggtttttgtttttgtttttaacagatattccttctgatacggacttgaaaattagtgtatggtgacctgtgtttaaaaaaaaaagtacaatacaactacatatagctatatagcttaatgagacttccacccccccccccttttttttttggtttgttgttgttgtagtagtctggtgctggccacatttaagtcttaaaaatttttaaattttgttgttgatgtttgtacacagccctgttgttgaaatcatggctttattcattttatttattttttaaacttgcctgaatttgttctaaaggaatatttaagagacataattttcttctctttaccataacattacacaaaactttttcctaaaacacggttgtgaggtactgatgaggtgtaagtggagctgttaaaaacagcagtgctgtattgcagttatgtatattcgtgtacagtatgtttagatcccaggtaaacatattcttttctgagaggataaatacctgcattcagatattccaggtaaatataattgagtcagggagtagtaaatctgatggagaattcactttggggaggggaaaaagaatagtatgcaagacccttattggcttttaattatacctgaaaccaaaatggatatttttagtctctctgcatgtgagatttggtgtaacaagatagaactataatatatacagtatatggaaggatagatatagtgctttgttcattttaattgcaaagctgccaaaatagttgaagcttaattacttgacttgccttgatttataggactggggcttggagaaaatgagcagatgttcctctaagacatcgattacagaagccttatatacatggatttgattttgtatttgtagctgaaagtcactgttgtctaaaactaacttttctaagttatcaaaacaacctaatttcttttccaacaaggagaacttaatggcatgaaggattgtgtgacacattggaaaagccagcttactgccactctcttcctttggccattagagggaggtgttgcctttcattgacgcttagaagcaaattgttcacttgttaagaaaagtaaatccttaaaaaaagaaaaggaaaaaatttaaccaatttttcttaatacccagaaggaattatactcaatatttccctagttaagaaaagaggagataatgttcgtctaaaaaactccaacgttgtaattacaactctacattcatttacttacttgacatactgccacaaagtagtttttgagttcattaaaaattccaaaggcattagttgtttttttttttttttagtgttttgttttttagttaacttttatagacattttagtaacttgctaaagattcaggggattctatgaaccccgaatttagaaacatctggtctacctcagttaaatgttgactgcttagaaatatagctgaagtgatcaccacagccataaaattgtttaagaaagatttatataatgtttacaaatctggaatcaaggattttagctgaaatcctttaagagatattagagcaagtatttaattcaggtattttcaagttttaaaacttaacctgtttacctacttaaaaataaaatagctagtttttttctgcatataaaagttcattgaaatgatatgcccttatttgcaatacttttcccataaagttttaagtgtgaaagaattgtaatttactagatatgtttggtatgggatattttgttaggcaagttttcttttttcttcttaaattgcaataggcttccaaaaagagtataattgtttcagaacaaattaactcttggcattatacgtctccctttttctttacagtattagtaaaaagaaaaattgtacactttctgattttaacttcactaatgtaattactctctcaagaagcttttaaaatttaaattaccatcacacaaccttttttatagtaaagccaacatttgttctctcaccaaaccccatgccaaattcatcatgaagaaagctcagcataagtaattcaaatactgcttataattttagaggggggtagaatttagtaaatattccagccggtcgttttatgcacaaggcttcagtcagaacatagaaaaaaaaaacattctgtgaatgaaatattgtatgttcagattttataaaagacatttttaaaagcccaatttacagccgtatattttcttatgatgtaatttatgaaaaagatgtctgtactaacaggtgctgtaacactactgttgttggattttattgtttggtgataaatgtatacaatatttctaagggaaactatgtactgtgatgtaaaagtctgggcaaaatgtatataatcctgtatataattatgtatttgattataattactgattgtaaagatttaataaaatatgtaaatattccaaaaaaaaaaaaaa

SEQ ID NO: 4564 - protein, 889 aa, Homo sapiens
  ref <308>: DATABASE ACCESSION NUMBER: SWISS-Prot / Q9BZQ6
  ref <309>: DATABASE ENTRY DATE: 2002-06-15
MSREEKQKLGNQVLEMFDHAYGNYMEHAYPADELMPLTCRGRVRGQEPSRGDVDDALGKFSLTLIDSLDTLVVLNKTKEFEDAVRKVLRDVNLDNDVVVSVFETNIRVLGGLLGGHSLAIMLKEKGEYMQWYNDELLQMAKQLGYKLLPAFNTTSGLPYPRINLKFGIRKPEARTGTETDTCTACAGTLILEFAALSRFTGATIFEEYARKALDFLWEKRQRSSNLVGVTINIHTGDWVRKDSGVGAGIDSYYEYLLKAYVLLGDDSFLERFNTHYDAIMRYISQPPLLLDVHIHKPMLNARTWMDALLAFFPGLQVLKGDIRPAIETHEMLYQVIKKHNFLPEAFTTDFRVHWAQHPLRPEFAESTYFLYKATGDPYYLEVGKTLIENLNKYARVPCGFAAMKDVRTGSHEDRMDSFFLAEMFKYLYLLFADKEDIIFDIEDYIFTTEAHLLPLWLSTTNQSISKKNTTSEYTELDDSNFDWTCPNTQILFPNDPLYAQSIREPLKNVVDKSCPRGIIRVEESFRSGAKPPLRARDFMATNPEHLEILKKMGVSLIHLKDGRVQLVQHAIQAASSIDAEDGLRFMQEMIELSSQQQKEQQLPPRAVQIVSHPFFGRVVLTAGPAQFGLDLSKHKETRGFVASSKPSNGCSELTNPEAVMGKIALIQRGQCMFAEKARNIQNAGAIGGIVIDDNEGSSSDTAPLFQMAGDGKDTDDIKIPMLFLFSKEGSIILDAIREYEEVEVLLSDKAKDRDPEMENEEQPSSENDSQNQSGEQISSSSQEVDLVDQESSEENSLNSHPESLSLADMDNAASISPSEQTSNPTENHETTNLNGECTDLDNQLQEQSETEEDSNPNVSWGKKVQPIDSILADWNEDIEAFEMMEKDEL

SEQ ID NO: 4565 - DNA, 649 bp, Rattus norvegicus
  misc_feature (1)..(649): n=a, c, g or t
  ref <308>: DATABASE ACCESSION NUMBER: EMBL / AA800004
  ref <309>: DATABASE ENTRY DATE: 2000-03-03
gccacatataggttagtttatttcctctgagtctctgagaagtcagcagggatataaggcgaactggtaggagctgcagggggcctgagcagagctgatgcagggagagaggccggcgtgggctggtagaagagatttaaatattcaggtccaaaagccagttagtgagtctccttcatctgtctttggattttgtgtagcatctcctgcatccgccgcagctcttcatctttctcccggatgagcttctcagtttctggatctgtccgattccgttccttcactactagccgggtcatgctctggatgcactgtgccctgtagttctcatagtgtgtctctcgggtcacatcctttaggtcctgtaatttgaagtcctcatcctcatcagaatcacaatctgggaactgatagatcttgattccaaagtgctcgatctcctcncggattttgcatttctttcggtccacttcagagggtgtcagtgtgtctgccttaggcaagataggcacaatgttgacccgctgatgcaggccctcatgaattcagcatccaatgcncggagcccgtggccaaaggtgagatgagtacagcagcatgcacctgttgtctgatgttctgcattcaggcagtccatctggaaatctcg

SEQ ID NO: 4566 - protein, 378 aa, Rattus norvegicus
  ref <308>: DATABASE ACCESSION NUMBER: SWISS-Prot / BAA98051
  ref <309>: DATABASE ENTRY DATE: 2001-12-01
MDSLAAPQDRLVEQLLSPRTQAQRRLKDIDKQYVGFATLPNQVHRKSVKKGFDFTLMVAGESGLGKSTLVHSLFLTDLYKDRKLLSAEERINQTVEILKHTVDIEEKGVKLKLTIVDTPGFGDAVNNFECWKPITDYVDQQFEQYFRDESGLNRKNIQDNRVHCCLYFISPFGHGLRPVDVGFMKALHEKVNIVPLIAKADCLVPSEIRKLKDRIREEIDKFGIHVYQFPECDSDEDEDFKQQDRELKESAPFAVIGSNTVVEAKGQRVRGRLYPWGIVEVENQAHCDFVKLRNMLIRTHMHDLKDVTCDVHYENYRAHCIQQMTSKLTQDSRMESPIPILPLPTPDSETEKLIRMKDEELRRMQEMLQKMKQRMQDQ

SEQ ID NO: 4567 - DNA, 1768 bp, Homo sapiens
  ref <308>: DATABASE ACCESSION NUMBER: EMBL / AF035811
  ref <309>: DATABASE ENTRY DATE: 2000-03-03
ttggcctcgaggccaagattcggcacgaggaacagcatcaaaacaaggctgtttctgtgtgtgaggaactttgcctgggagataaaattagacctagagctttctgacagggagtctgaagcgtgggacatggaccgttcactgggatggcaagggaattctgtccctgaggacaggactgaagctgggatcaagcgtttcctggaggacaccacggatgatggagaactgagcaagttcgtgaaggatttctcaggaaatgcgagctgccacccaccagaggctaagacctgggcatccaggccccaagtcccggagccaaggccccaggccccggacctctatgatgatgacctggagttcagacccccctcgcggccccagtcctctgacaaccagcagtacttctgtgccccagcccctctcagcccatctgccaggccccgcagcccatggggcaagcttgatccctatgattcctctgaggatgacaaggagtatgtgggctttgcaaccctccccaaccaagtccaccgaaagtccgtgaagaaaggctttgactttaccctcatggtggcaggagagtctggcctgggcaaatccacacttgtcaatagcctcttcctcactgatctgtaccgggaccggaaacttcttggtgctgaagagaggatcatgcaaactgtggagatcactaagcatgcagtggacatagaagagaagggtgtgaggctgcggctcaccattgtggacacaccaggttttggggatgcagtcaacaacacagagtgctggaagcctgtggcagaatacattgatcagcagtttgagcagtatttccgagacgagagtggcctgaaccgaaagaacatccaagacaacagggtgcactgctgcctgtacttcatctcacccttcggccatgggctccggccattggatgttgaattcatgaaggccctgcatcagcgggtcaacatcgtgcctatcctggctaaggcagacacactgacacctcccgaagtggaccacaagaaacgcaaaatccgggaggagattgagcattttggaatcaagatctatcaattcccagactgtgactctgatgaggatgaggacttcaaattgcaggaccaagccctaaaggaaagcatcccatttgcagtaattggcagcaacactgtagtagaggccagagggcgacgagttcggggtcgactctacccctggggcatcgtggaagtggaaaacccagggcactgcgactttgtgaagctgaggacaatgctggtacgtacccacatgcaggacctgaaggatgtgacacgggagacacattatgagaactaccgggcacagtgcatccagagcatgacccgcctggtggtgaaggaacggaatcgcaacaaactgactcgggaaagtggtaccgacttccccatccctgctgtcccaccagggacagatccagaaactgagaagcttatccgagagaaagatgaggagctgcggcggatgcaggagatgctacacaaaatacaaaaacagatgaaggagaactattaactggctttcagccctggatatttaaatctcctcctcttcttcctgtccatgccggcccctcccagcaccagttttgctcaggccccttcagctactgccacttcgccttacatccctgctgactgcccagagactcagaggaaataaagtttaataaatctgtaggtggctaaaaaaaaaaaaaaaaaaaaaaaaaaaaaaa

SEQ ID NO: 4568 - protein, 478 aa, Homo sapiens
  ref <308>: DATABASE ACCESSION NUMBER: SWISS-Prot / O43236
  ref <309>: DATABASE ENTRY DATE: 2002-06-15
MDRSLGWQGNSVPEDRTEAGIKRFLEDTTDDGELSKFVKDFSGNASCHPPEAKTWASRPQVPEPRPQAPDLYDDDLEFRPPSRPQSSDNQQYFCAPAPLSPSARPRSPWGKLDPYDSSEDDKEYVGFATLPNQVHRKSVKKGFDFTLMVAGESGLGKSTLVNSLFLTDLYRDRKLLGAEERIMQTVEITKHAVDIEEKGVRLRLTIVDTPGFGDAVNNTECWKPVAEYIDQQFEQYFRDESGLNRKNIQDNRVHCCLYFISPFGHGLRPLDVEFMKALHQRVNIVPILAKADTLTPPEVDHKKRKIREEIEHFGIKIYQFPDCDSDEDEDFKLQDQALKESIPFAVIGSNTVVEARGRRVRGRLYPWGIVEVENPGHCDFVKLRTMLVRTHMQDLKDVTRETHYENYRAQCIQSMTRLVVKERNRNKLTRESGTDFPIPAVPPGTDPETEKLIREKDEELRRMQEMLHKIQKQMKENY

SEQ ID NO: 4569 - DNA, 579 bp, Rattus norvegicus
  misc_feature (1)..(579): n=a, c, g or t
  ref <308>: DATABASE ACCESSION NUMBER: EMBL / AA800024
  ref <309>: DATABASE ENTRY DATE: 2000-03-03
aggtttgcaggtgcctctagtagccagaagatggcgctaaaggtatgagagatctgacccacaccgtggatgctgagaactgagctactgaatccttttgcaatggcagtacacgcttaagcagagccatctctccagcccctagatcttactttaactgtgtttgtgcctgtgcctgcgcagtgagcacacaggtccctcagaggtccttggagcacctggagctgaagttcaaagcaattgtgagacattcatgggtgctgggaactgaagtccattccccctcgaagagcagtgtctgtttaaccactgagcaggctctccagcatcctgaacttacattttgttgaaatagggtctcactgtgtagccctaactggcttggaactctgttgattangttggccttgaagattcgcctccctatgcacccgagtgctgggattacgaggaaatgcacacactcggcctgaattttcctcagtggaggttaaagggagtggcggttacaactgggaaaacctttaggaaactaagcctcgtagacaagcttggcttcaaatgtccgcccaaggggac

SEQ ID NO: 4570 - protein, 1472 aa, Rattus norvegicus
  ref <308>: DATABASE ACCESSION NUMBER: Refseq / NP_033860
  ref <309>: DATABASE ENTRY DATE: 2002-09-19
MVAVAAAAATEARLRGSTTTTAAPAGRKGRQHRPCTATGAWRPGPRARLCLPRVLSRALPPPPLLPLLFSLLLLPLPREAEAAAVAAAVSGSAAAEAKECDRPCVNGGRCNPGTGQCVCPTGWVGEQCQHCGGRFRLTGSSGFVTDGPGNYKYKTKCTWLIEGQPNRIMRLRFNHFATECSWDHLYVYDGDSIYAPLIAAFSGLIVPERDGNETAPEVTVTSGYALLHFFSDAAYNLTGFNITYNFDMCPNNCSGRGECKSSNSSSAVECECSENWKGESCDIPHCTDNCGFPHRGICNASDTRGCSCFPHWQGPGCSIPVPANQSFWTREEYSDLKLPRASHKAVVNGNIMWVVGGYMFNHSDYSMVLAYDLTSREWLPLNHSVNSVVVRYGHSLALHKDKIYMYGGKIDSTGNVTNELRVFHIHNESWVLLTPKAKDQYAVVGHSAHIVTLASGRVVMLVIFGHCPLYGYISVVQEYDLEKNTWSILHTQGALVQGGYGHSSVYDDRTKALYVHGGYKAFSANKYRLADDLYRYDVDTQMWTILKDSRFFRYLHTAVIVSGTMLVFGGNTHNDTSMSHGAKCFSSDFMAYDIACDRWSVLPRPELHHDVNRFGHSAVLYNSTMYVFGGFNSLLLSDVLVFTSEQCDAHRSEAACVAAGPGIRCLWDTQSSRCTSWELATEEQAEKLKSECFSKRTLDHDRCDQHTDCYSCTANTNDCHWCNDHCVPVNHSCTEGQISIAKYESCPKDNPMYYCNKKTSCRSCALDQNCQWEPRNQECIALPENICGNGWHLVGNSCLKITTAKENYDNAKLSCRNHNAFLASLTSQKKVEFVLKQLRLMQSSQSMSKLTLTPWVGLRKINVSYWCWEDMSPFTNSLLQWMPSEPSDAGFCGILSEPSTRGLKAATCINPLNGSVCERPANHSAKQCRTPCALRTACGECTSSSSECMWCSNMKQCVDSNAYVASFPFGQCMEWYTMSSCPPENCSGYCTCSHCLEQPGCGWCTDPSNTGKGKCIEGSYKGPVKMPSQASAGNVYPQPLLNSSMCLEDSRYNWSFIHCPACQCNGHSKCINQSICEKCEDLTTGKHCETCISGFYGDPTNGGKCQPCKCNGHASLCNTNTGKCFCTTKGVKGDECQLCEVENRYQGNPLKGTCYYTLLIDYQFTFSLSQEDDRYYTAINFVATPDEQNRDLDMFINASKNFNLNITWATSFPAGTQTGEEVPVVSKTNIKEYKDSFSNEKFDFRNHPNITFFVYVSNFTWPIKIQIAFSQHSNFMDLVQFFVTFFSCFLSLLLVAAVVWKIKQSCWASRRREQLLREMQQMASRPFASVNVALETDEEPPDLIGGSIKTVPKPIALEPCFGNKAAVLSVFVRLPRGLGGIPPPGQSRSRCGQCPGGHFSADANSVQGEVRSCKKPEAAAACTAWNLHLILGQEFALTEGVWSTKLSTGEAAGRKQAWGRRLGTLEASNSCA

SEQ ID NO: 4571 - DNA, 1723 bp, Homo sapiens
  ref <308>: DATABASE ACCESSION NUMBER: EMBL / AK021433
  ref <309>: DATABASE ENTRY DATE: 2002-08-06
ctcgaccctggacgtctaccttccggaggcccacatcttgcccactccgcgcgcggggctagcgcgggtttcagcgacgggagccctcaagggacatggcaactacagcggcgccggcgggcggcgcccgaaatggagctggcccggaatggggagggttcgaagaaaacatccagggcggaggctcagctgtgattgacatggagaacatggatgatacctcaggctctagcttcgaggatatgggtgagctgcatcagcgcctgcgcgaggaagaagtagacgctgatgcagctgatgcagctgctgctgaagaggaggatggagagttcctgggcatgaagggctttaagggacagctgagccggcaggtggcagatcagatgtggcaggctgggaaaagacaagcctccagggccttcagcttgtacgccaacatcgacatcctcagaccctactttgatgtggagcctgctcaggtgcgaagcaggctcctggagtccatgatccctatcaagatggtcaacttcccccagaaaattgcaggtgaactctatggacctctcatgctggtcttcactctggttgctatcctactccatgggatgaagacgtctgacactattatccgggagggcaccctgatgggcacagccattggcacctgcttcggctactggctgggagtctcatccttcatttacttccttgcctacctgtgcaacgcccagatcaccatgctgcagatgttggcactgctgggctatggcctctttgggcgttgcattgtcctgttcatcacctataatatccacctccacgccctcttctacctcttctggctgttggtgggtggactgtccacactgcgcatggtagcagtgttggtgtctcggaccgtgggccccacatcttgcccactccgcgcgcggggctagcgcgggtttcagcgacgggagccctcaagggacatggcaactacagcggcgccggcgggcggcgcccgaaatggagctggcccggaatggggagggttcgaagaaaacatccagggcggaggctcagctgtgattgacatggagaacatggatgatacctcaggctctagcttcgaggatatgggtgagctgcatcagcgcctgcgcgaggaagaagtagacgctgatgcagctgatgcagctgctgctgaagaggaggatggagagcaccctggctgccctacacatgctcttcctgctctatctgcattttgcctaccacaaagtggtagaggggatcctggacacactggagggccccaacatcccgcccatccagagggtccccagagacatccctgccatgctccctgctgctcggcttcccaccaccgtcctcaacgccacagccaaagctgttgcggtgaccctgcagtcctctttcccgcagctgcagagaggaggaagactattaaaggacagtcctgatgacatgtttcgtagatggggtttgcagctgccactgagctgtagctgcgtaagtacctccttgatgcctgtcggcacttctgaaaggcacaaggccaagaactcctggccaggactgcaaggctctgcagccaatgcagaaaatgggtcagctcctttgagaacccctccccacctaccccttccttcctctttatctctcccacattgtcttgctaaatatagacttggtaattaaaatgttgattgaagtctgg

SEQ ID NO: 4572 - protein, 1198 aa, Homo sapiens
  ref <308>: DATABASE ACCESSION NUMBER: Refseq / NP_036202
  ref <309>: DATABASE ENTRY DATE: 2002-11-05
MVAAAAATEARLRRRTAATAALAGRSGGPHCVNGGRCNPGTGQCVCPAGWVGEQCQHCGGRFRLTGSSGFVTDGPGNYKYKTKCTWLIEGQPNRIMRLRFNHFATECSWDHLYVYDGDSIYAPLVAAFSGLIVPERDGNETVPEVVATSGYALLHFFSDAAYNLTGFNITYSFDMCPNNCSGRGECKISNSSDTVECECSENWKGEACDIPHCTDNCGFPHRGICNSSDVRGCSCFSDWQGPGCSVPVPANQSFWTREEYSNLKLPRASHKAVVNGNIMWVVGGYMFNHSDYNMVLAYDLASREWLPLNRSVNNVVVRYGHSLALYKDKIYMYGGKIDSTGNVTNELRVFHIHNESWVLLTPKAKEQYAVVGHSAHIVTLKNGRVVMLVIFGHCPLYGYISNVQEYDLDKNTWSILHTQGALVQGGYGHSSVYDHRTRALYVHGGYKAFSANKYRLADDLYRYDVDTQMWTILKDSRFFRYLHTAVIVSGTMLVFGGNTHNDTSMSHGAKCFSSDFMAYDIACDRWSVLPRPDLHHDVNRFGHSAVLHNSTMYVFGGFNSLLLSDILVFTSEQCDAHRSEAACLAAGPGIRCVWNTGSSQCISWALATDEQEEKLKSECFSKRTLDHDRCDQHTDCYSCTANTNDCHWCNDHCVPRNHSCSEGQISIFRYENCPKDNPMYYCNKKTSCRSCALDQNCQWEPRNQECIALPENICGIGWHLVGNSCLKITTAKENYDNAKLFCRNHNALLASLTTQKKVEFVLKQLRIMQSSQSMSKLTLTPWVGLRKINVSYWCWEDMSPFTNSLLQWMPSEPSDAGFCGILSEPSTRGLKAATCINPLNGSVCERPANHSAKQCRTPCALRTACGDCTSGSSECMWCSNMKQCVDSNAYVASFPFGQCMEWYTMSTCPPENCSGYCTCSHCLEQPGCGWCTDPSNTGKGKCIEGSYKGPVKMPSQAPTGNFYPQPLLNSSMCLEDSRYNWSFIHCPACQCNGHSKCINQSICEKCENLTTGKHCETCISGFYGDPTNGGKCQPCKCNGHASLCNTNTGKCFCTTKGVKGDECQLCEVENRYQGNPLRGTCYYTLLIDYQFTFSLSQEDDRYYTAINFVATPDEQNRDLDMFINASKNFNLNITWAASFSAGTQAGEEMPVVSKTNIKEYKDSFSNEKFDFRNHPNITFFVYVSNFTWPIKIQVQTEQ

SEQ ID NO: 4573 - DNA, 613 bp, Rattus norvegicus
  misc_feature (1)..(613): n=a, c, g or t
  ref <308>: DATABASE ACCESSION NUMBER: EMBL / AA800034
  ref <309>: DATABASE ENTRY DATE: 2000-03-03
aaaaacaaagtttaatcatacttattaataacaagactttatataaaaatgcagagtataaattcaacttccattatttcagttaacttccaattatcctttccaaattaaaacaaaataccaaacagggcaaattgtaaatttaaatccaagactattaagttacaaatggagtaaatcacaaaataaaaatgcttaacattaagaatctacctatcacataagagaaaaaacagaagtgtgtgcattctgaatgtcctattttaccagcatgatgtatggggtccttttatgtacaaactctgccacgggatcactgttatgtctcactgaacttcgtaatcctatgtgcaacatgtgcaaggtggagaagagggtccacacttagcatacaggactgacacactgattccttaagggagttgatgatacggctacagacttcacacagagaaatgtatttggtagcacagagagagctaaacattttgagagttaanaacaaagacagtcagtcattgggaaacattcaaggacaaagagaactgcataatcactctcacaacaaactttattactaattaaaattaaaatttgaggtgggaccctagtt

SEQ ID NO: 4574 - DNA, 613 bp, Rattus norvegicus; identical to SEQ ID NO: 4573
  misc_feature (1)..(613): n=a, c, g or t
  ref <308>: DATABASE ACCESSION NUMBER: EMBL / AA800034
  ref <309>: DATABASE ENTRY DATE: 2000-03-03

SEQ ID NO: 4575 - DNA, 514 bp, Rattus norvegicus
  misc_feature (1)..(514): n=a, c, g or t
  ref <308>: DATABASE ACCESSION NUMBER: EMBL / AA800036
  ref <309>: DATABASE ENTRY DATE: 2000-03-03
acataaaactttcaaggaaccatgtggatccgacagaatgttaatagcacatctaagaataaacctcaggtagtcaacattcacaaaatgttgaaaactgattaaaatatacgtagtatggagagctacgacttcactacgaggcaggcatgtattttgacttgttagcaccgtcatttacagttcctcttcaaagctacagtgaagaatgaaatggtcaatggtaaaatactgctccaacttaaagtttagctaaacaaataaaaataaagttaaaactaccctctgcttatccacggttgttggtggtgtaagtactgtacagttctcgtaacgatattttattaaaaggcctgatagtaagtggagagagtaaaaaaaaaaagaattaaattaaaataaattaagaagcgaaagcagtcacgggacaagaacgtggacattacaatgactaacacgatgtctctttcngagccactttagcacagaatttttacgacacagagcagataat

SEQ ID NO: 4576 - DNA, 2112 bp, Homo sapiens
  ref <308>: DATABASE ACCESSION NUMBER: Refseq / NM_014575
  ref <309>: DATABASE ENTRY DATE: 2002-11-05
cggctttcaaagccaatttgaataaacaactcttccctctcaaatgggcaagagtaactcttcagcaccatggagaggtccgggcagcgtgttacaacgtgggactgtgaccagggcaagcactctgacagtgattaccgagaggatgggatggatctaggcagtgacgccggcagcagcagcagcagcagccgcgccagttcacagtccaactccaccaaagtgaccccttgctccgagtgcaaatcttcatcgtcgccggggggcagcctggacttggtgtctgccctggaggactatgaggagcccttcccggtctaccagaagaaggtgattgatgagtgggcgccggaggaggacggggaggaggaggaagaggaggacgagcgcgaccagcgagggtaccgggatgaccgctctccggcccgggaaccgggggacgtaagcgccaggacccgcagcggcggcggcgggggcaggagcgccaccaccgccatgccgcccccggtgcccaacggcaacctccaccagcacgacccccaggacctcaggcacaatggcaacgtggtggtggctggccggccgagctgttcccggggcccccgccgggcgatccaaaagccccagccggctgggggccggcgcagtggccgcggcccggcggctggggggctctgccttcagcccccagacggcgggacgtgcgtccccgaagagcccccggtgccacctatggattgggaggcgctggagaagcatctggccgggctgcagttccgggagcaggaggtacggaaccagggccaggcgaggaccaactccacctccgcacagaaaaatgagagagagtctatcagacagaagttggcacttggaagcttctttgatgatggcccaggaatttataccagctgtagcaaaagtgggaagccaagcctttcctcccgactgcagagtgggatgaacttgcagatatgctttgtcaacgacagtggcagtgataaggacagtgatgctgatgacagtaagactgaaaccagcttggacacccccttgtctcccatgagcaaacagagttcttcctattctgatagagacactactgaagaggagtctgaatccttggatgacatggacttccttacaaggcaaaagaaattgcaagctgaagccaaaatggcccttgccatggccaaaccaatggccaaaatgcaagtagaagtggagaaacagaacaggaaaaagtctcccgtcgctgatcttctgccacacatgcctcatataagtgaatgcttgatgaaaagaagtttaaaacccaccgacctgagagacatgactattgggcagctacaagtgatagtcaatgatctccattcccagatagaaagcttgaatgaagagttggtccagctgcttctcatccgagatgagctgcacacagagcaggatgccatgctggtggacattgaagacttgaccagacatgctgaaagtcagcagaagcacatggcagagaaaatgcctgcaaagtgaaaagaagccattcaaccagagaacaagctagaatttattttgcttctgtggttgtaaaaatgctgttgctaaaggtggcgcagaaacaaatatcagtgttagtcattgataatgtctgaagcttaatgtccagtgattggcctttgcttcttaatttattttaattttttacttgtgccacttaatatcaggcattttaataaaatattgttacaaaaaatgtacagtactgacaccaccacaaatcatggttaataaaagagagtagttttaactttatttttatttgtttagagattttaagttggaacagtattttcccattgactacttttcattcttcactgtagttttaaagaagaactgtaaatgacggtgctatacaagtcaaaaaatacatgcctgcctcgtagtgaagttgtagctctccgtaatatgtatattttactcagttttcaacattttgtgaatgttgactacctgaagttcctttttagatgtgctattaacattctgttggattcagagggttccttgaaagttttatgtataaatatgtaaaataaaaattaaaacccg

SEQ ID NO: 4577 - protein, 487 aa, Homo sapiens
  ref <308>: DATABASE ACCESSION NUMBER: Refseq / NP_055390
  ref <309>: DATABASE ENTRY DATE: 2002-11-05
MERSGQRVTTWDCDQGKHSDSDYREDGMDLGSDAGSSSSSSRASSQSNSTKVTPCSECKSSSSPGGSLDLVSALEDYEEPFPVYQKKVIDEWAPEEDGEEEEEEDERDQRGYRDDRSPAREPGDVSARTRSGGGGGRSATTAMPPPVPNGNLHQHDPQDLRHNGNVVVAGRPSCSRGPRRAIQKPQPAGGRRSGRGPAAGGLCLQPPDGGTCVPEEPPVPPMDWEALEKHLAGLQFREQEVRNQGQARTNSTSAQKNERESIRQKLALGSFFDDGPGIYTSCSKSGKPSLSSRLQSGMNLQICFVNDSGSDKDSDADDSKTETSLDTPLSPMSKQSSSYSDRDTTEEESESLDDMDFLTRQKKLQAEAKMALAMAKPMAKMQVEVEKQNRKKSPVADLLPHMPHISECLMKRSLKPTDLRDMTIGQLQVIVNDLHSQIESLNEELVQLLLIRDELHTEQDAMLVDIEDLTRHAESQQKHMAEKMPAK

SEQ ID NO: 4578 - DNA, 602 bp, Rattus norvegicus
  misc_feature (1)..(602): n=a, c, g or t
  ref <308>: DATABASE ACCESSION NUMBER: EMBL / AA800054
  ref <309>: DATABASE ENTRY DATE: 2000-03-03
gacaaggacaaaggcttgttttattttaatgactgatccacgtgaggccacagcctggccactatgtacagacacgagggacgcttcatttcttggtctcttcctccttggacagagtcttgatgatctcctccttcttggcttggaggcgctcctcccgacgctttcgtgcttccttggtcttagacctgcgagcctcagcctggtcagccagtagcttcttgcgggccttgtctgccttcagtttgtggatgtgctccatgagaatccgcttgtttttgaacacattccctttgaccttcaggtacaggctgtgatacatatgacggtcaatcttcttagattcccggtatctcctgagaagccggcgcaggatcctcatccttcgcatccaggtcaccttctcgggcatccgagcgttggcagtacccttcctcttccctatgcccatatgcctgcccttccgtcgggccaaggtgttcttccggcatcgagcccgggaatggacagtcacaggcttccggatgatcaggccatcttgatcagcttcctgatctgttgacnaagttggcattggcaagttcgttggtttcattggggtc

SEQ ID NO: 4579 - protein, 196 aa, Rattus norvegicus [sequence omitted]

SEQ ID NO: 4580 - DNA, 698 bp, Homo sapiens
  ref <308>: DATABASE ACCESSION NUMBER: Refseq / NM_000981
  ref <309>: DATABASE ENTRY DATE: 2002-11-05
ctttcctttcgctgctgcggccgcagccatgagtatgctcaggcttcagaagaggctcgcctctagtgtcctccgctgtggcaagaagaaggtctggttagaccccaatgagaccaatgaaatcgccaatgccaactcccgtcagcagatccggaagctcatcaaagatgggctgatcatccgcaagcctgtgacggtccattcccgggctcgatgccggaaaaacaccttggcccgccggaagggcaggcacatgggcataggtaagcggaagggtacagccaatgcccgaatgccagagaaggtcacatggatgaggagaatgaggattttgcgccggctgctcagaagataccgtgaatctaagaagatcgatcgccacatgtatcacagcctgtacctgaaggtgaaggggaatgtgttcaaaaacaagcggattctcatggaacacatccacaagctgaaggcagacaaggcccgcaagaagctcctggctgaccaggctgaggcccgcaggtctaagaccaaggaagcacgcaagcgccgtgaagagcgcctccaggccaagaaggaggagatcatcaagactttatccaaggaggaagagaccaagaaataaaacctcccactttgtctgtacatactggcctctgtgattacatagatcagccattaaaataaaacaagccttaatctgc

SEQ ID NO: 4581 - protein, 196 aa, Homo sapiens [sequence omitted]

SEQ ID NO: 4582 - DNA, 648 bp, Rattus norvegicus
  misc_feature (1)..(648): n=a, c, g or t
  ref <308>: DATABASE ACCESSION NUMBER: EMBL / AA800062
  ref <309>: DATABASE ENTRY DATE: 2000-03-03
tgctgacatggctgacagtgactgtttattgagcatcatgacacaactgagactgtccaaaactaaatgggtacagtctgccacaaaatacatttcactgtcaattgtgaaaattaggaagataacaagttctgttcgaagttttcataaatacattgatttctgaaaaatattgttaatactatattgtatgaaaatctaaaaaaatatgattagaaggaaaaaacattaaattgattatacatataagaatttaacgggttggggatttagctcagtggtagcgcacttgcctagcaagcgcaaggccctgggtttggtccccagctccgaaaaaaagaaaagaaaagaaaaaaagaatttaaaataatgagtttgtgctaagttcttgaactcaagtttttgaagtgttactggcaggcaaaataattaggaaaaagagaacactattccttaaaaaaaaaatactgcttttataantggtattttatactcctcganaatacaatttcgagagtcagaagtcctatgattggcccattaaatagtgtcaaatatcatcctgaggactccagccaacataatgatactgcactgctgtcactaacagcaaagttgatgacatgggggtctaagaaagaacaagag

SEQ ID NO: 4583 - protein, 394 aa, Rattus norvegicus
  ref <308>: DATABASE ACCESSION NUMBER: Refseq / NP_062708
  ref <309>: DATABASE ENTRY DATE: 2002-01-07
MRGQSLLTWVLAAAVTCAQAQDVPPWTEDCRKSTYPPSGPTYRGPVPWHTINLDLPPYKRWHELLAQKAPALRILVNSITSLVNTFVPSGKLMKMVDQKLPGMIGSLPDPFGEEMRGIADVTGIPLGEIISFNIFYELFTMCTSIITEDEKGHLLHGRNMDFGIFLGWNINNNTWVVTEELKPLTVNLDFQRNNKTVFKATSFVGYVGMLTGFKPGLFSLSLNERFSINGGYLGILEWMFGRKDAQWVGFITRSVLENTTSYEEAKNTLTKTKIMAPVYFILGGKKSGEGCVITRERKESLDVYELDPKHGRWYVVQTNYDRWKNTLFIDDRRTPAKKCLNHTTQKNLSFATIYDVLSTKPVLNKLTVFTTLMDVTKGQFESHLRDCPDPCIGW

SEQ ID NO: 4584 - DNA, 2333 bp, Homo sapiens
  ref <308>: DATABASE ACCESSION NUMBER: Refseq / NM_004315
  ref <309>: DATABASE ENTRY DATE: 2002-11-05
ggcacgaggctagagcgatgccgggccggagttgcgtcgccttagtcctcctggctgccgccgtcagctgtgccgtcgcgcagcacgcgccgccgtggacagaggactgcagaaaatcaacctatcctccttcaggaccaacgtacagaggtgcagttccatggtacaccataaatcttgacttaccaccctacaaaagatggcatgaattgatgcttgacaaggcaccaatgctaaaggttatagtgaattctctgaagaatatgataaatacattcgtgccaagtggaaaagttatgcaggtggtggatgaaaaattgcctggcctacttggcaactttcctggcccttttgaagaggaaatgaagggtattgccgctgttactgatatacctttaggagagattatttcattcaatattttttatgaattatttaccatttgtacttcaatagtagcagaagacaaaaaaggtcatctaatacatgggagaaacatggattttggagtatttcttgggtggaacataaataatgatacctgggtcataactgagcaactaaaacctttaacagtgaatttggatttccaaagaaacaacaaaactgtcttcaaggcttcaagctttgctggctatgtgggcatgttaacaggattcaaaccaggactgttcagtcttacactgaatgaacgtttcagtataaatggtggttatctgggtattctagaatggattctgggaaagaaagatgccatgtggatagggttcctcactagaacagttctggaaaatagcacaagttatgaagaagccaagaatttattgaccaagaccaagatattggccccagcctactttatcctgggaggcaaccagtctggggaaggttgtgtgattacacgagacagaaaggaatcattggatgtatatgaactcgatgctaagcagggtagatggtatgtggtacaaacaaattatgaccgttggaaacatcccttcttccttgatgatcgcagaacgcctgcaaagatgtgtctgaaccgcaccagccaagagaatatctcatttgaaaccatgtatgatgtcctgtcaacaaaacctgtcctcaacaagctgaccgtatacacaaccttgatagatgttaccaaaggtcaattcgaaacttacctgcgggactgccctgacccttgtataggttggtgagcacacgtctggcctacagaatgcggcctctgagacatgaagacaccatctccatgtgaccgaacactgcagctgtctgaccttccaaagactaagactcgcggcaggttctctttgagtcaatagcttgtcttcgtccatctgttgacaaatgacagatctttttttttttccccctatcagttgatttttcttatttacagataacttctttaggggaagtaaaacagtcatctagaattcactgagttttgtttcactttgacatttggggatctggtgggcagtcgaaccatggtgaactccacctccgtggaataaatggagattcagcgtgggtgttgaatccagcacgtctgtgtgagtaacgggacagtaaacactccacattcttcagtttttcacttctacctacatatttgtatgtttttctgtataacagccttttccttctggttctaactgctgttaaaattaatatatcattatctttgctgttattgacagcgatattattttattacatatcattagagggatgagacagacattcacctgtatatttcttttaatgggcacaaaatgggcccttgcctctaaatagcactttttggggttcaagaagtaatcagtatgcaaagcaatcttttatacaataattgaagtgttccctttttcataattactctacttcccagtaaccctaaggaagttgctaacttaaaaaactgcatcccacgttctgttaatttagtaaataaacaagtcaaagacttgtggaaaataggaagtgaacccatattttaaattctcataagtagcattgatgtaataaacaggtttttagtttgttcttcagattgatagggagttttaaagaaattttagtagttactaaaattatgttactgtatttttcagaaatcaaactgcttatgaaaagtactaatagaacttgttaacctttctaaccttcacgattaactgtgaaatgtacgtcatttgtgcaagaccgtttgtccacttcattttgtataatcacagttgtgttcctgacactcaataaacagtcactggaaagagtgccagtcagcagtcatgcacgctgataaaaaaaaaaaaaaaaaa

SEQ ID NO: 4585 - protein, 395 aa, Homo sapiens
  ref <308>: DATABASE ACCESSION NUMBER: SWISS-Prot / Q13510
  ref <309>: DATABASE ENTRY DATE: 2002-06-15
MPGRSCVALVLLAAAVSCAVAQHAPPWTEDCRKSTYPPSGPTYRGAVPWYTINLDLPPYKRWHELMLDKAPMLKVIVNSLKNMINTFVPSGKVMQVVDEKLPGLLGNFPGPFEEEMKGIAAVTDIPLGEIISFNIFYELFTICTSIVAEDKKGHLIHGRNMDFGVFLGWNINNDTWVITEQLKPLTVNLDFQRNNKTVFKASSFAGYVGMLTGFKPGLFSLTLNERFSINGGYLGILEWILGKKDAMWIGFLTRTVLENSTSYEEAKNLLTKTKILAPAYFILGGNQSGEGCVITRDRKESLDVYELDAKQGRWYVVQTNYDRWKHPFFLDDRRTPAKMCLNRTSQENISFETMYDVLSTKPVLNKLTVYTTLIDVTKGQFETYLRDCPDPCIGW

SEQ ID NO: 4586 - DNA, 374 bp, Rattus norvegicus
  ref <308>: DATABASE ACCESSION NUMBER: EMBL / AA800126
  ref <309>: DATABASE ENTRY DATE: 2000-03-03
ctttaatttctattcagggatccaagaatcttagtaattattaactgaaaagcatatcaatacctgcctgttttaaggtttactatcaccagccttatatctatttatataaagtataattttaaatctcacccatttcttctttcaagactcataagattttcttgccagagactggttatattttattattcttggacccctgcaattttcccaaaccactgcattcacctttttgctataccaaactggagctggtaattcttagttgagtcattttacctaggggaccacggtacagcgataagtcactcaattactaccttatgattgacagttcacactggaatcaaaggtgaattcatgggagtaga

SEQ ID NO: 4587 - DNA, 2595 bp, Homo sapiens
  ref <308>: DATABASE ACCESSION NUMBER: EMBL / L10910
  ref <309>: DATABASE ENTRY DATE: 2000-03-04
cgggctgggcggttccgcggcctgggcctaggggcttaacagtagcaacagaagcggcggcggcggcagcagcagcagcagcagcagcaatctcttcccgaacacgagcaccacaggcgcccgaaggccggaacaggcgtttagagaaaatggcagacgatattgatattgaagcaatgcttgaggctccttacaagaaggatgagaacaagttgagcagtgccaacggccatgaagaacgtagcaaaaagaggaaaaaaagcaagagcagaagtcgtagtcatgaacgaaagagaagcaaaagtaaggaacggaagcgaagtagagacagagaaaggaaaaagagcaaaagccgtgaaagaaagcgaagtagaagcaaagagaggcgacggagccgctcaagaagtcgagatcgaagatttagaggccgctacagaagtccttactccggaccaaaatttaacagtgccatccgaggaaagattgggttgcctcatagcatcaaattaagcagacgacgttcccgaagcaaaagtccattcagaaaagacaagagccctgtgagagaacctattgataatttaactcctgaggaaagagatgcaaggacagtcttctgtatgcagctggcggcaagaattcgaccaagggatttggaagagtttttctctacagtaggaaaggttcgagatgtgaggatgatttctgacagaaattcaagacgttccaaaggaattgcttatgtggagttcgtcgatgttagctcagtgcctctagcaataggattaactggccaacgagttttaggcgtgccaatcatagtacaggcatcacaggcagaaaaaaacagagctgcagcaatggcaaacaatttacaaaagggaagtgctggacctatgaggctttatgtgggctcattacacttcaacataactgaagatatgcttcgtgggatctttgagccttttggaagaattgaaagtatccagctgatgatggacagtgaaactggtcgatccaagggatatggatttattacattttctgactcagaatgtgccaaaaaggctttggaacaacttaatggatttgaactagcaggaagaccaatgaaagttggtcatgttactgaacgtactgatgcttcgagtgctagttcatttttggacagtgatgaactggaaaggactggaattgatttgggaacaactggtcgtcttcagttaatggcaagacttgcagagggtacaggtttgcagattccgccagcagcacagcaagctctacagatgagtggctctttggcatttggtgctgtggcagatttgcaaacaagactttcccagcagactgaagcttcagctttagctgcagctgcctctgttcagccacttgcaacacaatgtttccaactctctaacatgtttaaccctcaaacagaagaagaagttggatgggataccgagattaaggatgatgtgattgaagaatgtaataaacatggaggagttattcatatttatgttgacaaaaattcagctcagggcaatgtgtatgtgaagtgcccatcaattgctgcagctattgctgctgtcaatgcattgcatggcaggtggtttgctggtaaaatgataacagcagcatatgtacctcttccaacttaccacaacctgtttcctgattctatgacagcaacacagctactggttccaagtagacgatgaaggaagatatagtcccttatgtatatagctttttttctttcttgagaattcatcttgagttatcttttatttagataaaaataaagaggcaaggatctactgtcatttgtatgcaatttcctgttaccttgaaaaaataaaaatgttaacaggaatgcagtgtgctcattctccctaaatagtaaatcccactgtatacaaaactgttctcttgttctgccttttaaaatgttcatgtagaaaattaatgaactataggaatagctctaggagaacaaatgtgctttctgtaaaaaggcagaccagggatgtaatgtttttaatgtttcagaagcctaactttttacacagtggttacatttcacatttcactaatgttgatatttggctgatggttgagcagtttctgaaatacacatttagtgtatggaaatacaagacagctaaagggctgtttggttagcatctcatcttgcattctgatcaattggcaagaaagggagatttcaaaattatatttcttgatggtatcttttcaattaatgtatctgtaaaagtttctttgtaaatactatgtgttctggtgtgtcttaaaattccaaacaaaatgatccctgcatttcctgaagatgtttaaacgtgagagtctggtaggcaaagcagtctgagaaagaaataggaaatgcagaaataggttttgtctggttgcatataatctttgctctttttaagctctgtgagctctgaaatatatttttgggttacttcagtgtgtttgacaagacagcttgatatttctatcaaacaaatgactttcatattgcaacaatctttgtaagaaccactcaaataaaagtctcttaaaaaggcc

SEQ ID NO: 4588 - protein, 136 aa, Homo sapiens
  ref <308>: DATABASE ACCESSION NUMBER: SWISS-Prot / CAC11116
  ref <309>: DATABASE ENTRY DATE: 2002-10-01
MLLRAAWRRAAVAVTAAPGPKPAAPTRGLRLRVGDRAPQSAVPADTAAAPEVGPVLRPLYMDVQATTPLDPRVLDAMLPYLINYYGNPHSRTHAYGWESEAAMERARQQVASLIGADPREIIFTSGATESNNIAIK

SEQ ID NO: 4589 - DNA, 383 bp, Rattus norvegicus
  ref <308>: DATABASE ACCESSION NUMBER: EMBL / AA800168
  ref <309>: DATABASE ENTRY DATE: 2000-03-03
ccagtgtcacattttattgacaattcgcaaggtacagcatttcagtggcagcaatctgccaaatattcccgcagtcctggcagtcctggctgaggcaaacatgggttattttattctagtcttaattactctcacgatacactacatatcacacagtaaatctctctctctctgtatatgtctacgtgcagattatggaatggctgtaaagggttaaagatgcaaggagtttgagtttccaacaggccagttgggaaactcaggccactagtctctgataacggcctaaggggactggagaacttggcgaagctgtggccgtaagtcaagaccctgggttgtaggtttgacaatgaagcggcaaagctgagtccagcttgttc

SEQ ID NO: 4590 - DNA, 576 bp, Rattus norvegicus
  misc_feature (1)..(576): n=a, c, g or t
  ref <308>: DATABASE ACCESSION NUMBER: EMBL / AA800177
  ref <309>: DATABASE ENTRY DATE: 2000-03-03
agattacagtgcacagtcataggcttccttgggccagtgcccttttcaagtgagtccttttactggcaacctttaagaaggcaaagggcaagagactaccatctttctgaaaaatggtagaggcccagagatgtaactgaagtccagtcagggcccggctccactacagaacgcattaagctattaggtctttaggaacacagtaagcattaagaaatgatttgaatgctgcaagagtttaagtgcttacctaaaacaagctgtcagcctgttgagttctacaacaatcgtaagatgacccatgcttgcatttgtttatcaatgctgggtgaccacactgccatgaattcctttagtgccacactaaactaccaaaactagaaaaacctaccacttctagagagagagaaaggccttagaaactctgaggaattaccccctgggtggtaatcacacactaaggattgcttgaagagtttacagagttattacttaaaaaaaaattactctattttagaatccactcaatgtataagatgttttagtaaagagatgcactgtangaactttcttttc

SEQ ID NO: 4591 - DNA, 576 bp, Rattus norvegicus; identical to SEQ ID NO: 4590
  misc_feature (1)..(576): n=a, c, g or t
  ref <308>: DATABASE ACCESSION NUMBER: EMBL / AA800177
  ref <309>: DATABASE ENTRY DATE: 2000-03-03

SEQ ID NO: 4592 - DNA, 552 bp, Rattus norvegicus
  ref <308>: DATABASE ACCESSION NUMBER: EMBL / AA800184
  ref <309>: DATABASE ENTRY DATE: 2000-03-03
aaggctgtcaatagctttattgaaatcggtataaataaacatgcacatttcaaatgtaaactcaagtgaacccaagtgcaaacaaaatattaacctctgtcatgcaggaggttgtgtttacatttaaaaaaaaaaaagagagagagataaaaagaagaaaaaaagagaaaagaaaagaaaaaagaaacaacacccgaagcagcttttaaaagaccaggatgaaaaaccagctttaatatcaagatataaagcaaagccatgatcaacataccttacttaccctggtcaaatgcacttttttccctttcttttaaaatgctaacataaataaataatttaccaaaatgtgcactcacagagtgaacttttatttacaatacacaatttataacctattgtatttgattagttcaagtgaagaacattataatttttgctttaataacagtgggacacaaagcgatttctcaggtagtcggatgtgaaatgtgccccagcatttagtttcctattaaaggcagtattgcctgccaatcatccatacattctttc

SEQ ID NO: 4593 - DNA, 4602 bp, Homo sapiens
  ref <308>: DATABASE ACCESSION NUMBER: EMBL / AB011101
  ref <309>: DATABASE ENTRY DATE: 2002-05-12
atggcggaaggcggagcggcggatctggacacccagcggtctgacatcgcgacgctgctcaaaacctcgctccggaaaggggacacctggtacctagtcgatagtcgctggttcaaacagtggaaaaaatatgttggctttgacagttgggacaaataccagatgggagatcaaaatgtgtatcctggacccattgataactctggacttctcaaagatggtgatgcccagtcacttaaggaacatcttattgatgaattggattacatactgttgccaactgaaggttggaataaacttgtcagctggtacacattgatggaaggtcaagagccaatagcacgaaaggtggttgaacagggtatgtttgtaaagcactgcaaagtagaagtatatctcacagaattgaagctatgtgaaaatggaaacatgaataatgttgtaactcgaagatttagcaaagctgacacaatagatacaattgaaaaggaaataagaaaaatcttcagtattccagatgaaaaggagaccagattgtggaacaaatacatgagtaacacatttgaaccactgaataaaccagacagcaccattcaggatgctggtttataccaaggacaggtattagtgatagaacagaaaaatgaagatggaacatggccaaggggtccttctactcctaatgtgaaaaactcaaattactgtcttccatcatataccgcttataagaactatgattattcggaacctggaagaaacaatgaacagccaggcctctgtggcctaagtaacttgggaaatacgtgtttcatgaactcagctattcagtgtttgagcaacacacctccacttactgagtatttcctcaatgataagtatcaagaagaactgaattttgacaatcccttaggaatgagaggtgaaatagctaaatcttatgccgaactgatcaagcaaatgtggtctggaaagtttagctacgtcaccccaagagcctttaagacacaggtaggacgttttgcacctcagttctctggatatcagcagcaagactgtcaagaactgttagctttcctattagatggattacatgaggatttgaatagaattaggaaaaaaccatatatacaattaaaagatgcagatggaaggccagataaggtggttgccgaagaagcctgggaaaaccatttaaaacgaaatgattctatcatagtagatatatttcatggccttttcaaatcaactttagtttgtcctgagtgtgctaagatttcagtaacatttgatcctttttgttacttgacacttccattgcccatgaaaaaagaacgcaccttggaagtttacttagttagaatggatccgcttaccaaacctatgcagtacaaagtggttgtccccaaaattggaaacatattagatctttgtacagcattgtctgctttgtcaggaatacctgcagataagatgatagttactgatatatacaatcatagatttcacagaatattcgctatggatgaaaaccttagtagtattatggaacgggatgatatttatgtgtttgaaattaacatcaataggacagaagatacagagcacgtgattattcctgtttgcctaagagaaaaattcagacactcgagttatacccaccatactggttcttcactttttggtcagccctttcttatggctgtaccacgaaacaatactgaagacaaactttataatctcctgctcttgagaatgtgccgatatgtcaaaatatctactgaaactgaagaaactgaaggatccctacactgctgtaaggaccaaaatattaatgggaatggcccaaatggcatacatgaagaaggctcaccaagtgaaatggaaacagatgagccagatgatgaatccagccaggatcaagaacttccctcagagaatgaaaacagtcagtctgaagattcagttggaggagataatgattctgaaaatggattatgtactgaggatacttgcaaaggtcaactcacgggacacaaaaaacgattgtttacattccagttcaacaacttaggcaatactgatatcaactacatcaaagatgataccaggcatataagatttgatgataggcagcttaggctagatgaaagatcttttcttgctttggattgggatcctgatttgaaaaaaagatattttgatgaaaatgctgctgaggactttgaaaaacatgaaagtgtggagtataaacctcctaaaaaaccctttgtgaaattaaaagattgcattgaactttttacaacaaaagaaaagctaggtgctgaagatccctggtattgtccgaattgtaaagaacatcagcaagccacaaagaaattggatttatggtccctgcctccagtacttgtagtacatctcaagcgattttcttacagtcgatacatgagagacaagttggataccttagttgattttcctatcaatgacttggatatgtcggaattcttaattaatccaaatgcaggtccttgccgctataatctgattgctgtttccaaccactatggagggatgggaggaggacactatactgcttttgcaaaaaataaagatgatggaaaatggtactattttgatgacagtagtgtctccactgcatctgaagaccaaattgtgtccaaagcagcatatgtactcttctaccagagacaagacactttcagtggaactggcttttttcctcttgaccgagaaactaaaggtgcttcagctgccactggcatcccattagaaagtgatgaagatagcaatgataatgacaatgatatagaaaatgaaaactgtatgcacactaactaatgaaagtcctagaagccataaaagagacactttcctgctggtggtatctatggaaatgatgaagttacccaccacattaaaacaaaagtctgagatggggagtttcagataaccgaatgtaaatcctttatcagattttaacttgtgcagtacttgaagtgaaacacaatgaaaactttaacagaaattgtctcttaatacatttacagtcttgtatttacaagctaaatatatataggaaatcacaaataaatcccttttaagtttgctgctgttttgattaattatgtttcctttaattttttggatgtgagttgatgacaaatgttaaatttgtggatgttggtcatttattttgctctaataatactgcaagaaaactatggctgaacttagtttttggataatctagttcatgtgcattaggctgccgtatatactactatgatatttagctgcagtatcaatgtggcataaatactgcggcagcattcttcgaaaaccgcattttcaaatttatccccgtaatcaatgtgggcctattaaaaaaccaaatcatgatacaagaaacaaccttggaaaagttatttccctttgtaatacctttaaaaatccagagtattatattcattttactgccactgtggaaacaggttctagatttcatactccatctaaagtcatttttcagttacatgtaagtattatttactgctattgggatctattcttcagatattcaaaaacattttttgctttaaaatgcatatctttaattgggtgttggtccaaaattaaaatttttgctgtctgtttttctctaccccattttgtggtaatttggcaacttgagctctcccaattattgtaatataaggacagacataatagtattctgtacccatagtaataattgcatcaagcttagatgagaaatttttttcatatactggcctttaaatcattaatggacaattggctataaaggtaggtctgttaactttctttgtgtgttcctgatggaattcaccatagccttacagcttttctcagaaggtaacttgttataagagaaatggcatttgcatgttccagagtcagaacctgtacagtatataaagcataaacaccttgaatttgattttagttcaccacattcaaggatccaggatgccaaaaatatgtgtgaacatttgaaacatttttatttgctgctttttccctttgatatagttgaaagaatgtattgtaaattggcatacaatactgcctttaatagaaaacctaaatgctggggcacatttcacatatcgactacctgagaaattgctttgtgtcccactgttattaaagcaaaaagtataatgttcttcacttgaactaatcaaatacaatagattataaattgtgtattgtaaataaaagttcactctgtgagtgcacattttggtaaattatttatttatgttagcatttaaaagtttaaaaaaaatgcatttgaccaggataaatgaggtatgttgatcatggctttgctttatatcttgatattaaagctggtttatcatcctggtattttaaaagctgctttggggttttttttttcttttttttttttttaatgtaaactaacctcctgcatgacagaggttaaaattttgtctgcacttgagttcacttgagtttacatttgaaatgtgcatgtttatttatatagatttcaataaagctattcaaggcctt

SEQ ID NO: 4594 - protein, 902 aa, Homo sapiens [sequence omitted]

SEQ ID NO: 4595 - DNA, 693 bp, Rattus norvegicus
  ref <308>: DATABASE ACCESSION NUMBER: EMBL / AA800190
  ref <309>: DATABASE ENTRY DATE: 2000-03-03
atgggtatagaagtttaatccatttctcttacaaggaggtaacagtaaatagtagaggggtgatcatgtattatggcttcaagggacctcatgcacagggcagcagatgaccagccccagaacctgcccacccacccccaaagctaccacagtggttccggtgaattgagtgctgaaaacagacacctcccagtaaacactgccagggttgaggaaagtgaggcgttttcctgcccatcccgaaccagatacagcaatgcaaggtggtgaatctctggaaggagttttatgtagttctctgacaaccctactctgccctcagggaggagcatggctcctgtagtgggtgggcttaaccgctctttctcactatgctgctgtagcagagtgggaaccaggccctactgcaggactagcagctgagtcagccagggcagaaatatccagactgaccaagtacaaggtttacttgcaaaaaaaggaaggctttagctagtttcaattcctcatgaagtgttatttcctgttgaaaaagcaaaggactaagccaaccgtctataaaattgccagtccttaaccaaggcctcaaatatgggataaaggtctctctttagtctcctcttcagggttctggggttccacatgacacccacagggttctacaggtggctacagaggcatggccccatatgg

SEQ ID NO: 4596 - protein, 838 aa, Rattus norvegicus; identical to SEQ ID NO: 3567
  ref <308>: DATABASE ACCESSION NUMBER: SWISS-Prot / AAA41252
  ref <309>: DATABASE ENTRY DATE: 2000-05-30

SEQ ID NO: 4597 - DNA, 2580 bp, Homo sapiens
  ref <308>: DATABASE ACCESSION NUMBER: EMBL / AF013570
  ref <309>: DATABASE ENTRY DATE: 2001-10-30
ccagctgaacgaggagatggaggccaagcagaacctggagcgccacatctccactctcaacatccagctctccgactcgaagaagaagctgcaggactttgccagcaccgtggaagctctggaagaggggaagaagaggttccagaaggagatcgagaacctcacccagcagtacgaggagaaggcggccgcttatgataaactggaaaagaccaagaacaggcttcagcaggagctggacgacctggttgttgatttggacaaccagcggcaactcgtgtccaacctggaaaagaagcagaggaaatttgatcagttgttagccgaggagaaaaacatctcttccaaatacgcggatgagagggacagagctgaggcagaagccagggagaaggaaaccaaggccctgtccctggctcgggcccttgaagaggccttggaagccaaagaggaactcgagcggaccaacaaaatgctcaaagccgaaatggaagacctggtcagctccaaggatgacgtgggcaagaacgtccatgagctggagaagtccaagcgggccctggagacccagatggaggagatgaagacgcagctggaagagctggaggacgagctgcaagccacggaggacgccaaactgcggctggaagtcaacatgcaggcgctcaagggccagttcgaaagggatctccaagcccgggacgagcagaatgaggagaagaggaggcaactgcagagacagcttcacgagtatgagacggaactggaagacgagcgaaagcaacgtgccctggcagctgcagcaaagaagaagctggaaggggacctgaaagacctggagcttcaggccgactctgccatcaaggggagggaggaagccatcaagcacgtacgcaaactgcaggctcagatgaaggactttcaaagagagctggaagatgcccgtgcctccagagatgagatctttgccacagccaaagagaatgagaagaaagccaagagcttggaagcagacctcatgcagctacaagaggacctcgccgccgctgagagggctcgcaaacaagcggacctcgagaaggaggaactggcagaggagctggccagtagcctgtcgggaaggaacgcactccaggacgagaagcgccgcctggaggcccggatcgcccagctggaggaggagctggaggaggagcagggcaacatggaggccatgagcgaccgggtccgcaaagccacacagcaggccgagcagctcagcaacgagctggccacagagcgcagcacggcccagaagaatgagagtgcccggcagcagctcgagcggcagaacaaggagctccggagcaagctccacgagatggagggggccgtcaagtccaagttcaagtccaccatcgcggcgctggaggccaagattgcacagctggaggagcaggtcgagcaggaggccagagagaaacaggcggccaccaagtcgctgaagcagaaagacaagaagctgaaggaaatcttgctgcaggtggaggacgagcgcaagatggccgagcagtacaaggagcaggcagagaaaggcaatgccagggtcaagcagctcaagaggcagctggaggaggcagaggaggagtcccagcgcatcaacgccaaccgcaggaagctgcagcgggagctggatgaggccacggagagcaacgaggccatgggccgcgaggtgaacgcactcaagagcaagctcagagggccccccccacaggaaacttcgcagtgatgcaccaggcgaggaaacgagacctctttcgttccttctagaaggtctggaggacgtagagttattgaaaatgcagatggttctgaggaggaaacggacactcgagacgcagacttcaatggaaccaaggccagtgaataagcaactttctacagttttacaccacggcaagaaaaccaaaaaccaaaacaaacaaacaaaaaaaacccaacaacaacccagaacaaagcaaaacccagcagactgtacttagcattgtctaaatccattctcaaattccaaatatcacagacacccctcacacaaggaatataaaaaccaccaccctccagcctgggcaacgtagtaaaacctcatctatacaagaatttaaaaataagctgggcgtggtggtacacacctgtggcccagctactagggaggctgagccaggaagaacgctccagcccaggacttcgaggctgcaatgagctataattgcatcattgcactccagcctgggcaacagagaccctgtctcaaccaccaccaccaccaccacccctactacccctgtattcaaggtaaaaattgaagtttgtatgatgtaagagatgagaaaaacccaacaggaaacacagacacatcctccagttctatcaatggattgtgcagacactgagtttttagaaaaacatatccacggtaaccggtccctggcaattctgtttacatgaaatggggagaaagtcaccgaaatggtgccgccggccccactcccaattcattccctaacctgcaaacctttccaacttctcacgtcaggcctttga

SEQ ID NO: 4598 - protein, 1972 aa, Homo sapiens
  ref <308>: DATABASE ACCESSION NUMBER: SWISS-Prot / P35749
  ref <309>: DATABASE ENTRY DATE: 2001-10-16
MAQKGQLSDDEKFLFVDKNFINSPVAQADWAAKRLVWVPSEKQGFEAASIKEEKGDEVVVELVENGKKVTVGKDDIQKMNPPKFSKVEDMAELTCLNEASVLHNLRERYFSGLIYTYSGLFCVVVNPYKHLPIYSEKIVDMYKGKKRHEMPPHIYAIADTAYRSMLQDREDQSILCTGESGAGKTENTKKVIQYLAVVASSHKGKKDTSITGELEKQLLQANPILEAFGNAKTVKNDNSSRFGKFIRINFDVTGYIVGANIETYLLEKSRAIRQARDERTFHIFYYMIAGAKEKMRSDLLLEGFNNYTFLSNGFVPIPAAQDDEMFQETVEAMAIMGFSEEEQLSILKVVSSVLQLGNIVFKKERNTDQASMPDNTAAQKVCHLMGINVTDFTRSILTPRIKVGRDVVQKAQTKEQADFAVEALAKATYERLFRWILTRVNKALDKTHRQGASFLGILDIAGFEIFEVNSFEQLCINYTNEKLQQLFNHTMFILEQEEYQREGIEWNFIDFGLDLQPCIELIERPNNPPGVLALLDEECWFPKATDKSFVEKLCTEQGSHPKFQKPKQLKDKTEFSIIHYAGKVDYNASAWLTKNMDPLNDNVTSLLNASSDKFVADLWKDVDRIVGLDQMAKMTESSLPSASKTKKGMFRTVGQLYKEQLGKLMTTLRNTTPNFVRCIIPNHEKRSGKLDAFLVLEQLRCNGVLEGIRICRQGFPNRIVFQEFRQRYEILAANAIPKGFMDGKQACILMIKALELDPNLYRIGQSKIFFRTGVLAHLEEERDLKITDVIMAFQAMCRGYLARKAFAKRQQQLTAMKVIQRNCAAYLKLRNWQWWRLFTKVKPLLQVTRQEEEMQAKEDELQKTKERQQKAENELKELEQKHSQLTEEKNLLQEQLQAETELYAEAEEMRVRLAAKKQELEEILHEMEARLEEEEDRGQQLQAERKKMAQQMLDLEEQLEEEEAARQKLQLEKVTAEAKIKKLEDEILVMDDQNNKLSKERKLLEERISDLTTNLAEEEEKAKNLTKLKNKHESMISELEVRLKKEEKSRQELEKLKRKLEGDASDFHEQIADLQAQIAELKMQLAKKEEELQAALARLDDEIAQKNNALKKIRELEGHISDLQEDLDSERAARNKAEKQKRDLGEELEALKTELEDTLDSTATQQELRAKREQEVTVLKKALDEETRSHEAQVQEMRQKHAQAVEELTEQLEQFKRAKANLDKNKQTLEKENADLAGELRVLGQAKQEVEHKKKKLEAQVQELQSKCSDGERARAELNDKVHKLQNEVESVTGMLNEAEGKAIKLAKDVASLSSQLQDTQELLQEETRQKLNVSTKLRQLEEERNSLQDQLDEEMEAKQNLERHISTLNIQLSDSKKKLQDFASTVEALEEGKKRFQKEIENLTQQYEEKAAAYDKLEKTKNRLQQELDDLVVDLDNQRQLVSNLEKKQRKFDQLLAEEKNISSKYADERDRAEAEAREKETKALSLARALEEALEAKEELERTNKMLKAEMEDLVSSKDDVGKNVHELEKSKRALETQMEEMKTQLEELEDELQATEDAKLRLEVNMQALKGQFERDLQARDEQNEEKRRQLQRQLHEYETELEDERKQRALAAAAKKKLEGDLKDLELQADSAIKGREEAIKQLRKLQAQMKDFQRELEDARASRDEIFATAKENEKKAKSLEADLMQLQEDLAAAERARKQADLEKEELAEELASSLSGRNALQDEKRRLEARIAQLEEELEEEQGNMEAMSDRVRKATQQAEQLSNELATERSTAQKNESARQQLERQNKELRSKLHEMEGAVKSKFKSTIAALEAKIAQLEEQVEQEAREKQAATKSLKQKDKKLKEILLQVEDERKMAEQYKEQAEKGNARVKQLKRQLEEAEEESQRINANRRKLQRELDEATESNEAMGREVNALKSKLRRGNETSFVPSRRSGGRRVIENADGSEEETDTRDADFNGTKASE

SEQ ID NO: 4599 - DNA, 693 bp, Rattus norvegicus; identical to SEQ ID NO: 4595
  ref <308>: DATABASE ACCESSION NUMBER: EMBL / AA800190
  ref <309>: DATABASE ENTRY DATE: 2000-03-03

SEQ ID NO: 4600 - protein, 838 aa, Rattus norvegicus; identical to SEQ ID NO: 3567
  ref <308>: DATABASE ACCESSION NUMBER: SWISS-Prot / AAA41252
  ref <309>: DATABASE ENTRY DATE: 2000-05-30

SEQ ID NO: 4601 - DNA, 2580 bp, Homo sapiens; identical to SEQ ID NO: 4597
  ref <308>: DATABASE ACCESSION NUMBER: EMBL / AF013570
  ref <309>: DATABASE ENTRY DATE: 2001-10-30

SEQ ID NO: 4602 - protein, 1972 aa, Homo sapiens; identical to SEQ ID NO: 4598
  ref <308>: DATABASE ACCESSION NUMBER: SWISS-Prot / P35749
  ref <309>: DATABASE ENTRY DATE: 2001-10-16

SEQ ID NO: 4603 - DNA, 556 bp, Rattus norvegicus
  ref <308>: DATABASE ACCESSION NUMBER: EMBL / AA800198
  ref <309>: DATABASE ENTRY DATE: 2000-03-03
ggaaacagacacggtgctctttatttgcattgttcagaatactgtacaaagggagtaaaaatcctattcacactttgcttagaaagaccaaaaggtgaaagttccctatgatacatggggttcaaaaggagggtcaggggggaaacaggtgagtgacctccctctggcccccgggagagggcttgggcagccacactatccaaaggaacatgccccagtcgaaccagcgaggggagagactgctcctctctggcctaacctcgggctctatgacctgcctgccactctgggctgaggagacagtgcccgcagctgtccctactactgccttgtctgggcagggatccttagcactgtggagaccactgaccgcatgtggaagtggcctcctgaccattcccacgcaagccacacaccaggcactgtcccagcccaatctacacaagaatacaagttgagttttaaggaagaacctctctgaaagcttcctcacaccactaagggaagtgtcaaagtaaactgcttctgagggctcacaggcctcttccaacctgtg

SEQ ID NO: 4604 - DNA, 354 bp, Homo sapiens
  ref <308>: DATABASE ACCESSION NUMBER: EMBL / BF904759
  ref <309>: DATABASE ENTRY DATE: 2001-08-31
ccacacgaacagcagagaggggcagcaggatgaatgtgggcacagcgcacagcgaggtgaaccccaacacgcgggtgatgaacagccgtggcatctggctctcctacgtgctggccatcggtctcctccacatcgtgctgctgagcatcccgtttgtgagtgtccctgtcgtctggaccctcaccacctcattcacaacatggtgagagcctgtctgctgcctgcccctgcccctgcccctgccctgtgggctgccctttggcagggctgagggataggagtagcctgtcgggcctggcccaggtgtcagggtgatgtactgacgacatctgcctccagagcccaggcctagcc

SEQ ID NO: 4605 - DNA, 631 bp, Rattus norvegicus
  ref <308>: DATABASE ACCESSION NUMBER: EMBL / AA800199
  ref <309>: DATABASE ENTRY DATE: 2000-03-03
gggagagtagcgtttatttggtcctcagagccatctgagacaacatactgaactgaggaagaaattgggttccaaaagagctcatcaagtaaagaaagggactgcacttcccagtggctcaacagttactgtgatcagtaaggccgggaatacggttgctaccaaatcgctctcgtgtgtcgccattacaaaagtacaggtttctcatcacaaattgtcacaaacccaagttacaaaagaaaaatcacatggtgcatatcttaaaagacagtgccccccccacctcataagctacggtaatatcaagcagggagaaggtagcttttgctacccctcggcagtcatcttccccaacagcggggagaaggcacaggaaggagtggggcggggcgctaatttcccctcagtacaagatgacaggtgaagcttggtgggagactggagctggtgaggcttgaggggaggaggctccaggccctgtgttcagtcagagtcactgctggaggaggaggaggaggaagaggaggaggagtgcttcccgtgcttatgatgcttgtgtgatttcttgtgagctttcttcattttcttcctagtcttcttgtctatcactattcctgggcctaccatgcca

SEQ ID NO: 4606 - DNA, 562 bp, Homo sapiens
  ref <308>: DATABASE ACCESSION NUMBER: EMBL / BE396293
  ref <309>: DATABASE ENTRY DATE: 2000-07-29
tattaatccaccctttcccccaggcccctgtcctcctcccccaggagctccccatggcaatccagctttccccccaggtgggccccctcatcctgtgccacagccagggtatccaggatgccaaccgttgggtccctaccctcctccatacccaccgcctgccctggaatccctcctgtgaatcccttggctcctggcatggtggaccagcagtgatagtagacaagaagatgcagaagaaaatgaagaaagctcataaaaagatgcacaagcaccaaaagcaccacaagtaccacaagcatggcaagcattcctcctcttcctcctcctcttccagcagtgattctgactgaatacaggccctggacccttccctcaagtctcaccagttctgctctcccatcaagcttcagatgccatgtcgtactgggggaatgtagcccttgtgctccccacccctaactccactgagctcacctgctgttgaccctgagtggtaggggaatgggagaggatgcatggctggcatcttgagtgcaggtaaatcattgtatgatagcgg

SEQ ID NO: 4607 - DNA, 727 bp, Rattus norvegicus
  ref <308>: DATABASE ACCESSION NUMBER: EMBL / AA800212
  ref <309>: DATABASE ENTRY DATE: 2000-03-03
ccgccgcggaggaggaggagaaagaggaggggacagctgtccgcgcccgggcgcccgcggtggcacgagcccgcggcccgagtgcgaggcggaggcgaggaggccgcggggacgcgaggcgaggccggccggggcccccgcagccatggagaacgctcacacaaagaccgtggaggaggtgctgggccacttcggcgtcaacgagagcacggggctgagcctggagcaggtcaagaagctcaaggagagatggggctccaacgaattgccggctgaagaaggaaagaccttgctggaacttgtgatcgagcagtttgaagacttactagttagaattttattgctggcagcatgtatatctttcgttttggcttggttcgaagaaggtgaagaaacgattacagcctttgtagaaccttttgtaattctgcttatattggtagccaatgcaattgtgggtgtatggcaggagagaaacgctgaaaatgcaatagaagctcttaaggagtatgaacctgaaatgggcaaggtgtatcgacaggacagaaagagtgtgcagcggattaaagcgaaagatatagttcctggggatatagtggaaattgctgttggtgacaaagttccggctgacattagattgacatccatcaagtctacaactctgagagttgaccagtcgattcttacaggtgaatctgtctcggtcatcaagcatactgaccctgtc

SEQ ID NO: 4608 - protein, 1043 aa, Rattus norvegicus; identical to SEQ ID NO: 26
  ref <308>: DATABASE ACCESSION NUMBER: SWISS-Prot / P11507
  ref <309>: DATABASE ENTRY DATE: 2001-10-16

SEQ ID NO: 4609 - DNA, 4134 bp, Homo sapiens; identical to SEQ ID NO: 27
  ref <308>: DATABASE ACCESSION NUMBER: EMBL / M23114
  ref <309>: DATABASE ENTRY DATE: 2000-03-04

SEQ ID NO: 4610 - protein, 1042 aa, Homo sapiens; identical to SEQ ID NO: 28
  ref <308>: DATABASE ACCESSION NUMBER: SWISS-Prot / P16615
  ref <309>: DATABASE ENTRY DATE: 2002-06-15

SEQ ID NO: 4611 - DNA, 711 bp, Rattus norvegicus
  misc_feature (1)..(711): n=a, c, g or t
  ref <308>: DATABASE ACCESSION NUMBER: EMBL / AA800220
  ref <309>: DATABASE ENTRY DATE: 2000-03-03
gcaatttagaagagtttatttaggcaagttccaggccagcaggggtatgtagtaagatcctatcttaaaaaaaaaaaaagaaagaaaagaaatagtactatataaaacaattgataaagccaaaattaaattttatttcacattgatagaaactgtgaaaaacatgacattttcccacattacagcacacaaattcaacagaatatttcttaccccaaataaatttttacagatacaataactgaagtaaatgtatgctcttcaaagtaaagcaaaatagtaaatgattgtttgaaattgttttaaatctagacataaacaatcggcttcattgttaacactctatctcggacacaccaaatgaccccacatcagttagctcctgcttacaaagatgcttccttcttcttggtcggttgaaaaacagcaggaaaagaaaccgttcagaaataaccataatttttgtaacatactcaactgtgtggaaacagttataaatatgggtttatatatgtgggttctaaccagtccttattatccataaattaaataattttcagcagtattttgaacatgttgatgatttaaaatcaaatgattgttattttaatatttgcacaggagactgattatcaaaagctcctttactgaagatgaaaatttcaaattagcatgttacccagatgaaaataanacaagtttgactgctca

SEQ ID NO: 4612 - protein, 230 aa, Rattus norvegicus
  ref <308>: DATABASE ACCESSION NUMBER: Refseq / NP_037138
  ref <309>: DATABASE ENTRY DATE: 2002-11-05
MCGNNMSAPMPAVVPAARKATAAVIFLHGLGDTGHGWAEAFAGIKSSHIKYICPHAPVMPVTLNMSMMMPSWFDIIGLSPDSQEDESGIKQAAETVKALIDQEVKNGIPSNRIILGGFSQGGALSLYTALTTQQKLAGVTALSCWLPLRASFSQGPINSANRDISVLQCHGDCDPLVPLMFGSLTVERLKGLVNPANVTFKVYEGMMHSSCQQEMMDVKYFIDKLLPPID

SEQ ID NO: 4613 - DNA, 442 bp, Homo sapiens
  ref <308>: DATABASE ACCESSION NUMBER: EMBL / BE018412
  ref <309>: DATABASE ENTRY DATE: 2000-06-14
ggatgaatctgggattaaacaggcagcagaaaatataaaagctttgattgatcaagaagtgaagaatggcattccttctaacagaattattttgggagggttttctcagggaggagctttatctttatatactgcccttaccacacagcagaaactggcaggtgtcactgcactcagttgctggcttccacttcgggcttcctttccacagtgccacggggattgtgaccctttggttcccctgatgtttggttctcttacggtggaaaaactaaaaacattggtgaatccagccaatgtgacctttaaaacctatgaaggtatgatgcacagttcgtgtcaacaggaaatgatggatgtcaagcaattcattgataaactcctacctccaattgattgacgtcactaagaggccttgtgtagaagtacaccagcattattg

SEQ ID NO: 4614 - protein, 230 aa, Homo sapiens
  ref <308>: DATABASE ACCESSION NUMBER: Refseq / NP_006321
  ref <309>: DATABASE ENTRY DATE: 2002-11-05
MCGNNMSTPLPAIVPAARKATAAVIFLHGLGDTGHGWAEAFAGIRSSHIKYICPHAPVRPVTLNMNVAMPSWFDIIGLSPDSQEDESGIKQAAENIKALIDQEVKNGIPSNRIILGGFSQGGALSLYTALTTQQKLAGVTALSCWLPLRASFPQGPIGGANRDISILQCHGDCDPLVPLMFGSLTVEKLKTLVNPANVTFKTYEGMMHSSCQQEMMDVKQFIDKLLPPID

SEQ ID NO: 4615 - DNA, 459 bp, Rattus norvegicus
  ref <308>: DATABASE ACCESSION NUMBER: EMBL / AA800221
  ref <309>: DATABASE ENTRY DATE: 2000-03-03
ccaattgagaaagcacgtcaagccttctgacccctttgaactactgttcacctttggggacgtattttagttcacttttaacgttttggatctcagacaggttgacgacgggtcctgggaatttcttcattccaggaactggcttcttttcctcgggagtagcaggtgctccctccgcagttccaggggtactctctttccttctgggaggctgcccagctcccggacgaaaggctcccattggaatattaatattggcctgaatggatctgacgttggaaattggctgcttcgacatgttcaagaggtcttatacctgctctctggatttgtttactgcctgaggacagtcctaggcagccaggtgcaaaaacagaaaacgctttacagggtagaaggaactcccggtgtcctctgagctgagatctcaattccagtgcttttcatgtgcctcgtgcc

SEQ ID NO: 4616 - protein, 85 aa, Rattus norvegicus
  ref <308>: DATABASE ACCESSION NUMBER: SWISS-Prot / AAK50399
  ref <309>: DATABASE ENTRY DATE: 2002-06-01
MSKQPISNVRSIQANINIPMGAFRPGAGQPPRRKESTPGTAEGAPATPEEKKPVPGMKKFPGPVVNLSEIQNVKSELKYVPKGEQ

SEQ ID NO: 4617 - DNA, 886 bp, Homo sapiens
  ref <308>: DATABASE ACCESSION NUMBER: EMBL / AF129505
  ref <309>: DATABASE ENTRY DATE: 1999-12-23
gttctcaataccgggagaggcacagagctatttcagccacatgaaaagcatcggaattgagatcgcagctcagaggacaccgggcgccccttccaccttccaaggagctttgtattcttgcatctggctgcctgggacttcccttaggcagtaaacaaatacataaagcagggataagactgcatgaatatgtcgaaacagccagtttccaatgttagagccatccaggcaaatatcaatattccaatgggagcctttcggccaggagcaggtcaaccccccagaagaaaagaatgtactcctgaagtggaggagggtgttcctcccacctcggatgaggagaagaagccaattccaggagcgaagaaacttccaggacctgcagtcaatctatcggaaatccagaatattaaaagtgaactaaaatatgtccccaaagctgaacagtagtaggaagaaaaaaggattgatgtgaagaaataaagaggcagaagatggattcaatagctcactaaaattttatatatttgtatgatgattgtgaacctcctgaatgcctgagactctagcagaaatggcctgtttgtacatttatatctcttccttctagttggctgtatttcttactttatcttcatttttggcacctcacagaacaaattagcccataaattcaacacctggagggtgtggttttgaggagggatatgattttatggagaatgatatggcaatgtgcctaacgattttgatgaaaagtttcccaagctacttcctacagtattttggtcaatatttggaatgcgttttagttcttcaccttttaaattatgtcactaaactttgtatgagttcaaataaatatttgactaaatgtaaaatgtga

SEQ ID NO: 4618 - protein, 88 aa, Homo sapiens
  ref <308>: DATABASE ACCESSION NUMBER: SWISS-Prot / Q9UHP9
  ref <309>: DATABASE ENTRY DATE: 2002-06-15
MNMSKQPVSNVRAIQANINIPMGAFRPGAGQPPRRKECTPEVEEGVPPTSDEEKKPIPGAKKLPGPAVNLSEIQNIKSELKYVPKAEQ

SEQ ID NO: 4619 - DNA, 583 bp, Rattus norvegicus
  ref <308>: DATABASE ACCESSION NUMBER: EMBL / AA800224
  ref <309>: DATABASE ENTRY DATE: 2000-03-03
accaaaaaatattccaggtacctcttcagatagatcactttcaaaatatatttatagaccctttgccagtgctgtcatcccaaaagctgccagaactctggaagtcccgtggtccagccctcagcccaggaatataggtagagtctccatgatgggtggtaagagagcagtacctgggctgtgctggctccttctttcctcataggtaaggtatgacattaaaggacaataaatacgtgttgaatattagcaaaaaaagattacaagtcctatgctttgttgccgtggctctttgaagttcatctacctcactggcagctggaagacagttctgctgcttcgttctcagctcttggccttctgggctgtgtccacactaaaccctatggctatactgtcttgatttttcaagaattcacttaagaggaagaaagcagaaaccttagctgcaagtacattccccaatttaaattgtggtagattagtgataacatgaaaaactgagggatgatggtggtacagtcacatctccaggggccaagacatcttgcttgtgaactcagtgagtcacaggaggaaaagc

SEQ ID NO: 4620 - DNA, 2251 bp, Homo sapiens
  ref <308>: DATABASE ACCESSION NUMBER: EMBL / AK001441
  ref <309>: DATABASE ENTRY DATE: 2002-08-06
gacgtcacggtcactgacagcgtgagcccgcggcggctgctgccatggtggctggcggccgggtaagggtctgagtggatctcctgccaggccagagcgccttcgggggccgcggcggaaggccaggagtttgcagccagggcgccgggtttgtggtctgcagtgtcgtgaggctgaggtgcagcatgtctagactgggagccctgggtggtgcccgtgccgggctgggactgttgctgggtaccgccgccggccttggattcctgtgcctcctttacagccagcgatggaaacggacccagcgtcatggccgcagccagagcctgcccaactccctggactatacgcagacttcagatcccggacgccacgtgatgctcctgcgggctgtcccaggtggggctggagatgcctcagtgctgcccagccttccacgggaaggacaggagaaggtgctggaccgcctggactttgtgctgaccagccttgtggcgctgcggcgggaggtggaggagctgagaagcagcctgcgagggcttgcgggggagattgttggggaggtccgatgccacatggaagagaaccagagagtggctcggcggcgaaggtttccgtttgtccgggagaggagtgactccactggctccagctctgtctacttcacggcctcctcgggagccacgttcacagatgctgagagtgaagggggttacacaacagccaatgcggagtctgacaatgagcgggactctgacaaagaaagtgaggacggggaagatgaagtgagctgtgagactgtgaagatggggagaaaggattctcttgacttggaggaagaggcagcttcaggtgcctccagtgccctggaggctggaggttcctcaggcttggaggatgtgctgcccctcctgcagcaggccgacgagctgcacaggggtgatgagcaaggcaagcgggagggcttccagctgctgctcaacaacaagctggtgtatggaagccggcaggactttctctggcgcctggcccgagcctacagtgacatgtgtgagctcactgaggaggtgagcgagaagaagtcatatgccctagatggaaaagaagaagcagaggctgctctggagaagggggatgagagtgctgactgtcacctgtggtatgcggtgctttgtggtcagctggctgagcatgagagcatccagaggcgcatccagagtggctttagcttcaaggagcatgtggacaaagccattgctctccagccagaaaaccccatggctcactttcttcttggcaggtggtgctatcaggtctctcacctgagctggctagaaaaaaaaactgctacagccttgcttgaaagccctctcagtgccactgtggaagatgccctccagagcttcctaaaggctgaagaactacagccaggattttccaaagcaggaagggtatatatttccaagtgctacagagaactagggaaaaactctgaagctagatggtggatgaagttggccctggagctgccagatgtcacgaaggaggatttggctatccagaaggacctggaagaactggaagtcattttacgagactaaccacgtttcactggccttcatgacttgatgccactatttaaggtgggggggcggggaggcttttttccttagaccttgctgagatcaggaaaccacacaaatctgtctcctgggtctgactgctacccactaccactccccattagttaatttattctaacctctaacctaatctagaattggggcagtactcatggcttccgtttctgttgttctctcccttgagtaatctcttaaaaaaatcaagattcacacctgccccaggattacacatgggtagagcctgcaagacctgagaccttccaattgctggtgaggtggatgaacttcaaagctataggaacaaagcacataacttgtcactttaatctttttcactgactaataggactcagtacatatagtcttaagatcataccttacctaccaaggtaaaaagagggatcagagtggcccacagacattgctttcttatcacctatcatgtgaattctacctgtattccagggctggaccacttgataacttccagtgtcctggcagcttttggaatgacagcagtggtatggggtttatgatgctataaaacaatgtctgaaaagttgcctagaatatattttgttacaaacttgaaataaaccaaatttgatgtt

SEQ ID NO: 4621 - protein, 471 aa, Homo sapiens
  misc_feature (1)..(471): Xaa=Unknown amino acid
MSRLGALGGARAGLGLLLGTAAGLGFLCLLYSQRWKRTQRHGRSQSLPNSLDYTQTSDPGRHVMLLRAVPGGAGDASVLPSLPREGQEKVLDRLDFVLTSLVALRREVEELRSSLRGLAGEIVGEVRCHMEENQRVARRRRFPFVRERSDSTGSSSVYFTASSGATFTDAESEGGYTTANAESDNERDSDKESEDGEDEVSCETVKMGRKDSLDLEEEAASGASSALEAGGSSGLEDVLPLLQQADELHRGDEQGKREGFQLLLNNKLVYGSRQDFLWRLARAYSDMCELTEEVSEKKSYALDGKEEAEAALEKGDESADCHLWYAVLCGQLAEHESIQRRIQSGFSFKEHVDKAIALQPENPMAHFLLGRWCYQVSHLSWLEKKTATALLESPLSATVEDALQSFLKAEELQPGFSKAGRVYISKCYRELGKNSEARWWMKLALELPDVTKEDLAIQKDLEELEVILRDX

SEQ ID NO: 4622 - DNA, 669 bp, Rattus norvegicus
  misc_feature (1)..(669): n=a, c, g or t
  ref <308>: DATABASE ACCESSION NUMBER: EMBL / AA800228
  ref <309>: DATABASE ENTRY DATE: 2000-03-03
caggggcagagtgggtcacagttgagtttattgccagtgttaggagggttggggaatccgtggctggggtctgagtggagaagtttctgactgggcactgcagggcccaagagtagggaggaggcctgttgtccccaccactaaggcagcctcagggtgatggctgcaaaggacctactcacaacagggaggcctgggtggccttggggttcacctgaaccaataagttcttgtcaaaggcctatgtcttatcacccaatactgggttacaggcatgctggagatttgaactcaggtcctcaagcttgccgaggaccgttctccagggacaggccttgctggagaatcctcgttcacagtggggtgtcagacaggtccttcctagggtggaggactggccagcacttgttagcagctctaagttgctgggctctgtgcaaagggtgctaggccaagttggggtgcaaatgccccaaatgattaccctgtggtcccggaacacctacaaggccacctagacaaccactgaccccttcatcccggccatctgtgctcacattttacttccagactgggtctcataaaggtcattattgtgtcaggcccttatcctctcattaagtaatgggctctctanaggggacacatcttaactccaaagggactcca

SEQ ID NO: 4623 - protein, 227 aa, Rattus norvegicus
  ref <308>: DATABASE ACCESSION NUMBER: SWISS-Prot / CAA62001
  ref <309>: DATABASE ENTRY DATE: 2003-02-01
SRRDPCQPAPRSREIGCCPLQETVPGPSCQGETESIAGEASEQGEARPCPEGHQSPSPAPVLQSPPGSPAGPAMTSESTSPPVVPPLHSPKSPVWPTFPFHRESSRIWERGGGVSPRDLPSPLPTKRTRTYSATARASAGPVFKGVCKQFSRSQGHGFITPENGSEDIFVHVSDIEGEYVPVEGDEVTYKMCPIPPKNQKFQAVEVVLTQLAPHTPHETWSGQVVGS

SEQ ID NO: 4624 - DNA, 1157 bp, Homo sapiens
  ref <308>: DATABASE ACCESSION NUMBER: EMBL / AB027011
  ref <309>: DATABASE ENTRY DATE: 1999-09-29
gctctcctgctggccccaccatgacttcagagtcgacgtcacccccagttgtgcccccgctccactcccccaagtccccagtctggcccaccttccccttccacagggagggcagcagggtctgggagcggggtggtgtcccacctcgggacctacccagccctctgcccaccaagcggaccaggacctattcagcgacagcccgggcctcagctggccccgtgttcaagggcgtctgtaagcagttctcacgctcacagggccatggcttcatcacccccgagaacgggtccgaggacatcttcgtacatgtgtctgacatcgagggggagtacgtgccagtggagggcgacgaggtgacctacaagatgtgccctatccctcccaagaaccagaagttccaggccgtggaggtggtgctcactcagctggccccccacactccccacgagacgtggtctggccaggtcgtgggctcctaggctgagtggttcacaggccagctggccgggggttggggagccacacagggtgaacgggcagcagccggctccatgccccactgccctggctgatgagtccttcggtggcctcagtgtgcacgtctgtctgtccgtctgtgcttgtggctatgagcgtgtgcctccacccaccccacgacccgtgactactgtgcagctggccaggaggtaggtggagggcaaggccaccagacctggcttcgcgctgtccactgcctctctcctcccctccctgccgcagacacgcaggacccgctcgccctcctgcttacccgtccccacggtgactgagctgcgagagcctgcgctgggctcactccctggcctccgcccctgagctgtcccgtgtcagtccctggcccggagccaggctctctgtgctacttacatctccctcccttggctgaggtcccccgccacagcctggacccttccctcagaagcctggccgatgggtgcttttggggagcctctcagcctctggcaggggaggaggactgacacggaggcacacaggcctctcactgccgaggccagccttccttcctgctctgctctctcagtgccatggagaggcaggaagaggggcctgagggcggaaggggtttggggctcccatttcgccggccagtccct

SEQ ID NO: 4625 - protein, 153 aa, Homo sapiens
  ref <308>: DATABASE ACCESSION NUMBER: SWISS-Prot / CAB46024
  ref <309>: DATABASE ENTRY DATE: 2003-02-01
MTSESTSPPVVPPLHSPKSPVWPTFPFHREGSRVWERGGVPPRDLPSPLPTKRTRTYSATARASAGPVFKGVCKQFSRSQGHGFITPENGSEDIFVHVSDIEGEYVPVEGDEVTYKMCPIPPKNQKFQAVEVVLTQLAPHTPHETWSGQVVGS

SEQ ID NO: 4626 - DNA, 613 bp, Rattus norvegicus
  ref <308>: DATABASE ACCESSION NUMBER: EMBL / AA800243
  ref <309>: DATABASE ENTRY DATE: 2000-03-03
acaatatgcaagagactgattcgtatgttcccagacactctgctgttagtcgcttcctaaagctcttgaaaggcccatctgcctcctttctcttgcgggaatcctgctgctcggtcctgccctgggtaccaccaccaaaccccgttccttcctctgacatcccacagcctgtaacagatggtagagaatttgcgtgaaagctgggtccctggacctctgtatctgtgatctgattacatgaaccagcctttggcgctagccttgggggatggctgctcttctgtgtcacccagtgctcggagcacataagcgcccgcataaaccaggaactgtccggtcacctgggcagcataggatgcgaaccgcagcagactccttaacaaggccttgaagcttgtgcagcggatatcatacgacactgagtacatctcatacatggtggctttgacattgagacagccgaggaagtccttgggattcagcctgtataggtcgaaggtgactctggctattcctgacttctttgtttgtgtgcagacatacttattgcccggtgtccatttctgtcccttttccaagatcatgaagtgtgtgttgtctcttagggtctgaa

SEQ ID NO: 4627 - protein, 217 aa, Rattus norvegicus
  ref <308>: DATABASE ACCESSION NUMBER: Refseq / NP_031728
  ref <309>: DATABASE ENTRY DATE: 2002-01-07
METARDYAGALIRPLTFMGLQTKKVLLTPLIHPARPFRVSNHDRSSRRGVMASSLQELISKTLDVLVITTGLVTLVLEEDGTVVDTEEFFQTLRDNTHFMILEKGQKWTPGSKYVPVCKQPKKSGIARVTFDLYRLNPKDFLGCLNVKATMYEMYSVSYDIRCTRFKAVLRNLLRFMSYAAQMTGQFLVYAGTYMLRVLGDTEEQPSPKPSTKGWFM

SEQ ID NO: 4628 - DNA, 660 bp, Homo sapiens
  ref <308>: DATABASE ACCESSION NUMBER: EMBL / AF041378
  ref <309>: DATABASE ENTRY DATE: 2000-03-03
atggaggccgcccgggactatgcaggagccctcatcaggcccctgacatttatgggatcacagactaagcgagtcctgttcaccccgctcatgcatccagctcgccctttccgggtctccaaccatgacaggagcagccggcgtggggtgatggcaagcagcctgcaggagctcatcagcaagactctggatgccctcgtcatcgctaccggactggtcactctggtgctggaggaagatggcaccgtggtggacacagaagagttctttcagaccttgggagacaacacgcatttcatgatcttggaaaaaggacagaagtggatgccgggcagccagcacgtccccacttgctcgccgccgaagaggtcgggaatagcgagagtcaccttcgacttgtacaggctgaaccccaaggacttcatcggctgccttaacgtgaaggccaccatgtatgagatgtactccgtgtcctacgacatccggtgcacgggactcaagggcctgctgaggagtctgctgcggttcctgtcctactccgcccaggtgacgggacagtttctcatctatctgggcacatacatgctccgggtgctggatgacaaggaagagcggccatccctccggtcacaagccaagggcaggttcacgtgtggatag

SEQ ID NO: 4629 - protein, 219 aa, Homo sapiens
  ref <308>: DATABASE ACCESSION NUMBER: SWISS-Prot / O60543
  ref <309>: DATABASE ENTRY DATE: 2001-10-16
MEAARDYAGALIRPLTFMGSQTKRVLFTPLMHPARPFRVSNHDRSSRRGVMASSLQELISKTLDALVIATGLVTLVLEEDGTVVDTEEFFQTLGDNTHFMILEKGQKWMPGSQHVPTCSPPKRSGIARVTFDLYRLNPKDFIGCLNVKATMYEMYSVSYDIRCTGLKGLLRSLLRFLSYSAQVTGQFLIYLGTYMLRVLDDKEERPSLRSQAKGRFTCG

SEQ ID NO: 4630 - DNA, 623 bp, Rattus norvegicus
  ref <308>: DATABASE ACCESSION NUMBER: EMBL / AA800260
  ref <309>: DATABASE ENTRY DATE: 2000-03-03
agcaaggattgtgtgccgaactctgcattaaaacagctgatgctaccaatctttgttccagagatctgtgcgcggctacctcgcagctttctgcagcccaaagggaaggcgatgagttgcttgatccacccaagctgaatccagacagagcattcgcctcacaggaccttttccctcttgtggtaccttctggagggaaaacagaagccaaatgttttgggcagaaagctggggagggctggaggtctccagggagaggctgaaatgccccagcaaggtctctgcaccaggcatcccaaggaggcataggagagaccaccactgttgggtctcaaactccactttggatttgccttgaggatcgccctgcaaaggccctagaattctaagagacagcgtgatatacagacttagcactctttttttttcttccggagctgaggaccgaacccagggccttgcacttgctaggcaagcgctctaccactgagctaaaaccccaacccgtactatacagactttaattaatactctggtcagttagcacttgaggtgtccgggggtgtaggtcagaagcctacacttcaggggtggataagctactgcctttctacgtaagcacc

SEQ ID NO: 4631 - DNA, 569 bp, Rattus norvegicus
  misc_feature (1)..(569): n=a, c, g or t
  ref <308>: DATABASE ACCESSION NUMBER: EMBL / AA800268
  ref <309>: DATABASE ENTRY DATE: 2000-03-03
caaatttcagccataactgaaagactttattttaagaaaaatttacagcaaaacagaacttgaagttagcgggtttagaggatatggcaaaacataattaccagaaaagctgcccaagcattgatggcttcttgctagatagaggagagtgagtggcaggccctaacctcactcacctttcctgattcagagaaccttgacccttttaaggctgggcccaggaaccccattttccaatttctcccttcttggagtttagaaaggtttatcttatctgtcaggcttccaagatacagaagatagtacggagaagggaaaaacattctattagttccagtgccttccctcaatgcctgcagacctatcagcccgtctttcagtatttgttgattccaaagaggcgaaccccatgggactggggcagcttaggcagcagtacgctgagcagtgaggcagtgttgatgaggaaatgagcagcatcatacttggcgtagaagctggccagtaggtanagtacaataggggaaatgctgaggaactttcgtgaggaagtaaactgtagtccgtag

SEQ ID NO: 4632 - protein, 153 aa, Rattus norvegicus
  ref <308>: DATABASE ACCESSION NUMBER: SWISS-Prot / AAH02146
  ref <309>: DATABASE ENTRY DATE: 2002-10-01
MNVGVAHSEVNPNTRVMNSRGIWLAYIILVGLLHVVLLSIPFFSIPVVWTLTNVIHNLAMYIFLHTVKGTPFETPDQGKARLLTHWEQMDYGLQFTSSRKFLSISPIVLYLLASFYTKYDAAHFLINTASLLSVLLPKLPQFHGVRLFGINKY

SEQ ID NO: 4633 - DNA, 625 bp, Rattus norvegicus
  misc_feature (1)..(625): n=a, c, g or t
  ref <308>: DATABASE ACCESSION NUMBER: EMBL / AA800272
  ref <309>: DATABASE ENTRY DATE: 2000-03-03
aagagagataaatctttaataaaactataaaccaaaacaagactgggaaatgtgtctaaagaatgacaccacaaacggcaggcagcttgttctttacaaactgtcaatgttaacaaacccagtctatgtgactgttaatgcagtaaccttgctaatcagactgaagaggggccaagtggctcacttgtgcccttggtggacacaggagcttgctctcatgactaagcacagggaacgacatcccactcctggttctattactgatctggtcaccaaagtacgcggagcacagaggcctgcagcaccagcgcatcaggcaaaggtgatggaaggttcgctgggctgccacacgctctcatcgtacagatcttctggaagttcttcttcgtctccatcaggaaagtaggtagggaacggcaggctcttacagaaatccttgtatgcaggcagcgtanagtccttgatcttcactaagcaatttctatgtccaggcacagagccattgacatagattatattgtgcttggtgttcactctccacaccttcagcccatacactgtcctgttttggtttcccatttgcccgggcattttagttccaggccagactctggcaatatcccca

SEQ ID NO: 4634 - DNA, 1634 bp, Homo sapiens
  ref <308>: DATABASE ACCESSION NUMBER: EMBL / X06323
  ref <309>: DATABASE ENTRY DATE: 1993-09-12
ggtggcgtggggactccctgaaagcagagcggcagggcgcccggaagtcgtgagtcgagtcttcccgggctaatccatgccgggttggaggctgctgacgcaggtcggcgcccaggtgctgggtcgactcggggacggcctgggtgctgccctgggcccggggaacagaacacacatctggctttttgttagaggtcttcatggaaagagtggtacatggtgggatgagcatctttctgaagaaaatgtcccattcattaagcagttggtctctgatgaagataaagcccaattagcaagtaaactgtgtcctctgaaagatgaaccatggcctatacatccttgggaaccaggttcctttagagttggtcttattgccttgaagctgggcatgatgcctttatggaccaaggatggtcaaaagcatgtggtcacattacttcaggtacaagactgtcatgtcttaaaatatacgtcaaaggaaaactgtaatggaaaaatggcaaccctgtctgtaggaggaaaaactgtatcacgttttcgtaaagctacatccatattggaattttaccgggaacttggattgccgccgaaacagacagttaaaatctttaatataacagataatgctgcaattaaaccaggcactcctctttatgctgctcactttcgtccaggacagtatgtggatgtcacagccaaaactattggtaaaggttttcaaggtgtcatgaaaagatggggatttaaaggccagcctgctacgcatggtcaaacgaaaacccacaggagacctggagctgttgcaactggtgatattggcagagtctggcctggaactaaaatgcctggaaaaatgggaaacatatacaggacagaatatggactgaaagtgtggagaataaacacaaagcacaacataatctatgtaaatggctctgtacctggacataaaaattgcttagtaaaggtcaaagattctaaactgcctgcatataaggatctcggtaaaaatctaccattccctacatattttcctgatggagatgaagaggaactgccagaagatttgtatgatgaaaacgtgtgtcagcccggtgcgccttctattacatttgcctaacatctttggacgtggcagaaccttacatattctgtgagcttcgatgagccagagtgatatcataaccaccagaaatcatactctcctttcttagtcacaacaaaatcacacatgtcatctttgtcaagggcataaatatatcattcatacccccattaaattttgttagaaaaattaccacattaaatatatgagttaagtagattggatttgctgaaattggtgttgggcatattagcaaaatattcttaatttgtggactcgattcttttttactacatatttcccaagttatcttaagatgtctgtaaatttaacttttattaaagttttgtcaatctttgtgaaatagtggttgtggaacagtagaaaaccatatggggactatagtgcaacctatttgggtaaagaaaccatttgctaaaatggagaaagtaaatagatttttatttaaattacagaaacatgttaaaggccggacaaaggaaagacaataaaatcataaattatc

SEQ ID NO: 4635 - protein, 348 aa, Homo sapiens [sequence omitted]

SEQ ID NO: 4636 - DNA, 420 bp, Rattus norvegicus
  ref <308>: DATABASE ACCESSION NUMBER: EMBL / AA800290
  ref <309>: DATABASE ENTRY DATE: 2000-03-03
aaatacaaacaaaaccaagtttatttacacaaattacagtatttaccacatataaatattgacagttgtcactgtaacagcagacaacttcactttcaagtgagcactttttgaaatatcacagagctccatgcctctgttcttgttctgctaccctgatggctcagtttattacatagctcaaggcggcccgacactcccagcaatccttcagcctcccaggcgctgggactaaggtaggagcctggctcagtgcccttggaaagtactccccatgagttgtgacaaaccctcaaacacgtgtgtaacagatgagaaccagcagttctggctacaggaagaaagaccactgactttcctgggctccttagaggtctgtgctttccatttcccacttgacagaactctgtggcacgaggc

SEQ ID NO: 4637 - DNA, 420 bp, Rattus norvegicus; identical to SEQ ID NO: 4636
  ref <308>: DATABASE ACCESSION NUMBER: EMBL / AA800290
  ref <309>: DATABASE ENTRY DATE: 2000-03-03

SEQ ID NO: 4638 - DNA, 420 bp, Rattus norvegicus; identical to SEQ ID NO: 4636
  ref <308>: DATABASE ACCESSION NUMBER: EMBL / AA800290
  ref <309>: DATABASE ENTRY DATE: 2000-03-03

SEQ ID NO: 4639 - DNA, 420 bp, Rattus norvegicus; identical to SEQ ID NO: 4636
  ref <308>: DATABASE ACCESSION NUMBER: EMBL / AA800290
  ref <309>: DATABASE ENTRY DATE: 2000-03-03

SEQ ID NO: 4640 - DNA, 420 bp, Rattus norvegicus; identical to SEQ ID NO: 4636
  ref <308>: DATABASE ACCESSION NUMBER: EMBL / AA800290
  ref <309>: DATABASE ENTRY DATE: 2000-03-03

SEQ ID NO: 4641 - DNA, 420 bp, Rattus norvegicus; identical to SEQ ID NO: 4636
  ref <308>: DATABASE ACCESSION NUMBER: EMBL / AA800290
  ref <309>: DATABASE ENTRY DATE: 2000-03-03

SEQ ID NO: 4642 - DNA, 569 bp, Rattus norvegicus
  ref <308>: DATABASE ACCESSION NUMBER: EMBL / AA800303
  ref <309>: DATABASE ENTRY DATE: 2000-03-03
aatccaaatagtatagattgtacgttggccaactctagcctagcaggcgccactccctttgttatcccatgtccaccccctcccgtcacagctgtcttctactgtttaaaaagttgcaaagttggggctggggatttagctcagtggtagagcgcttacctaggaagcgcaaggccctgggtgcggtccccggctccgaaaaaaagaaccaaaaaaaaaaaaaaaaaagttgcaaagtttatatgagtacaacatacaaagacacagcctccttcctacagtaggggaaggaaggggttgacagttaaataaggcacaggaagctgcagaaagcaccagcagggcccaggggttaggggttggcactgggtcccagccctacagctattagtggggaggcagggatcccctcagagtgccaccgtctgaagctaaactaattggctaaagtgctaaaaggtaagggtggtatctgccatctttggtgccgcttgccttttacccacaggccctgctgtaaaacttgagtcctggattccagaggccccctcctgtgcagaggccctgga

SEQ ID NO: 4643 - protein, 296 aa, Rattus norvegicus
  ref <308>: DATABASE ACCESSION NUMBER: Refseq / NP_076053
  ref <309>: DATABASE ENTRY DATE: 2002-09-19
MAGYLPPKGYAPSPPPPYPVPSGYPEPVALHPGPGQAPVPTQVPAPAPGFALFPSPGPVAPGPPAPFVPLPGVPPGLEFLVQIDQILIHQKAERVETFLGWETCNMYELRSGTGQQLGQAAEESNCCARLCCGARRPFRIRLADPGDREVLRLLRPLHCGCSCCPCGLQEMEVQAPPGTTIGHVLQTWHPFLPKFSILDADRQPVLRVVGPCWTCGCGTDTNFEVKTKDESRSVGRISKQWGGLLREALTDADDFGLQFPVDLDVKVKAVLLGATFLIDYMFFEKRGGAGPSAITS

SEQ ID NO: 4644 - DNA, 1680 bp, Homo sapiens
  ref <308>: DATABASE ACCESSION NUMBER: Refseq / NM_020360
  ref <309>: DATABASE ENTRY DATE: 2002-08-04
cggggccggggtccgagctcgggcccgcctccgcctccgccagctcctgtgagctgccgagtgctaggcacccgggctcttctgggggctccagaactaagccacccagacaccatcatctcgaaaaccccagcccttctcccatggcaggctacttgccccccaaaggctacgccccttcgcccccacctccctaccctgtcacccctgggtacccggagccggcgctacatcctgggcccgggcaggcgccagtgcccgcccaggtacctgccccagctcccggcttcgccctcttcccctcgcctggccccgtggccttggggtctgctgcccccttcttgccactgccaggggtgccttctggcctcgaattcctggtgcagattgatcagattttgattcaccagaaggctgagcgagtggaaacgttcctaggctgggagacctgtaatcggtatgaactgcgctctggggccgggcagcccctgggtcaggcggccgaggagagcaactgctgcgcccgtctgtgctgtggcgcccgccggccgctgcgtgtccgcctggccgaccccggggaccgtgaggtgctgcgtttgctccgcccgctgcactgtggctgcagctgctgcccctgtggcctccaggagatggaagtacaggctccaccaggcaccaccattggccacgtgctacagacctggcatcccttcctccccaagttctccatccaggatgccgatcgccagacagtcttgcgagtggtggggccctgctggacctgtggctgtggcacagacaccaactttgaggtgaagactcgggatgaatcccgcagtgtgggccgcatcagcaagcagtgggggggcctggtccgagaagccctcacagatgcagatgactttggcctacagttcccgctggacctggatgtgagggtgaaggctgtgctgctgggagccacattcctcattgactacatgttctttgagaagcgaggaggcgctgggccctctgccatcaccagttagaggccaccatggtgtgaggagaccatcacctcgaccagaactccagatggtcacctgccctggcccctcctctgggcagcccctttcctccatgtacactgcaggggacagaaggggggccccatccctaccctactccctggccgcctgcccctgtggttcccaaggaggggtatgtatgagagccgctctcctgctacctcccaccactgtcccagcagtccctcggcacacaggcatatcagctttcacactttccccatgcactctctcccacccccttccagggcctctgctccaaaggaggcctctggaacccaggactctggggttttacaagagggctggggtgtggaagggcaagctgcaccaaagacggtggatatagccaccgcccccccgccgctgcctagcatctgcttggccaattagttcagcctcagaccatggcactttgagggggtctctacctccccatcaacagctgcagggggaccccagtgccaacttcctctcccactagggccctgccttcagctggtgcttgctgcgattcctgtgccttatgtaactgcccttccttcccttgccctaggaaaaaggctgcatctttatatgttacattcatataaactttgtaactttttgg

SEQ ID NO: 4645 - protein, 295 aa, Homo sapiens
  ref <308>: DATABASE ACCESSION NUMBER: SWISS-Prot / Q9NRY6
  ref <309>: DATABASE ENTRY DATE: 2002-06-15
MAGYLPPKGYAPSPPPPYPVTPGYPEPALHPGPGQAPVPAQVPAPAPGFALFPSPGPVALGSAAPFLPLPGVPSGLEFLVQIDQILIHQKAERVETFLGWETCNRYELRSGAGQPLGQAAEESNCCARLCCGARRPLRVRLADPGDREVLRLLRPLHCGCSCCPCGLQEMEVQAPPGTTIGHVLQTWHPFLPKFSIQDADRQTVLRVVGPCWTCGCGTDTNFEVKTRDESRSVGRISKQWGGLVREALTDADDFGLQFPLDLDVRVKAVLLGATFLIDYMFFEKRGGAGPSAITS

SEQ ID NO: 4646 - DNA, 556 bp, Rattus norvegicus
  ref <308>: DATABASE ACCESSION NUMBER: EMBL / AA800305
  ref <309>: DATABASE ENTRY DATE: 2000-03-03
ttttacaccactttattccaacctgagcacctcaatataaaactaaacactggtgagctgttctccttactaattttgagttactgtaaaatgtacacattctgctagcagatcaacacttaaatagattaaatcatctgacacatggtagatttcatataatgaaaatacctaaaataattagtgcaatatactgattaaaataaaattgacttcaaaaaacaaggcttcaagattactaataacattgtaatacttatgttacaaattgcaagtacggtgtttattatggttctagcatgtaagaacagcaaagccccttcctttcatagggggagaaagaaataattagctgttttagtaactgtacattttgtatgtttaggcaattcttaaatattacaggaaataataaacatatggagactacaatgcagtactctatttacagtacagctgaatatttaaaataatcaagtttgaatgtacataatggttagtgcactgactaatcatgtccaaagggaagcagagccccctccctgttctagcctcg

SEQ ID NO: 4647 - DNA, 560 bp, Rattus norvegicus
  ref <308>: DATABASE ACCESSION NUMBER: EMBL / AA800318
  ref <309>: DATABASE ENTRY DATE: 2000-03-03
gaaagtgtctgcaagttttatttgtagactctgttaagcttgaaccataaaagctgcaaaacagtggtttagagagcatgtcaataccatgggggttggtgggtggaaactgttccttctgccagttcctaaggctggaagtggctagggcaggcagtggcgaggaaatagctggatgagctgaagcttgggtggcagtgcttactcaagcctgactcctgcctgtctcaggccctggggtcatatacacggcccatgaagactgggaacttgtgtcgctggtcccagagcaggaagaggaaaggctgctgcacctcaaagatgagtaagtttcgggccacggagatggtggaggctgcggctgcttccacacctgtctctgtcagttccaacaccgtctcgtgtttcatggaagacacctgaagatctgggtcctcagtcagcccacacaggttgagatcgtaagtgaagtcaaagaattccagtttctccatgattgacagcatgtcttggatgctctttactttaatgcgaggcatcatcacgtaagtgggctgaaa

SEQ ID NO: 4648 - protein, 418 aa, Rattus norvegicus
  ref <308>: DATABASE ACCESSION NUMBER: PIR / B26423
  ref <309>: DATABASE ENTRY DATE: 1996-07-12
MTRLVTLELLMAGIGSALLCFPDCILGEDTLFHEDQDKGTQLDSLTLASINTDFAFSLYKKLALRNPDKNVVFSPLSISAALAVVSLGAKGNSMEEILEGLKFNLTETPETEIHRGFGHLLQRLSQPRDEIQISTGNALFIEKRLQVLAEFQEKAKALYQAEAFTADFQQSREAKKLINDYVSKQTQGKIQGLITNLAKKTSMVLVNYIYFKGKWKVPFDPRDTFQSEFYSGKRRPVKVPMMKLEDLTTPYVRDEELNCTVVELKYTGNASALFILPDQGKMQQVEASLQPETLRRWKDSLRPSMIDELYLPKFSISADYNLEDVLPELGIKEVFSTQADLSGITGDKDLMVSQVVHKAVLDVAETGTEAAAATGVKFVPMSAKLDPLIIAFDRPFLMIISDTETAIAPFLAKIFNPK

SEQ ID NO: 4649 - DNA, 657 bp, Homo sapiens
  ref <308>: DATABASE ACCESSION NUMBER: EMBL / M13203
  ref <309>: DATABASE ENTRY DATE: 2000-03-04
ctcggaccctgtacagcagcagccccagagtcctaagcaacaacagtgacgccaacttggagctcatcaacacctgggtggccaagaacaccaacaacaagatcagccggctgctagacagtctgccctccgatacccgccttgtcctcctcaatgctatctacctgagtgccaagtggaagacaacatttgatcccaagaaaaccagaatggaaccctttcagcttcaaaaactcagttataaaatgcccatgatgaatagcaagaagtaccctctggcccatttcattgaccaaactttgaaagccaaggtggggcagctgcagctctcccacaatctgagtttggtgatcctggtaccccagaacctgaaacatcgtcttgaagacactggaacaggctctcagccttctgttttcaaggccatcatggagaaactggagatgtccaagttccagccaactctcctaacactaccccgcatcaaagtgacgaccagccaggatatgctctcaatcatggagaaattggttttcttcgatttttcttatgaccttaacctgtgtgggctgacagaggacccagatcttcaggttttcgcgatgcagcaccagacagtcctggaactgacagagactggggtggaggcggctgcag

SEQ ID NO: 4650 - protein, 500 aa, Homo sapiens
  ref <308>: DATABASE ACCESSION NUMBER: SWISS-Prot / ITHUC1
  ref <309>: DATABASE ENTRY DATE: 2002-06-15
MASRLTLLTLLLLLLAGDRASSNPNATSSSSQDPESLQDRGEGKVATTVISKMLFVEPILEVSSLPTTNSTTNSATKITANTTDEPTTQPTTEPTTQPTIQPTQPTTQLPTDSPTQPTTGSFCPGPVTLCSDLESHSTEAVLGDALVDFSLKLYHAFSAMKKVETNMAFSPFSIASLLTQVLLGAGENTKTNLESILSYPKDFTCVHQALKGFTTKGVTSVSQIFHSPDLAIRDTFVNASRTLYSSSPRVLSNNSDANLELINTWVAKNTNNKISRLLDSLPSDTRLVLLNAIYLSAKWKTTFDPKKTRMEPFHFKNSVIKVPMMNSKKYPVAHFIDQTLKAKVGQLQLSHNLSLVILVPQNLKHRLEDMEQALSPSVFKAIMEKLEMSKFQPTLLTLPRIKVTTSQDMLSIMEKLEFFDFSYDLNLCGLTEDPDLQVSAMQHQTVLELTETGVEAAAASAISVARTLLVFEVQQPFLFVLWDQQHKFPVFMGRVYDPRA

SEQ ID NO: 4651 - DNA, 567 bp, Rattus norvegicus
  misc_feature (1)..(567): n=a, c, g or t
  ref <308>: DATABASE ACCESSION NUMBER: EMBL / AA800535
  ref <309>: DATABASE ENTRY DATE: 2000-03-03
gaaagaatgatttttttttcttaaaaaataaaacatgaggacttttttttttctctgcaatgctcagccatttttctgaagacataaaaaagttttaagagttttggcctaaacattcccgagagcggatgggagtgctgtgatgtggtctgagtggcaatgctggtcaaggtccttcagaccacatactggtacgggtctgccttcccttggtctggtgtggcaaaggggctggcccagcctaaagagaaagggtggccaaaaacggctttcatgttcatccactttgtttttttagcccatcttctctcttcctttttcaattgttctattcccgtctcatctgtgcagatggagtgcacttgggtcccaaacatcactgatgtgaaaatgaggaagagcagggcctcaaaacacagcaggatgagcaggataacagtggtgggcggtgagaaggagctgcactttgtccagtcttcttcaaagcaatgcaggaagtggaatcccaccatgatgagggcgtgcaaggaaatgagagctatgtacattgtgaacaggacanagtac

SEQ ID NO: 4652 - DNA, 2720 bp, Homo sapiens
  ref <308>: DATABASE ACCESSION NUMBER: EMBL / AF247703
  ref <309>: DATABASE ENTRY DATE: 2000-04-12
gctcgatgggcttctcctgcgcgccgcccggtgtctggccgagtccagagagccgcggcgcctcgttccgaggagccatcgccgaagcccgaggccgggtcccgggttggggactgcaggggaaggcagcggcggcggcggcgggagccccaccggggtctgggactggggaactgcctccggcttcacgatgccagtatggacagaatagcttatgatgcttatccccacccaccacttccgaaacattgagcggaaaccagaatacctccagccagagaagtgtgtcccacccccctaccctggtcctgtgggaaccatgtggtttatccgtgacggctgtggcatcgcctgtgccatcgttacctggtttctggtcctctatgcggagttcgtggtcctctttgtcatgctgattccatctcgagactacgtgtatagcatcatcaacggaattgtgttcaacctgctggccttcttggccctggcctcccactgccgggccatgctgacggaccccggggcagtgcccaaaggaaatgccactaaagaattcatcgagagtttacagttgaagcctgggcaggtggtgtacaagtgccccaaatgctgcagcatcaagcccgaccgagcccaccactgcagtgtttgtaagcggtgcattcggaagatggaccaccactgtccctgggtcaacaactgtgtaggcgagaacaaccagaagtacttcgtcctgtttacaatgtacatagctctcatttccttgcacgccctcatcatggtgggattccacttcctgcattgctttgaagaagattggacaacctatggactgaacagggaagaaatggcagagactggaatctctcttcatgaaaaaatgcagccccttaacttcagttcgacagagtgcagctccttctctccacccaccacagtgattctccttatcctgctgtgctttgagggcctgctcttcctcattttcacatcagtgatgtttgggacccaggtgcactccatctgcacagatgagacgggaatagaacaattgaaaaaggaagagagaagatgggctaaaaaaacaaagtggatgaacatgaaagccgtttttggccaccccttctctctaggctgggccagcccctttgccacgccagaccaagggaaggcagacccgtaccagtatgtggtctgaaggaccccgaccggcatggccactcagacacaagtccacaccacagcactaccgtcccatccgttctcatgaatgtttaaatcgaaaaagcaaaacaactactcttaaaactttttttatgtctcaagtaaaatggctgagcattgcagagaaaaaaaaaagtccccacattttattttttaaaaaccatcctttcgatttcttttggtgaccgaagctgctctcttttccttttaaaatcacttctctggcctctggtttctctctgctgtctgtctggcatgactaatgtagagggcgctgtctcgcgctgtgcccattctactaactgagtgagacatgacgctgtgcgtggatggaatagtctggacacctggtgggggatgcatgggaaagccaggagggccctgacctcccactgcccaggaggcagtggcgggctccccgatgggacataaaacctcaccgaagatggatgcttaccccttgaggcctgagaagggcaggatcagaagggaccttggcacagcgacctcatcccccaagtggacacggtttgcctgctaactcgcaaagcaattgcctgccttgtactttatgggcttggggtgtgtagaatgattttgcgggggagtggggagaaagatgaaagaggtcttatttgtattctgaatcagcaattatattccctgtgattatttggaagagtgtgtaggaaagacgtttttccagttcaaaatgccttatacaatcaagaggaaaaaaaattacacaatttcaggcaagctacgttttcctttgtttcatctgcttcctctctcaccaccccatctccctctcttccccagcaagatgtcaattaagcagtgtgaattctgactgcaataggcaccagtgcccaacacatacagccccaccatcatccccttctcattttataaacctcaaagtggattcactttctgatagttaacccccataaatgtgcacgtacctgtgtcttatctatattttaacctgggagactgttgtcctggcatggagatgaccatgatgctggggttacctcacagtccccaccctttcaaagttgacatatggccatcccattggccagaatccacagacacacctaagcctgtggcactgggacagaatagattttccatttgagaggcacttcctgtgtcagtcttgtttgaaggaggtggtgatggtggatagaggtgaaggaggtagggagtgccctccaagtgcaaaaataacaaatatgattattgaccatcggggaattctcacacattgatttgttttttaagcaattgccagaaacccccttttttagcttttgcttggggtgggggtaggagttaaggtttattcaatcctgtcctgggtagggcgaaagttaatctagccatgtgatttttcagaaaagtaagtggaacatgctgccacttttcaattctgtcagtgcttccacatggaaacaaaatgcaataaaatttttccaaaacctgat

SEQ ID NO: 4653 - protein, 328 aa, Homo sapiens
  misc_feature (1)..(328): Xaa=Unknown amino acid
MMLIPTHHFRNIERKPEYLQPEKCVPPPYPGPVGTMWFIRDGCGIACAIVTWFLVLYAEFVVLFVMLIPSRDYVYSIINGIVFNLLAFLALASHCRAMLTDPGAVPKGNATKEFIESLQLKPGQVVYKCPKCCSIKPDRAHHCSVCKRCIRKMDHHCPWVNNCVGENNQKYFVLFTMYIALISLHALIMVGFHFLHCFEEDWTTYGLNREEMAETGISLHEKMQPLNFSSTECSSFSPPTTVILLILLCFEGLLFLIFTSVMFGTQVHSICTDETGIEQLKKEERRWAKKTKWMNMKAVFGHPFSLGWASPFATPDQGKADPYQYVVX

SEQ ID NO: 4654 - DNA, 496 bp, Rattus norvegicus
  ref <308>: DATABASE ACCESSION NUMBER: EMBL / AA800570
  ref <309>: DATABASE ENTRY DATE: 2000-03-03
cacctgaaaaataaaacttttaaaaaatatacaggacttttaaagtacaggtatatcttgaatggctgaattataaataatgtctctggtcatgttcacagctagggctggagaaaatgtcccaattccagtgaaggcttatagagtcaggaggccagctggaccacaagtggtcttgctgaactctttgatccaaagtggatttaaacagtccataaagcagggtcaggaggggaagaggaatggactcccagacactctcccacgagtccagaggattcttggaataagagatcaatttacaaattattaaactataggactaagaattcacaccatgaatataaatgacaggctattattgaagatacaaagtggcattttatgtttcatccccccagtctctcatcaaaaatttaaaaagtccccatgggcttcctaatgacttaagtcctcatcagctgtgaagaaatctccaagcccagacaccttgggg

SEQ ID NO: 4655 - DNA, 495 bp, Homo sapiens
  misc_feature (1)..(495): n=a, c, g or t
  ref <308>: DATABASE ACCESSION NUMBER: EMBL / R49498
  ref <309>: DATABASE ENTRY DATE: 2000-03-04
tttttttttttttttaggcagagttcttaggatgtatttttgttcacctgaaaaataaaactttttaaaaatatacaggactttttgagtacaggtatatcttaaatggctgaattataaataatgtctctggtcatgttcacagctagggctggagcaaatgtcccaattccagtgaaggctttggagagtcaggaggccagcagctgggacctatgagtgggcctctctaggactctctgatccatcccaaagaggatttaaacagtccaggaaaggcaggggatcagggaaggagggacaggggaagtgggacttcccaggatgtttcttacaagtttcaaagggatttcttgggaattaaggagatccaattttaccaaatttnttttaaaattatagggggcttaaaaaatttccaccccagttaaatttttaattttaccgggcttttttttngaggtttgttaaagtngggcctttttttggtttncg

SEQ ID NO: 4656 - DNA, 473 bp, Rattus norvegicus
  ref <308>: DATABASE ACCESSION NUMBER: EMBL / AA800572
  ref <309>: DATABASE ENTRY DATE: 2000-03-03
gaagtagtgatatgttatattcagacatgagtacatttcaacagtcttttgcaataaatatcataaaataatagagattcgcataataaatattctttacaataaaaaaaagtttaacagacttttgtcttaaaaatagccaggattcaactttgtgttttatacataaaatatacaaaaagcaccacaatttgtggttaaggcaatgaaaacacaggaagggttggaagtgctcagctgttaaagagtcaaaaggccagccaggagccaaaggcaccttagggagctgcggctgagacaccggggcagatcagataggaatgtcaactacggtgtccaagcgccccctcagtgaagtggggggtgcgaagggaaggccttcacggatactgggtgctggaggaggagaaaggagggttgccaacatcatctctgatgtgaagaccaacaccgcacagtgaatccagagctgt

SEQ ID NO: 4657 - DNA, 1604 bp, Homo sapiens
  ref <308>: DATABASE ACCESSION NUMBER: EMBL / AF041037
  ref <309>: DATABASE ENTRY DATE: 2000-03-03
tgtgaacagtgtgggaagtgcaagtgtggagaatgcactgctcccaggaccctaccatcctgtttggcctgtaaccggcagtgcctttgctctgctgagagcatggtggaatatggaacctgcatgtgcttagtcaagggcatcttctaccactgctccaatgacgacgaaggggattcctattcagataatccttgctcctgttcacaatcacactgctgctctagatacctgtgtatgggagccatgtctttatttttaccttgcttactctgttatcctcctgctaaaggatgcctgaagctgtgcaggaggtgttatgactggatccatcgcccagggtgcagatgtaagaactccaacactgtctattgtaagctggagagctgcccctcccggggtcagggtaaaccatcatgatttttggaggtgggttgtacctcctgaacttttagctttcaagttgtggctgttttttgttttgttttgtttgttttctttaaattttccgttccctccttcccctgttgccaaggtctaactcatggatttttctctttcctcatggatgatcttcagcaagagtggactgggaagctgcacctggctcccactttcaacaagagcctctgccatccacttgagggtattgagagccagtgggcttttgtgtacctttttgttctgcaagcaactttctaaagttgtgtacatgaacatacacccacatccagaacagtgatttagagttgttttgattgggtaccgtgggagcagggaaattggttttttaaaaagcaactgtttaattgcttaaataagctatgtattaaatctgtctccagttagggctatcttcctagcataggccccttaagtagcatgggggaattttgtataacgtaaaaatttcctttaaccactgccctctccttcttttccttcaaggtttttccccctcagtttgttgttgtcttattggagatgccaagtgattttttcttttatgtaattttagattgcctacaatgtaaatttcacattggagataatattggttggacctcgcccatcttcacttagccttcgtatttgtgaaggattcagccaccttccttcttcaccccatgcttctcaccaaaattttgttgtcattgagggcacttggataactcaagttgatatttatagctgatcaatctatatgtgtcacagaactatgctgcctaaagtgatcttggctccttaatggtccttttggccccttggatagttaacagctgagtaattctaatctcttctgtgttttccttgccttaaccacaaattgtggtgctttttgtatattttatgtataaatcacaaagttgaattctgactatttttaagacaaaagtctgttaaacttttttattgtaaagaatatttattatgcgaatctctattattttatggtatttattgcaaaagactgttgaaatgtactcatgtttgaatataacaaaatatcaatacttaacggaaaataaggtgacacgaagaaagtacatatgttaactataatgcagaaaatatattaattaatgaaaaaaaaaaaaaaaaaa

SEQ ID NO: 4658 - protein, 139 aa, Homo sapiens
  ref <308>: DATABASE ACCESSION NUMBER: SWISS-Prot / O43609
  ref <309>: DATABASE ENTRY DATE: 2002-06-15
CEQCGKCKCGECTAPRTLPSCLACNRQCLCSAESMVEYGTCMCLVKGIFYHCSNDDEGDSYSDNPCSCSQSHCCSRYLCMGAMSLFLPCLLCYPPAKGCLKLCRRCYDWIHRPGCRCKNSNTVYCKLESCPSRGQGKPS

SEQ ID NO: 4659 - DNA, 657 bp, Rattus norvegicus
  misc_feature (1)..(657): n=a, c, g or t
  ref <308>: DATABASE ACCESSION NUMBER: EMBL / AA800597
  ref <309>: DATABASE ENTRY DATE: 2000-03-03
atattccaaaggtcttttatgaggataaaaagacaccaaaaatatcaaggtgtaacatttcctttcaaatgatctgggtgaacagagaaaacacatccaaataacatttctgtggattattattattaattataattatacattcatgctgtagtggtaacaacgttcacatttgtctcagtgactcattacaaaggcacaatcaagtaggatgcatgtttaccataaaaaattaacatacaattttaaacagatgaagaaaaggaccagtttgaagtattaaacagaaatacctgtgtgagggtcaactcaatcatttccactcctaagcatctgtactaacactctgtattaacactctccagaggtgaccacgggtcagtgtctgtctgatcaacatccactttaacttgtaacatttgaacatttatgtggagaggcgaagaactaactcagtgagttcttaaaaacccctctttctacttcagttaatcctgtgagaactaaaaagcctttcccctctgtatgaccattcagtagttaagcagttttacattattgacacatttgaggattattaaaaaattgaagatagccatccagtcacagtgcttaacattaaggaaacagtaagttanaagccaggtgagttgtttc

SEQ ID NO: 4660 - DNA, 657 bp, Rattus norvegicus; identical to SEQ ID NO: 4659
  misc_feature (1)..(657): n=a, c, g or t
  ref <308>: DATABASE ACCESSION NUMBER: EMBL / AA800597
  ref <309>: DATABASE ENTRY DATE: 2000-03-03

SEQ ID NO: 4661 - DNA, 652 bp, Rattus norvegicus
  ref <308>: DATABASE ACCESSION NUMBER: EMBL / AA800622
  ref <309>: DATABASE ENTRY DATE: 2000-03-03
agacagtaatgcatgtatttatatatacacatatatacacaatgtataaatgaaatccttatataagcataggagttctcttgacagaaataaattataagcaatacaataaaaatgaagcttaatttaacatagtggtttgttttaaataactaaaacagatttatacttcaacaaattttggtcatttgaacacaaactattctgattgacacgtacttttttatacagcaattcaacacaccctgagtttcacttcccaattgatggttaaatgcttatcatactacggaaataaagatgtttaaaatgaagagcctggcatcttggcgtttagttcactgaaattgctttgaacagttcagttagtttatgtcaaaggacctgtatctactttgatttgctctagtgactctggagagctaacgatttgctccaacgcagatatccaacgagaaggtgaaatcaggacgcgcaatgctctgcccaggagccatcacctcactctacagcttctgtatcatcacctggaatttgcaggcaggcattgaagatacttcagctgtcacaatactttttattcccaagtttgacaagccacctctgattaagccacatgtaaacgctagatacttggatgcatgttctaaat

SEQ ID NO: 4662 - DNA, 3233 bp, Homo sapiens
  ref <308>: DATABASE ACCESSION NUMBER: EMBL / AK056690
  ref <309>: DATABASE ENTRY DATE: 2002-08-06
tttttttcgcccccgcccagcggccggatcgcatctcagctggttggctttggttagagctcccgtcagactttcgttcggccctaggatttggtagccccgaagtgtgggctctctccagtaccagactcatttcagtaccagcctttgggaagtcgtgtgaatacctcggtctcttagccacagggatagaatggcggcctgacggagccgcggcgccggcgaagtcgctgaggcgcgagctggaacccccagaccagctcaaacgggagccaaaactcgaagcttggaagaattagcaggaaatggcggatgaggcgttgtttttgcttctccataacgagatggtgtctggagtgtacaagtccgcggagcagggggaggtggaaaacggacgatgtattactaagctggaaaacatggggtttcgagtgggacaaggattgatagaaaggtttacaaaagatactgcaaggttcaaggatgagttagatatcatgaagttcatttgtaaagatttttggactacggtattcaagaaacaaatcgacaatctaaggacaaatcatcagtatttagcatttacgtgtggcttaatcagaggtggcttatcaaacttgggaataaaaagtattgtaacagctgaagtgtcttcaatgcctgcttgcaaatttcaggtgatgatacagaagctgtagaacatactgaaatgcaaggcttcaacagtgtaaagagataaattattcatgtaaaagtatttcaagtagtgatgatttaattacattgttcgatgtttgtacaggagtaagcatgtatttttatcaatttaacacagatcaaaggagatgaagggacattctgccatgacatacacttaaccaaaactattcaaaatgaaaaccggatttcaaataaccagacaccaagatgcagggcccttattttaaacctttttatttggttagagtgatatgtatttagccatagatggagaaacaaagctcagggtttgttgaattagcatgagagaaaattatgtaccaacagaattatttgtgagaagaatgaacaaattttgataaagtatgaatttgttttattttaaaaagcaaacatactaaattttttttattttattgcttataatttattaagaatgtttacacctgtataaggatttcatatatacattgtatgtgtgtatatataaatacatatatgactgcctaaattgtttataaatttaatttttctttaataggtttcattccttcagagctccattaatgtaatcaaaatgaaatatagattagtttaaatgtgaattcagtgactctagggccaaagaatattaggtatgtttggaaagaatttttgtatttattcctgttacagttttgactttcaacttctctccccgtgcatggaagtcctggtaaaggatctaacatctttattcccttctttcctcttccagctgagcagagttggataattgaattagtcattctgacattctttggaccatatcatcttagtggtttggggtcagtgctcatctgataaatctttcttaccacctcttctacttactttctcttacttaaattatctggcataagcagttatctccagcttttgttagaatcttgcatgttgattactaaaactatactttgtttcccatttatttattacccttttgcatgtatttgtgtgacagggaactctgcagcagggggtgactgacacaccaaacaagatgtttcactgggtactctgccatagaaatggcagattaagaagattgactataccaaacattatattaaaaacacaaaataaaaactataaaaatgtactttaggacattaaagaaaactcaagttagaagcataccattttcctttcatggaagggtacagtattacaaagataatttgtttaacttgatttattaaattctagttatgtgccctataatgatgtttcagtcagtgacagacctcatatatggcagtggttccataagattacaatactgtatttttactgtaccttctttatgtttagatatgcaagtacttaccattgtgttacagtgtcctacagtattcactacaataatatgctgtacaggtttgtagcctaggagcaataggccatagcttaggtgtatagtagatcataccatctaggtttgtgtaagtacactctgtgattgtacaattttaaaatctcctaatgatgatgcatttctcagaatgtatcccctttgctaagcaatgcatgactgcaatcctaattctcacatgttttggggaaaaaattttaattttgaaaaaatttaggaaagttcctactaaatatacatgtataaagtttattaaaagtcataatgacccaggaatagctaatgacacagaagtagatcaaaatagaacacaatagagaacttcaaaataaaacaggtgtgagaattgtgtgtgtgaaaaagctgggttcaaataagttggtttgttagacattcatatgcctacccatcagccatttcgttctcccttccttgctgacaaagccccattttttttttctttttttttggcctaaaactctgtatggctgccttgtgctatagaatagggtgcttccctagcctagagagggtgagtgttgattagattctgtgccaatcatggtaattggcttacttgatcatttgatggaatctaggctaacgagacaaaggaagtctgaaggctttgaataagaaattttctgttgctcttaacaattgatacaagttagggatttgccagcatccctcttctgcttctcagtgaagatatgtgatatggatgtttgaagctaatctgcaacagccttctgatggccatgaaaggacaagtatggagatgaaagctatcacactgagaatagtgggatgtagatagaaagcacctgaattgtgcttctgaattaaccaatccaggaactgctttacctttggactttttgttatgtgagatattctttatattgttccatttgctttgggtatatgtatattgttacttgtagccaaaaagaaacctctcttagtagaaacaaagggagagttaggttattcaaaaattagtatgggacaattgaatatgcctttttctgcgggagtaggtggggagaaacttaaaggttcacttgtaaaacaataaagtactaaagaaaatgtg

SEQ ID NO: 4663 - DNA, 642 bp, Rattus norvegicus
  ref <308>: DATABASE ACCESSION NUMBER: EMBL / AA800637
  ref <309>: DATABASE ENTRY DATE: 2000-03-03
gaggagagcttttctactttattacaaagagaagaagcctttatgtggtcagaaaatacaagattgatcttttttctcttcctatgaaacgctgctgttcacacagccagagtgaattgtctcagttcacgtcttgaagccccatcacattcacttgggtatggatgtccttggctgctgaaaatctggccctttagtgcacagggcgacaaagtcccctgaccagcagttccagaatgtcccattttcatatattgcatccatgcacacctcctaaaaatgaggtacagcagggcaaacattttccaaaatagatgtcatatatataatatatacacattcgtacatacatacctttattcatgtgatgtccaaaatttaaaaaaaatgtacacatttattacaaaatcgtaacaaagactggacagtgttttgctcattctggaaagatgaagctcagtaacaacacagccctggagccaccagagactgtggtaatctctctacagtcatattcttgcagtaagcctggagaaactgcctttcagaaacacaaggggaagtaaaaagaaagaagcagaccttgctcatctttccaaatgaaatacgagaaggatctccacatcaaaacgcacaaacatc

SEQ ID NO: 4664 - protein, 455 aa, Rattus norvegicus
  ref <308>: DATABASE ACCESSION NUMBER: SWISS-Prot / BAB27481
  ref <309>: DATABASE ENTRY DATE: 2002-10-01
MRGMSNNTPQLNRSLSQGTQLPSHVTPTTGVPTMSLHTPPSPSRGILPMNPRNMMNHSQVGQGIGIPSRTNSMSSSGLGSPNRSSPSIICMPKQQPSRQPFTVNSMSGFGMNRNQAFGMNNSLSSNIFNGTDGSENVTGLDLSDFPALADRNRREGSGNPTPLINPLAGRAPYVGMVTKPANEQSQDFSIHNEDFPALPGSSYKDPTSSNDDSKSNLSTSGKTTSSTDGPKFPGDKSSTTQNNNQQKKGIQVLPDGRVTNIPQGMVTDQFGMIGLLTFIRAAETDPGMVHLALGSDLTTLGLNLNSPENLYPKFASPWASSPCRPQDIDFHVPSEYLTNIHIRDKLAAIKLGRYGEDLLFYLYYMNGGDVLQLLAAVELFNRDWRYHKEERVWITRAPGMEPTMKTNTYERGTYYFFDCLNWRKVAKEFHLEYDKLEERPHLPSTFNYNPAQQAF

SEQ ID NO: 4665 - DNA, 625 bp, Homo sapiens
  ref <308>: DATABASE ACCESSION NUMBER: EMBL / AF147398
  ref <309>: DATABASE ENTRY DATE: 1999-05-10
ttttttttttgaggagagcttttctactttattacaaagagaagaagcctttatgtggtcagaaaatacaagattgatctttttttctcttcctatgaaacgctgctgttcaaacagccagagtgaattgtctcagttcacttcttttaagtcccatcacattcacttgggtatggatgtccttggctgctgaaaatctggcccttttagtgcacagggcgacaaagtcccctgaccagcagttccagaatgtcccattttcatatattgcatccatgcacacctcctaaaaatgaggtacagcagggcaaacattttccaaaatagatgtcatatatataatatatacacattcgtacatacatacctttattcatgtgatgtccaaaaatttaaaaaaaatgtacacatttattacaaaatcgtaacaaagactggacagtgttttgctcattctggaaagatgaagctcagtaataacacaaccctggaaaaccatccagagattgtggcaatatctttcttctaaacagtcagatattcttgcattaagcttggcgaaactgcctttcaaaaacagaaggggaagtaaaatgaaggaagcagacctcttgctcatctttcc

SEQ ID NO: 4666 - DNA, 583 bp, Rattus norvegicus
  ref <308>: DATABASE ACCESSION NUMBER: EMBL / AA800639
  ref <309>: DATABASE ENTRY DATE: 2000-03-03
agaagcaaaatacaaatgttttatttattgtttaggaaactcccagactcttccacaggaaaatagacaggcattcatcacattattttaattgctaaagcagaacaattatttatggtgacattcaataataactgtctctgaggatgtggagttaaaggttaaaattgattaaactagatggtaaagtcacaatgctcaaataaacattcattcctatcatttcatgcctatagattttatcctataggaatgaaaagtaaaagtaaatttgttaacataaacaaaaacatacaaaacaaaaagttatgaaaatacaaggaaaggcataggtcacttaggaaaatttctaaacaacataattagaaaaaaatatatctgagcagacatgtttgtgtttttaacaatatatacaactgaaaaagtatcctaggagtgaggactaaaataacctctgtaataagaacccaacatgaactaaaacataggatacaatatccccacatagtatatgttttgccataaagggatatattctgaccactgagtatatacagaccataaaattaaattccaaaaatac

SEQ ID NO: 4667 - DNA, 539 bp, Rattus norvegicus
  misc_feature (1)..(539): n=a, c, g or t
  ref <308>: DATABASE ACCESSION NUMBER: EMBL / AA800651
  ref <309>: DATABASE ENTRY DATE: 2000-03-03
acaaacatagactttattaaatgctgctcaatccccagtgaagatctttcattataaaacggttttccatacaactgcaaggcaagaggttggaatggtactgataacaacaggtgtgaaaaatacccgaccaggtaaaaacatacaaggcttctacgcagtcaattcagagtttgcccactgcatttcccttacacaaagccaggcagtgatagctagcagtccgcatcacactgtgggacccagggcctccttcaccctgcaggcaggcctgggacgggcaggttgaggactgggaaggccctgcctccagccttggaggaatgaaggaggtgagctagggtccacccgccggtgctgctctgcgcacgctctgggtgctgctgctgcaggggatttgggaacagtcaacatttggtttacttccccccagcttttaatactttgtgcttcggaagcctggaaacgcaagatgttgcaaaacccagagtatggcagtatctttaatgaggctgggcctttatctcnccaaccgcctc

SEQ ID NO: 4668 - DNA, 3120 bp, Homo sapiens
  ref <308>: DATABASE ACCESSION NUMBER: Refseq / NM_006243
  ref <309>: DATABASE ENTRY DATE: 2000-11-01
ccgcagagggccggggctacggggcagccccgggcgatgaggggccggcgttgaccgggaagagcgggcaccgcggcagtggctccgaggggacccgcgatggcagcgccctgagaggaggctccaggcagggcgggctgcgctggcagcggccgctgaggtgctggccggccggctggctggcgacgggggcagaagcgacgagaggcgcgctcggcacccgcacccccgtgcccccgcctcagttgtctaaacttcgggctctcttccaccgtctgcgcgcccagagtcaacaacttcttcacccccctccgcccccgcccttccctccgtcagccccgggagctcgccgcggcccggggaccaggaacctccagcgctgagatgtggccgtgaggcgttggcgggcgccgaggagaagctcggcggcgtcccggggccggagggccgtggggccggggcgcaggggcgcgagcaccccgcgcctctcccccgcctcctcctgccgtctccgccgctgcccgtgccttgcaagcagcagccggagctgccaagcgtcagggccgcggagatgtcgtcgtcgtcgccgccggcgggggctgccagcgccgccatctcggcctcggagaaagtggacggcttcacccggaaatcggtccgcaaggcgcagaggcagaagcgctcccagggctcgtcgcagtttcgcagccagggcagccaggcagagctgcacccgctgccccagctcaaagatgccacttcaaatgaacaacaagagcttttctgtcagaagttgcagcagtgttgtatactgtttgatttcatggactctgtttcagacttgaagagcaaagaaattaaaagagcaacactgaatgaactggttgagtatgtttcaactaatcgtggtgtaattgttgaatcagcgtattctgatatagtaaaaatgatcagtgctaacatcttccgtacacttcctccaagtgataatccagattttgatccagaagaggatgaacccacgcttgaggcctcttggcctcacatacagttggtatatgaattcttcttgagatttttggagagccctgatttccagcctagcattgcaaaacgatacattgatcagaaattcgtacaacagctcctggagctttttgatagtgaagatcccagagaacgtgacttcctgaagactgttctgcaccgaatttatgggaaatttcttggattaagagcattcatcagaaaacaaattaacaacattttcctcaggtttatatatgaaacagaacatttcaatggtgttgctgaacttcttgaaatattaggaagtattatcaatggctttgcattgccactgaaagcagaacataaacaatttctaatgaaggttcttattcctatgcatactgcaaaaggattagctttgtttcatgctcagctagcatattgtgttgtacagttcctggagaaagatacaacactaacagagccagtgatcagaggactgctgaaattttggccaaaaacctgcagtcagaaagaggtgatgtttttaggagaaattgaagaaatcttagatgtcattgaaccaacacagttcaaaaaaattgaagagccacttttcaagcagatatccaagtgtgtatccagttctcattttcaggttgcagaaagggcattgtacttctggaataacgaatatattcttagtttgattgaggagaacattgataaaattctgccaattatgtttgccagtttgtacaaaatttccaaagaacactggaatccgaccattgtagcactggtatacaatgtgctgaaaaccctaatggaaatgaatggcaagcttttcgatgaccttactagctcatacaaagctgaaagacagagagagaaaaagaaggaattggaacgtgaagaattatggaaaaaattagaggagctaaagctaaagaaagctctagaaaaacagaatagtgcttacaacatgcacagtattctcagcaatacaagtgccgaataaaaaaaaagcctcccacctctgccggataggcagagttttgtatgcttttttgaaatatgtaaaaattacaaaacaaacctcatcagtataatataattaaaaggccaattttttctggcaactgtaaatggaaaaatatatggactaaacgtagccctgtgctgtatcatggccatagtatattgtaacctttgtctaatcattggatttattgtgtcacttctgaagtttcacagaaatgaatgaattttatcatctatgatatgagtgagataattatgggagtggtaagaattatgacttgaattcttctttgattgtgttgcacatagatatggtagtctgctctgtatatttttcccttttataatgtgcttttcacactgctgcaaaccttagttacatcctaggaaaaaatacttcctaaaataaaactaaggtatcatccttacccttctctttgtctcacccagaaatatgatggggggaattacctgccctaacccctccctcaataaatacattactgtactctggaatttaggcaaaaccttaaatctccaggctttttaaagcacaaaatataaataaaagctgggaaagtaaaccaaaattcttcagattgttcctcatgaatatcccccttcctctgcaattctccagagtggtaacagatgggtagaggcagctcaggtgaattacccagcttgcctctcaattcattcctcctcttcctctcaaaggctgaaggcagggcctttccagtcctcacaacctgtccttcacctagtccctcctgacccagggatggaggctttgagtcccacagtgtggtgatacagagcactagttgtcactgcctggctttatttaaaggaactgcagtaggcttcctctgtagagctctgaaaaggttgactatatagaggtcttgtatgtttttacttggtcaagtatttctcacatcttttgttatcagagtaccattccaatctcttaacttgcagttgtgtggaaaactgttttgtaatgaaagatcttcattgggggattgagcagcatttaataaagtctatgtttgtattttg

SEQ ID NO: 4669 - protein, 486 aa, Homo sapiens
  ref <308>: DATABASE ACCESSION NUMBER: SWISS-Prot / Q15172
  ref <309>: DATABASE ENTRY DATE: 2001-10-16
MSSSSPPAGAASAAISASEKVDGFTRKSVRKAQRQKRSQGSSQFRSQGSQAELHPLPQLKDATSNEQQELFCQKLQQCCILFDFMDSVSDLKSKEIKRATLNELVEYVSTNRGVIVESAYSDIVKMISANIFRTLPPSDNPDFDPEEDEPTLEASWPHIQLVYEFFLRFLESPDFQPSIAKRYIDQKFVQQLLELFDSEDPRERDFLKTVLHRIYGKFLGLRAFIRKQINNIFLRFIYETEHFNGVAELLEILGSIINGFALPLKAEHKQFLMKVLIPMHTAKGLALFHAQLAYCVVQFLEKDTTLTEPVIRGLLKFWPKTCSQKEVMFLGEIEEILDVIEPTQFKKIEEPLFKQISKCVSSSHFQVAERALYFWNNEYILSLIEENIDKILPIMFASLYKISKEHWNPTIVALVYNVLKTLMEMNGKLFDDLTSSYKAERQREKKKELEREELWKKLEELKLKKALEKQNSAYNMHSILSNTSAE

SEQ ID NO: 4670 - DNA, 362 bp, Rattus norvegicus
  ref <308>: DATABASE ACCESSION NUMBER: EMBL / AA800663
  ref <309>: DATABASE ENTRY DATE: 2000-03-03
caagggagaatgttaaatacttcatgctaggtagaccttgttattaagaacccctcccctgtagtaacttcctccagttcatacattcatgagtgcagggtacatacataaatatccacacacacatccacacacactgcctcaagggctggggaagacaaaagttatggccacacatattaggcctctggtggactcatgcaattgctcaacaagagagcaaatggctcaattctccatcgtctccctacagagaccaagaatcctaagacacaaacccaaacttttaacagcaagaggcatctttctgaggatgaaggtaccttatatgggaaaggattgggataaaacaccagaaattt

SEQ ID NO: 4671 - protein, 1087 aa, Rattus norvegicus
  ref <308>: DATABASE ACCESSION NUMBER: Refseq / NP_075532
  ref <309>: DATABASE ENTRY DATE: 2002-09-19
MADHVQSLAQLENLCKQLYETTDTTTRLQAEKALVEFTNSPDCLSKCQLLLERGSSSYSQLLAATCLTKLVSRTNNPLPLEQRIDIRNYVLNYLATRPKLATFVTQALIQLYARITKLGWFDCQKDDYVFRNAITDVTRFLQDSVEYCIIGVTILSQLTNEINQADTTHPLTKHRKIASSFRDSSLFDIFTLSCNLLKQASGKNLNLNDESQHGLLMQLLKLTHNCLNFDFIGTSTDESSDDLCTVQIPTSWRSAFLDSSTLQLFFDLYHSIPPSFSPLVLSCLVQIASVRRSLFNNAERAKFLSHLVDGVKRILENPQSLSDPNNYHEFCRLLARLKSNYQLGELVKVENYPDVIRLIANFTVTSLQHWEFAPNSVHYLLSLWQRLAASVPYVKATEPHMLETYTPEVTKAYITSRLESVHIILRDGLEDPLEDTGLVQQQLDQLSTIGRCEYEKTCALLVQLFDQSAQSYQELLQSASASPMDIAVQEGRLTWLVYIIGAVIGGRVSFASTDEQDAMDGELVCRVLQLMNLTDSRLAQAGNEKLELAMLSFFEQFRKIYIGDQVQKSSKLYRRLSEVLGLNDETMVLSVFIGKVITNLKYWGRCEPITSKTLQLLNDLSIGYSSVRKLVKLSAVQFMLNNHTSEHFSFLGINNQSNLTDMRCRTTFYTALGRLLMVDLGEDEDQYEQFMLPLTAAFEAVAQMFSTNSFNEQEAKRTLVGLVRDLRGIAFAFNAKTSFMMLFEWIYPSYMPILQRAIELWYHDPACTTPVLKLMAELVHNRSQRLQFDVSSPNGILLFRETSKMITMYGNRILTLGEVPKDQVYALKLKGISICFSMLKAALSGSYVNFGVFRLYGDDALENALQTFIKLLLSIPHSDLLDYPKLSQSYYSLLEVLTQDHMNFIASLEPHVIMYILSSISEGLTALDTMVCTGCCSCLDHIVTYLFKQLSRSTKKRTTPLNRESDCFLHIMQQHPAMIQQMLSTVLNIIIFEDCRNQWSMSRPLLGLILLNEKYFSDLRNSIVNSQPPEKQQAMHLCFENLMEGIERNLLTKNRDRFTQNLSAFRREVNDSMKNSTYGVNSNDMMS

SEQ ID NO: 4672 - DNA, 4228 bp, Homo sapiens
  ref <308>: DATABASE ACCESSION NUMBER: EMBL / AB018288
  ref <309>: DATABASE ENTRY DATE: 1999-09-02
gaatggagcaaaatggcggatcatgtgcagagcctggcccaactagagaatctgtgcaaacagctgtatgaaaccacagacacaaccactcgactccaggcagagaaagccttggttgaatttaccaacagccctgattgcctgagcaagtgccagctactcctcgaaagaggaagttcctcttactcccagttactggcagctacatgccttaccaagcttgtatcacgcacaaacaaccccctaccattggaacagcgaatagatattcggaactatgtgctcaactaccttgccactcggccgaagttggctactttcgtgacacaagcacttattcagttatatgccagaatcacaaaactgggctggtttgactgtcagaaggatgactatgtcttcagaaatgcaatcacagacgtcacaaggtttttacaggatagtgttgaatactgcatcattggtgtcacaattttatctcagctaaccaatgaaattaatcaagcagacaccacccatcctttaaccaagcacagaaaaatagcctcttcttttcgcgattcatcattatttgatatcttcacactttcctgcaatttactaaaacaggcttcaggaaagaatctaaacttgaatgatgaaagtcagcatggcttgctcatgcaactgctcaagctcactcataactgcctcaactttgacttcatcggcacttccactgatgagtcctcagacgacctgtgtacagtgcagattcccaccagctggagatcagccttcttagattcttcaaccttgcagctgtccaccattgggcgttgtgaatatgagaagacgtgtgcactcctcgtgcagttgtttgaccagtcggcccagtcgtaccaggagctgctacagagcgccagcgcaagcccaatggacattgcagtgcaggagggaaggctgacatggctggtttacattattggagcagtgatcggtggccgggtttcttttgccagcactgatgagcaagacgccatggatggtgagcttgtctgtcgggtgctccagctgatgaacctaacagattctcgtttggcccaggcgggtaatgagaagctagagttggccatgctgagcttttttgaacagtttcgtaagatctacattggggaccaagtgcagaaatcctctaagctgtaccgccgactctcagaagttctgggcttgaatgatgagaccatggtcctaagcgtcttcataggaaaaatcatcaccaacttgaagtactggggccgttgtgaaccaatcacctccaagacactacagcttctcaatgacctgtccattgggtacagtagcgtaaggaagctagtgaagcttagtgcggtacagttcatgctgaacaatcacacgagcgagcacttttcatttttgggtattaacaatcagtccaacctgacagacatgcggtgtcggactaccttctacacagcacttgggcgtctcctcatggtggatttaggagaggatgaagatcagtatgagcagttcatgctgccactcacagcagcatttgaggctgtggcccagatgtttagcaccaatagtttcaacgagcaggaggcaaagcgaactctagttggcctagtaagagacctgagagggatcgctttcgctttcaatgccaagaccagcttcatgatgctctttgaatggatatatccatcctatatgccaattctccaacgggcaattgagctctggtaccatgatccagcctgtactacacctgtactcaagttgatggctgaattggttcataataggtcccagcgactccagtttgatgtctcttcccccaatggcatcttactcttccgagaaaccagcaagatgataacaatgtatggcaatcgcatcctgacactaggagaggtcccaaaggatcaggtctatgctctgaagctcaagggcatctccatctgcttctccatgctgaaggctgctctcagtgggagttacgtcaatttcggagtctttcgtctctatggagacgatgccctggacaatgctctgcagaccttcatcaagctgctcctctctattcctcacagtgatctcttggattaccccaagctcagccagtcttattattcactactggaagtcctgacccaggaccatatgaactttattgcaagcctggaacctcacgtcatcatgtatattctctcttccatttctgaaggacttactgcacttgacaccatggtatgcacaggctgctgctcctgcctggaccacattgtgacatacctcttcaagcagctgtcacgtagcaccaagaagaggaccacacccctgaaccaggagagcgaccgctttctgcacatcatgcagcagcatccagagatgatccagcagatgctgtccacggtgctgaacatcatcatctttgaagactgtaggaaccagtggtctatgtcccgaccactacttggcttgatattgcttaatgaaaagtatttttctgacctaagaaacagtattgtgaacagccagccaccggagaagcagcaggccatgcacctgtgttttgagaacctgatggaaggcatcgagcgaaatcttcttacgaaaaacagagacaggttcacccagaacctgtcagcattccgtcgagaagtcaacgactcaatgaagaattccacttatggcgtgaatagcaatgacatgatgagctgacacctccttggactctacctgtacagagcagcgtccctttggtttggcccagaggggcgaacaattgcaagggagagggcctggctgatcctggctcttttctccaggggtgtggggaaaatggcaaaggtcaactagctgcttccccagggaataggggtgtgagtacactcactagggggcagggcgctgctggttcctgggggactgggtgggaagggtggtgggaggagataagagatacaaactgagactccagcctctcctcctggggccacccaagtggggagaacccctagtgtcctgccacaacctgccttgtataaacatgtacattttttcataacattttgaacaaggtttatattgactcaagtttaaaaacaaaaagtgtgactgaaaaatttttacagagtctagtgcaccaatgctgatgtgaggggttgtgtatgcgagtgaagaaaatgtgtattctggtggcctgaagctttactggacaaggatgtgtgagagtgcagagatatatttagtgacacagtagagaggcaaaaaaaaaaagctaaaattccaaatgtatattttttcgtattgccctgtcctcacccagaaatgatcaattcctgttactgtattaacccttgttattaggaactctaagccatgccagaacaccgtccctccccttggaccgtgtagattctgccctgggtccctagccccttgcagtgataaataactccagctaaaagtgtttggtgttcttatctccaccctctttcctactttgcttaccctcatcctcagacagatgcctcttgcttttaaaagttggatttaacgacgtgttgtagggttcttggtctgtgtgaaggcagagaccagagagaaggaagtgagcccactgctctcctgggagcaatgtgggtgagtccaccagaggccctgctgtgtgtggccaataaattttagtcttccccagccctcgaggcagtgtgtgtggatgtatgcgtgtggatatttatatatgtaccctgcactcatgaatgtatgaactggaggaagttactacagtggaagggttcttaataacaaggtctacctagcatgaagtatttaacattctcccatcccttaaaaaatatacatttttataaaatgaaaaccataataaatgttttgaatattaaaaaaaataataacctacagaggaaaattaatggagacagctatttgccttgtactttttccacaattgttgctgctagttgtacacatctctagttcagctcttgcccacgggacactcatcaattaggttttatttttatttctttcctctacccccagaaacaagcctgttaattttttttccttctcctctggcgactgtgtgatgaatcctttcttgcgtgatcaggttgcggatagacttgtaagggtgtttgctgcatacagtgtaagcattgtgaccgccaataaacttcaatggtttctactg

SEQ ID NO: 4673 - protein, 1087 aa, Homo sapiens
  ref <308>: DATABASE ACCESSION NUMBER: SWISS-Prot / Q9UIA9
  ref <309>: DATABASE ENTRY DATE: 2002-06-15
MADHVQSLAQLENLCKQLYETTDTTTRLQAEKALVEFTNSPDCLSKCQLLLERGSSSYSQLLAATCLTKLVSRTNNPLPLEQRIDIRNYVLNYLATRPKLATFVTQALIQLYARITKLGWFDCQKDDYVFRNAITDVTRFLQDSVEYCIIGVTILSQLTNEINQADTTHPLTKHRKIASSFRDSSLFDIFTLSCNLLKQASGKNLNLNDESQHGLLMQLLKLTHNCLNFDFIGTSTDESSDDLCTVQIPTSWRSAFLDSSTLQLFFDLYHSIPPSFSPLVLSCLVQIASVRRSLFNNAERAKFLSHLVDGVKRILENPQSLSDPNNYHEFCRLLARLKSNYQLGELVKVENYPEVIRLIANFTVTSLQHWEFAPNSVHYLLSLWQRLAASVPYVKATEPHMLETYTPEVTKAYITSRLESVHIILRDGLEDPLEDTGLVQQQLDQLSTIGRCEYEKTCALLVQLFDQSAQSYQELLQSASASPMDIAVQEGRLTWLVYIIGAVIGGRVSFASTDEQDAMDGELVCRVLQLMNLTDSRLAQAGNEKLELAMLSFFEQFRKIYIGDQVQKSSKLYRRLSEVLGLNDETMVLSVFIGKIITNLKYWGRCEPITSKTLQLLNDLSIGYSSVRKLVKLSAVQFMLNNHTSEHFSFLGINNQSNLTDMRCRTTFYTALGRLLMVDLGEDEDQYEQFMLPLTAAFEAVAQMFSTNSFNEQEAKRTLVGLVRDLRGIAFAFNAKTSFMMLFEWIYPSYMPILQRAIELWYHDPACTTPVLKLMAELVHNRSQRLQFDVSSPNGILLFRETSKMITMYGNRILTLGEVPKDQVYALKLKGISICFSMLKAALSGSYVNFGVFRLYGDDALDNALQTFIKLLLSIPHSDLLDYPKLSQSYYSLLEVLTQDHMNFIASLEPHVIMYILSSISEGLTALDTMVCTGCCSCLDHIVTYLFKQLSRSTKKRTTPLNQESDRFLHIMQQHPEMIQQMLSTVLNIIIFEDCRNQWSMSRPLLGLILLNEKYFSDLRNSIVNSQPPEKQQAMHLCFENLMEGIERNLLTKNRDRFTQNLSAFRREVNDSMKNSTYGVNSNDMMS

SEQ ID NO: 4674 - DNA, 590 bp, Rattus norvegicus
  ref <308>: DATABASE ACCESSION NUMBER: EMBL / AA800671
  ref <309>: DATABASE ENTRY DATE: 2000-03-03
acataaaacaattttcaaagaatacatttaaaaaccatctagatactgattttatagcattacaaaaaaattgagaggcacaattgaagtattcaaataaaaggtgaaggtgaaggtgggggtctctacttgctatccactgtgtttcctgggactcctcctacaggagccttcccatgaggcagtagtgcactttgaataaatcgaataaatcacataaaatatatacttttatacagaaagtgttgctgtgtcatcactttcaattgcttataaaaaacttcattttgaattgcacaaaagttctctttaaaaccggtaattcccagaaggcagggcttagaactatatgtctaaataattcattacaaattaattagatctctatttctccacagataaaaaaaaaacaatctgtgaagaattacatcatttaagtgggacatttaaaaattttttttcataggaaaataggtttatacatttgtccctagtcagctcaactttctccccctactttaaaacaaatcacagggcgttcagaacttttcagacggagtacctgtgccacagtactgggtgtgtcccat

SEQ ID NO: 4675 - protein, 1575 aa, Rattus norvegicus
  ref <308>: DATABASE ACCESSION NUMBER: Refseq / NP_006624
  ref <309>: DATABASE ENTRY DATE: 2002-11-05
MPHEELPSLQRPRYGSIVDDERLSAEEMDERRRQNIAYEYLCHLEEAKRWMEVCLVEELPPTTELEEGLRNGVYLAKLAKFFAPKMVSEKKIYDVEQTRYKKSGLHFRHTDNTVQWLRAMESIGLPKIFYPETTDVYDRKNIPRMIYCIHALSLYLFKLGIAPQIQDLLGKVDFTEEEISNMRKELEKYGIQMPSFSKIGGILANELSVDEAALHAAVIAINEAVEKGIAEQTVVTLRNPNAVLTLVDDNLAPEYQKELWDAKKKKEENARLKNSCISEEERDAYEELLTQAEIQGNINKVNRQAAVDHINAVIPEGDPENTLLALKKPEAQLPAVYPFAAAMYQNELFNLQKQNTMNYLAHEELLIAVEMLSAVALLNQALESNDLVSVQNQLRSPAIGLNNLDKAYVERYANTLLSVKLEVLSQGQDNLSWNEIQNCIDMVNAQIQEENDRVVAVGYINEAIDEGNPLRTLETLLLPTANISDVDPAHAQHYQDVLYHAKSQKLGDSESVSKVLWLDEIQQAVDEANVDEDRAKQWVTLVVDVNQCLEGKKSSDILSVLKSSTSNANDIIPECADKYYDALVKAKELKSERVSSDGSWLKLNLHKKYDYYYNTDSKESSWVTPESCFYKESWLTGKEIEDIIEEVTVGYIRENIWSASEELLLRFQATSSGPILREEFEARKSFLHEQEENVVKIQAFWKGYKQRKEYMHRRQTFIDNTDSVVKIQSWFRMATARKSYLSRLQYFRDHNNEIVKIQSLLRANKARDDYKTLVGSENPPLTVIRKFVYLLDQSDLDFQEELEVARLREEVVTKIRANQQLEKDLNLMDIKIGLLVKNRITLEDVISHSKKLNKKKGGEMEILNNTDNQGIKSLSKERRKTLETYQQLFYLLQTNPLYLAKLIFQMPQNKSTKFMDTVIFTLYNYASNQREEYLLLKLFKTALEEEIKSKVDQVQDIVTGNPTVIKMVVSFNRGARGQNTLRQLLAPVVKEIIDDKSLIINTNPVEVYKAWVNQLETQTGEASKLPYDVTTEQALTYPEVKNKLEASIENLRRVTDKVLNSIISSLDLLPYGLRYIAKVLKNSIHEKFPDATEDELLKIVGNLLYYRYMNPAIVAPDGFDIIDMTAGGQINSDQRRNLGSVAKVLQHAASNKLFEGENEHLSSMNNYLSETYQEFRKYFKEACNVPEPEEKFNMDKYTDLVTVSKPVIYISIEEIISTHSLLLEHQDAIAPEKNDLLSELLGSLGEVPTVESFLGEGAVDPNDPNKANTLSQLSKTEISLVLTSKYDIEDGEAIDSRSLMIKTKKLIIDVIRNQPGNTLTEILETPATAQQEVDHATDMVSRAMIDSRTPEEMKHSQSMIEDAQLPLEQKKRKIQRNLRTLEQTGHVSSENKYQDILNEIAKDIRNQRIYRKLRKAELAKLQQTLNALNKKAAFYEEQINYYDTYIKTCLDNLKRKNTRRSIKLDGKGEPKGAKRAKPVKYTAAKLHEKGVLLDIDDLQTNQFKNVTFDIIATEDVGIFDVRSKFLGVEMEKVQLNIQDLLQMQYEGVAVMKMFDKVKVNVNLLIYLLNKKFYGK

SEQ ID NO: 4676 - DNA, 5767 bp, Homo sapiens
  ref <308>: DATABASE ACCESSION NUMBER: EMBL / U51903
  ref <309>: DATABASE ENTRY DATE: 2000-03-04
gagggaggagagttcacttttacttcagtgtcagcgcgcggcggccgtggctggctctggcgagagagcaccgagggagtgggtcgcagatcttcgggcggctaggggaaatcggcgagaggcgggatccgagcgcgccggcggggcgcagagcccgcgagcctggccagcgagggtagccgcggggggcgcgccccgggcgggcccccggagacgcgcaggatgccacacgaagagctgccgtcgctgcagagaccccgctatggctctattgtggacgatgaaaggctctctgcagaggagatggatgagaggaggcggcagaacattgcttatgaatatctgtgccacttagaggaagccaaaaggtggatggaagtttgcttagttgaagaattgccaccaaccactgaattggaagaagggctccggaatggagtttaccttgcaaagttagccaagttctttgccccgaaaatggtatcagagaaaaagatctatgatgtggaacaaacacgttataagaagtctggccttcattttcgacacacagataataccgtccagtggttaagagcgatggagtctattggtctacccaagatattttatccagaaacaacagatgtctatgatcggaaaaacataccaagaatgatatattgcattcacgcactgagtttgtatctgttcaaactaggaatagcaccccagatccaggatttgttgggcaaagtagacttcacagaggaggaaatcagtaatatgagaaaagaacttgagaaatatggaatacagatgccatctttcagcaaaataggtggtattctggccaatgaactgtccgtggatgaagctgcattacatgctgcagttatagccattaatgaagcagttgaaaaaggaatagcagagcaaaccgttgtaacactaagaaacccaaatgcggttttaactttagtggatgacaaccttgcaccagaatatcagaaagaactctgggatgccaaaaagaaaaaagaggaaaatgcaagactgaagaatagctgtatttcagaagaagaaagagatgcttatgaagaactgctgacacaagcagaaatccaaggcaatattaataaagtcaacaggcaggctgcagtggaccatatcaatgctgtcattccggaaggtgaccccgagaatacgctgcttgcactgaagaaaccagaggcccagctgcctgctgtttatccctttgctgctgccatgtatcagaacgaacttttcaacctccagaaacagaacaccatgaactacttggcccacgaggagcttttgattgctgtggaaatgttgtctgctgttgctttactaaaccaggccttggaaagcaacgatcttgtgtctgtgcagaatcaactcagaagccccgcaataggcttaaacaatctggacaaggcatatgtggaacgttatgcaaacacactactctctgttaaactagaagttttatcccaagggcaagataacttaagctggaatgaaattcagaattgtattgatatggttaatgctcaaattcaagaagaaaatgaccgagttgtagctgtagggtacatcaatgaagctattgatgaagggaatcctttgaggactttagaaactttgctcctacctactgcgaatattagtgatgtggacccagcccatgcccagcactaccaggatgttttataccatgctaaatcacagaaactcggagactctgagagtgtttccaaagtgctttggctggatgagatacagcaagccgtcgatgaggccaacgtggacgaggacagagcaaaacaatgggttactctggtggttgatgttaatcagtgtttggaaggaaaaaaatcaagtgatattttgtctgtattgaagtcttccacttctaatgcaaatgacataatcccggagtgtgctgacaaatactatgatgcccttgtgaaggcaaaagagctcaaatctgaaagagtgtctagtgacggttcatggctcaaactcaacctgcacaaaaaatatgactactattacaacactgattcaaaagagagttcctgggtcacacctgaatcatgcttctataaagaatcatggctcacaggaaaagaaatcgaggacattattgaggaagtcacagtaggttacattcgtgagaatatatggtctgcttcagaagagttgcttcttcgctttcaagccacaagctcaggacccatccttagggaagagtttgaagctagaaaatcatttttgcatgaacaagaagagaatgtggtcaaaatacaggctttttggaaaggatataaacaacggaaggagtatatgcacaggcggcaaacgttcattgataatactgattctgttgtgaagattcagtcctggttccgaatggcaactgcaagaaagagctatctttcaagactacagtatttcagagatcataataatgaaattgtgaaaatacagtcactgttgagagcgaacaaagctagagatgactacaaaacattggttggctctgaaaacccaccattaacagtaattcgcaaatttgtatacctgctggaccaaagtgatttggatttccaggaggaactagaggttgcacgattaagggaagaagtagtgaccaagatcagggccaatcaacagctggaaaaagacctgaacctgatggacatcaagattggactgctggtgaagaacaggatcacactagaggatgtaatttcacacagtaaaaagctgaacaagaaaaaaggaggagaaatggaaatactgaataacaccgacaaccaaggaataaaaagtttgagtaaggagaggagaaaaacactagaaacatatcagcagctgttttaccttttacagaccaaccctttatacttggctaagctgattttccagatgccacagaacaagtccactaaatttatggatactgttattttcacactatataattatgcctctaatcagcgagaagaatatctacttctcaagctttttaaaactgctctggaggaagaaataaaatcaaaagtggaccaggtacaggacatagttactggtaaccctacagtcatcaagatggtcgtcagcttcaatagaggtgcccggggacagaacaccctgcgccaactcctggctccagtggtaaaagagatcatcgacgacaagtcgctgattatcaacacaaaccctgtagaggtgtacaaggcttgggtgaaccaactagaaacacagactggagaggccagcaagttgccttatgatgtgaccacagaacaagctctaacatacccagaagtgaaaaataaactggaggcttccattgagaacctgagaagggtcaccgacaaagtcctgaattctatcatttcttcccttgatctactgccttatggattgaggtatatagccaaagtactgaagaattcgatccatgagaaattccccgatgcaacagaagatgagctattaaagattgttggaaacctcctgtactatcggtacatgaatccagccattgtagctccagatggctttgatatcatcgacatgacagctggaggtcagataaattctgaccaaaggagaaacttaggatcagtggccaaggttcttcagcacgcagcctccaacaagctgtttgaaggagaaaatgagcatctctcatctatgaacaattatttatcagagacgtatcaggaattcaggaaatatttcaaagaagcatgtaatgtccctgagccagaagagaagtttaatatggacaaatacacagacctggtgacagtcagcaaaccagtcatttatatttcaattgaagaaatcatcagcacacactcactcctgttggaacaccaggatgcaattgcccctgagaaaaatgacttactgagtgaattgctggggtcgctgggagaggtgccaaccgtggaatcttttcttggggaaggagcagttgaccccaatgaccctaacaaggcaaatacactaagtcagctttcaaagaccgagatttctcttgtcttgacaagcaaatatgacatagaggacggtgaagctatagatagccgaagcctcatgataaagaccaagaagctgataattgatgtgatccggaaccagccagggaacacattgacagaaatcttagagacaccagcaactgcgcaacaggaggtagaccatgccacggacatggtgagccgtgcaatgatagattccaggactccagaagaaatgaagcatagccaatctatgattgaagatgcacagctgcctcttgagcagaagaagaggaaaatccagaggaatcttcggacgttggaacagactggacacgtgtcatccgaaaataaataccaagacattctcaatgagattgccaaggatattcgaaatcaaagaatctatcgtaagcttcgaaaagctgaattggcaaaacttcagcagaccctgaatgcacttaacaagaaggcagcattttatgaagagcaaatcaattattatgacacctacataaagacttgtttagacaacttaaaaagaaaaaatactcggagatcaattaaactagatggaaaaggagaacccaaaggggcgaagagagcgaagccagtgaagtacactgcagcaaagctgcatgagaaaggtgtcctgctagatatagatgatcttcaaacaaaccagtttaagaatgttacatttgatatcatagctactgaagatgtaggcattttcgatgtaagatcaaaattccttggtgttgagatggaaaaggtgcaactcaatattcaggatttacttcagatgcaatatgaaggagtagctgtaatgaaaatgtttgataaggttaaagtgaatgtaaaccttctcatatacctgctgaacaagaagttctatggaaagtgaagtgcctacagaaatttcttggattctgtatcatctggattaggaaatgaatttgtttaatatttttgtttttaaacatgattgaaatcactgcttataaatgtgtgattttttttaaatgaccaaaactgttctgaagaatgtacccaggtgcctttttgctaatttgatactataatagaatgagacataaaatgaattaatggaaacatatccacactgtactgtgatataggtactctgatttaaaactttggacatcctgtgatctgttttaaagttggggggtgggaaatttagctgactagggacaaacatgtaaacctattttcctatgaaaaaagttttaaatgtcccacttgaataacgtaattcttcatagtttttttaatctatggataaatggaaacctaattatttgtaatgaattatttagacagttctaagccctgtcttctgggagttatcaattttaaagagaacttttgtgcaattcaaatgaagtttttataagtaattgaaaatgacaacacaataacactttctgtataaaagtatatattttatgtgatttattcctactaaatgaaagtgcactactgcctcatgtaaagactcttgcacgcagagcctttaagtgactaaggaacaacatagatagtgagcatagtccccacctccacccctcacaatttatttgaatacttcaattgtgcctctcaattttttgtaatgctaaaaaatcagtatctagatggtttttaaatgtattctctggaaattgttttatgtaaaataaatgttacttaattccatt

SEQ ID NO: 4677 - protein, 1575 aa, Homo sapiens; identical to SEQ ID NO: 4675
  ref <308>: DATABASE ACCESSION NUMBER: SWISS-Prot / Q13576
  ref <309>: DATABASE ENTRY DATE: 2002-06-15

SEQ ID NO: 4678 - DNA, 698 bp, Rattus norvegicus
  misc_feature (1)..(698): n=a, c, g or t
  ref <308>: DATABASE ACCESSION NUMBER: EMBL / AA800673
  ref <309>: DATABASE ENTRY DATE: 2000-03-03
gggtaaaggaagtatatgtatgcagcgtatatcacatcgtatgcagcgtgtaacatatggtattaattgtctaacagtttttttcctggcacttgtatgcaaacagctttaccaagaggctctgtgcagcttttgtaacatgtcatgaagcatgtaactaaatggtgatctcaaagaatacatacaggctactttgtgtctggctgtgagaaggagaatattcacagtggtgttctactgcagttcttctaacaacccctttactaggatgcagtgggactaaaaaaatggaagaaacctcaggtacacttaaatacagcctggtactccctattaagtaagttccagcaatctacttttctctgttgtggaaagagtaaacctgaacaggtaccaacgtgaaaattcagtgtataaccaagtaactgctaaaataaaagttgtatattcatggaaaatagaaatggtaggaaaactattaggggattaaacacattgtttttgcatttaagttaatctgaactattataatagttattataaataactattttagttcaggttgaagcaataaagttgctttgcangtattttctgatttactgaatgattccatggtgaggacnattgggaacatcccataaactgactaatcatgaggaccgttacaagggtaaacacttcacaaggtgaccttg

SEQ ID NO: 4679 - DNA, 5538 bp, Homo sapiens
  ref <308>: DATABASE ACCESSION NUMBER: EMBL / D79986
  ref <309>: DATABASE ENTRY DATE: 2001-10-10
gccccagatcggaagtgacggagacgtgctagcgcgtcgaaggtagctctatggttttcctcgcgttcttgagtcgggaaatggccgctgtgtggttgcaacggagataaattcccggaaccgcgattcggcgtgtcaggaattcgaatttagagtttaatttctcagagcattctctccaggaagaatttttacagtatctcaaagacttcacttgacttcttgatcctgcataaaaccaaggagaaaagaaatgggtcgctccaattctagatcacattcttcaaggtcaaagtctagatcacagtctagttctcgatcaagatcaagatctcattctagaaagaagcgatacagttctaggtctcgttccagaacatattcaaggtctcgtagtagagatcgtatgtattctagagattatcgtcgcgattacagaaataatagaggaatgagacgaccttatgggtacagaggaaggggtagagggtattatcaaggaggaggaggtagatatcatcgaggtggttatagacctgtctggaatagaaggcactctaggagtcctagacgaggtcgttcacgttccaggagtccaaaaagaagatccgtttcttctcaaagatccagaagcagatctcgccggtcatatagatcttctaggtctccaagatcatcctcttctcgttcttcatccccatatagcaaatctcctgtttctaaaagacgagggtctcaggaaaaacaaaccaaaaaagctgaaggggaaccccaagaagagagtccgttgaaaagtaaatcacaggaggaaccgaaagatacatttgaacatgacccatctgagtctatcgatgaatttaataagtcatcagccacatccggtgatatttggcctggcctttcagcttatgataatagtcctagatcaccccatagtccttcacctattgctacaccacctagtcagagttcatcttgctctgatgctcccatgctcagtacagttcactctgcaaaaaatactccttctcagcattcacattccattcagcatagtcctgaaaggtctgggtctggttctgttggaaatggatctagtcgatacagtccttctcagaatagtccaattcatcacatcccttcacgaagaagtcctgcaaagacaatcgcaccacagaatgctccaagagatgagtctaggggccgttcctcgttttatcctgatggtggagatcaggaaactgcaaagactgggaagttcttaaaaaggttcacagatgaagagtctagagtattcctgcttgataggggtaataccagggataaagaggcttcaaaagagaaaggatcagagaaagggagggcagagggagaatgggaagatcaggaagctctagattacttcagtgataaagagtctggaaaacaaaagtttaatgattcagaaggggatgacacagaggagacagaggattatagacagttcaggaagtcagtcctcgcagatcagggtaaaagttttgctactgcatctcaccggaatactgaggaggaaggactcaagtacaagtccaaagtttcactgaaaggcaatagagaaagtgatggatttagagaagaaaaaaattataaacttaaagagactggatatgtagtggaaaggcctagcactacaaaagataagcacaaagaagaagacaaaaattctgaaagaataacagtaaagaaagaaactcagtcacctgagcaggtaaagtctgaaaagctcaaagacctctttgattacagtccccctctacacaagaatctggatgcacgagaaaagtctaccttcagagaggaaagcccacttaggatcaaaatgatagcgagtgattctcaccgtcctgaagtcaaactcaaaatggcacctgttcctcttgatgattctaacagacctgcttccttgactaaagacaggctgcttgctagtacacttgtccattctgtcaagaaggagcaagaattccgatccatctttgaccacattaagttgccacaggccagcaaaagcacttcagagtcatttattcaacacattgtgtccttggttcatcatgttaaagagcaatacttcaagtcagctgcaatgaccctaaacgagcggttcacttcgtatcagaaagccactgaagaacatagtactcggcaaaagagccctgaaatacacaggagaattgacatctcaccaagtaccctgaggaagcatacccgtttagcaggggaagagagagtttttaaagaagaaaatcaaaagggagataaaaaattaaggtgtgactctgctgaccttcggcatgacattgatcgccgtagaaaagaaagaagtaaagaacggggagattccaagggctccagggaatccagtggatcaagaaagcaggaaaaaactccaaaagattacaaggaatacaaatcttacaaagatgacagtaaacataaaagagagcaagatcattctcgatcttcatcctcttcagcatcaccttcttctcccagttctcgagaagaaaaggagagtaagaaggaaagagaagaagaatttaaaactcaccatgaaatgaaagaatactcaggctttgcaggagttagccgaccacgaggaaccttttttcgaattagaggcagaggaagagccagaggagtttttgctgggacaaatactggtccaaacaactcaaatactacttttcaaaagagaccgaaggaagaggaatgggatccagaatataccccaaagagcaagaagtacttcttgcatgacgacagagatgatggtgtggattattgggccaaaagaggaagaggtcgtggtacttttcaacgtggcagagggcgctttaacttcaaaaaatcaggtagcagtcctaaatggactcatgacaaataccaaggggatgggattgttgaagatgaagaagagaccatggaaaataatgaagaaaagaaggacagacgcaaggaagaaaaggaataataaatatgaagtaagattacaacagagcagaacttgcacccaccattttttttacctgatttttgttttcaaataagaatgtaagcattttacttaaattttactgtttgcaagtagtctatagaaattttgttttaagtcttcaaatatcttgagaaatagtagactgtatgttgaaaattgtactgaaataaagtagaaaattgttacgtaccatatttgtaactatcaacttttaaaacttttaacgtttttgttacatgcattgtaattctgctttgtctataagatatggtcaagtacagctctgtgaaagttctgattctcttccttccctgtttgtcaatgttttattctgaagtaaacgttagctctacatataaatcctggaacagaaattgtttatagagactacactaattattttaactgtatacatctgtttaatttgaacacactacatcgtagggtgactgatttttgaagtataccacagacaaaaagttgttactatggtaaactaagctagtttaacacttgagcaaatgcttaagaaggaattaaaaaaaaaaagctttgccaatagctaaaaagtacaagctattaaaaatcagattgaaaagttttgagaaaatgttatttttactgaaagcaagcagtggcctataaagaacattcttaggagccttttctatttgcgttcaaaactgtgtgttctctttctattcctatttgatagtttgagtcatggtcttagatattagctatttgtgagaggaaactggtttgtaacaatactgcaaatagaaaccccatttctactgaacatcctagttttaaacagaagaaaaactgtaatcctggggttggtatgtaggaggtctatcctgcagaataagttgatacattagtacctgatttcatatcttacatatttatttgagctgaacattagtttgtagtgtaactattagtaaaaatagagaaacacagcatactgttcattaatagtattttaaaaaaattgtttttcaaatgtcaccaataaaagttttggcaggaagcttgttgcggcattgatctaacctttttcccccccatttcagttgcagtttttgtagaatggctttttctttttcctcttaagagttctattcttcaggtagataatttttcaaatgtgaattatcttttgtgtctatattgatagctcttaaaggagtgaaaatctaaaatagtaaatttcaatgttaagtgtctgctttatgggcatatataaaagtagacacatttcatttgttaatttagttgtgtgtgtgtgttaaaaggagctaatgcttattctgttaatgtaaacttttgaagatcttaagtgtattgctctttcatcttaaacactttcgaggatttgcagtgcgtctagcacctagattacagccaggaacattggttaagaactgttggaaacaaaactaaaagcaaactcaacatatgtgatgtttatggccctcagatccttagtattgtgtgattttcccccgttaacatgtctttctaaaattgtctattaaagcagaggaaatacctgccaaaggaagtatgtattgcattaatcagggcataactaatattctcctgttcagaataatacttatttacgtgtgaaagcaacatggatgtgattcccaacacagaattttcatgacccttttattgtatacaaataaataccataacagttacttggttagacatcaaatctgtgtgcatgactatgtgcttatccacttaagacaataggtaaaaggggatctgagaaattatgtaatagggagtgggaataaaactacttaattcctgtgggcaggttatattttaagttcaaatgcattgctttaacctttggttacttttattctgttaaacagaattgaagaaagagtattataccagagtgtagtaggctagggtgattgtaagaactctgtaatagaatgtcattgtggatgttacctttttcagatccaagcatataaaaagcctgtatattttttaaaaacacatcttaactccacgctttacgatattataaaagttgaatggttcctcttggtaaggatatttgcttacaagtgctaggaaataactcactgatacctgcgttaacatactttgttttgcctagagaggggcaataaaaatgaaccaaaggatatttccagaaaggattaagaaagctgtttaagaaggccatgactctttaggtgtgtatgtgtacctttcagcatcctaggaatttttatactaaaagcaaaatgttttttccagttagtcttcttcaaggaattactattgttccttttgtcacaggtaaaatcagtgttgggaattataatttgagaaaaatattacccagtaacattgaatgtagatggctaaacgattcttactcagtgtgatgtataatgatgcaacagggacccttgtaaattgtcatacgccaataaaatgtcacaagtaat

SEQ ID NO: 4680 - protein, 921 aa, Homo sapiens
  misc_feature (1)..(921): Xaa=Unknown amino acid
MGRSNSRSHSSRSKSRSQSSSRSRSRSHSRKKRYSSRSRSRTYSRSRSRDRMYSRDYRRDYRNNRGMRRPYGYRGRGRGYYQGGGGRYHRGGYRPVWNRRHSRSPRRGRSRSRSPKRRSVSSQRSRSRSRRSYRSSRSPRSSSSRSSSPYSKSPVSKRRGSQEKQTKKAEGEPQEESPLKSKSQEEPKDTFEHDPSESIDEFNKSSATSGDIWPGLSAYDNSPRSPHSPSPIATPPSQSSSCSDAPMLSTVHSAKNTPSQHSHSIQHSPERSGSGSVGNGSSRYSPSQNSPIHHIPSRRSPAKTIAPQNAPRDESRGRSSFYPDGGDQETAKTGKFLKRFTDEESRVFLLDRGNTRDKEASKEKGSEKGRAEGEWEDQEALDYFSDKESGKQKFNDSEGDDTEETEDYRQFRKSVLADQGKSFATASHRNTEEEGLKYKSKVSLKGNRESDGFREEKNYKLKETGYVVERPSTTKDKHKEEDKNSERITVKKETQSPEQVKSEKLKDLFDYSPPLHKNLDAREKSTFREESPLRIKMIASDSHRPEVKLKMAPVPLDDSNRPASLTKDRLLASTLVHSVKKEQEFRSIFDHIKLPQASKSTSESFIQHIVSLVHHVKEQYFKSAAMTLNERFTSYQKATEEHSTRQKSPEIHRRIDISPSTLRKHTRLAGEERVFKEENQKGDKKLRCDSADLRHDIDRRRKERSKERGDSKGSRESSGSRKQEKTPKDYKEYKSYKDDSKHKREQDHSRSSSSSASPSSPSSREEKESKKEREEEFKTHHEMKEYSGFAGVSRPRGTFFRIRGRGRARGVFAGTNTGPNNSNTTFQKRPKEEEWDPEYTPKSKKYFLHDDRDDGVDYWAKRGRGRGTFQRGRGRFNFKKSGSSPKWTHDKYQGDGIVEDEEETMENNEEKKDRRKEEKEX

SEQ ID NO: 4681 - DNA, 452 bp, Rattus norvegicus
  ref <308>: DATABASE ACCESSION NUMBER: EMBL / AA800678
  ref <309>: DATABASE ENTRY DATE: 2000-03-03
aaaacatgattacaagaaaagaatacttcatttacgtgtaacactgtcttcatggacgtaccgtggtcacggagtagaaatacaacatgagtatacaggaaaggagaggagagaccggtgtttggccctggtggccccctcacagagacacagaaagcagcagacacctctgtgcattcaatgggacagtggacacttgtgtttggagcagccagagagtcagggaggatgggcaaagccacctctgggaccctaatttcgtgtggtaaccccaaagagatactggtctgcactggtggaggctggctcctgtcaggttcttcgcagccttcagggacaagctgaggctcctgagtgcccagtggtttgtcgcatagcttgctgggcccatgggctccatggtgtgaagagaaaaaaggccaaagtgggcgactggctgatctctaggtgac

SEQ ID NO: 4682 - DNA, 640 bp, Rattus norvegicus
  ref <308>: DATABASE ACCESSION NUMBER: EMBL / AA800680
  ref <309>: DATABASE ENTRY DATE: 2000-03-03
cagttgtgggagccacagtgcgggcgggcgggtctcacgggcggcggcgggagcgcgagtccgcccgcgtctttcaccttccggagaaaacatttcaagcggaggatccggtatctcgggattccgaagtctcccggtgtgagactcaaatttcaaaatggactggagcctgcgccccgcccccaccctctaggcggtcgggggccgtgggaaggctctggggccctgcggggctcagaagactgcccaggggaggcgctctattgcggaggctcgaactaagggggccacggacgcgctactttggtcgtggccgtggacatagagacctagcccgatttccacgcggaccagcaaacctggcgcacaccgaggtagttggcgggaaggtacagcagagacgacgcaggtgaggccagggtccggggtcggggtggctatcaccggccgctggccgcgtacttggccttggtgatgagatagagcacgatgtcctggtggcccccgaaagcggcgatgtgcagtgcgctccagccgtcgcggttggctaggcggatgtctgcgccgaatttgactagcagcttcaccagctccaggttgccgtcgatgactgactggtgtagtgctgtctggccctccg

SEQ ID NO: 4683 - protein, 162 aa, Rattus norvegicus
  ref <308>: DATABASE ACCESSION NUMBER: SWISS-Prot / BAB28231
  ref <309>: DATABASE ENTRY DATE: 2002-10-01
MSQAELSTCSAPQTQRIFQEAVRKGNTQELQSLLQNMTNCEFNVNSFGPEGQTALHQSVIDGNLELVKLLVKFGADIRLANRDGWSALHIAAFGGHQDIVLYLITKAKYAASGGVIATRTPAPGPHPRRLCCTFPPTTSVCARFAGPRGNRAKSLRPRPRPK

SEQ ID NO: 4684 - DNA, 501 bp, Rattus norvegicus
  ref <308>: DATABASE ACCESSION NUMBER: EMBL / AA800684
  ref <309>: DATABASE ENTRY DATE: 2000-03-03
gaacagacttttattgagctcctggtgtgtggtaccaccaaggcacagcacacagagacattagattggatggcagcccacaaggagggccttcctggaggcccccagaaaggcagtggtagacagacacatgcagcaatcacaagccttctcctctctgtggtttcagaaaatggaatggaaagagacaccttaggtggtctctaagacttagactcacatgttccatgggtataaggcacatgtgtagaacccacataactacggatgtgtgtatgagacaaaaacggctatgtatggcacacgcacaggcttcacgtgccgagtcggagtccacgtgtgcacaggccgcatggatagggcacaagaactccagagggataggggaggatcttgggaccgcaaggcctcaaggctggggctggtactggccctctgtggctgtgaagaagtcatccagaacgctccgaaggtagtcaaacgtgggcctgtcctctgggc

SEQ ID NO: 4685 - DNA, 2032 bp, Homo sapiens
  ref <308>: DATABASE ACCESSION NUMBER: EMBL / M36881
  ref <309>: DATABASE ENTRY DATE: 2000-03-04
cgcctggaccatgtgaatggggccagagggctcccgggctgggcagggaccatgggctgtggctgcagctcacacccggaagatgactggatggaaaacatcgatgtgtgtgagaactgccattatcccatagtccgactggatgggaagggcaggctgctcatccgaaatggctctgaggtgcgggacccactggttacctacgaaggctccaatccgccggcttccccactgcaagacaacctggttatcgctctgcacagctatgagccctctcacgacggagatctgggctttgagaagggggaaccactccgcatcctggagcagagcggcgagtggtggaaggcgcagtccctgaccacgggccaggaaggcttcatccccttcaattttgtggccaaagcgaacagcctggagcccgaaccctggttcttcaagaacctgagccgcaaggacgcggagcggcagctcctggcgcccgggaacactcacggctccttcctcatccgggagagcgagagcaccgccgggtccttttcactgtcggtccgggacttcgaccaaaaccagggagaggtggtgaaacattacaagatccgtaatctggacaacggtggcttctacatctcccctcgaatcacttttcccggcctgcatgaactggtccgccattacaccaatgcttcagatgggctgtgcacacggttgagccgcccctgccagacccagaagccccagaagccgtggtgggaggacgagtgggaggttcccagggagacgctgaagctggtggagcggctgggggctgcacagttcggggaggtgtggatggggtactacaacgggcacacgaaggtggcggtgaagagcctgaagcagggcagcatgtccccggacgccttcctggccgaggccaacctcatgaagcagctgcaacaccagcggctggttcggctctacgctgtggtcacccaggagcccatctacatcatcactgaatacatggagaatgggagtctagtggattttctcaagaccccttcaggcatcaagttgaccatcaacaaactcctggacatggcagcccaaattgcagaaggcatggcattcattgaagagcggaattatattcatcgtgaccttcgggctgccaacattctggtgtctgacaccctgagctgcaagattgcagactttggcctagcacgcctcattgaggacaacgagtacacagccagggagggggccaagtttcccattaagtggacagcgccagaagccattaactacgggacattcaccatcaagtcagatgtgtggtcttttgggatcctgctgacggaaattgtcacccacggccgcatcccttacccagggatgaccaacccggaggtgattcagaacctggagcgaggctaccgcatggtgcgccctgacaactgtccagaggagctgtaccaactcatgaggctgtgctggaaggagcgcccagaggaccggcccacctttgactacctgcgcagtgtgctggaggacttcttcacggccacagagggccagtaccagcctcagccttgagaggaggccttgagaggccctggggttctccccctttctctccagcctgacttggggagatggagttcttgtgccatagtcacatggcctatgcacatatggactctgcacatgaatcccacccacatgtgacacatatgcaccttgtgtctgtacacgtgtcctgtagttgcgtggactctgcacatgtcttgtgcatgtgtagcctgtgcatgtatgtcttggacactgtacaaggtacccctttctggctctcccatttcctgagaccaccagagagaggggagaagcctgggattgacagaagcttctgcccacctacttttctttcctcagatcatccagaagttcctgaagggccaggactttatctaatacctctgtgtgctcctccttggtgcctggcctggcacacatcaggagttcaataaatgtctgttgatgactgccg

SEQ ID NO: 4686 - protein, 508 aa, Homo sapiens
  ref <308>: DATABASE ACCESSION NUMBER: SWISS-Prot / P06239
  ref <309>: DATABASE ENTRY DATE: 2002-06-15
GCGCSSHPEDDWMENIDVCENCHYPIVPLDGKGTLLIRNGSEVRDPLVTYEGSNPPASPLQDNLVIALHSYEPSHDGDLGFEKGEQLRILEQSGEWWKAQSLTTGQEGFIPFNFVAKANSLEPEPWFFKNLSRKDAERQLLAPGNTHGSFLIRESESTAGSFSLSVRDFDQNQGEVVKHYKIRNLDNGGFYISPRITFPGLHELVRHYTNASDGLCTRLSRPCQTQKPQKPWWEDEWEVPRETLKLVERLGAGQFGEVWMGYYNGHTKVAVKSLKQGSMSPDAFLAEANLMKQLQHQRLVRLYAVVTQEPIYIITEYMENGSLVDFLKTPSGIKLTINKLLDMAAQIAEGMAFIEERNYIHRDLRAANILVSDTLSCKIADFGLARLIEDNEYTAREGAKFPIKWTAPEAINYGTFTIKSDVWSFGILLTEIVTHGRIPYPGMTNPEVIQNLERGYRMVRPDNCPEELYQLMRLCWKERPEDRPTFDYLRSVLEDFFTATEGQYQPQP

SEQ ID NO: 4687 - DNA, 501 bp, Rattus norvegicus; identical to SEQ ID NO: 4684
  ref <308>: DATABASE ACCESSION NUMBER: EMBL / AA800684
  ref <309>: DATABASE ENTRY DATE: 2000-03-03

SEQ ID NO: 4688 - DNA, 2032 bp, Homo sapiens; identical to SEQ ID NO: 4685
  ref <308>: DATABASE ACCESSION NUMBER: EMBL / M36881
  ref <309>: DATABASE ENTRY DATE: 2000-03-04

SEQ ID NO: 4689 - protein, 508 aa, Homo sapiens; identical to SEQ ID NO: 4686
  ref <308>: DATABASE ACCESSION NUMBER: SWISS-Prot / P06239
  ref <309>: DATABASE ENTRY DATE: 2002-06-15

SEQ ID NO: 4690 - DNA, 632 bp, Rattus norvegicus
  misc_feature (1)..(632): n=a, c, g or t
  ref <308>: DATABASE ACCESSION NUMBER: EMBL / AA800686
  ref <309>: DATABASE ENTRY DATE: 2000-03-03
aataacaagaaacagaacatcagtcccttatttgtacaaaaatacctgaaagtttacaattaggttcacgagccaaagagctatatagcacagagtgaagcaaagcacgcgggataaaggttttgtctatcaattaacaccctctgcattccctgaaaacgtttacatgtcaggtcattttccggtcactgcagtttacactatgatatcacaaatctacgatgagctagtagcgccctcggaggcacagtgatcggacaggctgtcaggtatttaagtgcagaaaggagaagacaaaacatctaagctgaggcacatatttcttcaaagtttaagcaaacaaaaaaagaaaaaagaaaacacgtttggaaactcttaacacctaataatataacagagcctacgtattaaaacgctaaaaacccaaagcatttggcattttccttctcaacttagtccaggtggttacacggagttgttcttaagaaaagaaaatcacaggcagagattgcaaagtcaaacaggctccaaacaaccctgagctgtccccttacattcatgtcaattaaatacaanaataaaagtcaattgtccttcagtctccggttaagggcggctgggtgcccgctaac

SEQ ID NO: 4691 - DNA, 5431 bp, Homo sapiens
  ref <308>: DATABASE ACCESSION NUMBER: EMBL / D86962
  ref <309>: DATABASE ENTRY DATE: 2001-10-10
ggcagccgggcgccccgcggggctctccgcgctgcgttcccgacccctggggggaggtgtggagtccaagcggtgcattcttgaaccatcttgtcagacgccggcggctcgcgggctgtggcgggggctgcggtcaaggccgcgctcctgggggccgccgcctgggagggtgggcgcccaggcgtccctgcagccccgggtgctccgactgcgcggcggggccgcggcgcgcgcgcccgggcgtccgggcgtccgggacagtggtgccagacactcccaaatcccgagccggcccagcctcgtacggaggaccttttttttggttctgttggtgacccgttagccgccgctggggcctaacaccaagttgagggctcgcggattagccgcccgccagccgtggaaatgtgataagagcggtaccgtttgcagaaggaaatttctgatgcaactcttcgcctttgctgattgcctctccaaacgcctgcctgacgactgccttggagcatgtgcgttatggaaattaggctttggcgctgaccacaatgctgagcaggaagcagcagctgcaggcccagtgactggtagctcagtgaccagcagcccagtgaccggcagccaggtcctcacctgggtcctctcagtgaagccagggtggccgccccagcagacagtgctacagagccaactcctgacaggttctgaaaatattgtgcacagggcaggctgaggacacagccacgtgatacccactgtagagagagggagagagagacctcctatgcaagctgccggccctctgttccgtagtaaggacaaggtggagcagacacctcgcagtcaacaagacccggcaggaccaggactccccgcacagtctgaccgacttgcgaatcaccaggaggatgatgtggacctggaagccctggtgaacgatatgaatgcatccctggagagcctgtactcggcctgcagcatgcagtcagacacggtgcccctcctgcagaatggccagcatgcccgcagccagcctcgggcttcaggccctcctcggtccatccagccacaggtgtccccgaggcagagggtgcagcgctcccagcctgtgcacatcctcgctgtcaggcgccttcaggaggaagaccagcagtttagaacctcatctctgccggccatccccaatccttttcctgaactctgtggccctgggagccccgctgtgctcacgccgggttctttacctccgagccaggccgccgcaaagcaggatgttaaagtctttagtgaagatgggacaagcaaagtggtggagattctagcagacatgacagccagagacctgtgccaattgctggtttacaaaagtcactgtgtggatgacaacagctggacactagtggagcaccacccgcacctaggattagagaggtgcttggaagaccatgagctggtggtccaggtggagagtaccatggccagtgagagtaaatttctattcaggaagaattacgcaaaatacgagttctttaaaaatcccatgaatttcttcccagaacagatggttacttggtgccagcagtcaaatggcagtcaaacccagcttttgcagaattttctgaactccagtagttgtcctgaaattcaagggtttttgcatgtgaaagagctgggaaagaaatcatggaaaaagctgtatgtgtgtttgcggagatctggcctttattgctccaccaagggaacttcaaaggaacccagacacctgcagctgctggccgacctggaggacagcaacatcttctccctgatcgctggcaggaagcagtacaacgcccctacagaccacgggctctgcataaagccaaacaaagtcaggaatgaaactaaagagctgaggttgctctgtgcagaggacgagcaaaccaggacgtgctggatgacagcgttcagactcctcaagtatggaatgctcctttaccagaattaccgaatccctcagcagaggaaggccttgctgtccccgttctcgacgccagtgcgcagtgtctccgagaactccctcgtggcaatggatttttctgggcaaacaggacgcgtgatagagaatccggcggaggcccagagcgcagccctggaggagggccacgcctggaggaagcgaagcacacggatgaacatcctaggtagccaaagtcccctccacccttctaccctaagtacagtgattcacaggacacagcactggtttcacgggaggatctccagggaggaatcccacaggatcattaaacagcaagggctcgtggatgggctttttctcctccgtgacagccagagtaatccaaaggcatttgtactcacactgtgtcatcaccagaaaattaaaaatttccagatcttaccttgcgaggacgacgggcagacgttcttcagcctagatgacgggaacaccaaattctctgacctgatccagctggttgacttttaccagctgaacaaaggagtcctgccttgcaaactcaagcaccactgcatccgagtggccttatgaccgcagatgtcctctcggctgaagactggaggaagtgaacactggagtgaagaagcggtctgtgcgttggtgaagaacacacatcgattctgcacctggggacccagagcgagatgggtttgttcggtgccagccgaccaagattgactagtttgttggacttaaacgacgatttgctgctgtgaacccagcagggtcgcctccctctgcgtcagccaaattggggagggcatggaagatccagcggaaagttgaaaataaactggaatgatcatcttggcttgggccgcttaggaacaagaaccggagagaagtgattggaaatgaactcttgccctggaataatcttgacaattaaaactgatatgtttactttttttgtattgatcacttttttgcactccttctttgttttcaatattgtattcagcctattgtaggagggggatgtggcgtttcaactcatataatacagaaagagttttgaatgggcagatttcaaactgaatatgggtccccaaatgttcccagagggtcctccacaccctctgccgactaccacggtgtggattcagctcccaaatgacaaacccagcccttcccagtatacttgaaaagctttcttgttaaaataaaaggtgtcactgtggtaggcatttggcatattttgtggactcagtcaagcaaccacagtctgttaatcatttctctatgctcagatgtcagatcctcttgttattagtgtgtcttgttctgcacagtgcaggagactttattcctttggaaaattcactgttccacaaacagcaggctgaatggcctcgcctctagattgacgtgggccagcctccttgagacacacctggcacccgtcatcggccagcggtggatgctgcataatccacctgggtacttcagccttgcgtttccacagccttcagcctgttctagaacgatcactgccttacccctgctgctgcagtggtgtgagtcgtttcacggctgatgtccctcgggggattaaaggatctaaagagaaaatggcacctggttgtcttcgtgctgtgtctcatgggtttccatagtgataaagacaaggaaacgctgcaggggccacaggcacaggctgatatttaaagatctttgcttgcagccctccgtcctgctgaaaacccccataagccagtgaacacagagcagctagaggctcctcctctgctggcttagggtcagaagtacctcacagtggttgtggacatggaagagttttgtcaacacaacactttgtccccgctccgggagatgagtcagatggtggcttgagttgtcacttggtcccctccgcccctcgggtggccccctttgccacgtccccttagcttagtgatcaggtgtgagagtggccatttccttacctttgatccctgtaaagcagaaaggactcctttgacaggcgacaaactactgtggtgagcagaatgatttcctttttcaagacaacacctgcctggcttctattaatgtgtgctggccatgatattgccccaaatccgccccactgaagtgttccctaaggaacagcatttctctgctcctcagtcaacccccgtagcctagagcagtgtcacaagcttcagtaaggccagtcagctggaagtcagtctaccgtatagtaacactgtatttcagtctacagaccacactctagttgttttccatgaaaggtatacaaatgaagaattttctagcaaaacatgtttttaaccatcagtgctcaattgcattttcttcctttcgcagccagtcagtctttcaaactattgacagtaagataattctcacgttcacacctggtggcaggcttcactgtagggacggacattgcagttacaccacgattccttcctcttcactggctcgaggtaaacccttttcaaggaaaaacaactctaggatttcttttttctgtgtacgtagaccagtcccatcagtgtataatctctctctcacacgcctctctccaatagacagcttgtatttgcagtatttcatatttataaatatgcgtttatttaaaaggagaacaaaagcttgactctgattcacagttttgtatgtagctggtttgacgtagtcttttgtattttccctgccgaagtgaattgttggagaatgtaaaccgcctccacgtggcggcagacttcctaaggccccagctcgctggcctcgcgctgggcggctgggaattccacctgagaacaagtcccgcaaaccggggacggaaggacatttgacttttatttttgtatttaattgacatgaatgtaaaggggacagctcagggttgttttggagcctgttgactttgtatctctgcctgtgattttcttttctaaatgaaactccatgtagcaaccaggacgaagttgagaaggaaaacgccaaatgctttggttattagagtttaataggtaagctctgttacactaggtgttagagttccagaatgttcttttgtttgctaaaccttgaagaaacatgtgcctcagcctagatgttttgtcttctcttttctgcacttaatacctgacagtatgaccgatctctgcgcctttctgggggcgggcaagctggcggtagatttgtgatgtcacagtgcaaactgcagtgactgtaaattggcctggcgtgtataaacgttttcagggaatgcagaaggtattaatgaagagacaaaacctttattccatgtgctttgcttcattctgtacatagctctttggctcgtgaacctaattgtaaactttcaggtatttttgtacaaataagggactgatgttctgtttcttgtaattagaaataaacattaatacagtgttcttc

SEQ ID NO: 4692 - protein, 594 aa, Homo sapiens
  ref <308>: DATABASE ACCESSION NUMBER: SWISS-Prot / Q13322
  ref <309>: DATABASE ENTRY DATE: 2002-06-15
MALAGCPDSFLHHPYYQDKVEQTPRSQQDPAGPGLPAQSDRLANHQEDDVDLEALVNDMNASLESLYSACSMQSDTVPLLQNGQHARSQPRASGPPRSIQPQVSPRQRVQRSQPVHILAVRRLQEEDQQFRTSSLPAIPNPFPELCGPGSPPVLTPGSLPPSQAAAKQDVKVFSEDGTSKVVEILADMTARDLCQLLVYKSHCVDDNSWTLVEHHPHLGLERCLEDHELVVQVESTMASESKFLFRKNYAKYEFFKNPMNFFPEQMVTWCQQSNGSQTQLLQNFLNSSSCPEIQGFLHVKELGKKSWKKLYVCLRRSGLYCSTKGTSKEPRHLQLLADLEDSNIFSLIAGRKQYNAPTDHGLCIKPNKVRNETKELRLLCAEDEQTRTCWMTAFRLLKYGMLLYQNYRIPQQRKALLSPFSTPVRSVSENSLVAMDFSGQTGRVIENPAEAQSAALEEGHAWRKRSTRMNILGSQSPLHPSTLSTVIHRTQHWFHGRISREESHRIIKQQGLVDGLFLLRDSQSNPKAFVLTLCHHQKIKNFQILPCEDDGQTFFSLDDGNTKFSDLIQLVDFYQLNKGVLPCKLKHHCIRVAL

SEQ ID NO: 4693 - DNA, 632 bp, Rattus norvegicus; identical to SEQ ID NO: 4690
  misc_feature (1)..(632): n=a, c, g or t
  ref <308>: DATABASE ACCESSION NUMBER: EMBL / AA800686
  ref <309>: DATABASE ENTRY DATE: 2000-03-03

SEQ ID NO: 4694 - DNA, 5431 bp, Homo sapiens; identical to SEQ ID NO: 4691
  ref <308>: DATABASE ACCESSION NUMBER: EMBL / D86962
  ref <309>: DATABASE ENTRY DATE: 2001-10-10

SEQ ID NO: 4695 - protein, 594 aa, Homo sapiens; identical to SEQ ID NO: 4692
  ref <308>: DATABASE ACCESSION NUMBER: SWISS-Prot / Q13322
  ref <309>: DATABASE ENTRY DATE: 2002-06-15

SEQ ID NO: 4696 - DNA, 533 bp, Rattus norvegicus
  ref <308>: DATABASE ACCESSION NUMBER: EMBL / AA800693
  ref <309>: DATABASE ENTRY DATE: 2000-03-03
tatttgtgggtagtcatagaagtcaacagaccagcacagaacagacacagctacacagtgctcatgtccacaaacacactgacaggggacagcacacagggctgggagacttgggctaagaccacctaagtccagagcacgcccctcctgcacagcagggattgtggggccaactgtgctttgctctaaagaccaggggcctctggggaggtgaggtctctgggaaggactagcagggtcgggccagccccacagtgcagcccatttgacaattggtccaggtttgcaacacatgggtgagattctgacatgctcagtgccaggaatgggcagctataaaccagagcattcacgagtaacaggtttcattcttcgagggctttgttcatgaagagttcacctccatgcacaatacactgacatcatacccccatcatccaaaaaaaaggtgttgggtgttttgtgggaatcactcaggcctgagctttgagaggacattgcttctgccttcctgctctgtgagttatgaggga

SEQ ID NO: 4697 - DNA, 533 bp, Rattus norvegicus; identical to SEQ ID NO: 4696
  ref <308>: DATABASE ACCESSION NUMBER: EMBL / AA800693
  ref <309>: DATABASE ENTRY DATE: 2000-03-03

SEQ ID NO: 4698 - DNA, 533 bp, Rattus norvegicus; identical to SEQ ID NO: 4696
  ref <308>: DATABASE ACCESSION NUMBER: EMBL / AA800693
  ref <309>: DATABASE ENTRY DATE: 2000-03-03

SEQ ID NO: 4699 - DNA, 533 bp, Rattus norvegicus; identical to SEQ ID NO: 4696
  ref <308>: DATABASE ACCESSION NUMBER: EMBL / AA800693
  ref <309>: DATABASE ENTRY DATE: 2000-03-03

SEQ ID NO: 4700 - DNA, 629 bp, Rattus norvegicus
  ref <308>: DATABASE ACCESSION NUMBER: EMBL / AA800699
  ref <309>: DATABASE ENTRY DATE: 2000-03-03
ggaaaaaggtcctgtttattattaggaaaagccggatctcagtagcagcagaacatggaatctgctcacaggcctcacactcattcctcaccaaaacaaaatagagtttacataaaaatagatataacccaggaaaccatgtacattggcatgtgaccagtgctatttacatgaaaatatcgcgttgcataagtgaggaataaacaccgccatgcacttcatcctaacgtttaaggtgaaaacgcagcagcacttgcttgcttcccgtgattgtcccactatcactaaaggactgacagacacctgaaggtttcttgtgcgcatctccatctgagtacaacctagatcttaccacttcgccaacaagaaacctctggatggcatctatcaaaccggtatgttaaacaaagttaagggtagttcaccaggctggagctctgatggggatatcaaacactctaagaagcccagtttgaaaatgtggaaagttacagcatcgtcagaatggaatgctgaggcctttcaaagctcagagtcactgtgcagaccggtatggacacacacccagaaaagacaccatcaccctccatcaagagggtggcatcagatgatggtgacattggatgatg

SEQ ID NO: 4701 - DNA, 2492 bp, Homo sapiens
  ref <308>: DATABASE ACCESSION NUMBER: EMBL / AK027812
  ref <309>: DATABASE ENTRY DATE: 2002-08-06
caaagatggaatacgtctgaatcttattttgatacgatacactggagacaattcaccctattccccaactataatttattttcatgggaatgcaggcaacataggtcacaggttgccaaatgcattacttatgttggttaacctcaaagttaaccttttgctggttgattatcgaggatatggaaaaagtgaaggagaagcaagtgaagaaggactctacttagattctgaagctgtgttagactacgtgatgactagacctgaccttgataaaacaaaaatttttctttttggccgttccttgggtggagcagtggctattcatttggcttctgaaaattcacataggatttcagccattatggtggagaacacatttttaagcataccacatatggccagcactttattttcattctttccgatgcgttaccttcctttatggtgctacaaaaataaatttttgtcctacagaaaaatctctcagtgtagaatgccttcacttttcatctctggactctcagatcaattaattccaccagtaatgatgaaacaactttatgaactctccccatctcggactaagagattagccatttttccagatgggactcacaatgacacatggcagtgccaaggctatttcactgcacttgaacagttcatcaaagaagtcgtaaagagccattctcctgaagaaatggcaaaaacttcatctaatgtaacaattatataatgtttccctttttgattattgcattgtattttaatttgtgcagaatgataaagaatgttccttttagaagtgtgttatgtctgtacctgtctgaagagtgacattaaactttgaaaggacttcactgctcctttacgatattccaaatagttttttacattggaaaaactaattcttgggattctttcatacattttcatcaaaactttcagtgtgattatgtattcatatcttcagtttaatatgtcagtataatagatattgttcaaaagtttcttgttgctaaagtggtgtaatctgttacacagatgaatagctagatgtggaaagagatatgtaaacaagaaacctttgggtattgtttcttaagtaaatattgggacaatcatggtaagcaaacttagttctgtaactgcatttttcaccttaaaagttaaatgaaatgcatgatggtattttattccttgaattatgcaatgcaacattttacatgtaaatagcactggtcatatactgatgtatatggttatctgggttatatctatttttatgtaaactctattttgtttttggcaagaagtgaaattgagacttatgtgcaggttgccattgaattttgctctggtgaatgctgagatccagctttttcttacaaataaatgggaccctgttttccaatacaaatgtaccgtgtttttgttaggtacagtctggatcatggcatgtagaaatagaaatttagaattttactgcagctttgatgtgcatatttgaactttttaacatttgtaactttggtggcaaagagaattttagcttctatcgattttgtaagtcttcagctgaaccactaatagcagtcatagtgaagattagcactacttagaattaaattaggaagtcttttatcattgcaggattgtacatactactttataaaaattctcacctttgattttaaatcccagtacctagttatatctaacctatcaaaggcaagatatcatttattggacttcttgaaaataaaagttacaaaatccaacaacaacaacaacaaaacaatgttcttggttttaatgttccagttgctgtgaaatagaactcctacaatcaaaagacagttttaggaagtcttatttattgattttaaaagttttacatgtaggagtgtgggaatgaaggaattctggagctttttgacacaaaacctattaccacatttagcagttaaatggctataggtgggaagtaggatttagatgtatagaaaagtaagaaaatcttacttagaaaaaagccccttgaaacttgcaggatttacttaataaaaatacacgctatgagtcataattgtgccaagttgtttcatgcagtcctcaaaaattagatgtaattgagctttgtgtaatattatgtcagctttaacatataatattttgaatattttagctatatttagtggctttctgcaagcaactagaacagagaagtaatgggtcaataatcttgaccttaatttaaaactttcaatggagatagggctagaaatacttttgccaaatagcattcttattcactttatgccggtatttagaaaaaataaattatagcaagtatgatttctaagaatgtttttctataaattactaattgtaaaaagtcttgctttttaaaacaagttggtaatgcatatcatggaaggcatattttgtatgtataaattcaccacaattaaagattattcttgtcagtc

SEQ ID NO: 4702 - protein, 202 aa, Homo sapiens
  misc_feature (1)..(202): Xaa=Unknown amino acid
MLVNLKVNLLLVDYRGYGKSEGEASEEGLYLDSEAVLDYVMTRPDLDKTKIFLFGRSLGGAVAIHLASENSHRISAIMVENTFLSIPHMASTLFSFFPMRYLPLWCYKNKFLSYRKISQCRMPSLFISGLSDQLIPPVMMKQLYELSPSRTKRLAIFPDGTHNDTWQCQGYFTALEQFIKEVVKSHSPEEMAKTSSNVTIIX

SEQ ID NO: 4703 - DNA, 629 bp, Rattus norvegicus; identical to SEQ ID NO: 4700
  ref <308>: DATABASE ACCESSION NUMBER: EMBL / AA800699
  ref <309>: DATABASE ENTRY DATE: 2000-03-03

SEQ ID NO: 4704 - DNA, 2492 bp, Homo sapiens; identical to SEQ ID NO: 4701
  ref <308>: DATABASE ACCESSION NUMBER: EMBL / AK027812
  ref <309>: DATABASE ENTRY DATE: 2002-08-06

SEQ ID NO: 4705 - protein, 202 aa, Homo sapiens; identical to SEQ ID NO: 4702
  misc_feature (1)..(202): Xaa=Unknown amino acid

SEQ ID NO: 4706 - DNA, 636 bp, Rattus norvegicus
  misc_feature (1)..(636): n=a, c, g or t
  ref <308>: DATABASE ACCESSION NUMBER: EMBL / AA800701
  ref <309>: DATABASE ENTRY DATE: 2000-03-03
agcattttcaaactttatttacaactgtcacagtgacaaaaagtagtttggaaaaaaaaaatgctagtttctccctgagcctcgatacagaacagacagaagtcacaggaggttcatctcacaacaggcatgtcactgaaatactaggattttttttttcaatacgatcagttagaaatacacacaaattacttaaagaaagaagaggaggaagaggggaagagaaagagaaagagaaagagaaagagaagaagaggccagacaggagctcagccacttgtccaagagcagctgggtccccccaacaggctcaaccgctgaggggcctgacgttagctatcagcccctgacctgctcagacaacacacggttgtacaacatggtctagtgaccggcaaaaggaagaagccaccccacagacacacatatacacaaagctgattgatactggatttacaagcacatcccgtcacacggcaagaccaagacagatcggggtaggggtgagaagacaccaanacacaggaatttcaaaggccaaacacctgtccataaagggaggcgagggacgagaaatgccgtgggagaaggggagaaggatgaacagatctctgtagccaaaacagaacagagtgg

SEQ ID NO: 4707 - DNA, 497 bp, Homo sapiens; identical to SEQ ID NO: 4248
  ref <308>: DATABASE ACCESSION NUMBER: EMBL / BF109813
  ref <309>: DATABASE ENTRY DATE: 2000-10-23

SEQ ID NO: 4708 - protein, 295 aa, Homo sapiens; identical to SEQ ID NO: 4249
  ref <308>: DATABASE ACCESSION NUMBER: SWISS-Prot / P13726
  ref <309>: DATABASE ENTRY DATE: 2002-06-15

SEQ ID NO: 4709 - DNA, 641 bp, Rattus norvegicus
  ref <308>: DATABASE ACCESSION NUMBER: EMBL / AA800708
  ref <309>: DATABASE ENTRY DATE: 2000-03-03
gataaaaggcaggtaggaatttaatgacgaatagcccatattggttgctgaacaccaggatgctgtccaaggaaccatccttaaataaaacaacctgaaaacagagttctcacacacacgagcacactcacggactctggaactcttgggatcattaaaccactactttaacgaacagatgtaaaatcacactaaaatgggaagtgggcacaaacttcaggaatagtgcagattgtctatgaacatcattttcttttataattttccatttacttttcacatatatgtacagtctctagactgtaaaagagaccgagtggctcaaaggacgaactacccacctccttctgtctcagaactaagtcatttaagctcataaacgtcttcaagtttcacttactaaagacagcaaatgaagccggcttttgaccaagttccccaggaaataaatagtacatagacctccaacccagcaacccgctggatcaaggaatctttaacctttcgagcatgaaccacagtcacaagcgtatcctgaaaaaacgctattcttctaagactgaagacagggaacggccacctgggcgatggaatttcatgtgatgcaggcacattccctgaagaggagaaacagagtcaca

SEQ ID NO: 4710 - DNA, 663 bp, Rattus norvegicus
  ref <308>: DATABASE ACCESSION NUMBER: EMBL / AA800719
  ref <309>: DATABASE ENTRY DATE: 2000-03-03
gaaaagcagccttttaatatctaattgaatccagtgagtgggaaagactcaaaacatatgtccccttgagaatacctttacaagaacaacaggccagaggcgtctcttccatgggaaactgacatcccctgtgtgctcacaaaagtgaggtctcaactcatatgcatgccacatagtttccaccccatcccaccctgcccaccctccacaggtgacagattcacacaccgaagggactggtttcttaaaccgtggaacagaatgtttaaaagaagataaatctagccaagtggccagataccagaaataactcaggggcagttttacatacacaataaaagtcaactcatataaaaagggaagttttgctaattggaatcagaggcaaaaattacaaatggcagagaatccagctacccatatgagattatttaagaaaaacaaaaaaccaaaccaaaccaaaaaaaaaaaaaaaaacacccccaaaccccaaaagtccctactggagactcccttcattacaaaagtatgcaaacatctcaatataaacgaagcccaggcccacggctcgctctctctggacaggagagcatagctaaaattccccgtgtggaattcatgcctggaccaatgccccaccctttgggaaagaaagggaaggat

SEQ ID NO: 4711 - DNA, 1554 bp, Homo sapiens
  ref <308>: DATABASE ACCESSION NUMBER: EMBL / AL133060
  ref <309>: DATABASE ENTRY DATE: 2000-02-18
gccaggcttcgacaatctcgcagcccccactaggtggacacattaatgatttggtttctcccctgggcagccaacctgccccagaggcaccagacctgggctttcagctttgggaccaggctgcccaaaggtactcctttatacacccggcaccttccacgaaagatggtacttcccaagcaagcccctatgatttgtcactatagatggaaccctgacttctgccccatcccttcctgcccaacctagaacccaggcctcaagtctttaccccacccctttcttgttcttccaagaagcagatgcccagttgctcagcagcagcggtagagacttgaatctgcccaccagtcacaaggcgggtcacagattcctcttcctctcttctcctcgttcctctgaaccctccaccaatgtgcctcagcctgtgtgctgtgtggcaacagcattctggttcccactgccaagatctcccaccactctgctgggatctgcagtggcagggagtgggggttgtgtaaaggggaagtcatcttttgagatccagatagacatggtttgtgcacttacgtccagatgggaagcatccttcctgcaaccctaaaataatcatgcagcctctcagacggacgccatcggtcccaaggccttaggtggaggaagcaaagcaggccaggcctgtcctgtccgtggacctctaccttctggactccctacgggtgcagagcacttgggtttctctacagccatcgtggcccacttgacactgtgctcctccatcagctggtcacatgccaacacgttcccagcccctgaggcagctccagggtgccccacctgctcctgaggtgggtccctaccctgctgctcctcttcatcctttcccttttgtcctgaaagggaggagcaatggtccaggcattaattccacccagggaattttagctatgccctcatgtcccagggagagagccacacgcctgttttccatttatagcaagattgtttgcatacttttgtaatgaaggggagtgtccagtggaaggatttttaaaattatcttatggatagctcaagtctctgccatttgtaatttttggctctaagctccgattggagacgcttctccttgtgcatgtgagttgactgatgttgtgagtgtaaatgcatttggttatttctggtatcggtggccacttggatggatttttttacattctgttccccagttacaggaaggagtccctttggtgtgtgaatatgtgtgcctgtagagggtggggcagggtggggtggggatggaaatgtgtggcatgcacatgagttgaaattcttttatgcatttttttgaagaaaaaaaaaaaaacaactctgaggacataggggatgtcagtttcctatggaagagacacctctgacccgttattcttataatcaaaatctgaagggaaaaaaatgttttagttctttccccactcgttgggttcaactagattaaaaggctgattttcagaaaaaaaaaaaaaaaaaaaaaaaaaaaaaaaggggcggccg

SEQ ID NO: 4712 - DNA, 663 bp, Rattus norvegicus; identical to SEQ ID NO: 4710
  ref <308>: DATABASE ACCESSION NUMBER: EMBL / AA800719
  ref <309>: DATABASE ENTRY DATE: 2000-03-03

SEQ ID NO: 4713 - DNA, 1554 bp, Homo sapiens; identical to SEQ ID NO: 4711
  ref <308>: DATABASE ACCESSION NUMBER: EMBL / AL133060
  ref <309>: DATABASE ENTRY DATE: 2000-02-18

SEQ ID NO: 4714 - DNA, 552 bp, Rattus norvegicus
  ref <308>: DATABASE ACCESSION NUMBER: EMBL / AA800735
  ref <309>: DATABASE ENTRY DATE: 2000-03-03
caatgtaaactgatcaatgagttgtgattactctgaaattttatttttgggatcctgtgtcacaaaatgacgtgtgtaatgtttacaatgggtatgagaaattgagatgtttttatctctactgagaataaaactgtagataaggttccaagccggcatcaaaagagcagagcaaacttttctgtatataaactgtacataaaacaaggcactatacacttccgggggggacattaaggtagaaaggttgattcagatagattcttcagagtcacaccgggaagtagtacaaagtctttgctcgctttagcaccggaagcagaactcggcacaagccagacctaaggctgaggaggcagtcctgagcctgggagagactggtggcaggcctaggtcaacagaagtgacacagccctacacttggtaatgtccttttgacaccaaagggaacagttgcaagtgaatgaatacatagcttgttaaatacatagttgctttatatggtgtttatataaatatatatatatatttagaattcacaaactatcaaaa

SEQ ID NO: 4715 - DNA, 6719 bp, Homo sapiens
  ref <308>: DATABASE ACCESSION NUMBER: EMBL / AF051850
  ref <309>: DATABASE ENTRY DATE: 1999-02-12
tcggcgggaagcggcgatcctgccaccgggaggtgtggaagagccgggtagattctggctacattggagattggttgctttctaaaactgaaggagaagcccatgaagagatggtggattctcactgagttttgactagcggaagaaaagagagagttcaagtggatggccttgaggacttgaaaagctgagatatgatgattttgaagtcatttcacatcgaagccatgatttaaatatcggcgttaagatttcaacaagaaaaacttaagcttccttggattcccacgtcaaaggaaagtttcaagctttcagaaggagttctcactcgaagataaagaacagctcgctaaccacgaaagaggaatcgatgctcagcttttagttgcacttcctaaagttgcagaattaagacaaatctttgaaccaaagaagaaagaattcttagaaatgaaaagaaaagaaagaattgccaggcgcctggaagggattgaaaatgacactcagcccatcctcttgcagagctgcacaggattggtgactcaccgcctgctggaggaagacacccctcgatacatgagagccagcgaccctgccagcccccacatcggccgatcaaatgaagaggaggaaacttctgattcttctctagaaaagcaaactcgatccaaatactgcacagaaacctccggtgtccacggtgactcaccctatggttcgggtaccatggacacccacagtctggagtccaaagccgaaagaattgcaaggtacaaagcagaaagaaggcgacagctggcagagaagtatgggctgactctggatcccgaggccgactccgagtatttatcccgctataccaagtccaggaaggagcctgatgctgtcgagaagcggggaggaaaaagtgacaaacaggaagagtcaagcagagatgcgagttctctgtaccccgggaccgagacgatggggctcaggacctgtgccggtgaatccaaggactatgccctccatgcgggtgacggctcttccgacccggaggtgctgctgaacatagaaaaccaaagacgaggtcaagagctgagtgccacccggcaggcccatgacctgtccccagcagccgagagttcctcgaccttctctttctctgggcgagactcctccttcactgaagtgccacggtcccccaagcacgcccacagctcctccctgcagcaggcagcctcccggagcccctcctttggtgacccacagctatcccctgaggcccgacccaggtgcacttcacattcagaaacgccaactgtcgatgatgaagaaaaggtggatgaacgagccaagctgagcgtcgccgccaagaggttgcttttcagggagatggaaaaatcttttgatgaacaaaatgttccaaagcgacgctcaagaaacacagctgtggagcagaggctacgccgtctgcaggacaggtccctcacccagcccatcaccactgaagaggtggtcatcgcagccacattgcaggcctctgctcaccaaaaggccttagccaaggaccagacaaatgagggcaaagagcttgctgagcaaggagaacctgattcctccactctaagcttggccgaaaagttggccttgtttaacaaattgtcccagccagtctcaaaagcgatttctacccggaacagaatagacacgagacagaggagaatgaacgctcgctatcaaactcagccagtcacactgggagaggtggagcaggtgcagagtggaaagctcattcctttctcacctgccgtgaacacatcagtgtctaccgtagcatccacggttgctccaatgtatgccggagatcttcgcacaaagccacctcttgaccacaatgcaagtgccactgactataagttttcttcttcaatagaaaattcggactctccagttagaagcattctgaaatcgcaagcttggcagcctttggtagagggtagcgagaacaagggaatgttgagagaatatggagagacagaaagcaagagagctttgacaggtcgagacagtgggatggagaagtatgggtcctttgaggaagcagaagcatcctaccccatcctgaacagagccagggaaggagacagccataaggaatctaaatatgctgttcccagaagaggaagcctggaacgggcgaaccctcccatcacccacctcggggatgaaccgaaggaattttccatggctaaaatgaatgcacaaggaaacttggacttgagggacaggctgccctttgaagagaaggtggaggtggagaatgttatgaaaaggaagttttcactaagagcggcagagttcggggagcccacttccgagcagacggggacagctgctgggaaaactattgctcaaaccacagcccccgtgtcctggaagccccaggattcttcggaacagccacaggagaagctctgcaagaatccatgtgcgatgtttgctgctggagagatcaaaacgccgacaggggagggccttcttgactcacccagcaaaaccatgtctattaaagaaagattggcactgttgaagaaaagcggggaggaagattggagaaacagactcagcaggaggcaggagggcggcaaggcgccggccagcagcctgcacacccaggaagcagggcggtccctcatcaagaagcgggtcacagaaagtcgagagagccaaatgacgattgaggagaggaagcagctcatcactgtgagagaggaggcctggaagacgagaggcagaggagcggccaacgactcgacccagttcactgtggctggcaggatggtgaagaaaggtttggcgtcacctactgccataaccccagtagcctcagccatttgcggtaaaacaagaggcaccacacccgtttccaaacccctggaagatatcgaagccagaccagatatgcagttagaatcggacctgaagttggacaggctggaaacctttctaagaaggctgaataacaaagttggcgggatgcacgaaacggtgctcactgtcaccggcaaatctgtgaaggaggtgatgaagccagatgatgatgaaacctttgccaaattttaccgcagcgtggattataatatgccaagaagtcctgtggagatggatgaggacttcgatgtcattttcgatccttatgcacccaaattgacgtcttccgtggccgagcacaagcgggcagttaggcccaagcgccgggttcaggcctccaaaaaccccctgaaaatgctggcggcaagagaagatctccttcaggaatacactgagcagagattaaacgttgccttcatggagtcaaagcggatgaaagtagaaaagatgtcttccaactccaacttctcagaagtcaccctggcgggtttagccagtaaagaaaacttcagcaacgtcagcctgcggagcgtcaacctgacggaacagaactctaacaacagcgccgtgccctacaagaggctgatgctgttgcagattaaaggaagaagacatgtgcagaccaggctggtggaacctcgagcttcggcgctcaacagtggggactgcttcctcctgctctctccccactgctgcttcctgtgggtaggagagtttgcaaacgtcatagaaaaggcgaaggcctcagaacttgcaactttaattcagacaaagagggaacttggttgtagagctacttatatccaaaccattgaagaaggaattaatacacacactcatgcagccaaagacttctggaagcttctgggtggccaaaccagttaccaatctgctggagacccaaaagaagatgaactctatgaagcagccataatagaaactaactgcatttaccgtctcatggatgacaaacttgttcctgatgacgactactgggggaaaattccgaagtgctcccttctgcaacccaaagaggtactggtgtttgattttggtagtgaagtttacgtatggcatgggaaagaagtcacattagcacaacgaaaaatagcatttcagctggcaaagcacttatggaatggaacctttgactatgagaactgtgacatcaatcccctggatcctggagaatgcaatccgcttatccccagaaaaggacaggggcggcccgactgggcgatatttgggagacttactgaacacaatgagacgattttgttcaaagagaagtttctggattggacggaactgaagagatcgaatgagaagaaccccggggaacttgcccagcacaaggaagaccccaggactgatgtcaaggcatacgatgtgacacggatggtgtccatgccccagacgacagcaggcaccatcctggacggagtgaacgtcggccgtggctatggcctggtggaaggacacgacaggaggcagtttgagatcaccagcgtttccgtggatgtctggcacatcctggaattcgactatagcaggctccccaaacaaagcatcgggcagttccatgagggggatgcctatgtggtcaagtggaagttcatggtgagcacggcagtgggaagtcgccagaagggagagcactcggtgagggcagccggcaaagagaagtgcgtctacttcttctggcaaggccggcactccaccgtgagtgagaagggcacgtcggcgctgatgacggtggagctggacgaggaaaggggggcccaggtccaggttctccagggaaaggagcccccctgtttcctgcagtgtttccagggggggatggtggtgcactcggggaggcgggaagaggaagaagaaaatgtgcaaagtgagtggcggctgtactgcgtgcgtggagaggtgcccgtggaagggaatttgctggaagtggcctgtcactgtagcagcctgaggtccagaacttccatggtggtgcttaacgtcaacaaggccctcatctacctgtggcacggatgcaaagcccaggcccacacgaaggaggtcggaaggaccgctgcgaacaagatcaaggaacaatgtcccctggaagcaggactgcatagtagcagcaaagtcacaatacacgagtgtgatgaaggctccgagccactcggattctgggatgccttaggaaggagagacaggaaagcctacgattgcatgcttcaagatcctggaagttttaacttcgcgccccgcctgttcatcctcagcagctcctctggggattttgcagccacagagtttgtgtaccctgcccgagccccctctgtggtcagttccatgcccttcctgcaggaagatctgtacagcgcgccccagccagcacttttccttgttgacaatcaccacgaggtgtacctctggcaaggctggtggcccatcgagaacaagatcactggttccgcccgcatccgctgggcctccgaccggaagagtgcgatggagactgtgctccagtactgcaaaggaaaaaatctcaagaaaccagcccccaagtcttaccttatccacgctggtctggagcccctgacattcaccaatatgtttcccagctgggagcacagagaggacatcgctgagatcacagagatggacacggaagtttccaatcagatcaccctcgtggaagacgtcttagccaagctctgtaaaaccatttacccgctggccgacctcctggccaggccactcccggagggggtcgatcctctgaagcttgagatctatctcaccgacgaagacttcgagtttgcactagacatgacgagggatgaatacaacgccctgcccgcctggaagcaggtgaacctgaagaaagcaaaaggcctgttctgagtggggagacgccagaggagcctcacggtcacgtccaacaacaccactgcaccagggaaatggatatatatttttggactggtgtttttcacaaagtatttttcaatcagagttttcagaacctgacattgttaaagatactgcttgtcccggagttgtgtattttgtaaatgttcaagggaactgtttggaaacttctttccaccattcaggaggttatcagaattaataaaagtatctgttatgtgcacttaagccgcagctgctatagatagcactgccttcttgttccagctaggcaatgcctttttttttttttttgaagcagttctctttataaagtgttattttgatagtttgtggattctaaaatatatatatatttatataaacaccatataagtcaaatatgtatttaacaaagcaatatgtattcattcactttcaagatttgttttggtgtcaaaataacatgaaaaggtagatggagttgcttctgttgaattagctctgccaccaatatgtatcttcatacacgtttggaaatgtttcctgcagcattaggtatgacttgttctgagtactgcttccggtgctaaaatgaacaaagaatttgtacttaatggcatggactctggagaatctatgcgaatcaacctttctaccttaatatctccccaaaaatgtatagtgccttgtttttatgtacagtttatatacagaaaagtttgctctgcatttttgatgatggtttggaacattatctacaattttactctcaaatagtcaaaataaaaacatctcaatttctaataccggttgtaaacaaacagtacacatgtcattttgtgatataggactcccaaataaaagtatcagaataaacacaacaattaactggt

SEQ ID NO: 4716 - protein, 1789 aa, Homo sapiens
  misc_feature (1)..(1789): Xaa=Unknown amino acid
MKRKERIARRLEGIENDTQPILLQSCTGLVTHRLLEEDTPRYMRASDPASPHIGRSNEEEETSDSSLEKQTRSKYCTETSGVHGDSPYGSGTMDTHSLESKAERIARYKAERRRQLAEKYGLTLDPEADSEYLSRYTKSRKEPDAVEKRGGKSDKQEESSRDASSLYPGTETMGLRTCAGESKDYALHAGDGSSDPEVLLNIENQRRGQELSATRQAHDLSPAAESSSTFSFSGRDSSFTEVPRSPKHAHSSSLQQAASRSPSFGDPQLSPEARPRCTSHSETPTVDDEEKVDERAKLSVAAKRLLFREMEKSFDEQNVPKRRSRNTAVEQRLRRLQDRSLTQPITTEEVVIAATLQASAHQKALAKDQTNEGKELAEQGEPDSSTLSLAEKLALFNKLSQPVSKAISTRNRIDTRQRRMNARYQTQPVTLGEVEQVQSGKLIPFSPAVNTSVSTVASTVAPMYAGDLRTKPPLDHNASATDYKFSSSIENSDSPVRSILKSQAWQPLVEGSENKGMLREYGETESKRALTGRDSGMEKYGSFEEAEASYPILNRAREGDSHKESKYAVPRRGSLERANPPITHLGDEPKEFSMAKMNAQGNLDLRDRLPFEEKVEVENVMKRKFSLRAAEFGEPTSEQTGTAAGKTIAQTTAPVSWKPQDSSEQPQEKLCKNPCAMFAAGEIKTPTGEGLLDSPSKTMSIKERLALLKKSGEEDWRNRLSRRQEGGKAPASSLHTQEAGRSLIKKRVTESRESQMTIEERKQLITVREEAWKTRGRGAANDSTQFTVAGRMVKKGLASPTAITPVASAICGKTRGTTPVSKPLEDIEARPDMQLESDLKLDRLETFLRRLNNKVGGMHETVLTVTGKSVKEVMKPDDDETFAKFYRSVDYNMPRSPVEMDEDFDVIFDPYAPKLTSSVAEHKRAVRPKRRVQASKNPLKMLAAREDLLQEYTEQRLNVAFMESKRMKVEKMSSNSNFSEVTLAGLASKENFSNVSLRSVNLTEQNSNNSAVPYKRLMLLQIKGRRHVQTRLVEPRASALNSGDCFLLLSPHCCFLWVGEFANVIEKAKASELATLIQTKRELGCRATYIQTIEEGINTHTHAAKDFWKLLGGQTSYQSAGDPKEDELYEAAIIETNCIYRLMDDKLVPDDDYWGKIPKCSLLQPKEVLVFDFGSEVYVWHGKEVTLAQRKIAFQLAKHLWNGTFDYENCDINPLDPGECNPLIPRKGQGRPDWAIFGRLTEHNETILFKEKFLDWTELKRSNEKNPGELAQHKEDPRTDVKAYDVTRMVSMPQTTAGTILDGVNVGRGYGLVEGHDRRQFEITSVSVDVWHILEFDYSRLPKQSIGQFHEGDAYVVKWKFMVSTAVGSRQKGEHSVRAAGKEKCVYFFWQGRHSTVSEKGTSALMTVELDEERGAQVQVLQGKEPPCFLQCFQGGMVVHSGRREEEEENVQSEWRLYCVRGEVPVEGNLLEVACHCSSLRSRTSMVVLNVNKALIYLWHGCKAQAHTKEVGRTAANKIKEQCPLEAGLHSSSKVTIHECDEGSEPLGFWDALGRRDRKAYDCMLQDPGSFNFAPRLFILSSSSGDFAATEFVYPARAPSVVSSMPFLQEDLYSAPQPALFLVDNHHEVYLWQGWWPIENKITGSARIRWASDRKSAMETVLQYCKGKNLKKPAPKSYLIHAGLEPLTFTNMFPSWEHREDIAEITEMDTEVSNQITLVEDVLAKLCKTIYPLADLLARPLPEGVDPLKLEIYLTDEDFEFALDMTRDEYNALPAWKQVNLKKAKGLFX

SEQ ID NO: 4717 - DNA, 552 bp, Rattus norvegicus; identical to SEQ ID NO: 4714
  ref <308>: DATABASE ACCESSION NUMBER: EMBL / AA800735
  ref <309>: DATABASE ENTRY DATE: 2000-03-03

SEQ ID NO: 4718 - DNA, 6719 bp, Homo sapiens; identical to SEQ ID NO: 4715
  ref <308>: DATABASE ACCESSION NUMBER: EMBL / AF051850
  ref <309>: DATABASE ENTRY DATE: 1999-02-12

SEQ ID NO: 4719 - protein, 1789 aa, Homo sapiens; identical to SEQ ID NO: 4716
  misc_feature (1)..(1789): Xaa=Unknown amino acid

SEQ ID NO: 4720 - DNA, 637 bp, Rattus norvegicus
  ref <308>: DATABASE ACCESSION NUMBER: EMBL / AA800749
  ref <309>: DATABASE ENTRY DATE: 2000-03-03
aagcaccaaaagtacacagcaatggttggtacataaaaagcacaattattgatataatttcttaccatcaagtttacaatctaaaataaaacacaagaatattgtcagcccacatcaaagtttccttattttggaattggctactttggcaaatgaatgaggcaaaatgtcctatttcaggcaaagtattaataaggctttgaatatgacacacaaaatattttttgtgtatccattttccatgttacattatggtaactaaggacaaaaagggcacttagaaatttcataagcacaatgaattacttcagattgttctcagaaactcagagatgttcaatgacaaatgccagcagccagtgaaagcctacaattaataggaactagataaagtctttgtcttggccccatttagacctccatctccttccttactaagggctctaatgttataccccacagtgaaaggcaccatctctagatgaattactacataattatgagatcaagcttactggaatattgtctaaagagaagtgagcaaagccagcagtggggactctggctaagtgatgtcacacaagcaaaggcagtcaggcaaggccacgcacatctaaagagattgggaaagcacagg

SEQ ID NO: 4721 - DNA, 475 bp, Rattus norvegicus
  ref <308>: DATABASE ACCESSION NUMBER: EMBL / AA800753
  ref <309>: DATABASE ENTRY DATE: 2000-03-03
agacaacagtatgtagtagttttgaatccactgagatgttgctttcaatttgaaatattgtgtatacatgtatataaaaaataatccaatgtatgactcatctgacagatgtttaagatcaataaagtttttgaacatgcatttaggaagagaggggagaagcccaccccgctaccctgttgttgctggcttatttctgcagtggtctcaatagtggtttttagagggaaccatgtgccttcagtcttcagagttacgataagataccataatcaagacgggaggggaaatggggaatgggcaggtattaatcttaaatacattttgcactctatctggtacaagataaaaacaggttaatggggataggtattaattaggaataaattgcagtcagatcaagacataattgccgaattgagtttttaatagactgcatatatagatgtttagccatactctagatcaactcttt

SEQ ID NO: 4722 - protein, 1039 aa, Rattus norvegicus
  ref <308>: DATABASE ACCESSION NUMBER: SWISS-Prot / CAC17143
  ref <309>: DATABASE ENTRY DATE: 2003-02-01
MDPNTIIEALRGTMDPALREAAERQLNEAHKSLNFVSTLLQITMSEQLDLPVRQAGVIYLKNMITQYWPDREATPGDIAPYTIPEEDRHCIRENIVEAIIHSPELIRVQLTTCIHHIIKHDYPSRWTAIVDKIGFYLQSDNSACWLGILLCLYQLVKNYEYKKPEERSPLVAAMQHFLPVLKDRFIQLLSDQSDQSVLIQKQIFKIFYALVQYTLPLELINQQNLTEWVEILKTVVNRDVPNETLQVEEDDRPELPWWKCKKWALHILARLFERYGSPGNVSKEYNEFAEVFLKAFAVGVQQVLLKVLYQYKEKQYMAPRVLQQTLNYINQGVSHALTWKNLKPHIQGIIQDVIFPLMCYTDADEELWQEDPYEYIRMKFDVFEDFISPTTAAQTLLFTACSKRKEVVLQKTMGFCYQILTEPNADPRKKDGALHMIGSLAEILLKKKIYKDQMEYMLQNHVFPLFSSELGYMRARACWVLHYFCEVKFKSDQNLQTALELTRRCLIDDREMPVKVEAAIALQVLISNQEKAKEYITPFIRPVMQALLHIIRETENDDLTNVIQKMICEYSEEVTPIAVEMTQHLAMTFNQVIQTGPDEEGSDDKAVTAMGILNTIDTLLSVVEDHKEITQQLEGICLQVIGTVLQQHVLEFYEEIFSLAHSLTCQQVSPQMWQLLPLVFEVFQQDGFDYFTDMMPLLHNYVTVDTDTLLSDTKYLEMIYSMCKKVLTGVAGEDAECHAAKLLEVIILQCKGRGIDQCIPLFVEAALERLTREVKTSELRTMCLQVAIAALYYNPHLLLNTLENLRFPNNVEPVTNHFITQWLNDVDCFLGLHDRKMCVLGLCALIDMEQIPQVLNQVSGQILPAFILLFNGLKRAYACHAEHENDSDDDEDAEDDDETEELGSDEDDIDEDGQEYLEILAKQAGEDGDDEDWEEDDAEETALEGYSTIIDDEDNPVDEYQIFKAIFQTIQNRNPVWYQALTHGLNEEQRKQLQDIATLADQRRAAHESKMIEKHGGYKFSAPVVPSSFNFGGPAPGMN

SEQ ID NO: 4723 - DNA, 2291 bp, Homo sapiens
  ref <308>: DATABASE ACCESSION NUMBER: EMBL / AK027892
  ref <309>: DATABASE ENTRY DATE: 2002-08-06
ataatccacacctactactcaatacctcagaaaatcttcgcttccctaataatgttgaaccagttacaaatcattttattacacagtggcttaatgatgttgactgtttcttggggcttcatgacagaaagatgtgtgttctcggactctgtgctcttattgatatggaacagataccccaagttttaaatcaggtttctggacagattttgccggcttttatccttttatttaacggattgaaaagagcatatgcctgccatgcagaacatgagaatgacagtgatgatgatgatgaagctgaagatgatgatgaaaccgaggaactggggagtgatgaagatgatattgatgaagatgggcaagaatatttggagattctggctaagcaggctggtgaagatggagatgatgaagattgggaagaagatgatgctgaagagactgctctggaaggctattccacaatcattgatgatgaagataaccctgttgatgagtatcagatatttaaagctatctttcaaactattcaaaatcgtaatcctgtgtggtatcaggcgctgactcacggtcttaatgaagaacaaagaaaacagttacaggacatagcaactctggctgatcaaagaagagcagcccatgaatccaaaatgattgagaagcatggaggatacaaattcagtgctccagttgtgccaagttctttcaattttggaggcccagcaccagggatgaattgagttatctctttctttcctgctgtgtgcttgtagtgaagagcttgtgttcctcctagtagtggttccagaactggttcatgttatctattctaaactaataatcaatagatggacaaaagaaacaacaaccccaggagatgggacctgatcatgcaacctggcactggaaaagaaatcagcgggattttgggggtgggggggatgggaggtaccttagagggagtattttctttattttttgaagaaagtaagatcctgactctgaagcttcaaagtgacactgtggaaatctgaaacgaggggatgtcatgaaggcagcttttctttttctgaggaaaaaataggcatgggctacaggactatttaaaatgtctcatttacagtataaaactcaaaggtagatgtaatttttacacctatgagtatttgtccaatttctgtctcttcctcaccattgggtatctattctttatatgtaaataagataaggtcatctgatagccttattcagtcttcatcattttcatcattgttcctatgtagattattggacatttattgtagcactacataactgattataaaaatctgtaaatgaattagcactttcatattgaaacaagcctgctagcctatgtataaaatagcaaaatgtttgctgtttataaaaagatgtaatggggtggggggcaggggtaatttcaagttattaatttaaaaatgaactagcaattttgtacctggtgactttgtggtgcactcacctctgatagtgacttgaattcggtatgtaaaaaggggttagtggtatttcattgctgctaaaaatgacaactccctctgtgtcctgtttttcttaaagctgtcagtgtacaagtgggtatttgaataccagaccttactgtaaaaaataaaaaaggtggtatctagagcatgtaaattggatataaagttctgctcttaaagagttgatctaagagtatggctaaacatctatatatgcaatctattaaaagaacttaattcggctattatgtcttgatttgattgcagttttttcctaattataacaaatttttcctcattggcctgtttttaatcctgtgcctagaaggagtacaaaatgcacactttacaaaattgatatttaacacttacccactcccctttccccatctcttctaccgctcttgttgatcgtggtatctgatcttgactagataggctgaaggcacatggttccctccaaaaaccactattgataccactacaaaaacaagccagcaaaaagatactgtagagaggttggcttgcttccctctcttcctaactgcatgttgaaaaataagccgttattgatcttaaacatcggtcagatgagtcatacattgggttattttttatatacatgtatacacaaaatatttcaaattgaaagcaacatcttaatggattcaaaactattacaagctgttgtctaaaacaggtgagaaaaaaatttataactgtaaaaacaaatgcacatattgatatttaaaatgcgtaatt

SEQ ID NO: 4724 - protein, 1010 aa, Homo sapiens
  ref <308>: DATABASE ACCESSION NUMBER: SWISS-Prot / CAC17609
  ref <309>: DATABASE ENTRY DATE: 2003-02-01
AHKSLNFVSTLLQITMSEQLDLPVRQAGVIYLKNMITQYWPDRETAPGDISPYTIPEEDRHCIRENIVEAIIHSPELIRVQLTTCIHHIIKHDYPSRWTAIVDKIGFYLQSDNSACWLGILLCLYQLVKNYEYKKPEERSPLVAAMQHFLPVLKDRFIQLLSDQSDQSVLIQKQIFKIFYALVQYTLPLELINQQNLTEWIEILKTVVNRDVPNETLQVEEDDRPELPWWKCKKWALHILARLFERYGSPGNVSKEYNEFAEVFLKAFAVGVQQVLLKVLYQYKEKQYMAPRVLQQTLNYINQGVSHALTWKNLKPHIQGIIQDVIFPLMCYTDADEELWQEDPYEYIRMKFDVFEDFISPTTAAQTLLFTACSKRKEVLQKTMGFCYQILTEPNADPRKKDGALHMIGSLAEILLKKKIYKDQMEYMLQNHVFPLFSSELGYMRARACWVLHYFCEVKFKSDQNLQTALELTRRCLIDDREMPVKVEAAIALQVLISNQEKAKEYITPFIRPVMQALLHIIRETENDDLTNVIQKMICEYSEEVTPIAVEMTQHLAMTFNQVIQTGPDEEGSDDKAVTAMGILNTIDTLLSVVEDHKEITQQLEGICLQVIGTVLQQHVLEFYEEIFSLAHSLTCQQVSPQMWQLLPLVFEVFQQDGFDYFTDMMPLLHNYVTVDTDTLLSDTKYLEMIYSMCKKVLTGVAGEDAECHAAKLLEVIILQCKGRGIDQCIPLFVEAALERLTREVKTSELRTMCLQVAIAALYYNPHLLLNTLENLRFPNNVEPVTNHFITQWLNDVDCFLGLHDRKMCVLGLCALIDMEQIPQVLNQVSGQILPAFILLFNGLKRAYACHAEHENDSDDDDEAEDDDETEELGSDEDDIDEDGQEYLEILAKQAGEDGDDEDWEEDDAEETALEGYSTIIDDEDNPVDEYQIFKAIFQTIQNRNPVWYQALTHGLNEEQRKQLQDIATLADQRRAAHESKMIEKHGGYKFSAPVVPSSFNFGGPAPGMN

SEQ ID NO: 4725 - DNA, 475 bp, Rattus norvegicus; identical to SEQ ID NO: 4721
  ref <308>: DATABASE ACCESSION NUMBER: EMBL / AA800753
  ref <309>: DATABASE ENTRY DATE: 2000-03-03

SEQ ID NO: 4726 - protein, 1039 aa, Rattus norvegicus; identical to SEQ ID NO: 4722
  ref <308>: DATABASE ACCESSION NUMBER: SWISS-Prot / CAC17143
  ref <309>: DATABASE ENTRY DATE: 2003-02-01

SEQ ID NO: 4727 - DNA, 2291 bp, Homo sapiens; identical to SEQ ID NO: 4723
  ref <308>: DATABASE ACCESSION NUMBER: EMBL / AK027892
  ref <309>: DATABASE ENTRY DATE: 2002-08-06

SEQ ID NO: 4728 - protein, 1010 aa, Homo sapiens; identical to SEQ ID NO: 4724
  ref <308>: DATABASE ACCESSION NUMBER: SWISS-Prot / CAC17609
  ref <309>: DATABASE ENTRY DATE: 2003-02-01

SEQ ID NO: 4729 - DNA, 727 bp, Rattus norvegicus
  ref <308>: DATABASE ACCESSION NUMBER: EMBL / AA800768
  ref <309>: DATABASE ENTRY DATE: 2000-03-03
aggaatgagctattttaatcaagcaaaacaaatttatattcattatttctaaaaataaaattagacctttccaacccttaacatctgcatttaatcatatttcctaaccaaaatacagatgctaaaaacagcaagttacaatatatctttacagcatacagtatgttcactgtttacactttaattctacttggtcattatgtacttgatgcatacttaaacaccactcataacatttacacaatcaacaaaaaaatgtaaccagttgtcttaaaatggctctgctataaattgtatagaatatacagaattacaaagtcaagtattttatcaaaatatacaccccctccctgaaactaacacaagctatcaacattttaaatgaataatacaattatagaaaatatttgcaaaattatttgtatgtataaatattctgccatatttactttggtctagaattatcagcatacaagtccacttaaaaaatatccacatattgatgggagacatcaatacatataactttatttgtagttaaatcaaaacaacttaaatccataattgttttataatcataactgagataaaacaaattagtggatcacaggattgcttgtcatctggttattaattcaaaagtgattttcataagccctttgtgaccacttcaataaaactcaaatggtgtgggtgcacatatatacaatggacaaaacaaagttca

SEQ ID NO: 4730 - DNA, 474 bp, Homo sapiens
  ref <308>: DATABASE ACCESSION NUMBER: EMBL / AW573102
  ref <309>: DATABASE ENTRY DATE: 2000-03-15
tatcaaaatatacacccctccctgaaactaacacaagctatcaacattttaaatgaatacaattatagaaaatatttgcaaaattattttttcatgtataaatattctgccatatttactttggtctagaattatcagcatacaagtccacttaaaaaatatccacatataagggctgggagagagacatcactacaggtaattttatatttggggttaactcaaatcaaaatgactagaatatacagtaaatgtctttgattaatattattaactgataaaacaaattagtggatcataggattgcttattcaatattctaattatcaattcaaaaatgattttcgtaagccctttgtgactatctctttaataaaacccaaatgaatagtgtagggtgtacatatatacaatgtataaaataaagttgaatttgcttgcattttcccatttttctctacttatataatactg

SEQ ID NO: 4731 - DNA, 600 bp, Rattus norvegicus
  ref <308>: DATABASE ACCESSION NUMBER: EMBL / AA800772
  ref <309>: DATABASE ENTRY DATE: 2000-03-03
aacctgtggctattaaaaataaaggcattttacattgatatttattgtggcattgtttacaaacaagttatgtaatcagtgtagacatccaccaagtggataaacaaaatgtatatattcacaaaccagttttattcagtcataaaaagtgaaattacttcatttgcagtcaaaggatggaactgaagaagatcttgttaatccactataggatcaggtagatactgcatggggatccaaattgaaacaaaacaaacaaacaaaaaacatcaaagtagaaggcaaattacttgagaacgggcattgggtgatttcctctctgaaagtgtgtctgctgtctttgaggatatgtgaagccttaattcaggtttgtttattggtaatgcagtagataggggagcccaggcctctcagcacaccagggggaaagctggggcctttttggttattttcactttcagctgaacctttgttacttcttgataacaaaatattcctatgtggcctaccaacaggcaatggatgctacaacacaacctggcttaagacttgtctccttttttaaaaggataatgaaaacaaagacaggatgttaatcac

SEQ ID NO: 4732 - DNA, 577 bp, Rattus norvegicus
  ref <308>: DATABASE ACCESSION NUMBER: EMBL / AA800782
  ref <309>: DATABASE ENTRY DATE: 2000-03-03
cgttttacgaccttatttttaattaaagacgattgttacaacatatttttaaaaaccacgttttaaatttaattacaaaggagatgaaggcccaagtactgagagacatgtttgcattttagctgattttttaaaaagagtgatcacaatttacaggcctggagtttttgtttgtacttgaagatctggagggcactacacttctaaaattcacttctgattttacgtagttaaactttcaggacagtaggctcaaaattcacctcaaaattagtagtaaagggactgagaaacaattgtcctgataatccagtcttagatttatttatttatttaacctacaaggctttaatctacatagaaggtgtgatgccaagtcacactcagagttcattacaatccagaaaggagggaggatgggtattcattttctcaagctgaaaacccgagatttcgaaccattcaacatgactcaggttcttacgcacagttcatttaaaaatgtggtgatatacattgtatcccacttcctaggagaaattcgcacctctttagtcttctcattcccgctattcag

SEQ ID NO: 4733 - DNA, 520 bp, Rattus norvegicus
  ref <308>: DATABASE ACCESSION NUMBER: EMBL / AA800787
  ref <309>: DATABASE ENTRY DATE: 2000-03-03
ttagaagcaatgttgggcaaacagacaggcaaatatctgagaagagatatcgtacatcaactagcactttaaacagttgaagagaaaacatggaaagtacttacatggaccagtttcttatacaaatactaaagtgtggaaaacatcccaaaccaaatagagtattaccgtcgagaagcaaaaccagtaaaacaaaacaaaaatacaaaaaaaaaaaatacaaagatagtgtgtattgtctataggaaataatagtgtaaatagcagacataaactggcccatgtaaaatacaaaaatatttattgaaatcagatctttctataaaacagtgctttggaggtatcttaatatgaatccaatatatgatctaaatgtaaattcgtttagaaacattaacagcattaagccagtgccacccacttgttccaattagtccttttttaaaagctgttttgttgattcatgacaaatacataagacctatgttcttaaaagcacaatccattcttttagaattaa

SEQ ID NO: 4734 - DNA, 4006 bp, Homo sapiens
  ref <308>: DATABASE ACCESSION NUMBER: Refseq / NM_013995
  ref <309>: DATABASE ENTRY DATE: 2002-11-05
ccgattcctggcttttgcaaggctgtggtcggtggtcatcagtgctcttgacccaggtccagcgagccttttccctggtgttgcagctgttgttgtaccgccgccgtcgccgccgtcgccgcctgctctgcggggtcatggtgtgcttccgcctcttcccggttccgggctcagggctcgttctggtctgcctagtcctgggagctgtgcggtcttatgcattggaacttaatttgacagattcagaaaatgccacttgcctttatgcaaaatggcagatgaatttcacagtacgctatgaaactacaaataaaacttataaaactgtaaccatttcagaccatggcactgtgacatataatggaagcatttgtggggatgatcagaatggtcccaaaatagcagtgcagttcggacctggcttttcctggattgcgaattttaccaaggcagcatctacttattcaattgacagcgtctcattttcctacaacactggtgataacacaacatttcctgatgctgaagataaaggaattcttactgttgatgaacttttggccatcagaattccattgaatgacctttttagatgcaatagtttatcaactttggaaaagaatgatgttgtccaacactactgggatgttcttgtacaagcttttgtccaaaatggcacagtgagcacaaatgagttcctgtgtgataaagacaaaacttcaacagtggcacccaccatacacaccactgtgccatctcctactacaacacctactccaaaggaaaaaccagaagctggaacctattcagttaataatggcaatgatacttgtctgctggctaccatggggctgcagctgaacatcactcaggataaggttgcttcagttattaacatcaaccccaatacaactcactccacaggcagctgccgttctcacactgctctacttagactcaatagcagcaccattaagtatctagactttgtctttgctgtgaaaaatgaaaaccgattttatctgaaggaagtgaacatcagcatgtatttggttaatggctccgttttcagcattgcaaataacaatctcagctactgggatgcccccctgggaagttcttatatgtgcaacaaagagcagactgtttcagtgtctggagcatttcagataaatacctttgatctaagggttcagcctttcaatgtgacacaaggaaagtattctacagcccaagagtgttcgctggatgatgacaccattctaatcccaattatagttggtgctggtctttcaggcttgattatcgttatagtgattgcttacgtaattggcagaagaaaaagttatgctggatatcagactctgtaacactaatcaatacgtgatctctgttacaaaagaaaaaagcaagtacaagttccaacatgcaatactggtcaacttaaggtatatttagttgcagtccagctctttagaatgggtggtatgggggatttcaaacttaaacaaaaaactatcaactacaaattagttgcctgactttggtttttccaaccaaggaatttaaaactgttatttttacagcaaaagatgtgcaaaatcactggattataagttctattttactgtcttgaattagtatttcagtgttttcattttagacattcagactaaaaatacaccgtttagaaaaaacaatttttgaaaaagagattttttttccctgcaggtagttgagttgaacaacatgttctaccgtggatttgtacttgctccttttgctctttttgtgtgtgtgtgtgtgtgtgtgtgtgtgtgtgtgatttttgtttgcaggttaacttagctactttggcattgctgcatatttgacctttgagagatataatagtagatttgaacaggggctggtattattatgttcttagcaataaatgcttttctaatgccttttgaatacatttgtatttatgtggctgtaatgacaaaagatacaaaagctttttaaaatttagagtaggtattaatcttattgtttaatcttttttttaaaaaaactggatatttcaatcttttaaattgcaatatataagactattccaactgggcatttcaatccattttttaggtgctttagagataattgcttgccagtgccaattgagggcattagtactttgtgctcataaattggcctctgtatgcagtactaaaattaatgcagatttctctttagccttccaacatttcttgttgatagtgatgtattttattattttctttttcttaagaaatgccagtgtgtcctagaacctagataacgaagtgcacttacacttataaaataacttgcatctaggctgggcgtggcggctcacgcctgtaatcccagcactttgggaggccgaagtgggtggatcacttgaggccaggagtttgagaccagcctggccaacatggtgaaaccccatctctatcagaaatacaaaaaattagctgggcatggtggtgggcgcctgtaatcccagttactcgggaggctgaggcaggagaatcacttgaacccgggaggcagaggttgcggtgagccaagagcgcaccattgcactccagccttgggcgacaaaaacgaaactccatcttcaaaacaaaacaaaacaaaacaaacaaacaaacaaaacttgcatcttaaccaaaagtcttggttttatcttaatccattaaaagttggtcttgtttccagcttgcattgattgctacaacatcactaatttggctttcacatttaaatggttctgtgctaatcaaaactttcgttgttattattcgttatggtagaatcatttttaattcacgtgctttgtgttcagttttgtggtctgagagatgtaccaattgtcaaattaccgtgtaccacctaatgtttataggagaaagcaaaatacatcagcttggtagttaacacatcaaatatttcttgctgcttctaggagaacttttttggtgtgtgttggaatggctgagcaaatattaaaattgttaatatgcagccatatatggaaggttcctgtggggttgttttttcgtgttttttttttttgtggtgggattatgtgcctcccattcactagaaaatgagaaaattgtctgggttccaaaatattgacattgaatggatcaatacacacacacagacatatatatatatatatgcacacatatataggcagttgcatgcctagcatgggtattttataaccatataactgagttatattggaattataaatattttccgtcacttaaatttgttctttgtttagcctgaaaacctttatggctcaagatcagattcctgactaacccctctcttagagctacagcgagctgcattaccagcttaaaacacttcttagggattaaatatagatgtaatttttcaaaatcgtttttaatttaaactgtgttttagtgtaaaattgttaaccttgtaagatggataatgtgtataagaatgtaggccttaactatttcacatgagtcaaaacaaagcagctttaaaaaaataattggaagcacaatgcatggcactgactgaatgctgttaatatttctaaaagtttctacattcagattatatgcctgattcatagtaaaatacctctaataaacactgttttatagaaaacctgacttcagtgaatatttttgtattttacatgggccagtttatatactgctatttacactattatttcctatagctacatgttctttgtaccttttgtagttttatttgtattactagattcataccttgatggtaacgctctatctggttttgggtgtttttcatgttttagcatttgtataaagaaactggtccatgtaaatactttccatgttttttcttcaaatgtttaaaccactagttgatgtatggtatctttagatatttgcctgtctgtttgctcaaaattgcttctaaaacaataaagattctt

SEQ ID NO: 4735 - protein, 410 aa, Homo sapiens
  ref <308>: DATABASE ACCESSION NUMBER: SWISS-Prot / P13473
  ref <309>: DATABASE ENTRY DATE: 2002-06-15
MVCFRLFPVPGSGLVLVCLVLGAVRSYALELNLTDSENATCLYAKWQMNFTVRYETTNKTYKTVTISDHGTVTYNGSICGDDQNGPKIAVQFGPGFSWIANFTKAASTYSIDSVSFSYNTGDNTTFPDAEDKGILTVDELLAIRIPLNDLFRCNSLSTLEKNDVVQHYWDVLVQAFVQNGTVSTNEFLCDKDKTSTVAPTIHTTVPSPTTTPTPKEKPEAGTYSVNNGNDTCLLATMGLQLNITQDKVASVININPNTTHSTGSCRSHTALLRLNSSTIKYLDFVFAVKNENRFYLKEVNISMYLVNGSVFSIANNNLSYWDAPLGSSYMCNKEQTVSVSGAFQINTFDLRVQPFNVTQGKYSTAQDCSADDDNFLVPIAVGAALAGVLILVLLAYFIGLKHHHAGYEQF

SEQ ID NO: 4736 - DNA, 644 bp, Rattus norvegicus
  ref <308>: DATABASE ACCESSION NUMBER: EMBL / AA800794
  ref <309>: DATABASE ENTRY DATE: 2000-03-03
gaagaaagttactagttttattagtttaatgcttcatagaacagaaagaaatctcaaagtcaaacaatatgcactcacttgaagaaaatacagagttagctacctaatggtttgttcttccgtaatgaaaatggatacgtcgaccttcccccgcattgttggtcgaagcccacataatccaattcttccaaaaactcttagcataggtcaatggaaggagtatgaaacattctgagccctaaaaaatatccaggtttgctggatatgttagcaaggcttacctgttcctatctgccttggctatggcataattctaacctagaaactcctttaaaaggcaagtgatttctagactcaagtgttcaacactatccaactagggtcagtcaaaccatcctctcgcacatctgcaagagaagacaatctatgttggcagaaattcccagtcaagaggtcctgcttcccaaagggactttgtgtcaccttagtgacacttaatgatacagtctcacactggtaaaggtgatcaaaggagacaccatgctacagagatataatatcactgacgggttgagcagatcccactggagcatgcacacagaatgcagccagagttaaagccacagatgaagcacactgtaaca

SEQ ID NO: 4737 - DNA, 2424 bp, Homo sapiens
  ref <308>: DATABASE ACCESSION NUMBER: EMBL / U18543
  ref <309>: DATABASE ENTRY DATE: 1999-07-02
gtgggctcgtcggagccgcgggcggtcagcaggaatttgaccctctagggcatgaatactgtgctgttcagttctgagctgtgctagcaatacccttcaaaggaagagcaatggctgcagcagcagcttctcacctgaacctggatgccctccgggaagtgctagaatgccccatctgcatggagtccatcacagaagagcagctgcgtcccaagcttctgcactgtggccataccatctgccgccagtgcctggagaagctattggccagtagcatcaatggtgtccgctgtcccttttgcagcaagattacccgcataaccagcttgacccagctgacagacaatctgacagtgctaaagatcattgatacagctgggctcagcgaggctgtggggctgctcatgtgtcggtcctgtgggcggcgtctgccccggcaattctgccggagctgtggtttggtgttatgtgagccctgccgggaggcagaccatcagcctcctggccactgtacactccctgtcaaagaagcagctgaggagcggcgtcgggactttggagagaagttaactcgtctgcgggaacttatgggggagctgcagcggcggaaggcagccttggaaggtgtctccaaggaccttcaggcaaggtataaagcagttctccaggagtatgggcatgaggagcgcagggtccaggatgagctggctcgctctcggaagttcttcacaggctctttggctgaagttgagaagtccaatagtcaagtggtagaggagcagagttacctgcttaacattgcagaggtgcaggctgtgtctcgctgtgactacttcctggccaagatcaagcaggcagatgtagcactactggaggagacagctgatgaggaggagccagagctcactgccagcttgcctcgggagctcaccctgcaagatgtggagctccttaaggtaggtcatgttggccccctccaaattggacaagctgttaagaagccccggacagttaacgtggaagattcctgggccatggaggccacagcgtctgctgcctctacctctgttacttttagagagatggacatgagcccggaggaagtggttgccagccctagggcctcacctgctaaacagcggggtcctgaggcagcctccaatatccagcagtgcctctttctcaagaagatgggggccaaaggcagcactccaggaatgttcaatcttccagtcagtctctacgtgaccagtcaaggtgaagtactagtcgctgaccgtggtaactatcgtatacaagtctttacccgcaaaggctttttgaaggaaatccgccgcagccccagtggcattgatagctttgtgctaagcttccttggggcagatctacccaacctcactcctctctcagtggcaatgaactgccaggggctgattggtgtgactgacagctatgataactccctcaaggtatataccttggatggccactgcgtggcctgtcacaggagccagctgagcaaaccatggggtatcacagccttgccatctggccagtttgtagtaaccgatgtggaaggtggaaagctttggtgtttcacagttgatcgaggatcaggggtggtcaaatacagctgcctatgtagtgctgtgcggcccaaatttgtcacctgtgatgctgagggcaccgtctacttcacccagggcttaggcctcaatctggagaatcggcagaatgagcaccacctggagggtggcttttccattggctctgtaggccctgatgggcagctgggtcgccagattagccacttcttctcggagaatgaggatttccgctgcattgctggcatgtgtgtggatgctcgtggtgatctcatcgtggctgacagtagtcgcaaggaaattctccattttcctaagggcgggggctatagtgtccttattcgagagggacttacctgtccggtgggcatagccctaactcctaaggggcagctgctggtcttggactgttgggatcattgcatcaagatctacagctaccatctgagaagatattccaccccataggggatgagaaattatcagtttcttctgctcccaagccaacttcccttcccttagttcttggttgttagtggcacatgcagaatagactcagcctatgtcctgattccagctgggtagttctagaactttagaagctccatcttttaatgtttttatttgttatgtccccctcccggcttcccacctaaatttagagctttaaaagatgcactgcccaaataggacacacgatggtgttagctgaagtttgattagcaattaggcacttccaaggctttagtagagagagccactttagccctttgtgccatgtttgaaatttgcccttgtattaaatccttgattttttccc

SEQ ID NO: 4738 - protein, 653 aa, Homo sapiens
  ref <308>: DATABASE ACCESSION NUMBER: SWISS-Prot / Q13049
  ref <309>: DATABASE ENTRY DATE: 2002-06-15
MAAAAASHLNLDALREVLECPICMESFTEEQLRPKLLHCGHTICRQCLEKLLASSINGVRCPFCSKITRITSLTQLTDNLTVLKIIDTAGLSEAVGLLMCRSCGRRLPRQFCRSCGLVLCEPCREADHQPPGHCTLPVKEAAEERRRDFGEKLTRLRELMGELQRRKAALEGVSKDLQARYKAVLQEYGHEERRVQDELARSRKFFTGSLAEVEKSNSQVVEEQSYLLNIAEVQAVSRCDYFLAKIKQADVALLEETADEEEPELTASLPRELTLQDVELLKVGHVGPLQIGQAVKKPRTVNVEDSWAMEATASAASTSVTFREMDMSPEEVVASPRASPAKQRGPEAASNIQQCLFLKKMGAKGSTPGMFNLPVSLYVTSQGEVLVADRGNYRIQVFTRKGFLKEIRRSPSGIDSFVLSFLGADLPNLTPLSVAMNCQGLIGVTDSYDNSLKVYTLDGHCVACHRSQLSKPWGITALPSGQFVVTDVEGGKLWCFTVDRGSGVVKYSCLCSAVRPKFVTCDAEGTVYFTQGLGLNLENRQNEHHLEGGFSIGSVGPDGQLGRQISHFFSENEDFRCIAGMCVDARGDLIVADSSRKEILHFPKGGGYSVLIREGLTCPVGIALTPKGQLLVLDCWDHCIKIYSYHLRRYSTP

SEQ ID NO: 4739 - DNA, 541 bp, Rattus norvegicus
  ref <308>: DATABASE ACCESSION NUMBER: EMBL / AA800803
  ref <309>: DATABASE ENTRY DATE: 2000-03-03
gacattttagactgacttcgtttattgagcaccagtggagagcaggctgtagtacactagagcagagatgaaccggccctcccatctaggggcgtacagtcggggagaacccaacagcttacagattcctctaccgggggttaggatgagacaggaaggtgatctttacagcacctaactcagtcacctggggcagctggggcctgacctggggcagctgggggtaaggtactgcagggcaggggacatctaggggaaggcacagaggtaagatagcatggggcccggggaatgccaagagctcagggctcagaggcagagtgggggaggtagtggctaagatgtgaggaaaagctccattagaagctgggtttctccaaagggctctgcctcggcctagccacagcatgcccaaagaggagagtctctgcacccaggagatagctgtttgaaggagaaggcctttagtctggaaggatttgctgtggtccactagtatgtttgtggccgtgctggggcagatgctctgagaaggttcaag

SEQ ID NO: 4740 - DNA, 859 bp, Homo sapiens
  ref <308>: DATABASE ACCESSION NUMBER: EMBL / AK026608
  ref <309>: DATABASE ENTRY DATE: 2000-09-29
ggtctgcaggcgcgcgctcccgaggtcccgcctcgcccgctgagccggcctgtaagcgctgcggagattgggctagaggcggaggcctgggccacggcggaggcgctgggtccttctggcactcctctggtggaccgcccccatcggccacacttgccctgctctccagtgattctgtagctcctggctccgtagtctcgcggacagctctctttcctggaagatgtttctggtgggcctgacagggggcattgcctcaggcaagagctcagtgatccaggtgttccagcagctgggctgtgcggtgattgacgtggacgtgatggcccggcacgtcgtgcagccaggataccctgcccaccggcgcatcgtagaggtcttcggcactgaggtcttgctggagaacggcgacataaatcgcaaggtcctgggggacctgatctttaaccagcctgaccggcggcagctgctcaacgccatcacccaccccgagattcgcaaggagatgatgaaggagacgttcaagtacttcctccgggagccccgtaccagccccagaggaaagaagcacgttccctcagctcttaaggaggctgacagtttaatgagaagagacacatgaggctttcgagccatgagcccaggaagtaagttggtttttctagtagggatgggagtaataagagctggtgaataatggagccatagatctgagttcaaatcccaaaaaaaaaaaaaaaaaaaaaaaaaaaaaaaaaaaaaaaaaaaaaaaaaaaaaaaaaaaaaaaaaaaaaaaaaaaaaaaaaaagaaaaaaaaaaaaaaaaaaaaaaaaaaaaaaaaaaaaaaaaaaaaaaaaaa

SEQ ID NO: 4741 - protein, 133 aa, Homo sapiens
  misc_feature (1)..(133): Xaa=Unknown amino acid
MFLVGLTGGIASGKSSVIQVFQQLGCAVIDVDVMARHVVQPGYPAHRRIVEVFGTEVLLENGDINRKVLGDLIFNQPDRRQLLNAITHPEIRKEMMKETFKYFLREPRTSPRGKKHVPSALKEADSLMRRDTX

SEQ ID NO: 4742 - DNA, 541 bp, Rattus norvegicus; identical to SEQ ID NO: 4739
  ref <308>: DATABASE ACCESSION NUMBER: EMBL / AA800803
  ref <309>: DATABASE ENTRY DATE: 2000-03-03

SEQ ID NO: 4743 - DNA, 859 bp, Homo sapiens; identical to SEQ ID NO: 4740
  ref <308>: DATABASE ACCESSION NUMBER: EMBL / AK026608
  ref <309>: DATABASE ENTRY DATE: 2000-09-29

SEQ ID NO: 4744 - protein, 133 aa, Homo sapiens; identical to SEQ ID NO: 4741
  misc_feature (1)..(133): Xaa=Unknown amino acid

SEQ ID NO: 4745 - DNA, 497 bp, Rattus norvegicus
  ref <308>: DATABASE ACCESSION NUMBER: EMBL / AA800814
  ref <309>: DATABASE ENTRY DATE: 2000-03-03
cttgtagagtcttttatttgtttgtttgaaacagggtctcaaccactgtaacccctggatggcctggaactcactatttagaccaagttgaccgctaacatagaaataggcctccgagtactgggattaaagcggtgaagcacaatgttcagctcggaagtttgctaggggaatggggagcatgaatggaatggatgtcgaggcacctaaaatacattttttttctagacagtaacaagaatttggacgcaatagtgagatactggaaatcgggcttcttgtacattgaagcaaggggcttgaagagttgtggccgagggacacgttttccctatcagagaccgtgttctttcctcaaactgcctctagatggtggtgctgttctggatgcagtccagtggataaggcttggcacagtgcacaagacccctttaacacacacaacaaaagaatttggggccatgtgggagatagacacagaatagtctacttcttta

SEQ ID NO: 4746 - DNA, 470 bp, Rattus norvegicus
  ref <308>: DATABASE ACCESSION NUMBER: EMBL / AA800850
  ref <309>: DATABASE ENTRY DATE: 2000-03-03
ggatgttaaagtagttacagcaatatacaaaaacaaacaacaacataggacaacccacgggaagagaggggtgagacacacacaatgggactgtacaaatttaggtcaaaataaaggtatatgtattttgtggggtcataaaacatttactaggtcggtagagaaagcagaagtaacagcaatatatgtaaaagtaatgatttaatggctatgagcaagacaaagcaatagaattgtgcttcttttgcagactgtagaccatgaaatgcttagctacagggtccatacaaacatgaaacgattcatatggaagaaacgtcctcacagataactggtggctgataaacacacgctaagttcgaccaaagcaaactgagacttggtagggtcattcatattttaaactcaacatgtttgctctatttaaaaatacctgtagaaactcatagtaaattgcttctagttccaga

SEQ ID NO: 4747 - DNA, 3203 bp, Homo sapiens
  ref <308>: DATABASE ACCESSION NUMBER: EMBL / L13689
  ref <309>: DATABASE ENTRY DATE: 2000-03-04
gagaggcagagatcggggcgagacaatggggatgtgggcgcgggagccccgttccggcttagcagcacctcccagccccgcagaataaaaccgatcgcgccccctccgcgcgcgccctcccccgagtgcggagcgggaggaggcggcggcggccgaggaggaggaggaggaggccccggaggaggaggcgttggaggtcgaggcggaggcggaggaggaggaggccgaggcgccggaggaggccgaggcgccggagcaggaggaggccggccggaggcggcatgagacgagcgtggcggccgcggctgctcggggccgcgctggttgcccattgacagcggcgtctgcagctcgcttcaagatggccgcttggctcgcattcattttctgctgaacgacttttaactttcattgtcttttccgcccgcttcgatcgcctcgcgccggctgctctttccgggattttttatcaagcagaaatgcatcgaacaacgagaatcaagatcactgagctaaatccccacctgatgtgtgtgctttgtggagggtacttcattgatgccacaaccataatagaatgtctacattccttctgtaaaacttgtattgttcgttacctggagaccagcaagtattgtcctatttgtgatgtccaagttcacaagaccagaccactactgaatataaggtcagataaaactctccaagatattgtatacaaattagttccagggcttttcaaaaatgaaatgaagagaagaagggatttttatgcagctcatccttctgctgatgctgccaatggctctaatgaagatagaggagaggttgcagatgaagataagagaattataactgatgatgagataataagcttatccattgaattctttgaccagaacagattggatcggaaagtaaacaaagacaaagagaaatctaaggaggaggtgaatgataaaagatacttacgatgcccagcagcaatgactgtgatgcacttaagaaagtttctcagaagtaaaatggacatacctaatactttccagattgatgtcatgtatgaggaggaacctttaaaggattattatacactaatggatattgcctacatttatacctggagaaggaatggtccacttccattgaaatacagagttcgacctacttgtaaaagaatgaagatcagtcaccagagagatggactgacaaatgctggagaactggaaagtgactctgggagtgacaaggccaacagcccagcaggaggagttccctccacctcttcttgtttgcctagccccagtactccagtgcagtctcctcatccacagtttcctcacatttccagtactatgaatggaaccagcaacagccccagcggtaaccaccaatcttcttttgccaatagacctcgaaaatcatcagtaaatgggtcatcagcaacttcttctggttgatacctgagactgttaaggaaaaaaattttaaacccctgatttatatagatatcttcagccattacgactttctagagctaatacatgtgactatcgtccaatttgctttcttttgtagtgacattaaatttggctataaaagatggactacatgtgatactcctgtccgtcttggttcaaaagaaagattgttgttataaagaattggtttcttggaaagcaggcaagactttttctctgtgttaggaaagatgggaaatggtttctgtaaccattgtttggatttggaagtactctgcagtggacataagcattgggccatagtttgttaatctcaactaacgcctacattacattctccttgatcgttcttgttattacgctgttttgtgaacctgtagaaaaacaagtgctttttatcttgaaattcaaccaacggaaagaatatgcatagaataatgcattctatgatgccatgtcactgtgaataacgatttcttgcagctatttagccattttgattgctgtttgatttatacttctctgttgctacgcaaaaccgatcaaagaaaagtgaacttcagttttacaatctgtatgcctaaaagcgggtactaccgtttattttactgacttgtttaaatgattcgcttttgtaagaatcagatggcattatgcttgttgtacaatgccatattggtatatgacataacaggaaacagtattgtatgatatatctataaatgctataaagaaatattgtgtttcatgcattcagaaatgattgttaaaattctcccaactggttcgacctttgcagatacccataacctatgttgagccttgcttaccagcaaagaatatttttaatgtggatatctaattctaaagtctgttccattagaagcaattggcacatctttctatactttatatacttttctccagtaatacatgtttactttaaaaattgttgcagtgaagaaaaacctttaactgagaaatatggaaaccgtcttaattttccattggctatgatggaattaatattgtattttaaaaatgcatattgatcactataattctaaaacaattttttaaataaaccagcaggttgctaaaagaaggcattttatctaaagttattttaataggtggtatagcagtaattttaaatttaagagttgcttttacagttaacaatggaatatgccttctctgctatgtctgaaaatagaagctatttattatgagcttctacaggtatttttaaatagagcaagcatgttgaatttaaaatatgaataaccccacccaacaattttcagtttattttttgctttggtcgaacttggtgtgtgttcatcagttatttgtgagggtgtttattctatatgaatattgtttcatgtttgtagggaaattgtagctaaacatttcattgtccccagtctgcaaaagaagcacaattctattgctttgtcttgcttatagtcattaaatcattacttttacatatattgctgttacttctgctttctttaaaaatatagtaaaggatgttttatgaagtcacaagatacatatatttttattttgacctaaatttgtacagtcccattgtaagtgttgtttctaattatagatgtaaaatgaaatttcatttgtaattggaaaaaatccaataaaaaggatattcatttagaaaatagctaagatctttaataaaaatttgatatgaaa

SEQ ID NO: 4748 - protein, 326 aa, Homo sapiens [sequence omitted]

SEQ ID NO: 4749 - DNA, 379 bp, Rattus norvegicus
  ref <308>: DATABASE ACCESSION NUMBER: EMBL / AA800882
  ref <309>: DATABASE ENTRY DATE: 2000-03-03
ggaagtttacaaatgtattccagaatcagtaaaacatcatatccactttacagggcacggatctcaagcaaagagttcagaacagtctctggcagatcccacgccaaaagcccgtgacaggccttcttaacaaacagcttgacacttgacagataacacagactccagcctgcttcgccttcttgggccctctgaggttttgtttatgcatgtggaattaaataggatctgagcaaagcaactctgcaggaacaaacgagtttagggagaataaatgctggcctactttgctgaagactacaggagagtcactggtcttatgttgttagctcagggtcaggattaaaccagaatactttattgaaaactatgggaacca

SEQ ID NO: 4750 - DNA, 182 bp, Homo sapiens
  ref <308>: DATABASE ACCESSION NUMBER: EMBL / AA708838
  ref <309>: DATABASE ENTRY DATE: 2000-03-03
ttttttttttttttttttttttttttttattcaaattttattggaagtttacaaatgtattacagacatcagtaaaacatcatatccattttacagggcacggatctcaagcaaagtgttcagaacagtctctggcagagccacaccaaaggcctgttgcagaccttcttaacaaatagctt

SEQ ID NO: 4751 - DNA, 297 bp, Rattus norvegicus
  ref <308>: DATABASE ACCESSION NUMBER: EMBL / AA800908
  ref <309>: DATABASE ENTRY DATE: 2000-03-03
aagtaactaaaatcgaacttatttttgcttaagtaaataggctaaaaatgaggaaatacaaccaacaagaaaataaatgttcaaagcactaaaattctactaggtaactctttggttaggttagacgggtattagcaactaagtttaggactcaaaatggctcgatagacttccagctgaagataggtcttttactaaccttgataaaatctaagtttacacgtactgtttcatatttttttaaatgtgcacgtactcaagtggatcatacaaacgtccaactctcaaataataaat

SEQ ID NO: 4752 - DNA, 460 bp, Rattus norvegicus
  ref <308>: DATABASE ACCESSION NUMBER: EMBL / AA800928
  ref <309>: DATABASE ENTRY DATE: 2000-03-03
aaaaaaaaatgttaaaataaattacacctgccttcaccaccagtacatgcatacagtgtggttactatggctccgggacattcagcttaggacatctcacaggagccaggctctttctcccaccccgaggccggtgtggcctctgcaaccgctttgaggatggcggacgtatggacacacacctctcactgtcataacgtgggggctctggccctattacgccccttggcaaacgaacagggcaaggggaggggctgaggcaggtaatcagctgagctgggaactccatatctcctgccccacacctgagacctgcgggtgtctctctctccctcgctagacaaaggacaagctgagttgggaggacaacagagtgcccgacagacagacctccatcccaacggcagggaccctgttctttactggctctgggtataaaagaaaagacagttcgttaaaa

SEQ ID NO: 4753 - DNA, 495 bp, Rattus norvegicus
  ref <308>: DATABASE ACCESSION NUMBER: EMBL / AA800962
  ref <309>: DATABASE ENTRY DATE: 2000-03-03
catagagtcacctttattggagcttgacctgttgggtttgtaaccctcaggctccacaggtagctggggcagggatagagtatcaaaaagggatgagttgagctgctgtggctgtggggattggctggaagctgctggcaggttggagcagctggagccctggcagggtaaaactgaggtatggcagcgttaataatactcttggagcgttaatactctggaggggacaggcacttggggccctaaggtgcgaaggcacttggagtcagggagaggacacggcttgcaatgggactgggcaggaccaggcccggggtttggcaggcactttggggagtgctggggttggcagcttgggccctgagcagcccagaaggctttggtagtggcaggcacagtctctgggctgggtctgcattaaatacaggggtttcctcagtgctcgtctcgaagctctgaaggcaagaacttgtactgctgctgccggatctgggc

SEQ ID NO: 4754 - protein, 2541 aa, Rattus norvegicus
  ref <308>: DATABASE ACCESSION NUMBER: Refseq / NP_035732
  ref <309>: DATABASE ENTRY DATE: 2002-11-02
MVALSLKISIGNVVKTMQFEPSTMVYDACRMIRERIPEALAGPPNDFGLFLSDDDPKKGIWLEAGKALDYYMLRNGDTMEYRKKQRPLKIRMLDGTVKTIMVDDSKTVTDMLMTICARIGITNHDEYSLVRELMEEKKDEGTGTLRKDKTLLRDEKKMEKLKQKLHTDDELNWLDHGRTLREQGVEEHETLLLRRKFFYSDQNVDSRDPVQLNLLYVQARDDILNGSHPVSFDKACEFAGFQCQIQFGPHNEQKHKAGFLDLKDFLPKEYVKQKGERKIFQAHKNCGQMSEIEAKVRYVKLARSLKTYGVSFFLVKEKMKGKNKLVPRLLGITKECVMRVDEKTKEVIQEWSLTNIKRWAASPKSFTLDFGDYQDGYYSVQTTEGEQIAQLIAGYIDIILKKKKSKDHFGLEGDEESTMLEDSVSPKKSTVLQQQYNRVGKVEHGSVALPAIMRSGASGPENFQVGSMPPAQQQITSGQMHRGHMPPLTSAQQALTGTINSSMQAVQAAQATLDDFETLPPLGQDAASKAWRKNKMDESKHEIHSQVDAITAGTASVVNLTAGDPAETDYTAVGCAVTTISSNLTEMSRGVKLLAALLEDEGGNGRPLLQAAKGLAGAVSELLRSAQPASAEPRQNLLQAAGNVGQASGELLQQIGESDTDPHFQDVLMQLANAVASAAAALVLKAKSVAQRTEDSGLQTQVIAAATQCALSTSQLVACTKVVAPTISSPVCQEQLVEAGRLVAKAVEGCVSASQAATEDGQLLRGVGAAATAVTQALNELLQHVKAHATGAGPAGRYDQATDTILTVTENIFSSMGDAGEMVRQARILAQATSDLVNAIKADAEGESDLENSRKLLSAAKILADATAKMVEAAKGAAAHPDSEEQQQRLREAAEGLRMATNAAAQNAIKKKLVQRLEHAAKQAAASATQTIAAAQHAASAPKASAGPQPLLVQSCKAVAEQIPLLVQGVRGSQAQPDSPSAQLALIAASQSFLQPGGKMVAAAKASVPTIQDQASAMQLSQCAKNLGTALAELRTAAQKAQEACGPLEMDSALSVVQNLEKDLQEIKAAARDGKLKPLPGETMEKCTQDLGNSTKAVSSAIAKLLGEIAQGNENYAGIAARDVAGGLRSLAQAARGVAALTSDPAVQAIVLDTASDVLDKASSLIEEAKKASGHPGDPESQQRLAQVAKAVTQALNRCVSCLPGQRDVDNALRAVGDASKRLLSDLLPPSTGTFQEAQSRLNEAAAGLNQAATELVQASRGTPQDLARASGRFGQDFSTFLEAGVEMAGQAPSQEDRAQVVSNLKGISMSSSKLLLAAKALSTDPASPNLKSQLAAAARAVTDSINQLITMCTQQAPGQKECDNALRQLETVRELLENPVQPINDMSYFGCLDSVMENSKVLGEAMTGISQNAKNGNLPEFGDAIATASKALCGFTEAAAQAAYLVGVSDPNSQAGQQGLVEPTQFARANQAIQMACQSLGEPGCTQAQVLSAATIVAKHTSALCNSCRLASARTANPTAKRQFVQSAKEVANSTANLVKTIKALDGDFTEENRAQCRAATAPLLEAVDNLSAFASNPEFSSVPAQISPEGRAAMEPIVISAKTMLESAGGLIQTARALAVNPRDPPRWSVLAGHSRTVSDSIKKLITSMRDKAPGQLECETAIAALNSCLRDLDQASLAAVSQQLAPREGISQEALHTQMLTAVQEISHLIEPLASAARAEASQLGHKVSQMAQYFEPLTLAAVGAASKTLSHPQQMALLDQTKTLAESALQLLYTAKEAGGNPKQAAHTQEALEEAVQMMTEAVEDLTTTLNEAASAAGVVGGMVDSITQAINQLDEGPMGDPEGSFVDYQTTMVRTAKAIAVTVQEMVTKSNTSPEELGPLANQLTSDYGRLASQAKPAAVAAENEEIGAHIKHRVQELGHGCSALVTKAGALQCSPSDVYTKKELIECARRVSEKVSHVLAALQAGNRGTQACITAASAVSGIIADLDTTIMFATAGTLNREGAETFADHREGILKTAKVLVEDTKVLVQNAAGSQEKLAQAAQSSVATITRLADVVKLGAASLGAEDPETQVVLINAVKDVAKALGDLISATKAAAGKVGDDPAVWQLKNSAKVMVTNVTSLLKTVKAVEDEATKGTRALEATTEHIRQELAVFCSPEPPAKTSTPEDFIRMTKGITMATAKAVAAGNSCRQEDVIATANLSRRAIADMLRACKEAAFHPEVAPDVRLRALHYGRECANGYLELLDHVLLTLQKPNPDLKQQLTGHSKRVAGSVTELIQAAEAMKGTEWVDPEDPTVIAENELLGAAAAIEAAAKKLEQLKPRAKPKEADESLNFEEQILEAAKSIAAATSALVKAASAAQRELVAQGKVGAIPANALDDGQWSQGLISAARMVAAATNNLCEAANAAVQGHASQEKLISSAKQVAASTAQLLVACKVKADQDSEAMKRLQAAGNAVKRASDNLVKAAQKAAAFEDQENETVVVKEKMVGGIAQIIAAQEEMLRKERELEEARKKLAQIRQQQYKFLPSELRDEH

SEQ ID NO: 4755 - DNA, 8168 bp, Homo sapiens
  ref <308>: DATABASE ACCESSION NUMBER: EMBL / AF177198
  ref <309>: DATABASE ENTRY DATE: 2000-01-11
cccgagaagcggcggggcggcgggccggcgggcggggcgcagagccaggcagcgcaggtatagccaggctggagaaaagaagctgccaccatggttgcactttcactgaagatcagcattgggaatgtggtgaagacgatgcagtttgagccgtctaccatggtgtacgacgcctgccgcatcattcgtgagcggatcccagaggccccagctggtcctcccagcgactttgggctctttctgtcagatgatgaccccaaaaagggtatatggctggaggctgggaaagctttggactactacatgctccgaaatggggacactatggagtacaggaagaaacagagacccctgaagatccgtatgctggatggaactgtgaagacgatcatggtggatgactctaagactgtcactgacatgctcatgaccatctgtgcccgcattggcatcaccaatcatgatgaatattcattggttcgagagctgatggaagagaaaaaggaggaaataacagggaccttaagaaaggacaagacattgctgcgagatgaaaagaagatggagaaactaaagcagaaattgcacacagatgatgagttgaactggctggaccatggtcggacactgagggagcagggtgtagaggagcacgagacgctgctgctgcggaggaagttcttttactcagaccagaatgtggattcccgggaccctgtacagctgaacctcctgtatgtgcaggcacgagatgacatcctgaatggctcccaccctgtctcctttgacaaggcctgtgagtttgctggcttccaatgccagatccagtttgggccccacaatgagcagaagcacaaggctggcttccttgacctgaaggacttcctgcccaaggagtatgtgaagcagaagggagagcgtaagatcttccaggcacacaagaattgtgggcagatgagtgagattgaggccaaggtccgctacgtgaagctagcccgttctctcaagacttacggtgtctccttcttcctggtgaaggaaaaaatgaaagggaagaacaagctagtgcccaggcttctgggcatcaccaaggagtgtgtgatgcgagtggatgagaagaccaaggaagtgatccaggagtggaacctcaccaacatcaaacgctgggctgcgtctcccaaaagcttcaccctggattttggagattaccaagatggctattactcagtacagacaactgaaggggagcagattgcacagctcattgccggctacatcgatatcatcctgaagaagaaaaaaagcaaggatcactttgggctggaaggagatgaggagtctactatgctggaggactcagtgtcccccaaaaagtcaacagtcctgcagcagcaatacaaccgggtggggaaagtggagcatggctctgtggccctgcctgccatcatgcgctctggagcctctggtcctgagaatttccaggtgggcagcatgccccctgcccagcagcagattaccagcggccagatgcaccgaggacacatgcctcctctgacttcagcccagcaggcactcactggaaccattaactccagcatgcaggccgtgcaggctgcccaggccaccctggatgactttgacactctgccgcctcttggccaggatgctgcctctaaggcctggcgtaaaaacaagatggatgaatcaaagcatgagatccactctcaggtagatgccatcacagctggtactgcgtctgtggtgaacctgacagcaggggaccctgctgagacagactataccgcagtgggctgtgcagtcaccacaatctcctccaacctgacggagatgtcccgtggggtgaagctgctggctgccttgctggaggacgaaggcggcagtggtcggcccctgttgcaggcagcaaagggccttgcgggagcagtgtcagaactgctgcgcagtgcccaaccagccagtgctgagccccgtcagaacctgctgcaagcagctgggaacgtgggccaggccagtggggagctgttgcaacaaattggggaaagtgatactgacccccacttccaggatgcgctaatgcagctcgccaaagctgtggcaagtgctgcagctgccctggtcctcaaggccaagagtgtggcccagcggacagaggactcgggacttcagacccaagttattgctgcagcaacacagtgtgccctatccacttcccaactagtggcctgtactaaggtggtggcacctacaatcagctcacctgtctgccaagagcaactggtggaggctggacgactggtagccaaagccgtggagggctgtgtgtctgcctcccaggcagctacagaggatgggcaactgttgcgaggggtaggagcagcagccacagctgtcacccaggccctaaatgagctgctgcagcatgtgaaagcccatgccacaggggctgggcctgctggccgttatgaccaggctactgacaccatcctaaccgtcactgagaacatctttagctccatgggtgatgctggggagatggtgggacaggcccgcatcctggcccaagccacatctgacctggtcaatgccatcaaggctgatgctgagggggaaagtgatctggagaactcccgcaagctcttaagtgctgccaagatcctagctgatgccacagccaagatggtagaggctgccaagggagcagctgcccaccctgacagtgaggagcagcagcagcggctgcgggaggcagctgaggggctgcgcatggccaccaatgcagctgcgcagaatgccatcaagaaaaagctggtgcagcgcctggagcatgcagccaagcaggctgcagcctcagccacacagaccatcgctgcagctcagcacgcagcctctacccccaaagcctctgccggcccccagcccctgctggtgcagagctgcaaggcagtggcagagcagattccactgctggtgcagggcgtccgaggaagccaagcccagcctgacagccccagcgctcagcttgccctcattgctgccagccagagcttcctgcagccaggtgggaagatggtggcagctgcaaaggcctcagtgccaacgattcaggaccaggcttcagccatgcagctgagtcagtgtgccaagaacctgggcaccgcgctggctgaactccggacggctgcccagaaggctcaggaagcatgtggacctttggagatggattctgcactgagtgtggtacagaatctagagaaagatctacaggaagtgaaggcagcagctcgagatggcaagcttaaacccttacctggggagacaatggagaagtgtacccaggacctgggcaacagcaccaaagccgtgagctcagccatcgcccagctactgggagaggttgcccagggcaatgagaattatgcaggtattgcagctcgggatgtggcaggtgggctgcggtcactggcccaggccgctaggggagtcgctgcactgacgtcagatcctgcagtgcaggccattgtacttgatacggccagtgatgtgctggacaaggccagcagcctcattgaggaggcgaaaaaggcagctggccatccaggggaccctgagagccagcagcggcttgcccaggtggctaaagcagtgacccaggctctgaaccgctgtgtcagctgcctacctggccagcgcgatgtggataatgccctgagggcagttggagatgccagcaagcgactcctgagtgactcgcttcctcctagcactgggacatttcaagaagctcagagccggttgaatgaagctgctgctgggctgaatcaggcagccacagaactggtgcaggcctctcggggaacccctcaggacctggctcgagcctcaggccgatttggacaggacttcagcaccttcctggaagctggtgtggagatggcaggccaggctccgagccaggaggaccgagcccaagttgtgtccaacttgaagggcatctccatgtcttcaagcaaacttcttctggctgccaaggccctgtccacggaccctgctgcccctaacctcaagagtcagctggctgcagctgccagggcagtaactgacagcatcaatcagctcatcactatgtgcacccagcaggcacccggccagaaggagtgtgataacgccctgcgggaattggagacggtccgggaactcctggagaacccagtccagcccatcaatgacatgtcctactttggttgcctggacagtgtaatggagaactcaaaggtgctgggcgaggccatgactggcatctcccaaaatgccaagaacggaaacctgccagagtttggagatgccatttccacagcctcaaaggcactttgtggcttcaccgaggcagctgcacaggctgcatatctggttggtgtctctgaccccaatagccaagctggacagcaagggctagtggagcccacacagtttgcccgtgcaaaccaggcaattcagatggcctgccagagtttgggagagcctggctgtacccaggcccaggtgctctctgcagccaccattgtggctaaacacacctctgcactgtgtaacagctgtcgcctggcttctgcccgtaccaccaatcctactgccaagcgccagtttgtacagtcagccaaggaggtggccaacagcacagctaatcttgtcaagaccatcaaggcgctagatgggcctttcacagaggagaaccgtgcccagtgccgagcagcaacagcccctctgctggaggctgtggacaatctgagtgcctttgcgtccaaccctgagttctccagcattcctgcccagatcagccctgagggtcgggctgccatggagcccattgtgatctctgcccagacaatgttagagagtgccgggggactcatccagacagcccgggccctcgcagtcaacccccgggaccccccgagctggtcggtgctggccggccactcccgtactgtctcagactccatcaagaagctaattacaagcatgagggacaaggctccagggcagctggagtgtgaaacggccattgcagctctgaacagttgtctacgggacctagaccaggcttccctcgctgcagtcagccagcagcttgctccccgtgagggaatctctcaagaggccttgcacactgagatgctgactgcagtccaagagatctcccatctcattgagccgctggcccatgctgcccgggctgaagcctcccagctgggacacaaggtgtcccagatggcgcagtactttgagccgctcaccctggctgcagtgggtgctgcctccaagaccctgagccacccgcagcagatggcactcctggaccagactaaaacattggcagagtctgccctgcagttgctatacactgccaaggaggctggtggtaacccaaagcaagcagctcacacccaggaagccctggaggaggctgtgcagatgatgaccgaggccgtagaggacctgacaacaaccctcaacgaggcagccagtgctgctggggtcgtgggtggcatggtggactccatcacccaggccatcaaccagctagatgaaggaccaatgggtgaaccagaaggttccttcgtggattaccaaacaactatggtgcggacagccaaggccattgcagtgactgttcaggagatggttaccaagtcaaacaccagcccagaggagctgggccctcttgctaaccagctgaccagtgactatggccgtctggcctcggaggccaagcctgcagcggtggctgctgaaaatgaagagataggttcccatatcaaacaccgggtacaggagctgggccatggctgtgccgctctggtcaccaaggcaggcgccctgcagtgcagccccagtgatgcctacaccaagaaggagctcatagagtgtgcccggagagtctctgagaaggtctcccacgtcctggctgcgctccaggctgggaatcgtggcacccaggcctgcatcacagcagccagcgctgtgtctggtatcattgctgacctcgacaccaccatcatgttcgccactgctggcacgctcaatcgtgagggtactgaaactttcgctgaccaccgggagggcatcctgaagactgcgaaggtgctggtggaggacaccaaggtcctggtgcaaaacgcagctgggagccaggagaagttggcgcaggctgcccagtcctccgtggcgaccatcacccgcctcgctgatgtggtcaagctgggtgcagccagcctgggagctgaggaccctgagacccaggtggtactaatcaacgcagtgaaagatgtagccaaagccctgggagacctcatcagtgcaacgaaggctgcagctggcaaagttggagatgaccctgctgtgtggcagctaaagaactctgccaaggtgatggtgaccaatgtgacatcattgcttaagacagtaaaagccgtggaagatgaggccaccaaaggcactcgggccctggaggcaaccacagaacacatacggcaggagctggcggttttctgttccccagagccacctgccaagacctctaccccagaagacttcatccgaatgaccaagggtatcaccatggcaaccgccaaggccgttgctgctggcaattcctgtcgccaggaagatgtcattgccacagccaatctgagccgccgtgctattgcagatatgcttcgggcttgcaaggaagcagcttaccacccagaagtggcccctgatgtgcggcttcgagccctgcactatggccgggagtgtgccaatggctacctggaactgctggaccatgtactgctgaccctgcagaagccaagcccagaactcaagcagcagttgacaggacattcaaagcgtgtggctggttccgtcactgagctcatccaggctgctgaagccatgaagggaacagaatgggtagacccagaggaccccacagtcattgctgagaatgagctcctgggagctgcagccgccattgaggctgcagccaaaaagctagagcagctgaagccccgggccaaacccaaggaggcagatgagtccttgaactttgaggagcagatactagaagctgccaagtccattgcagcagccaccagtgcactggtaaaggctgcgtcggctgcccagagagaactagtggcccaagggaaggtgggtgccattccagccaatgcactggacgatgggcagtggtcccagggcctcatttctgctgcccggatggtggctgcggccaccaacaatctgtgtgaggcagccaatgcagctgtacaaggccatgccagccaggagaagctcatctcatcagccaagcaggtagctgcctccacagcccagctccttgtggcctgcaaggtcaaggctgaccaggactcggaggcaatgaaacgacttcaggctgctggcaacgcagtgaagcgagcctcagataatctggtgaaagcagcacagaaggctgcagcctttgaagagcaggagaatgagacagtggtggtgaaagagaagatggttggcggcattgcccagatcatcgcagcacaggaagaaatgcttcggaaggaacgagagctggaagaggcgcggaagaaactggcccagatccggcagcagcagtacaagtttctgccttcagagcttcgagatgagcactaaagaagcctcttctatttaatgcagacccggcccagagactgtgcgtgccactaccaaagccttctgggctgtcggggcccaacctgcccaaccccagcactccccaaagtgcctgccaaaccccaaggcctggccccgcccagtcccgcagtacatcccctgtcccctccccaaccccaagtgccttcatgccctagggccccccaagtgcctgcccctccccagagtattaacgctccaagagtattattaacgctgctgtacctcgatctgaatctgccggggccccagcccactccaccctgccagcagcttccagccagtccccacagcctcatcagctctcttcaccgttttttgatactatcttcccccacccccagctacccataggggctgcagagttataagccccaaacaggtcatgctccaataaaaatgattctacctac

SEQ ID NO: 4756 - protein, 2541 aa, Homo sapiens [sequence omitted]

SEQ ID NO: 4757 - DNA, 613 bp, Rattus norvegicus
  ref <308>: DATABASE ACCESSION NUMBER: EMBL / AA801130
  ref <309>: DATABASE ENTRY DATE: 2000-03-03
aagaagtcattggagtttattcacagttaatcactacctaccaaattgctattcgcagaagttagaggcgtaagtacataggtttgtttttttatttaaacactgatctttaaatatatacacacaaaacttagttcagcaaggcttcatgatatacaccaattccaaaataaaacaatcaaatggcccaggtgtaactccagagataaatttttatcatcagcagggaaagaggcagcagaaccaggaggggtgggaacaggctccgcccaggacgcctccggggcctcaggggtgctccgagctgagtccatctcacaaaacagagtccaggggggaccccaccctcaagagtccagcagcccacggacgccgccaactccaagggagagcctgggagtagccatgactctgctgtggggaggaggctgcgtggagagaaacggtggacaggcacatgactacggaggactgagagctcacaggagacaagatttaaaaagctttgcgttgctcttggtcttttctacctcaaaaggcttcatgggatggggcagcagagcagctgcaaacaccactgttgtgcacagagatgcaaccatgcaaccagccc

SEQ ID NO: 4758 - protein, 217 aa, Rattus norvegicus [sequence omitted]

SEQ ID NO: 4759 - DNA, 1356 bp, Homo sapiens; identical to SEQ ID NO: 2113
  ref <308>: DATABASE ACCESSION NUMBER: EMBL / BC000631
  ref <309>: DATABASE ENTRY DATE: 2001-07-13

SEQ ID NO: 4760 - protein, 217 aa, Homo sapiens [sequence omitted]

SEQ ID NO: 4761 - DNA, 635 bp, Rattus norvegicus
  ref <308>: DATABASE ACCESSION NUMBER: EMBL / AA817843
  ref <309>: DATABASE ENTRY DATE: 2000-03-03
tttttttttttttttttgaactctacccttatattttattaaaagggtaataaacattatgaattaacccagctgcttacttgaattacaaaataacatgattcaatatgaaaataagaaactgtctacaaatctctgacagtaataaatcgcaatatacaatgcatacaggcgtcacagagcaacacactctcgtacaaaacaaaaatatttttaatacctttaaaatccaatttttttcttttaaaatcattcatgaaaaagattctcaagtcagaattaacacctcaattagtcaggcatcaggaagctacgttacagctacttattatacaaggaggcggcctcactctcacttcctcccaatgcctctgctccagactccgtcagactctcgctcgcgctctccacacagcccggctccatccttccttcatatcatgaaaactgaatctgctggacaccagaaatctgttgataggacgtcgtgtaaaccataacgttttgttgttggccatctgcagttattaacccagccggtaactggttagtgaatgcctcttccgtgagctcctcgctgagtccatctgtatcagacacggccccaccaatgcccttctctcacttcatggcct

SEQ ID NO: 4762 - protein, 207 aa, Rattus norvegicus
  ref <308>: DATABASE ACCESSION NUMBER: SWISS-Prot / P22569
  ref <309>: DATABASE ENTRY DATE: 2002-06-15
MTMDGDSSTTDASQLGISADYIGGSHYVIQPHDDTEDSMNDHEDTNGSKESFREQDIYLPIANVARIMKNAIPQTGKIAKDAKECVQECVSEFISFITSEASERCHQEKRKTINGEDILFAMSTLGFDSYVEPLKLYLQKFREAMKGEKGIGGAVSATDGLSEELTEEAFTNQLPAGLITADGQQQNVMVYTTSYQQISGVQQIQFS

SEQ ID NO: 4763 - DNA, 456 bp, Rattus norvegicus
  ref <308>: DATABASE ACCESSION NUMBER: EMBL / AA817854
  ref <309>: DATABASE ENTRY DATE: 2000-03-03
tttttttttttttttttccttatgcagagaaccttttttacagagtatcaacggtcctatgagtcctgatgcaatatcttttggagcatccacatgagagtggtaaatcctggtcacacaattgctgtctccctcgccaggacttggctcattggcacgcagcacgtacaaatactgctgtccaggaaacagtttgtcatcggctctttgaaaatcagtggtgttgtcagggtagatggccccctcgttcgccttggtgtaagttaccccatgagcatgaaaagtgtagggcctagaggcaaagttctttacgtgaacagaaactttgtctccaacttcagctttgatgacagggcctaaaagccctatccaggctggtttgtctatagtcttcgtaaaggtgccatctgtgtactcagaataaagggccttcttatactttcttcactcgtgccg

SEQ ID NO: 4764 - protein, 1059 aa, Rattus norvegicus; identical to SEQ ID NO: 3197
  ref <308>: DATABASE ACCESSION NUMBER: SWISS-Prot / P13635
  ref <309>: DATABASE ENTRY DATE: 1999-07-15

SEQ ID NO: 4765 - DNA, 3321 bp, Homo sapiens; identical to SEQ ID NO: 3198
  ref <308>: DATABASE ACCESSION NUMBER: EMBL / M13699
  ref <309>: DATABASE ENTRY DATE: 2000-03-04

SEQ ID NO: 4766 - protein, 1065 aa, Homo sapiens; identical to SEQ ID NO: 3199
  ref <308>: DATABASE ACCESSION NUMBER: SWISS-Prot / P00450
  ref <309>: DATABASE ENTRY DATE: 2002-06-15

SEQ ID NO: 4767 - DNA, 581 bp, Rattus norvegicus
  misc_feature (1)..(581): n=a, c, g or t
  ref <308>: DATABASE ACCESSION NUMBER: EMBL / AA817997
  ref <309>: DATABASE ENTRY DATE: 2000-03-03
tttttttttttttttttcacctagagacaaatctttatttttaaactctcatctactaaattagcgtttcccaccaactctgggagcagagaccttcacaggcttcacaatcttttgtttaggggctgcctttgtgggagccttggcagcagccattgctgtcttctttgatgcctgcttagccttttttgcttccttggcagccctgatagcctgttctcgctgagctttcctaacttctggtttctgattcctcttggccattatatcagccagagaagcgcctgtgatggcccgctggaacttgactgcacggcgggttcttttcttttgaatttcttccgactgtcctttcttgtgttttcttctgtagaggacagtccagttaatttgccgagggttccttttggaaaggaatgcggactcacatttggcattaagaaactggaaaaccttcccatcggtcctggcgtancgccgcccgtgtcncgggtagatcttgtacccactanaactgcacagctcgaccttcatggtgacagatgtcggcctgccgggggaaagcctcgtgccgaattctt

SEQ ID NO: 4768 - protein, 157 aa, Rattus norvegicus [sequence omitted]

SEQ ID NO: 4769 - DNA, 341 bp, Homo sapiens
  misc_feature (1)..(341): n=a, c, g or t
  ref <308>: DATABASE ACCESSION NUMBER: EMBL / AA380579
  ref <309>: DATABASE ENTRY DATE: 2000-03-08
gtcgccatgaaggtcgagctgtgcagttttagcgggtacaagatctaccccggacacgggaggcgctacgccaggaccgacgggaaggttttccagtttcttaatgcgaaatgcgagtcggctttcctttccaagaggaatcctcggcagataaactggactgtcctctacagaaggaagcacaaaaagggacagtcggaagaaattcaaaagaaaagaacccgccgagcagtcaaattccagagggccattactggtgcatctnttgctgatataatggccaagaggaattcagaaacctgaagttagaaaggcttcaacggggaacaagctattcaggg

SEQ ID NO: 4770 - protein, 157 aa, Homo sapiens [sequence omitted]

SEQ ID NO: 4771 - DNA, 581 bp, Rattus norvegicus; identical to SEQ ID NO: 4767
  misc_feature (1)..(581): n=a, c, g or t
  ref <308>: DATABASE ACCESSION NUMBER: EMBL / AA817997
  ref <309>: DATABASE ENTRY DATE: 2000-03-03

SEQ ID NO: 4772 - protein, 157 aa, Rattus norvegicus [sequence omitted]

SEQ ID NO: 4773 - DNA, 341 bp, Homo sapiens; identical to SEQ ID NO: 4769
  misc_feature (1)..(341): n=a, c, g or t
  ref <308>: DATABASE ACCESSION NUMBER: EMBL / AA380579
  ref <309>: DATABASE ENTRY DATE: 2000-03-08

SEQ ID NO: 4774 - protein, 157 aa, Homo sapiens [sequence omitted]

SEQ ID NO: 4775 - DNA, 504 bp, Rattus norvegicus
  ref <308>: DATABASE ACCESSION NUMBER: EMBL / AA818025
  ref <309>: DATABASE ENTRY DATE: 2000-03-03
tttttttttttttttttcctatagcatagtgtttattattccattatgtggaagacagtcaagataaactgctttttcaagatcgaaaaaatgttggccattacagttttctagtaaaagctagcaaagcccaggcaatattcagagatgtgggataattcaggttggagccgcccgtccacacttctacaagaacagacgttttgtgtgtttcctttcttttttgttttgttgttattgttgttttgaggtttttcttttctatgtatgtatgtatgtatgtatgtatgtatgtatgtatgtatgtatagacaggctttctctgtatagccttggctgtccgggaactggctggctttgacctcacggagatgcacctgcttctactcccaagtgctggtattaaaggcatgcaccaccactcgccattttgtttttcatttgaggcaaggtcttactatatagttttaggtgacttggagaccactgtgaaggtcaggctgg

SEQ ID NO: 4776 - protein, 126 aa, Rattus norvegicus
  ref <308>: DATABASE ACCESSION NUMBER: SWISS-Prot / P27274
  ref <309>: DATABASE ENTRY DATE: 2000-05-30
MRARRGFILLLLLAVLCSTGVSLRCYNCLDPVSSCKTNSTCSPNLDACLVAVSGKQVYQQCWRFSDCNAKFILSRLEIANVQYRCCQADLCNKSFEDKPNNGAISLLGKTALLVTSVLAAILKPCF

SEQ ID NO: 4777 - DNA, 1742 bp, Homo sapiens
  ref <308>: DATABASE ACCESSION NUMBER: EMBL / AF052941
  ref <309>: DATABASE ENTRY DATE: 2000-01-21
gaccgcggcagctcagcctcccgccgattgtatgttccaggcctcaatgaggagtccaaacatggagccattcaagcagcagaaggtggaggacttttatgacatcggagaggagctggggagtggccagtttgccatcgtgaagaagtgccgggagaagagcacggggcttgagtatgcagccaagttcatcaagaagcggcagagccgggcgagccggcgcggtgtgagccgggaggagatcgagcgggaggtgagcatcctgcggcaggtgctgcaccacaatgtcatcacgctgcacgacgtctatgagaaccgcaccgacgtggtgctcatccttgagctagtgtctggaggagagctcttcgatttcctggcccagaaggagtcactgagtgaggaggaggccaccagcttcattaagcagatcctggatggggtgaactaccttcacacaaagaaaattgctcactttgatctcaagccagaaaacattatgttgttagacaagaatattcccattccacacatcaagctgattgactttggtctggctcacgaaatagaagatggagttgaatttaagaatatttttgggacgccggaatttgttgctccagaaattgtgaactacgagcccctgggtctggaggctgacatgtggagcataggcgtcatcacctacatcctcttaagtggagcatcccctttcctgggagacacgaagcaggaaacactggcaaatatcacatcagtgagttacgactttgatgaggaattcttcagccatacgagcgagctggccaaggactttattcggaagcttctggttaaagagacccggaaacggctcacaatccaagaggctctcagacacccctggatcacgccggtggacaaccagcaagccatggtgcgcagggagtctgtggtcaatctggagaacttcaggaagcagtatgtccgcaggcggtggaagctttccttcagcatcgtgtccctgtgcaaccacctcacccgctcgctgatgaagaaggtgcacctgaggccggatgaggacctgaggaactgtgagagtgacactgaggaggacatcgccaggaggaaagccctccacccacggaggaggagcagcacctcctaactggcctgacctgcagtggccgccagggaggtttgggcccagcggggctcccttctgtgcagacttttggacccagctcagcaccagcacccgggcgtcctgagcactttgcaagagagatgggcccaaggaattcagaagagcttgcaggcaagccaggagaccctgggagctgtggctgtcttctgtggaggaggctccagcattcccaaagctcttaattctccataaaatgggctttcctctgtctgccatcctcagagtctggggtgggagtgtggacttaggaaaacaatataaaggacatcctcatcatcacggggtgaaggtcagagtaaggcagccttcttcacaggctgagggggttcagaaccagcctggccaaaaattacaccagagagacagagtcctccccattgggaacagggtgattgaggaaagtgaaccttgggtgtgagggaccaatcctgtgacctcccagaaccatggaagccaggacgtcaggctgaccaacacctcagaccttctgaagcagcccattgctggcccgccatgttgtaattttgctcatttttattaaacttctggtttacctgaa

SEQ ID NO: 4778 - protein, 128 aa, Homo sapiens
  ref <308>: DATABASE ACCESSION NUMBER: Refseq / NP_000602
  ref <309>: DATABASE ENTRY DATE: 2002-04-10
MGIQGGSVLFGLLLVLAVFCHSGHSLQCYNCPNPTADCKTAVNCSSDFDACLITKAGLQVYNKCWKFEHCNFNDVTTRLRENELTYYCCKKDLCNFNEQLENGGTSLSEKTVLLLVTPFLAAAWSLHP

SEQ ID NO: 4779 - DNA, 504 bp, Rattus norvegicus; identical to SEQ ID NO: 4775
  ref <308>: DATABASE ACCESSION NUMBER: EMBL / AA818025
  ref <309>: DATABASE ENTRY DATE: 2000-03-03

SEQ ID NO: 4780 - protein, 126 aa, Rattus norvegicus; identical to SEQ ID NO: 4776
  ref <308>: DATABASE ACCESSION NUMBER: SWISS-Prot / P27274
  ref <309>: DATABASE ENTRY DATE: 2000-05-30

SEQ ID NO: 4781 - DNA, 1742 bp, Homo sapiens; identical to SEQ ID NO: 4777
  ref <308>: DATABASE ACCESSION NUMBER: EMBL / AF052941
  ref <309>: DATABASE ENTRY DATE: 2000-01-21

SEQ ID NO: 4782 - protein, 128 aa, Homo sapiens; identical to SEQ ID NO: 4778
  ref <308>: DATABASE ACCESSION NUMBER: Refseq / NP_000602
  ref <309>: DATABASE ENTRY DATE: 2002-04-10

SEQ ID NO: 4783 - DNA, 158 bp, Rattus norvegicus
  ref <308>: DATABASE ACCESSION NUMBER: EMBL / AA818152
  ref <309>: DATABASE ENTRY DATE: 2000-03-03
cggccgcatccattttgttgttcatgtgtttttttttttttaacacttctcaattagtttttattcataatcataaacttaaccttgcaatcctgctagacttgaaggggaatgaagaaaatatggaacccaaagaacttcaatgcaaacacatatta

SEQ ID NO: 4784 - protein, 163 aa, Rattus norvegicus
  ref <308>: DATABASE ACCESSION NUMBER: SWISS-Prot / P10111
  ref <309>: DATABASE ENTRY DATE: 2002-06-15
VNPTVFFDITADGEPLGRVCFELFADKVPKTAENFRALSTGEKGFGYKGSSFHRIIPGFMCQGGDFTRHNGTGGKSIYGEKFEDENFILKHTGPGILSMANAGPNTNGSQFFICTAKTEWLDGKHVVFGKVKEGMSIVEAMERFGSRNGKTSKKITISDCGQL

SEQ ID NO: 4785 - DNA, 382 bp, Homo sapiens
  ref <308>: DATABASE ACCESSION NUMBER: EMBL / AA071425
  ref <309>: DATABASE ENTRY DATE: 2000-03-03
agaattattccagggtttatgtgtcagggtggtgacttcacacgccataatggcactggtggcaagtccatctatggggagaaatttgaagatgagaacttcatcctaaagcatacgggtcctggcatcttgtccatggcaaatgctggacccaacacaaatggttcccagtttttcatctgcactgccaagactgagtggttggatggcaagcatgtggtgtttggcaaagtgaaaagaaggcatgaatattgtggaaggccatggaaccgctttgggtccaggaatggcaaagaccagcaaagaaagatcaccattgctgactgtggacaactcgaataagtttgacttgtgttttatctttaaccaccagatcattccc

SEQ ID NO: 4786 - protein, 164 aa, Homo sapiens; identical to SEQ ID NO: 1327
  ref <308>: DATABASE ACCESSION NUMBER: SWISS-Prot / P05092
  ref <309>: DATABASE ENTRY DATE: 2002-06-15

SEQ ID NO: 4787 - DNA, 492 bp, Rattus norvegicus
  ref <308>: DATABASE ACCESSION NUMBER: EMBL / AA818593
  ref <309>: DATABASE ENTRY DATE: 2000-03-03
ttttttttttttttgttcgcaagcatttttattatatttaaatcaaatatcattctgagaaggcatgtaacatacacatttgtacatagcatctttcaataaaaaaatgtacaggtggggcagtgttttagtgaaaggcttaaattttttttaattgaactactagttcaattaaaaactcaaaaaactcattgtgttaaagtaactatatacatagataaagtgggcatccaagaggtatagcagcagccctttaatgtatacaccagggagtgatatgcatcttcctgccctctgcctccagcagttcccttcgaagctggcctgttcctctgcacccttcagggctcatgattccttgcgtagctctgtctgttggtggtttcgtgtagagtcgtatgtgagtcctcttttctttctttgttagactctgtggtcttgaagaaatcagttacatacaaaaccactaatattgccacaacagctccttga

SEQ ID NO: 4788 - protein, 282 aa, Rattus norvegicus
  ref <308>: DATABASE ACCESSION NUMBER: Refseq / NP_071983
  ref <309>: DATABASE ENTRY DATE: 2002-05-23
MFDKPRLPYVVLDVICVLLAGLPFIILTSRHTPFQRGVFCTDESIKYPYREDTIPYALLGGIVIPFCIIVMITGETLSVYFNVLHSNSFVSNHYIATIYKAVGAFLFGASASQSLTDIAKYSIGRLRPHFLAVCNPDWSKINCSDGYIENFVCQGNEQKVREGRLSFYSGHSSFSMYCMLFVALYLQARMKGDWARLLRPMLQFGLVALSIYVGLSRVSDYKHHWSDVLIGLIQGAVVAILVVLYVTDFFKTTESNKERKEDSHTTLHETTNRQSYARNHEP

SEQ ID NO: 4789 - DNA, 3352 bp, Homo sapiens
  ref <308>: DATABASE ACCESSION NUMBER: EMBL / D29641
  ref <309>: DATABASE ENTRY DATE: 2001-10-10
ctgctcccaaaaatggcggacgcattcggagatgagctgttcagcgtgttcgagggcgactcgaccactgcggcgggaaccaaaaaagacaaggaaaaggacaaggggaaatggaaggggcctccagggtctgcagacaaggcagggaaacgttttgatggtaaattacaatcagaatcaactaataatggaaaaaataagagagatgtagatttcgaaggtacagatgaacccatttttggaaagaagcccaggatagaagagtcaataactgaagacttaagtttggcagacctgatgcccagagtcaaggtacaatcagttgaaactgttgaagggtgtacacatgaggttgcacttcctgcagaagaggattatttaccacttaaaccacgagttggaaaagctgctaaggaatacccgttcattcttgatgcttttcaaagagaggccattcagtgtgttgacaataatcagtctgttctagtatctgcacatacctcagcgggaaaaacagtatgcgccgagtatgccattgcattggccttaagggaaaagcagcgtgtaatatttaccagcccaattaaggctctgagtaaccaaaaataccgtgaaatgtatgaagaatttcaagatgttggtttgatgactggtgatgttactattaatcctacggcatcttgtcttgttatgaccacagagattttgagaagtatgctttacagaggttccgaagttatgagagaagttgcttgggttatatttgatgaaattcattatatgagagattcagaacgtggtgtagtatgggaagaaactattattttgcttcctgataacgtccactatgtctttctttcggctactattccaaatgcccgacagtttgctgaatggatttgccatttacataaacagccttgtcatgttatttacacagattatcggcccactccattgcaacactacatttttccagcagggggagatggcctgcatcttgtggttgatgaaaatggtgacttcagagaagataattttaatactgcaatgcaagtgcttcgagatgcaggtgatttggccaaaggagaccagaaagggcggaaaggaggaacaaaaggaccatcaaatgttttcaaaattgtgaagatgattatggaaagaaatttccaacctgtgattattttcagttttagtaagaaagattgtgaagcctatgcacttcaaatgaccaaattagatttcaacacagatgaagaaaagaagatggttgaagaagtattcagtaatgcaattgattgcttatccgatgaagataaaaaactccctcaggtagaacatgtacttcctcttttgaagaggggaattggtattcaccatggtggtttacttcctattttgaaagaaactatagaaattctcttttctgaaggattgataaaggccttatttgccacggagacctttgctatgggaattaacatgccagctagaactgttttatttacaaatgcccgcaaatttgatgggaaggatttccgatggatttcttctggtgaatacattcagatgtctggtcgtgctggaaggagaggaatggatgatagaggaattgtaattcttatggtagatgaaaagatgagcccaacaattggaaaacaattacttaagggctccgctgatcctctaaatagtgctttccatttgacctacaacatggttttgaacttactacgtgtagaagaaattaatcctgagtacatgttggaaaaatccttctaccagtttcagcattatagagcaattccaggagtagtagagaaggtaaagaattcagaagaacagtataataaaatagtaattcccaatgaagaaagtgtggttatctattataagattagacagcagcttgccaaattgggtaaagaaattgaagaatatattcacaaaccaaaatactgcttaccttttctacaaccaggtcgtttggtaaaggtaaagaatgaaggagatgactttggctggggagtagtggtgaatttctcaaaaaagtcaaatgttaagcctaactctggtgaactggatcctttgtatgtagtagaagtacttctgcgctgtagcaaagagagcttgaaaaattcagctacagaagctgcaaaaccagctaaacctgatgagaaaggagagatgcaggttgtcccagttttggtgcatctcctgtctgctatcagcagtgttaggctttacattcctaaagaccttcggccggtggacaatagacagagtgttttaaaatcaatacaggaagttcagaaacgttttcctgacggcatccccttattagaccctattgatgatatgggcattcaagatcaagggctgaaaaaagtcattcagaaagtagaagcttttgagcatcgaatgtattctcatccacttcacaatgatccaaatttggaaactgtgtatacgctttgtgaaaaaaaagcacagattgcaatagatattaaatctgcaaagcgagaactgaagaaagcaagaacagtcctacaaatggatgaactcaaatgtcgcaaacgtgttttaagaaggttgggatttgctacttcttctgatgtaatagagatgaaaggacgagtggcttgtgagataagcagtgctgatgagctccttctaactgagatgatgtttaatggccttttcaatgacctttctgcagaacaggcaacagcattattaagctgctttgtgtttcaagagaattctagtgagatgcccaaattaacagaacaattagcaggaccacttcgtcaaatgcaggaatgtgctaaaagaattgcaaaagtttcagcagaagccaaattggaaattgatgaggaaacttatctaagctcatttaaacctcacttaatggatgtagtatatacctgggcaactggagctacatttgcccatatctgcaaaatgacagatgtctttgaaggcagcataattcgttgtatgaggcgcctggaagaattgcttcgacaaatgtgtcaagcagcaaaagccattggaaacactgagctggaaaataaatttgcagaaggaatcaccaaaatcaagagagatattgtgtttgctgccagcctctacttgtagagtcagctaaaggaatgtgagattttaaattattgaccacctgtttgattacagttgactacaaatgcctgcaagtgtggatttggttctcccatacattttaatatgtattatatttaaatcaaacatcattcatagaaagcatattacatacatgtttatacataagcattacatttttttaataaaaatgtatacaggtggggcactg

SEQ ID NO: 4790 - protein, 1046 aa, Homo sapiens
  ref <308>: DATABASE ACCESSION NUMBER: SWISS-Prot / P42285
  ref <309>: DATABASE ENTRY DATE: 2002-06-15
LLPKMADAFGDELFSVFEGDSTTAAGTKKDKEKDKGKWKGPPGSADKAGKRFDGKLQSESTNNGKNKRDVDFEGTDEPIFGKKPRIEESITEDLSLADLMPRVKVQSVETVEGCTHEVALPAEEDYLPLKPRVGKAAKEYPFILDAFQREAIQCVDNNQSVLVSAHTSAGKTVCAEYAIALALREKQRVIFTSPIKALSNQKYREMYEEFQDVGLMTGDVTINPTASCLVMTTEILRSMLYRGSEVMREVAWVIFDEIHYMRDSERGVVWEETIILLPDNVHYVFLSATIPNARQFAEWICHLHKQPCHVIYTDYRPTPLQHYIFPAGGDGLHLVVDENGDFREDNFNTAMQVLRDAGDLAKGDQKGRKGGTKGPSNVFKIVKMIMERNFQPVIIFSFSKKDCEAYALQMTKLDFNTDEEKKMVEEVFSNAIDCLSDEDKKLPQVEHVLPLLKRGIGIHHGGLLPILKETIEILFSEGLIKALFATETFAMGINMPARTVLFTNARKFDGKDFRWISSGEYIQMSGRAGRRGMDDRGIVILMVDEKMSPTIGKQLLKGSADPLNSAFHLTYNMVLNLLRVEEINPEYMLEKSFYQFQHYRAIPGVVEKVKNSEEQYNKIVIPNEESVVIYYKIRQQLAKLGKEIEEYIHKPKYCLPFLQPGRLVKVKNEGDDFGWGVVVNFSKKSNVKPNSGELDPLYVVEVLLRCSKESLKNSATEAAKPAKPDEKGEMQVVPVLVHLLSAISSVRLYIPKDLRPVDNRQSVLKSIQEVQKRFPDGIPLLDPIDDMGIQDQGLKKVIQKVEAFEHRMYSHPLHNDPNLETVYTLCEKKAQIAIDIKSAKRELKKARTVLQMDELKCRKRVLRRLGFATSSDVIEMKGRVACEISSADELLLTEMMFNGLFNDLSAEQATALLSCFVFQENSSEMPKLTEQLAGPLRQMQECAKRIAKVSAEAKLEIDEETYLSSFKPHLMDVVYTWATGATFAHICKMTDVFEGSIIRCMRRLEELLRQMCQAAKAIGNTELENKFAEGITKIKRDIVFAASLYL

SEQ ID NO: 4791 - DNA, 492 bp, Rattus norvegicus; identical to SEQ ID NO: 4787
  ref <308>: DATABASE ACCESSION NUMBER: EMBL / AA818593
  ref <309>: DATABASE ENTRY DATE: 2000-03-03

SEQ ID NO: 4792 - protein, 282 aa, Rattus norvegicus; identical to SEQ ID NO: 4788
  ref <308>: DATABASE ACCESSION NUMBER: Refseq / NP_071983
  ref <309>: DATABASE ENTRY DATE: 2002-05-23

SEQ ID NO: 4793 - DNA, 3352 bp, Homo sapiens; identical to SEQ ID NO: 4789
  ref <308>: DATABASE ACCESSION NUMBER: EMBL / D29641
  ref <309>: DATABASE ENTRY DATE: 2001-10-10

SEQ ID NO: 4794 - protein, 1046 aa, Homo sapiens; identical to SEQ ID NO: 4790
  ref <308>: DATABASE ACCESSION NUMBER: SWISS-Prot / P42285
  ref <309>: DATABASE ENTRY DATE: 2002-06-15

SEQ ID NO: 4795 - DNA, 618 bp, Rattus norvegicus
  ref <308>: DATABASE ACCESSION NUMBER: EMBL / AA818677
  ref <309>: DATABASE ENTRY DATE: 2000-03-03
tttttttttttttttgtatttcagaagcacttggttttattgcacggaagcaatcgaaagtggacttcagtggacagcacaccctggcctggttcagcggccagcgccctgcctcacctgctgcagctcttccaggagcgtgtaccgggcaagggcctgaccgctcctttggaaaacaagaaggcattcgggaataggttacaacatttcaagcataatgcatttctaactgctcattcattactgcggtcacctgtcggtaggacataagtaaatgcacttacttggaaaggagggggggcagtttttagtcacgcgttttacgtggagcgttcagcaatacatcacgttcggctacgataagctatcataattgtccatcacctggggagggctttcggtgttggggaggcacggctcagggttatcttctcttgctaacttaatcctaatagaaattcctgtttggtgagggcgggcccgccatctaagtggtgtttcttcttacggagggaaaggaagaaataaactttattacaccaacccttgagtaccggggccgtcctgagtttctttggctattccgggtggtcctctcgtcctcttacttgtctccct

SEQ ID NO: 4796 - protein, 831 aa, Rattus norvegicus
  ref <308>: DATABASE ACCESSION NUMBER: SWISS-Prot / P16884
  ref <309>: DATABASE ENTRY DATE: 2001-10-16
HQEEVGELLGQIQGCGAAQAQAQAEARDALKCDVTSALREIRAQLEGHTVQSTLQSEEWFRVRLDRLSEAAKVNTDAMRSAQEEITEYRRQLQARTTELEALKSTKESLERQRSELEDRHQVDMASYQDAIQQLDNELRNTKWEMAAQLREYQDLLNVKMALDLEIAAYRKLLEGEECRIGFGPIPFSLTEGLPKIPSMSTHIKVKSEEKIKVVEKSEKETVIVEEQTEEIQVTEEVTEEEDKEAQGEEEEEAEEGGEEAATTSPPAEEAASPEKETKSPVKEEAKSPAEAKSPAEAKSPAEAKSPAEVKSPAVAKSPAEVKSPAEVKSPAEAKSPAEAKSPAEVKSPATVKSPGEAKSPAEAKSPAEVKSPAEAKSPAEAKSPASVKSPGEAKSPAEAKSPAEVKSPATVKSPVEAKSPAEVKSPVTVKSPAEAKSPVEVKSPASVKSPSEAKSPAGAKSPAEAKSPVVAKSPAEAKSPAGAKPPAEAKSPAEAKSPAEAKSPAEAKSPAEAKSPVEVKSPEKAKSPVKEGAKSLAEAKSPEKAKSPVKEEIKPPAEVKSPEKAKSPMRKEAKSPEKAKTLDVKSPEAKPPAKEEAKRPADIRSPEQVKSPAKEEAKSPEKEETRTEKVAPKKEEVKSPVEEVKAKEPPKKVEEEKTPATPKTEVKESKKDEAPKEAQKPKAEEKEPLTEKPKDSPGEAKKEEAKEKKAAAPEEETPAKLGVKEEAKPKEKAEDAKAKEPSKPSEKEKPKKEEVPAAPEKKDTKEEKTTESKKREEKPKMEAKAKEEDKGLPQEPSKPKTEKAEKSSSTDQKDSQPSEKAPEDKAAKGDK

SEQ ID NO: 4797 - DNA, 2313 bp, Homo sapiens
  ref <308>: DATABASE ACCESSION NUMBER: EMBL / BC014185
  ref <309>: DATABASE ENTRY DATE: 2001-09-13
ggcacgagggccccgtcccggcctcgcgcacctgctcaggccatgatgagcttcggcggcgcggacgcgctgctgggcgccccgttcgcgccgctgcatggcggcggcagcctccactacgcgctagcccgaaagggtggcgcaggcgggacgcgctccgccgctggctcctccagcggcttccactcgtggacacggacgtccgtgagctccgtgtccgcctcgcccagccgcttccgtggcgcaggcgccgcctcaagcaccgactcgctggacacgctgagcaacgggccggagggctgcatggtggcggtggccacctcacgcagtgagaaggagcagctgcaggcgctgaacgaccgcttcgccgggtacatcgacaaggtgcggcagctggaggcgcacaaccgcagcctggagggcgaggctgcggcgctgcggcagcagcaggcgggccgctccgctatgggcgagctgtacgagcgcgaggtccgcgagatgcgcggcgcggtgctgcgcctgggcgcggcgcgcggtcagctacgcctggagcaggagcacctgctcgaggacatcgcgcacgtgcgccagcgcctagacgacgaggcccggcagcgagaggaggccgaggcggcggcccgcgcgctggcgcgcttcgcgcaggaggccgaggcggcgcgcgtggacctgcagaagaaggcgcaggcgctgcaggaggagtgcggctacctgcggcgccaccaccaggaagaggtgggcgagctgctcggccagatccagggctccggcgccgcgcaggcgcagatgcaggccgagacgcgcgacgccctgaagtgcgacgtgacgtcggcgctgcgcgagattcgcgcgcagcttgaaggccacgcggtgcagagcacgctgcagtccgaggagtggttccgagaagaaggaacctgctgtcgaaaagcccaaagaatccaaagttgaagccaagaaggaagaggctgaagataagaaaaaagtccccaccccagagaaggaggctcctgccaaggtggaggtgaaggaagacgctaaacccaaagaaaagacagaggtggccaagaaggaaccagatgatgccaaggccaaggaacccagcaaaccagcagagaagaaggaggcagcaccggagaaaaaagacaccaaggaggagaaggccaagaagcctgaggagaaacccaagacagaggccaaagccaaggaagatgacaagaccctctcaaaagagcctagcaagcctaaggcagaaaaggctgaaaaatcctccagcacagaccaaaaagacagcaagcctccagagaaggccaagtccccagagaaggccaagactcttgatgtgaagtctccagaagccaagactccagcgaaggaggaagcaaggtcccctgcagacaaattccctgaaaaggccaaaagccctgtcaaggaggaggtcaagtccccagagaaggcgaaatctcccctgaaggaggatgccaaggcccctgagaaggagatcccaaaaaaggaagaggtgaagtccccagtgaaggaggaggagaagccccaggaggtgaaagtcaaagagcccccaaagaaggcagaggaagagaaagcccctgccacaccaaaaacagaggagaagaaggacagcaagaaagaggaggcacccaagaaggaggctccaaagcccaaggtggaggagaagaaggaacctgctgtcgaaaagcccaaagaaactcagaagagtcccggagctcaaggatcagagtaacacaattttcactttttctgtctttatgtaagaagaaactgcttagatgacggggcctccttcttcaaacaggaatttctgttagcaatatgttagcaagagagggcactcccaggcccctgcccccatgccctccccaggcgatggacaattatgatagcttatgtagctgaatgtgatacatgccgaatgccacacgtaaacacttgactataaaaactgcccccctcctttccaaataagtgcatttattgcctctatgtgcaactgacagatgaccgcaataatgaatgagcagttagaaatacattatgcttgagatgtcttaacctattcccaaatgccttctgttttccaaaggagtggtcaagcccttgcccagagctctctattctggaagagcggtccaggtggggccgggcactggccactgaattatgccagggcgcactttccactggagttcactttcaattgcttctgtgcaataaaaccaagtgcttataaaatgaaaaaaaaaaaaaaaaaaaaaaaaa

SEQ ID NO: 4798 - protein, 1020 aa, Homo sapiens [sequence omitted]

SEQ ID NO: 4799 - DNA, 481 bp, Rattus norvegicus
  misc_feature (1)..(481): n=a, c, g or t
  ref <308>: DATABASE ACCESSION NUMBER: EMBL / AA818726
  ref <309>: DATABASE ENTRY DATE: 2000-03-03
tttttttttttttttttgaacgggatcccaccagtcccaggggcccaaactggacccaggtcctaggcaacagatttattggttcacagcccaaactgatggcaagggtaaagggctcagggacagacctggaggcccacagccctgcacccctaccaggatccctgaggccagcctgctgctaccaggagctgaagtccccaaagccccgactgggccttttcttggctgtggggatagctgtgctggtggatggttcttcctctgctgctcgtttcgtggctgcagggttgatgtacttgcccaccccctggcggtatgtctgggggccctggtttccaggctggggctggttcgtcttggccttggcctctggatccacttggtgctgtgtcttcttccgttcctgngcaatatgggcgtcggcctcctcatagggatccacaaacactgtggtggtacagatgcgcacttcttcctt

SEQ ID NO: 4800 - DNA, 2060 bp, Homo sapiens
  ref <308>: DATABASE ACCESSION NUMBER: EMBL / U37221
  ref <309>: DATABASE ENTRY DATE: 2000-03-04
aggagctctacaaggagttcaaaggggacgagattctggcagccaccatgaaggccccggagaagaagaaagtggacaagctgaatgctgcccactattccacagggaaggtcagcgcttccttcacctccaccgcgatggtcccggagaccacacatgaagcagctgccatcgacgaggatgtgctgcgctaccagtttgtgaagaagaagggctacgtgcggctgcacaccaacaagggcgacctcaacctggagctgcactgcgacctgacaccaaaaacctgcgaaaacttcatcaggctttgcaagaagcattattacgatggcaccatcttccacagatccatccggaactttgtgatccaagggggcgaccccacaggcacaggcacgggtggggagtcatactgggggaagcccttcaaagacgagttccggcccaacctctcgcacacgggccgcggcatcctcagcatggccaactccgggcccaacagcaacaggtctcaattcttcatcacgtttcgctcctgtgcctacctggacaagaagcataccatctttggacgggttgttgggggctttgacgtactgacagccatggagaatgtggagagtgaccccaaaactgaccgccctaaggaggagatccgcattgatgccactacagtgttcgtggacccctatgaggaggccgatgcccagattgcgcaggagcggaagacacagctcaaggtagccccggagaccaaagtgaagagcagccagccccaggcagggagccagggcccccagaccttccgccagggcgtgggcaagtacatcaacccagcagccacgaagcgagcagcagaggaagagccctcaaccagtgccactgtccccatgtccaagaagaagcccagtcggggttttggggacttcagctcctggtagcagcagcaacttgcaggctgtacctctgcccttccttttctcatcaatcactgatgctgaagctgcaggcctgagccctttgtctccctggatgctgggtggcgcctcatctgcatctctgcctcaccccatccactgccacaggctgcctgatgaccactagaggtatgtctgcccctcgtcaccctgctgcacaccaatctgtggcccttcatcatgctaagaacaagaactgcgccatggctggctccttctcttctccagcccatccctctgcagcctgtcatccctgtctgtgaccattggtcgggcccctgggctctagagtgacttttgacgccctccatccctcccgccaggcactgtcctccgcaaggcctggtgcagccctggcagtaactggcttgtaagaggctcagacaccaagctgggcctgcagaggaggggcacagtaggacacagtgactgcccaggtgtccacacacctgtaggcctctgagccagcgtccagggtacaggtgcgggtggtggggatgaaggcctgaccagggagtgagaagcaggtttggagaggaccctgtgcccaccctgacagacaccctggctggccctgactgactgtattctctggccacattcaagtcccccattggtgggggcagagaagtaggaccaggccatccttggctacagagctcgaagaccccaagacagccctctgctctcagcggcgccacagagagcctgggctcagccttctgcatcaggacatggcctcgtccactgagggcacgatttaaacatttgacatcagaagctttatttgtaaacctcacacagataaggaccaagggctggcggtgtggccagaggacaggggaagctgaaggccccgtgcttgagctcggcagtcctgctccttgcagtgaagccaccatgggtgaccgtccagcctcacccggtggcctgcacagtgagggaagggcttcagggccatctgctcccagggcaggggacaggccaccaaggacctttggcaaatgaaggtttacatttctgtagtttgtttgttttagagcttaatttgtagttttttagctattaaaaccatttgaattttta

SEQ ID NO: 4801 - protein, 520 aa, Homo sapiens
  ref <308>: DATABASE ACCESSION NUMBER: Refseq / NP_055152
  ref <309>: DATABASE ENTRY DATE: 2002-11-05
MGKRQHQKDKMYITCAEYTHFYGGKKPDLPQTNFRRLPFDHCSLSLQPFVYPVCTPDGIVFDLLNIVPWLKKYGTNPSNGEKLDGRSLIKLNFSKNSEGKYHCPVLFTVFTNNTHIVAVRTTGNVYAYEAVEQLNIKAKNFRDLLTDEPFSRQDIITLQDPTNLDKFNVSNFYHVKNNMKIIDPDEEKAKQDPSYYLKNTNAETRETLQELYKEFKGDEILAATMKAPEKKKVDKLNAAHYSTGKVSASFTSTAMVPETTHEAAAIDEDVLRYQFVKKKGYVRLHTNKGDLNLELHCDLTPKTCENFIRLCKKHYYDGTIFHRSIRNFVIQGGDPTGTGTGGESYWGKPFKDEFRPNLSHTGRGILSMANSGPNSNRSQFFITFRSCAYLDKKHTIFGRVVGGFDVLTAMENVESDPKTDRPKEEIRIDATTVFVDPYEEADAQIAQERKTQLKVAPETKVKSSQPQAGSQGPQTFRQGVGKYINPAATKRAAEEEPSTSATVPMSKKKPSRGFGDFSSW

SEQ ID NO: 4802 - DNA, 469 bp, Rattus norvegicus
  ref <308>: DATABASE ACCESSION NUMBER: EMBL / AA818843
  ref <309>: DATABASE ENTRY DATE: 2000-03-03
tttttttttttttttttcagataggaattatatggataatgtctagtagacagtgcgtacagaagtagggaacaccttactcattaattatacagataatgtcgagtagacagtgcgtactcattaattagataatgtcgagtagacagtgcgtacacaagttgggaaacctcgttcattaattttgtcacttatctagttcagtaaaatgctcacaaggaaaataaccacctaaggcagaaacttcattcacaacttcatgagagcagacagatcaatactgatcaacgtccctgcttcagactgaatcattcatcctcaaacaggtcattttgtgagatggacatccgtgttacgcttgaaaagctgaagcacaaatacaaccgtagagttggaatcttcaacagcctagacggaagtctgcttgtagtttttagtatccaaaacctttttgccacacatcgcacag

SEQ ID NO: 4803 - protein, 101 aa, Rattus norvegicus
  ref <308>: DATABASE ACCESSION NUMBER: Refseq / NP_063972
  ref <309>: DATABASE ENTRY DATE: 2002-11-05
MVCEKCEKKLGRVITPDTWKDGARNTTESGGRKLNENKALTSKKARFDPYGKNKFSTCRICKSSVHQPGSHYCQGCAYKKGICAMCGKKVLDTKNYKQTSV

SEQ ID NO: 4804 - DNA, 628 bp, Rattus norvegicus
  ref <308>: DATABASE ACCESSION NUMBER: EMBL / AA818858
  ref <309>: DATABASE ENTRY DATE: 2000-03-03
tttttttttttttttttaacacttctcatttagtttttattcataatcataaacttaactttgcaatcctgctagacttgaaggggaatgaggaaaatatggaacccaaagaacttcagtgagagcagagattacagggtattgcgagcagatggggtgggggtgctctcctgagctacagaaggaatggtttgatgggtaaaatgcccgcaagtcaaagaaattagagttgtccacagtcggagatggtgatcttcttgctggtcttgccattcctggacccaaaacgctccatggcttccacaatgctcatgccttctttcaccttcccaaagaccacatgcttgccatccagccactcagtcttggcagtgcagataaaaaactgggaaccatttgtgtttggtccagcatttgccatggacaagatgccaggacctgtatgcttcaggatgaagttctcatcctcaaatttctctccgtagatggacttgccaccagtgccattatggcgtgtgaagtcaccaccctggcacatgaatcctggaataattctgtgaaaggaggaacccttatagccaaatcctttctccccagtgctcagagcacgaaagttttctgctgtctt

SEQ ID NO: 4805 - protein, 163 aa, Rattus norvegicus; identical to SEQ ID NO: 4784
  ref <308>: DATABASE ACCESSION NUMBER: SWISS-Prot / P10111
  ref <309>: DATABASE ENTRY DATE: 2002-06-15

SEQ ID NO: 4806 - DNA, 382 bp, Homo sapiens; identical to SEQ ID NO: 4785
  ref <308>: DATABASE ACCESSION NUMBER: EMBL / AA071425
  ref <309>: DATABASE ENTRY DATE: 2000-03-03

SEQ ID NO: 4807 - protein, 164 aa, Homo sapiens; identical to SEQ ID NO: 1327
  ref <308>: DATABASE ACCESSION NUMBER: SWISS-Prot / P05092
  ref <309>: DATABASE ENTRY DATE: 2002-06-15

SEQ ID NO: 4808 - DNA, 561 bp, Rattus norvegicus
  ref <308>: DATABASE ACCESSION NUMBER: EMBL / AA819338
  ref <309>: DATABASE ENTRY DATE: 2000-03-03
tttttttttttttttttgaatgtactcatgtcaaatagtgactgtttattgaaagaagcaatggagggctgaggttgctgccctcaggcctggatgtggctctttgcactgaaagctaggtagtagatcactatgccaattgctgcagccagcaccccgtggagacccaaggcccattccaggtaccccgatggtccacactgactgtgaacagtggtgggatgatggaaacgtcttcattatttctttgagccttccttaggaggctgtaggactcttcatcgaagaatctgacctcataggtgcctgcatgggcgctcttgtgctccaggctccaggacacctgatatcgacccacatcctggccgcgggttacaggaaattgttttccactaacgtcggcataaagagccatattctggaccctgtttttgcaggtcagtgagatctccacgatgaatacagtctctgtagaaatgacggcatctgaagttgtatagtaagaaggggtgatctggggttccaggcaggcctctgagcagcaagataggccggacagca

SEQ ID NO: 4809 - protein, 173 aa, Rattus norvegicus
  ref <308>: DATABASE ACCESSION NUMBER: SWISS-Prot / Q07984
  ref <309>: DATABASE ENTRY DATE: 1996-10-01
MAAMASFGALALLLLSGLSCCSAEACLEPQITPSYYTTSDAVISTETVFIVEISLTCKNRVQNMALYADVSGKQFPVTRGQDVGRYQVSWSLEHKSAHAGTYEVRFFDEESYSLLRKAQRNNEDVSIIPPLFTVSVDHRGTWNGPWVSTEVLAAAIGIVIYYLAFSAKSHIQA

SEQ ID NO: 4810 - DNA, 642 bp, Homo sapiens
  ref <308>: DATABASE ACCESSION NUMBER: EMBL / Z69043
  ref <309>: DATABASE ENTRY DATE: 1997-10-02
tcgtgttcatgggagctcgttttcttttcctctaggcagagaagaggcgatggcggcgatggcatctctcggcgccctggcgctgctcctgctgtccagcctctcccgctgctcagccgaggcctgcctggagccccagatcaccccttcctactacaccacttctgacgctgtcatttccactgagaccgtcttcattgtggagatctccctgacatgcaagaacagggtccagaacatggctctctatgctgacgtcggtggaaaacaattccctgtcactcgaggccaggatgtggggcgttatcaggtgtcctggagcctggaccacaagagcgcccacgcaggcacctatgaggttagattcttcgacgaggagtcctacagcctcctcaggaaggctcagaggaataacgaggacatttccatcatcccgcctctgtttacagtcagcgtggaccatcggggcacttggaacgggccctgggtgtccactgaggtgctggctgcggcgatcggccttgtgatctactacttggccttcagtgcgaagagccacatccaggcctgagggcggcaccccagccctgcccttgcttccttcaataaacatcacaggacctgggactgcacaggaaaaaa

SEQ ID NO: 4811 - protein, 173 aa, Homo sapiens
  ref <308>: DATABASE ACCESSION NUMBER: SWISS-Prot / P51571
  ref <309>: DATABASE ENTRY DATE: 2002-06-15
MAAMASLGALALLLLSSLSRCSAEACLEPQITPSYYTTSDAVISTETVFIVEISLTCKNRVQNMALYADVGGKQFPVTRGQDVGRYQVSWSLDHKSAHAGTYEVRFFDEESYSLLRKAQRNNEDISIIPPLFTVSVDHRGTWNGPWVSTEVLAAAIGLVIYYLAFSAKSHIQA

SEQ ID NO: 4812 - DNA, 561 bp, Rattus norvegicus; identical to SEQ ID NO: 4808
  ref <308>: DATABASE ACCESSION NUMBER: EMBL / AA819338
  ref <309>: DATABASE ENTRY DATE: 2000-03-03

SEQ ID NO: 4813 - protein, 173 aa, Rattus norvegicus; identical to SEQ ID NO: 4809
  ref <308>: DATABASE ACCESSION NUMBER: SWISS-Prot / Q07984
  ref <309>: DATABASE ENTRY DATE: 1996-10-01

SEQ ID NO: 4814 - DNA, 642 bp, Homo sapiens; identical to SEQ ID NO: 4810
  ref <308>: DATABASE ACCESSION NUMBER: EMBL / Z69043
  ref <309>: DATABASE ENTRY DATE: 1997-10-02

SEQ ID NO: 4815 - protein, 173 aa, Homo sapiens; identical to SEQ ID NO: 4811
  ref <308>: DATABASE ACCESSION NUMBER: SWISS-Prot / P51571
  ref <309>: DATABASE ENTRY DATE: 2002-06-15

SEQ ID NO: 4816 - DNA, 561 bp, Rattus norvegicus; identical to SEQ ID NO: 4808
  ref <308>: DATABASE ACCESSION NUMBER: EMBL / AA819338
  ref <309>: DATABASE ENTRY DATE: 2000-03-03

SEQ ID NO: 4817 - protein, 173 aa, Rattus norvegicus; identical to SEQ ID NO: 4809
  ref <308>: DATABASE ACCESSION NUMBER: SWISS-Prot / Q07984
  ref <309>: DATABASE ENTRY DATE: 1996-10-01

SEQ ID NO: 4818 - DNA, 642 bp, Homo sapiens; identical to SEQ ID NO: 4810
  ref <308>: DATABASE ACCESSION NUMBER: EMBL / Z69043
  ref <309>: DATABASE ENTRY DATE: 1997-10-02

SEQ ID NO: 4819 - protein, 173 aa, Homo sapiens; identical to SEQ ID NO: 4811
  ref <308>: DATABASE ACCESSION NUMBER: SWISS-Prot / P51571
  ref <309>: DATABASE ENTRY DATE: 2002-06-15

SEQ ID NO: 4820 - DNA, 561 bp, Rattus norvegicus; identical to SEQ ID NO: 4808
  ref <308>: DATABASE ACCESSION NUMBER: EMBL / AA819338
  ref <309>: DATABASE ENTRY DATE: 2000-03-03

SEQ ID NO: 4821 - protein, 173 aa, Rattus norvegicus; identical to SEQ ID NO: 4809
  ref <308>: DATABASE ACCESSION NUMBER: SWISS-Prot / Q07984
  ref <309>: DATABASE ENTRY DATE: 1996-10-01

SEQ ID NO: 4822 - DNA, 642 bp, Homo sapiens; identical to SEQ ID NO: 4810
  ref <308>: DATABASE ACCESSION NUMBER: EMBL / Z69043
  ref <309>: DATABASE ENTRY DATE: 1997-10-02

SEQ ID NO: 4823 - protein, 173 aa, Homo sapiens; identical to SEQ ID NO: 4811
  ref <308>: DATABASE ACCESSION NUMBER: SWISS-Prot / P51571
  ref <309>: DATABASE ENTRY DATE: 2002-06-15

SEQ ID NO: 4824 - DNA, 541 bp, Rattus norvegicus
  ref <308>: DATABASE ACCESSION NUMBER: EMBL / AA819500
  ref <309>: DATABASE ENTRY DATE: 2000-03-03
tttttttttttttttttacaggtggtttggtcctttatttctattattcatacaaaagaacatcgatcttaacagttctgggtcagttgctgcatcacagttgcgcagaggctcatcagctgcaggtgctcatctgcaccatctgctaaacacttatccacctcagcaagtttttctgtaatgatggacttctgtttatcagacagattttcatcttctatgattgaatcatgaagttggttgacaagctgagtggctgcatgcccttcatctattaggttcttcagcacggcttctagtttgtcaaaagagccgctgtgacatgcagtgactattccctcaatggttgcagctggtattaccccagcaatgtctgtgatcacatcttccgagatttcctttccacctgttagtcgagtagcactttgaagaaatgtaattgctttccgtaaatctccttctgatattctaacaagataagctatttcctcatcgccaattttgacattttccttctcagcaatatccaataatcgcttct

SEQ ID NO: 4825 - protein, 364 aa, Rattus norvegicus
  ref <308>: DATABASE ACCESSION NUMBER: SWISS-Prot / AAH03335
  ref <309>: DATABASE ENTRY DATE: 2003-02-01
MQAFLKGTSVSAKAQLTKDRGTPATAGSSGETKKVKPVPWVEKYRPKCVDEVAFQDEVVAVLRKSLEGADLPNLLFYGPPGTGKTSTILAAARELFGPELFRLRVLELNASDERGIQVVREKVKNFAQLTVSGSRSDGKPCPPFKIVILDEADSMTSAAQAALRRTMEKESKTTRFCLICNYVSRIIEPLTSRCSKFRFKPLSDKIQQERLLDIAEKENVKIGNEEIAYLVKISEGDLRKAITFLQSATRLTGGKEVSEDVITDIAGVIPAATIDGIFTACHSGSFDKLEAVVKNLIDEGHAATQLVNQLHDAIIENENLSDKHKSIITEKLAEVDKCLADGADEHLQLMSLCATVMQQLTQNC

SEQ ID NO: 4826 - DNA, 1446 bp, Homo sapiens
  ref <308>: DATABASE ACCESSION NUMBER: EMBL / M87339
  ref <309>: DATABASE ENTRY DATE: 1999-07-02
ctgccatttaggacaagctggatgatgatggtttgatagctccaggggttcgtgtataggagatgatgaatctgcttcatccagaatcacaatcttaaaaggcgggaactgaggcgactgtggggacatcagtgatcgtaagtctcctgggcccgttattctcagattaggtgacggagctaagacttcgagaccatctcgtcctttttgtatcgcggaaacctgaggaacgagccggcggcggtgacctgcacgagaagccaggctaactgggtgaagtaccatgcaagcatttcttaaaggtacatccatcagtactaaacccccgctgaccaaggatcgaggagtagctgccagtgcgggaagtagcggagagaacaagaaagccaaacccgttccctgggtggaaaaatatcgcccaaaatgtgtggatgaagttgctttccaggaagaagtggttgcagtgctgaaaaaatctttagaaggagcagatcttcctaatctcttgttttacggaccacctggaactggaaaaacatccactattttggcagcagctagagaactctttgggcctgaacttttccgattaagagttcttgagttaaatgcatctgatgaacgtggaatacaagtagttcgagagaaagtgaaaaattttgctcaattaactgtgtcaggaagtcgctcagatgggaagccgtgtccgccttttaagattgtgattctggatgaagcagattctatgacctcagctgctcaggcagctttaagacgtaccatggagaaggagtcgaaaaccacccgattctgtcttatctgtaactatgtcagtcgaataattgaacccctgacctctagatgttcaaaattccgcttcaagcctctgtcagataaaattcaacagcagcgattactagacattgccaagaaggaaaatgtcaaaattagtgatgagggaatagcttatcttgttaaagtgtcagaaggagacttaagaaaagccattacatttcttcaaagcgctactcgattaacaggtggaaaggagatcacagagaaagtgattacagacattgctggggtaataccagctgagaaaattgatggagtatttgctgcctgtcagagtggctcttttgacaaactagaagctgtggtcaaggatttaatagatgagggtcatgcagcaactcagctcgtcaatcaactccatgatgtggttgtagaaaataacttatctgataaacagaagtctattatcacagaaaaacttgccgaagttgacaaatgcctagcagatggtgctgatgaacatttgcaactcatcagcctttgtgcaactgtgatgcagcagttatctcagaattgttaacgtgatatatctggatggggggttttgtaaataatgaagttgtaataaaaataaaatgaccaaaagcaccg

SEQ ID NO: 4827 - protein, 363 aa, Homo sapiens
  ref <308>: DATABASE ACCESSION NUMBER: SWISS-Prot / P35249
  ref <309>: DATABASE ENTRY DATE: 2002-06-15
MQAFLKGTSISTKPPLTKDRGVAASAGSSGENKKAKPVPWVEKYRPKCVDEVAFQEEVVAVLKKSLEGADLPNLLFYGPPGTGKTSTILAAARELFGPELFRLRVLELNASDERGIQVVREKVKNFAQLTVSGSRSDGKPCPPFKIVILDEADSMTSAAQAALRRTMEKESKTTRFCLICNYVSRIIEPLTSRCSKFRFKPLSDKIQQQRLLDIAKKENVKISDEGIAYLVKVSEGDLRKAITFLQSATRLTGGKEITEKVITDIAGVIPAEKIDGVFAACQSGSFDKLEAVVKDLIDEGHAATQLVNQLHDVVVENNLSDKQKSIITEKLAEVDKCLADGADEHLQLISLCATVMQQLSQNC

SEQ ID NO: 4828 - DNA, 541 bp, Rattus norvegicus; identical to SEQ ID NO: 4824
  ref <308>: DATABASE ACCESSION NUMBER: EMBL / AA819500
  ref <309>: DATABASE ENTRY DATE: 2000-03-03

SEQ ID NO: 4829 - protein, 364 aa, Rattus norvegicus; identical to SEQ ID NO: 4825
  ref <308>: DATABASE ACCESSION NUMBER: SWISS-Prot / AAH03335
  ref <309>: DATABASE ENTRY DATE: 2003-02-01

SEQ ID NO: 4830 - DNA, 1446 bp, Homo sapiens; identical to SEQ ID NO: 4826
  ref <308>: DATABASE ACCESSION NUMBER: EMBL / M87339
  ref <309>: DATABASE ENTRY DATE: 1999-07-02

SEQ ID NO: 4831 - protein, 363 aa, Homo sapiens; identical to SEQ ID NO: 4827
  ref <308>: DATABASE ACCESSION NUMBER: SWISS-Prot / P35249
  ref <309>: DATABASE ENTRY DATE: 2002-06-15

SEQ ID NO: 4832 - DNA, 541 bp, Rattus norvegicus; identical to SEQ ID NO: 4824
  ref <308>: DATABASE ACCESSION NUMBER: EMBL / AA819500
  ref <309>: DATABASE ENTRY DATE: 2000-03-03

SEQ ID NO: 4833 - protein, 364 aa, Rattus norvegicus; identical to SEQ ID NO: 4825
  ref <308>: DATABASE ACCESSION NUMBER: SWISS-Prot / AAH03335
  ref <309>: DATABASE ENTRY DATE: 2003-02-01

SEQ ID NO: 4834 - DNA, 1446 bp, Homo sapiens; identical to SEQ ID NO: 4826
  ref <308>: DATABASE ACCESSION NUMBER: EMBL / M87339
  ref <309>: DATABASE ENTRY DATE: 1999-07-02

SEQ ID NO: 4835 - protein, 363 aa, Homo sapiens; identical to SEQ ID NO: 4827
  ref <308>: DATABASE ACCESSION NUMBER: SWISS-Prot / P35249
  ref <309>: DATABASE ENTRY DATE: 2002-06-15

SEQ ID NO: 4836 - DNA, 541 bp, Rattus norvegicus; identical to SEQ ID NO: 4824
  ref <308>: DATABASE ACCESSION NUMBER: EMBL / AA819500
  ref <309>: DATABASE ENTRY DATE: 2000-03-03

SEQ ID NO: 4837 - protein, 364 aa, Rattus norvegicus; identical to SEQ ID NO: 4825
  ref <308>: DATABASE ACCESSION NUMBER: SWISS-Prot / AAH03335
  ref <309>: DATABASE ENTRY DATE: 2003-02-01

SEQ ID NO: 4838 - DNA, 1446 bp, Homo sapiens; identical to SEQ ID NO: 4826
  ref <308>: DATABASE ACCESSION NUMBER: EMBL / M87339
  ref <309>: DATABASE ENTRY DATE: 1999-07-02

SEQ ID NO: 4839 - protein, 363 aa, Homo sapiens; identical to SEQ ID NO: 4827
  ref <308>: DATABASE ACCESSION NUMBER: SWISS-Prot / P35249
  ref <309>: DATABASE ENTRY DATE: 2002-06-15

SEQ ID NO: 4840 - DNA, 565 bp, Rattus norvegicus
  ref <308>: DATABASE ACCESSION NUMBER: EMBL / AA848545
  ref <309>: DATABASE ENTRY DATE: 2000-03-03
aacagatgtaaactatttattgaatatttgccaccaaatattgttaaatacattatcttgcagcatatcgctttcaagttaaaatgtcagaaacaaacaccaatatttacatttcttgtaaggaatgttatataatgacacattaaggcgtaaattcttttggcttataattcttaaaagaatgataatagcaaaagtgatgcaaaatcttcagtgtgaggttatgattaagctacattttacaaaaatacggtgtaagatggcgataatcccattcaacatcctggattagacccctcaggagggctggtaatttatacagtcagactttaaatttacagataagtgcagtttaatactgccactgagaagtacatctctgaacatatacagcttcaggccacagttttgaaggtctgaagtatcaagttggtttgatgaattagccggttggcacttatgaacacatttattgccttgccatctttaaaatatgtcttcagagtgtcactgaaacttttggagtattttacaaattctttcttttggtttcaagtgccctgcg

SEQ ID NO: 4841 - protein, 212 aa, Rattus norvegicus
  ref <308>: DATABASE ACCESSION NUMBER: Refseq / NP_062719
  ref <309>: DATABASE ENTRY DATE: 2002-09-19
MRMTMEEMKNEAETTSMVSMPLYAVMYPVFNELERVNLSAAQTLRAAFIKAEKENPGLTQDIIMKILEKKSVEVNFTESLLRMAADDVEEYMIERPEPEFQDLNEKARALKQILSKIPDEINDRVRFLQTIKDIASAIKELLDTVNNVFKKYQYQNRRQLEHQKKEFVKYSKSFSDTLKTYFKDGKAINVFISANRLIHQTNLILQTFKTVA

SEQ ID NO: 4842 - DNA, 1466 bp, Homo sapiens
  ref <308>: DATABASE ACCESSION NUMBER: EMBL / BC002506
  ref <309>: DATABASE ENTRY DATE: 2001-07-13
ggcctgggtggcggtaaggtgtagctgttctgtcccagtccccgtagctctgcaccgagcagaagaggtctagggtcacgcaggggccatggctgaggcacttgggcttggttctggcaggcggagcggacggggctgagagcggggccctacgggcggaagaggagcactggaagaaggaagagacaaatgttggggtctacggattcagttccagtttaatgatgtggccctctaaggagataattttgccttaaacagaaagacttgaccctcttaggtgtcatacctaagatcagtgtgttttttgtgtccaattcttttatcaccaaaaaagagaagaaatattgcagtgaatgaagattcctctgcattttagcactgctttttcaactgtagttggcttttgaatgaggatgacaatggaagagatgaagaatgaagctgagaccacatccatggtttctatgcccctctatgcagtcatgtatcctgtgtttaatgagctagaacgagtaaatctgtctgcagcccagacactgagagccgctttcatcaaggctgaaaaagaaaatccaggtctcacacaagacatcattatgaaaattttagagaaaaaaagcgtggaagttaacttcacggagtcccttcttcgtatggcagctgatgatgtagaagagtatatgattgaacgaccagagccagaattccaagacctaaacgaaaaggcacgagcacttaaacaaattctcagtaagatcccagatgagatcaatgacagagtgaggtttctgcagacaatcaaggatatagctagtgcaataaaagaacttcttgatacagtgaataatgtcttcaagaaatatcaataccagaaccgcagggcacttgaacaccaaaagaaagaatttgtaaagtactccaaaagtttcagtgatactctgaaaacgtattttaaagatggcaaggcaataaatgtgttcgtaagtgccaaccgactaattcatcaaaccaacttaatacttcagaccttcaaaactgtggcctgaaagttgtatatgttaagagatgtacttctcagtggcagtattgaactgcctttatctgtaaattttaaagtttgactgtataaattatcagtccctcctgaagggatctaatccaggatgttgaatgggattattgccatcttacaccatatttttgtaaaatgtagcttaatcataatctcacactgaagattttgcatcacttttgctattatcattcttttaagaattataagccaaaagaatttacgccttaatgtgtcattatataacattccttaaaagaattgtaaatattggtgtttgtttctgacattttaacttgaaagcgatatgctgcaagataatgtatttaacaatatttggtggcaaatattcaataaatagtttacatctgttaaaaaaaaaaaaaaaaaa

SEQ ID NO: 4843 - protein, 212 aa, Homo sapiens
  ref <308>: DATABASE ACCESSION NUMBER: SWISS-Prot / AAH02506
  ref <309>: DATABASE ENTRY DATE: 2002-10-01
MRMTMEEMKNEAETTSMVSMPLYAVMYPVFNELERVNLSAAQTLRAAFIKAEKENPGLTQDIIMKILEKKSVEVNFTESLLRMAADDVEEYMIERPEPEFQDLNEKARALKQILSKIPDEINDRVRFLQTIKDIASAIKELLDTVNNVFKKYQYQNRRALEHQKKEFVKYSKSFSDTLKTYFKDGKAINVFVSANRLIHQTNLILQTFKTVA

SEQ ID NO: 4844 - DNA, 525 bp, Rattus norvegicus
  ref <308>: DATABASE ACCESSION NUMBER: EMBL / AA848831
  ref <309>: DATABASE ENTRY DATE: 2000-03-03
aaagaaaggcatactgcatacacacatcacatgcttgctttctaaacaaaacatgaaaatcattctaatttatagttttcctccatcgtggataaaaattcatctaagtcagtttagcagtcttctcgatcacaaacatgctgtcagacatatacatacttattaataaatgcaatgtgttgtttgttctttaaaggggaagcctgtgtgaattgtgtacttgatttggaagatttgtttttttttttctggcttaggccaaaccacataaaatcttttaagtctagttagtgaaggctacatacacggtctccccagagtccgtttctgaattccactgcaagacggtccccttctcttttccaaaggagaagatgggggctaccaagcaagttcatcctaaagtctcttgggtctagggacaaatactgccattggttagtgttaagtacaggagtgtcttcgtctcctctggcgccccaccttgccctggcaatgcgggtaaggtggggttcacagatccac

SEQ ID NO: 4845 - protein, 364 aa, Rattus norvegicus
  ref <308>: DATABASE ACCESSION NUMBER: SWISS-Prot / Q61130
  ref <309>: DATABASE ENTRY DATE: 2001-10-16
MAAASTSSPVISQPQFTAMNEQQCFYNESIAFFYNRSGKYLATEWNTVSKLVMGLGITVCVFIMLANLLVMVAIYVNRRFHFPIYYLMANLAAADFFAGLAYFYLMFNTGPNTRRLTVSTWLLRQGLIDTSLTASVANLLAIAIERHITVFRMQLHTRMSNRRVVVVIVVIWTMAIVMGAIPSVGWNCICDIDHCSNMAPLYSDSYLVFWAIFNLVTFVVMVVLYAHIFGYVRQRTMRMSRHSSGPRRNRDTMMSLLKTVVIVLGAFIVCWTPGLVLLLLDVCCPQCDVLAYEKFFLLLAEFNSAMNPIIYSYRDKEMSATFRQILCCQRNENPNGPTEGSDRSASSLNHTILAGVHSNDHSVV

SEQ ID NO: 4846 - DNA, 2687 bp, Homo sapiens
  ref <308>: DATABASE ACCESSION NUMBER: Refseq / NM_001401
  ref <309>: DATABASE ENTRY DATE: 2002-11-05
acggcgcgctgggctcacactgtcccgccgcggacgggctttgtggttgggggcgcgcgtgcgagtgccagtgagagtgtgggtgcgcgctgtgggccgcggcgcgggtgggtggccgtgcgttcttgcgagccggcctgcaggaggcgaggctcccctggcctcccgcacccagcggcggaccgagcccctggagggaagttgccgcagccgcccgggccgccggccctcctgtcccgcgccaggtacacagcttctcctagcatgacttcgatctgatcagcaaacaagaaaatttgtctcccgtagttctggggcgtgttcaccacctacaaccacagagctgtcatggctgccatctctacttccatccctgtaatttcacagccccagttcacagccatgaatgaaccacagtgcttctacaacgagtccattgccttcttttataaccgaagtggaaagcatcttgccacagaatggaacacagtcagcaagctggtgatgggacttggaatcactgtttgtatcttcatcatgttggccaacctattggtcatggtggcaatctatgtcaaccgccgcttccattttcctatttattacctaatggctaatctggctgctgcagacttctttgctgggttggcctacttctatctcatgttcaacacaggacccaatactcggagactgactgttagcacatggctcctgcgtcagggcctcattgacaccagcctgacggcatctgtggccaacttactggctattgcaatcgagaggcacattacggttttccgcatgcagctccacacacggatgagcaaccggcgggtagtggtggtcattgtggtcatctggactatggccatcgttatgggtgctatacccagtgtgggctggaactgtatctgtgatattgaaaattgttccaacatggcacccctctacagtgactcttacttagtcttctgggccattttcaacttggtgacctttgtggtaatggtggttctctatgctcacatctttggctatgttcgccagaggactatgagaatgtctcggcatagttctggaccccggcggaatcgggataccatgatgagtcttctgaagactgtggtcattgtgcttggggcctttatcatctgctggactcctggattggttttgttacttctagacgtgtgctgtccacagtgcgacgtgctggcctatgagaaattcttccttctccttgctgaattcaactctgccatgaaccccatcatttactcctaccgcgacaaagaaatgagcgccacctttaggcagatcctctgctgccagcgcagtgagaaccccaccggccccacagaaggctcagaccgctcggcttcctccctcaaccacaccatcttggctggagttcacagcaatgaccactctgtggtttagaacggaaactgagatgaggaaccagccgtcctctcttggaggataaacagcctccccctacccaattgccagggcaaggtggggtgtgagagaggagaaaagtcaactcatgtacttaaacactaaccaatgacagtatttgttcctggaccccacaagacttgatatatattgaaaattagcttatgtgacaaccctcatcttgatccccatcccttctgaaagtaggaagttggagctcttgcaatggaattcaagaacagactctggagtgtccatttagactacactaactagacttttaaaagattttgtgtggtttggtgcaagtcagaataaattctggctagttgaatccacaacttcatttatatacaggcttcccttttttatttttaaaggatacgtttcacttaataaacacgtttatgcctatcagcatgtttgtgatggatgagactatggactgcttttaaactaccataattccattttttcccttacataggaaaactgtaagttggaattatcttttgtttagaaagcatgcatgtaatgtatgtatgcagtatgccttacttaaaaagattaaaaggatactaatgttaaatcttctaggaaatagaacctagacttcaaagccagtatttgtttaggtcatgaagcaaacaatgctctaatcacaatattaactgtttaattaaaatgttgtaacaagtataaaacagggaatgtaagtttattaccaaagtgatatgtattccaaaaaagtcatagaagatgaagcactataatattgttcccatatatttaaaatacccaagtacattctaattaccagtatatcagaggaaaattttcgtagtctttgtaaaataatatactcatcatagaaaacttgaaaaatgcagaaatgtataaaaaagcaaaaatgattactgataatatcacaacccagaagtaaccacctttaaaaagcaacccccatgtatgcctatatgtgtattgtatactttttttacataattggagtcatactgtaaacagttttataagtagatctttttcattgcaaaattgccacattttcttatggcattaaaaattttacaaaaacataattttaatggctatattatattccatttaatggatgcaactcagtttatttaaccattcccatgttgttaactatttaggttgtttctaattttcattattataaagttgcagaaatttggtgt

SEQ ID NO: 4847 - protein, 364 aa, Homo sapiens [sequence omitted]

SEQ ID NO: 4848 - DNA, 581 bp, Rattus norvegicus
  ref <308>: DATABASE ACCESSION NUMBER: EMBL / AA849038
  ref <309>: DATABASE ENTRY DATE: 2000-03-03
ggaggcaattctgtaactttatttgacattcagcagttagttctcatccacattgaccgtctgtagatttttgaatgtggtaacaggcacgtaagttaccagtgtgtagagcttgtttggtgaatcctcatcctcattacgctttctggacaaacgtactcggatgcggtacggaacattccttattcctttggcccagacggctttattgagcctggtgtctatgcgcacatctggagttcccatctccttcatggcaaatttccgaatttctttgagtgcccgaggagcacgcttcttgaagcccactccatggatgcgtttgtgaatgttgatggtgtattctcgggtcaccacctcgttgatggcagaacggcccttcttcttctcgccacccttctttgcgggagccatctaaacgcagggatagggaggtttaagcaggcagtgggaaagtccgggctaaggtgacctcggcaggctgttctcccaccgccccggaccgcagagaaatcacaccgagcttgcccgccccgcgcccggagcggatggagccggatttcagagccacgaccccgcaa

SEQ ID NO: 4849 - protein, 125 aa, Rattus norvegicus [sequence omitted]

SEQ ID NO: 4850 - DNA, 806 bp, Homo sapiens
  ref <308>: DATABASE ACCESSION NUMBER: EMBL / BC001663
  ref <309>: DATABASE ENTRY DATE: 2001-07-13
ggcacgagggcagaatggctcccgcaaagaagggtggcgagaagaaaaagggccgttctgccatcaacgaagtggtaacccgagaatacaccatcaacattcacaagcgcatccatggagtgggcttcaagaagcgtgcacctcgggcactcaaagagattcggaaatttgccatgaaggagatgggaactccagatgtgcgcattgacaccaggctcaacaaagctgtctgggccaaaggaataaggtgctaaagttatctgtattcgaaggtgaacttttgcaatgacaccagcttcacttaaccctgcaagagcccatatcagaatgtgccataccgaatccgtgtgcggctgtccagaaaacgtaatgaggatgaagattcaccaaataagctatatactttggttacctatgtacctgttaccactttcaaaagtaagttctccatcccataaagccatttaaattcattagaaaaatgtccttacctcttaaaatgtgaattcatctgttaagctaggggtgacacacgtcattgtaccctttttaaattgttggtgtgggaagatgctaaagaatgcaaaactgatccatatctgggatgtaaaaaggttgtggaaaatagaatgtccagacccgtctacaaaaggtttttagagttgaaatatgaaatgtgatgtgggtatggaaattgactgttacttcctttacagatctacagacagtcaatgtggatgagaactaatcgctgatcgtcagatcaaataaagttataaaattgccttcaaaaaaaaaaaaaaaaa

SEQ ID NO: 4851 - protein, 125 aa, Homo sapiens [sequence omitted]

SEQ ID NO: 4852 - DNA, 413 bp, Rattus norvegicus
  ref <308>: DATABASE ACCESSION NUMBER: EMBL / AA849648
  ref <309>: DATABASE ENTRY DATE: 2000-03-03
aagtagaggaggggtactcggtatatgttctctagaccttttaggaaacatggagtcgttcctttggccacatacatgcgaatctacaagaagggtgatattgtagacatcaagggaatgggcactgttcaaaaaggaatgccccataagtgttaccatggcaaaaccggaagagtctacaatgtcacccagcatgccgtgggcatcattgtgaacaagcaagttaaaggcaagattctggccaagaggatcaatgtgcggattgagcacatcaagcactcaaagagcagagacagcttcctgaagcgggtgaaggagaacgatcagaagaaaaaggaatccaaagagaaaggcacctgggttcagctgaagcgccagactgcgccacccagagagacccactttgtgaggac

SEQ ID NO: 4853 - protein, 159 aa, Rattus norvegicus
  ref <308>: DATABASE ACCESSION NUMBER: SWISS-Prot / P20280
  ref <309>: DATABASE ENTRY DATE: 1995-02-01
TNTKGKRRGTRYMFSRPFRKHGVVPLATYMRIYKKGDIVDIKGMGTVQKGMPHKCYHGKTGRVYNVTQHAVGIIVNKQVKGKILAKRINVRIEHIKHSKSRDSFLKRVKENDQKKKEAKEKGTWVQLNGQPAPPREAHFVRTNGKEPELLEPIPYEFMA

SEQ ID NO: 4854 - DNA, 2458 bp, Homo sapiens
  misc_feature (1)..(2458): n=a, c, g or t
  ref <308>: DATABASE ACCESSION NUMBER: EMBL / X04790
  ref <309>: DATABASE ENTRY DATE: 1996-07-23
tgacccaataagggtggaaggctgagtcccgcagagccaataacgagagtccgagaggcgacggaggcggactctgtgaggaaacaagaagagaggcccaagatggagacggcggcggctgtagcggcgtgacaggagccccatggcacctgcccagccccacctcagcccatcttgacaaaatctaaggctccatggagccaccacggggcccccctgccaatggggccgagccatcccgggcagtgggcaccgtcaaagtatacctgcccaacaagcaacgcacggtggtgactgtccgggatggcatgagtgtctacgactctctagacaaggccctgaaggtgcggggtctaaatcaggactgctgtgtggtctaccgactcatcaagggacgaaagacggtcactgcctgggacacagccattgctcccctggatggcgaggagctcattgtcgaggtccttgaagatgtcccgctgaccatgcacaattttgtacggaagaccttcttcagcctggcgttctgtgacttctgccttaagtttctgttccatggcttccgttgccaaacctgtggctacaagttccaccagcattgttcctccaaggtccccacagtctgtgttgacatgagtaccaaccgccaacagttctaccacagtgtccaggatttgtccggaggctccagacagcatgaggctccctcgaaccgccccctgaatgagttgctaaccccccagggtcccagcccccgcacccagcactgtgacccggagcacttccccttccctgccccagccaatgcccccctacagcgcatccgctccacgtccactcccaacgtccatatggtcagcaccacggcccccatggactccaacctcatccagctcactggccagagtttcagcactgatgctgccggtagtagaggaggtagtgatggaaccccccgggggagccccagcccagccagcgtgtcctcggggaggaagtccccacattccaagtcaccagcagagcagcgcgagcggaagtccttggccgatgacaagaagaaagtgaagaacctggggtaccgggantcaggctattactgggaggtaccacccagtgaggtgcagctgctgaagaggatcgggacgggctcgtttggcaccgtgtttcgagggcggtggcatggcgatgtggccgtgaaggtgctcaaggtgtcccagcccacagctgagcaggcccaggctttcaagaatgagatgcaggtgctcaggaagacgcgacatgtcaacatcttgctgtttatgggcttcatgacccggccgggatttgccatcatcacacagtggtgtgagggctccagcctctaccatcacctgcatgtggccgacacacgcttcgacatggtccagctcatcgacgtggcccggcagactgcccagggcatggactacctccatgccaagaacatcatccaccgagatctcaagtctaacaacatcttcctacatgaggggctcacggtgaagatcggtgactttggcttggccacagtgaagactcgatggagcggggcccagcccttggagcagccctcaggatctgtgctgtggatggcagctgaggtgatccgtatgcaggacccgaacccctacagcttccagtcagacgtctatgcctacggggttgtgctctacgagcttatgactggctcactgccttacagccacattggctgccgtgaccagattatctttatggtgggccgtggctatctgtccccggacctcagcaaaatctccagcaactgccccaaggccatgcggcgcctgctgtctgactgcctcaagttccagcgggaggagcggcccctcttcccccagatcctggccacaattgagctgctgcaacggtcactccccaagattgagcggagtgcctcggaaccctccttgcaccgcacccaggccgatgagttgcctgcctgcctactcagcgcagcccgccttgtgccttaggccccgcccaagccaccagggagccaatctcagccctccacgccaaggagccttgcccaccagccaatcaatgttcgtctctgccctgatgctgcctcaggatcccccattccccaccctgggagatgagggggtccccatgtgcttttccagttcttctggaattgggggacccccgccaaagactgagccccctgtctcctccatcatttggtttcctcttggctttggggatacttctaaattttgggagctcctccatctccaatggctgggatttgtggcagggattccactcagaacctctctggaatttgtgcctgatgtgccttccactggattttggggttcccagcaccccatgtggattttggggggtcccttttgtgtctcccccgccattcaaggactcctctctttcttcaccaagaagcacagaattc

SEQ ID NO: 4855 - protein, 606 aa, Homo sapiens [sequence omitted]

SEQ ID NO: 4856 - DNA, 413 bp, Rattus norvegicus; identical to SEQ ID NO: 4852
  ref <308>: DATABASE ACCESSION NUMBER: EMBL / AA849648
  ref <309>: DATABASE ENTRY DATE: 2000-03-03

SEQ ID NO: 4857 - protein, 159 aa, Rattus norvegicus; identical to SEQ ID NO: 4853
  ref <308>: DATABASE ACCESSION NUMBER: SWISS-Prot / P20280
  ref <309>: DATABASE ENTRY DATE: 1995-02-01

SEQ ID NO: 4858 - DNA, 2458 bp, Homo sapiens; identical to SEQ ID NO: 4854
  misc_feature (1)..(2458): n=a, c, g or t
  ref <308>: DATABASE ACCESSION NUMBER: EMBL / X04790
  ref <309>: DATABASE ENTRY DATE: 1996-07-23

SEQ ID NO: 4859 - protein, 606 aa, Homo sapiens [sequence omitted]

SEQ ID NO: 4860 - DNA, 413 bp, Rattus norvegicus; identical to SEQ ID NO: 4852
  ref <308>: DATABASE ACCESSION NUMBER: EMBL / AA849648
  ref <309>: DATABASE ENTRY DATE: 2000-03-03

SEQ ID NO: 4861 - protein, 159 aa, Rattus norvegicus; identical to SEQ ID NO: 4853
  ref <308>: DATABASE ACCESSION NUMBER: SWISS-Prot / P20280
  ref <309>: DATABASE ENTRY DATE: 1995-02-01

SEQ ID NO: 4862 - DNA, 2458 bp, Homo sapiens; identical to SEQ ID NO: 4854
  misc_feature (1)..(2458): n=a, c, g or t
  ref <308>: DATABASE ACCESSION NUMBER: EMBL / X04790
  ref <309>: DATABASE ENTRY DATE: 1996-07-23

SEQ ID NO: 4863 - protein, 606 aa, Homo sapiens [sequence omitted]

SEQ ID NO: 4864 - DNA, 413 bp, Rattus norvegicus; identical to SEQ ID NO: 4852
  ref <308>: DATABASE ACCESSION NUMBER: EMBL / AA849648
  ref <309>: DATABASE ENTRY DATE: 2000-03-03

SEQ ID NO: 4865 - protein, 159 aa, Rattus norvegicus; identical to SEQ ID NO: 4853
  ref <308>: DATABASE ACCESSION NUMBER: SWISS-Prot / P20280
  ref <309>: DATABASE ENTRY DATE: 1995-02-01

SEQ ID NO: 4866 - DNA, 2458 bp, Homo sapiens; identical to SEQ ID NO: 4854
  misc_feature (1)..(2458): n=a, c, g or t
  ref <308>: DATABASE ACCESSION NUMBER: EMBL / X04790
  ref <309>: DATABASE ENTRY DATE: 1996-07-23

SEQ ID NO: 4867 - protein, 606 aa, Homo sapiens [sequence omitted]

SEQ ID NO: 4868 - DNA, 608 bp, Rattus norvegicus
  misc_feature (1)..(608): n=a, c, g or t
  ref <308>: DATABASE ACCESSION NUMBER: EMBL / AA849769
  ref <309>: DATABASE ENTRY DATE: 2000-03-03
acgtccaatgcacataaaacaggacaacaaaggggcttgaggattgcctaaaccacaaactaccattgattaaatctcaagatgcctcctaatcagttcactaaggaaacggacacccagaaataggagagctaggaccgcagtgactcgctctgcccgttagccacagatgacggcaggctgccatggcctgggatcccgtccttggaacttctcacaagaaatgaaaccaaatcaactctttggtaaaaaaaaaaaaaaagaagggaaatgtatttaaaattttggttaggtctccatggcgcttgaagtccgtaagtatttgcatcattcaaacccactcttcaggaaactccaagtttgagggacacagctaactaatggggcgactgtgtatgcaggtgactgtggggatcaaaaggagaagcagatttgctgcagatctgggatgatgacagtggtgacaagggtcaaagcagcagggttcctccccaccaagctccccctatttcctccagcagggccagctcagtgttccccctaacatcacatgcttttcctgttgtatcctcacagctgaccccagaaaggtttcattcanacctgcc

SEQ ID NO: 4869 - protein, 306 aa, Rattus norvegicus
  ref <308>: DATABASE ACCESSION NUMBER: SWISS-Prot / Q62632
  ref <309>: DATABASE ENTRY DATE: 2002-06-15
MWKRWLALALVTIALVHGEEEQRSKSKICANVFCGAGRECAVTEKGEPTCLCIEQCKPHKRPVCGSNGKTYLNHCELHRDACLTGSKIQVDYDGHCKEKKSVSPSASPVVCYQANRDELRRRIIQWLEAEIIPDGWFSKGSNYSEILDKYFKSFDNGDSHLDSSEFLKFVEQNETAVNITAYPNQENNKLLRGLCVDALIELSDENADWKLSFQEFLKCLNPSFNPPEKKCALEDETYADGAETEVDCNRCVCSCGHWVCTAMTCDGKNQKGVQTHTEEEMTRYAQELQKHQGTAEKTKKVNTKEI

SEQ ID NO: 4870 - DNA, 1987 bp, Homo sapiens
  ref <308>: DATABASE ACCESSION NUMBER: EMBL / U06863
  ref <309>: DATABASE ENTRY DATE: 1999-07-02
gggcggggcgatcggcggagctcccacctccgcttacagctcgctgccgccgtcctgccccgcgcccccaggagacctggaccagaccacgatgtggaaacgctggctcgcgctcgcgctcgcgctggtggcggtcgcctgggtccgcgccgaggaagagctaaggagcaaatccaagatctgtgccaatgtgttttgtggagccggccgggaatgtgcagtcacagagaaaggggaacccacctgtctctgcattgagcaatgcaaacctcacaagaggcctgtgtgtggcagtaatggcaagacctacctcaaccactgtgaactgcatcgagatgcctgcctcactggatccaaaatccaggttgattacgatggacactgcaaagagaagaaatccgtaagtccatctgccagcccagttgtttgctatcagtccaaccgtgatgagctccgacgtcgcatcatccagtggctggaagctgagatcattccagatggctggttctctaaaggcagcaactacagtgaaatcctagacaagtattttaagaactttgataatggtgattctcgcctggactccagtgaattcctgaagtttgtggaacagaatgaaactgccatcaatattacaacgtatccagaccaggagaacaacaagttgcttaggggactctgtgttgatgctctcattgaactgtctgatgaaaatgctgattggaaactcagcttccaagagtttctcaagtgcctcaacccatctttcaaccctcctgagaagaagtgtgccctggaggatgaaacgtatgcagatggagctgagaccgaggtggactgtaaccgctgtgtctgtgcctgtggaaattgggtctgtacagccatgacctgtgacggaaagaatcagaagggggcccagacccagacagaggaggagatgaccagatatgtccaggagctccaaaagcatcaggaaacagctgaaaagaccaagagagtgagcaccaaagagatctaatgaggaggcacagaccagtgtctggatcccagcatcttctccacttcagcgctgagttcagtatacacaagtgtctgctacagtcgccaaatcaccagtatttgcttatatagcaatgagttttattttgtttatttgttttgcaataaaggatatgaaggtggctggctaggaagggaagggccacagccttcatttctaggagtgctttaagagaaactgtaaatggtgctctggggctggaggctagtaaggaaactgcatcacgattgaaagaggaacagacccaaatctgaacctcttttgagtttactgcatctgtcagcaggctgcagggagtgcacacgatgccagagagaacttagcagggtgtccccggaggagaggtttgggaagctccacggagaggaacgctctctgcttccagcctctttccattgccgtcagcatgacagacctccagcatccacgcatctcttggtcccaataactgcctctagatacatagccatactgctagttaacccagtgtccctcagacttggatggagtttctgggagggtacacccaaatgatgcagatacttgtatactttgagccccttagcgacctaaccaaattttaaaaatactttttaccaaaggtgctatttctctgtaaaacactttttttggcaagttgactttattcttcaattattatcattatattattgttttttaatattttattttcttgactaggtattaagcttttgtaattatttttcagtagtcccaccacttcataggtggaaggagtttggggttcttcctggtgcaggggctgaaataacccagatgcccccaccctgccacatactagatgcagcccatagttggcccccctagcttccagcagtccactatctgccagaggagcaagggtgccttagaccgaagccaggggaagaagcatccttgctcccc

SEQ ID NO: 4871 - protein, 308 aa, Homo sapiens
  ref <308>: DATABASE ACCESSION NUMBER: SWISS-Prot / Q12841
  ref <309>: DATABASE ENTRY DATE: 2002-06-15
MWKRWLALALALVAVAWVRAEEELRSKSKICANVFCGAGRECAVTEKGEPTCLCIEQCKPHKRPVCGSNGKTYLNHCELHRDACLTGSKIQVDYDGHCKEKKSVSPSASPVVCYQSNRDELRRRIIQWLEAEIIPDGWFSKGSNYSEILDKYFKNFDNGDSRLDSSEFLKFVEQNETAINITTYPDQENNKLLRGLCVDALIELSDENADWKLSFQEFLKCLNPSFNPPEKKCALEDETYADGAETEVDCNRCVCACGNWVCTAMTCDGKNQKGAQTQTEEEMTRYVQELQKHQETAEKTKRVSTKEI

SEQ ID NO: 4872 - DNA, 608 bp, Rattus norvegicus; identical to SEQ ID NO: 4868
  misc_feature (1)..(608): n=a, c, g or t
  ref <308>: DATABASE ACCESSION NUMBER: EMBL / AA849769
  ref <309>: DATABASE ENTRY DATE: 2000-03-03

SEQ ID NO: 4873 - protein, 306 aa, Rattus norvegicus; identical to SEQ ID NO: 4869
  ref <308>: DATABASE ACCESSION NUMBER: SWISS-Prot / Q62632
  ref <309>: DATABASE ENTRY DATE: 2002-06-15

SEQ ID NO: 4874 - DNA, 1987 bp, Homo sapiens; identical to SEQ ID NO: 4870
  ref <308>: DATABASE ACCESSION NUMBER: EMBL / U06863
  ref <309>: DATABASE ENTRY DATE: 1999-07-02

SEQ ID NO: 4875 - protein, 308 aa, Homo sapiens; identical to SEQ ID NO: 4871
  ref <308>: DATABASE ACCESSION NUMBER: SWISS-Prot / Q12841
  ref <309>: DATABASE ENTRY DATE: 2002-06-15

SEQ ID NO: 4876 - DNA, 608 bp, Rattus norvegicus; identical to SEQ ID NO: 4868
  misc_feature (1)..(608): n=a, c, g or t
  ref <308>: DATABASE ACCESSION NUMBER: EMBL / AA849769
  ref <309>: DATABASE ENTRY DATE: 2000-03-03

SEQ ID NO: 4877 - protein, 306 aa, Rattus norvegicus; identical to SEQ ID NO: 4869
  ref <308>: DATABASE ACCESSION NUMBER: SWISS-Prot / Q62632
  ref <309>: DATABASE ENTRY DATE: 2002-06-15

SEQ ID NO: 4878 - DNA, 1987 bp, Homo sapiens; identical to SEQ ID NO: 4870
  ref <308>: DATABASE ACCESSION NUMBER: EMBL / U06863
  ref <309>: DATABASE ENTRY DATE: 1999-07-02

SEQ ID NO: 4879 - protein, 308 aa, Homo sapiens; identical to SEQ ID NO: 4871
  ref <308>: DATABASE ACCESSION NUMBER: SWISS-Prot / Q12841
  ref <309>: DATABASE ENTRY DATE: 2002-06-15

SEQ ID NO: 4880 - DNA, 608 bp, Rattus norvegicus; identical to SEQ ID NO: 4868
  misc_feature (1)..(608): n=a, c, g or t
  ref <308>: DATABASE ACCESSION NUMBER: EMBL / AA849769
  ref <309>: DATABASE ENTRY DATE: 2000-03-03

SEQ ID NO: 4881 - protein, 306 aa, Rattus norvegicus; identical to SEQ ID NO: 4869
  ref <308>: DATABASE ACCESSION NUMBER: SWISS-Prot / Q62632
  ref <309>: DATABASE ENTRY DATE: 2002-06-15

SEQ ID NO: 4882 - DNA, 1987 bp, Homo sapiens; identical to SEQ ID NO: 4870
  ref <308>: DATABASE ACCESSION NUMBER: EMBL / U06863
  ref <309>: DATABASE ENTRY DATE: 1999-07-02

SEQ ID NO: 4883 - protein, 308 aa, Homo sapiens; identical to SEQ ID NO: 4871
  ref <308>: DATABASE ACCESSION NUMBER: SWISS-Prot / Q12841
  ref <309>: DATABASE ENTRY DATE: 2002-06-15

SEQ ID NO: 4884 - DNA, 474 bp, Rattus norvegicus
  ref <308>: DATABASE ACCESSION NUMBER: EMBL / AA850138
  ref <309>: DATABASE ENTRY DATE: 2000-03-03
tgggcaagggagaagggataaggtagctagtagagagaagagaccctgctctgggtctacagctgcagggttcccaggctaaggagaaacctgggctcctagacacattctgcaggagacagactcttctccacagtgttcccttcatgtgtaacttggcaggtaaaactgttgcgagatctccactgttctgctgtcaaacgtaagaagctgctggcgatgtatttgttgccctgtttggtgggatttgcagtgtccacaccctgggagataggtgcaccatttgccttccaggccacttccacatcactcgggtagaaatcagaaatcagacacaccagtgtggctttgtttccctggagctcctcagttgaaggtggaaatactgtgagtgtgggagtggacttgggctgacctaggacagtgagcttggttccaccgccgaaaatataccacagtgactgagactcaatc

SEQ ID NO: 4885 - protein, 104 aa, Rattus norvegicus
  ref <308>: DATABASE ACCESSION NUMBER: PIR / B27390
  ref <309>: DATABASE ENTRY DATE: 1999-07-23
QPKSTPTLTVFPPSTEELQGNKATLVCLISDFYPSDVEVAWKANGAPISQGVDTANPTKQGNKYIASSFLRLTAEQWRSRNSFTCQVTHEGNTVEKSLSPAECV

SEQ ID NO: 4886 - DNA, 1053 bp, Homo sapiens
  ref <308>: DATABASE ACCESSION NUMBER: EMBL / AJ318022
  ref <309>: DATABASE ENTRY DATE: 2001-08-12
agccggctgtggtgggaggcagttgagccctggattgtgaccgcttcagggcagttggtagatgcccctctgggagagatccccaggggtgacagccatggaccctggaagggcctgggctagggacagggaccagagccagtccagggagaggacagagccaatggactggggtgtactgtaacagccctgctggcgagagggaccagggcaccgtcctccagggagcccatgctgcaagtcgggccagaggtgcccctgaacctgaaggccaatgagacccaagacaggccaagtgggttgtgagacccctgaggagctgggccctggtcccaggcagcgctggcccctgctgctgctgggtctggccatggtcgcccatggcctgctgcgcccaatggttgcaccgcaaagcggcgacccagaccctggagcctcagttggaagcagccgatccagcctgcggagcctgtggggcaggctcctgctccagcccagcccccagagagcagaccccaggtgctggccccgggggttttggtctgagcctcagtcactgtgttatgtcttcggaactgggaccaaggtcaccgtcctaggtcagcccaaggccaaccccactgtcactctgttcccgccctcctctgaggagctccaagccaacaaggccacactagtgtgtctgatcagtgacttctacccgggagctgtgacagtggcctggaaggcagatggcagccccgtcaaggcgggagtggagaccaccaaaccctccaaacagagcaacaacaagtacgcggccagcagctacctgagcctgacgcccgagcagtggaagtcccacagaagctacagctgccaggtcacgcatgaagggagcaccgtggagaagacagtggcccctacagaatgttcataggttcccaactctaaccccacccacgggagcctggagctgcaggatcccaggggaggggacctctctctccccatcccaagtcatccagcccttctccctgcactcatgaaaccccaataaatatcctcattgac

SEQ ID NO: 4887 - protein, 105 aa, Homo sapiens; identical to SEQ ID NO: 2954
  ref <308>: DATABASE ACCESSION NUMBER: SWISS-Prot / P01842
  ref <309>: DATABASE ENTRY DATE: 2002-06-15

SEQ ID NO: 4888 - DNA, 477 bp, Rattus norvegicus
  ref <308>: DATABASE ACCESSION NUMBER: EMBL / AA850734
  ref <309>: DATABASE ENTRY DATE: 2000-03-03
gggtgggtgtgtctacaggaatcccagaaacaaaactccctaatcttccgggcttggcgatttagcagcaaatataagaaaatggcgaatccagttccacgagggaccaccgtgcttggtcacctgcccgggaatgcgtctgccggagtctcgccctccggacccaaagtgctcctcgaagagtctcctctcccttcatgtcaggctttctggattaaggactgttctgtcgacggtgacgatggtggtgtggtggtgacatggttaatcggtctttccggtgagaggtctagttcccgaaaccctgagggaggctccttcctgcagcctggctcaccgccttggcttgtcacatctgcaagtacgttcgtttaactcaagctgcctcgccttgcaacgcgagtctgtgtttttgcaggaacatttacacgtctgcggatcttggacaaacaaatgctttctccgctctgaacaagg

SEQ ID NO: 4889 - protein, 214 aa, Rattus norvegicus
  ref <308>: DATABASE ACCESSION NUMBER: SWISS-Prot / P16612
  ref <309>: DATABASE ENTRY DATE: 2002-06-15
MNFLLSWVHWTLALLLYLHHAKWSQAAPTTEGEQKAHEVVKFMDVYQRSYCRPIETLVDIFQEYPDEIEYIFKPSCVPLMRCAGCCNDEALECVPTSESNVTMQIMRIKPHQSQHIGEMSFLQHSRCECRPKKDRTKPEKKSVRGKGKGQKRKRKKSRFKSWSVHCEPCSERRKHLFVQDPQTCKCSCKNTDSRCKARQLELNERTCRCDKPRR

SEQ ID NO: 4890 - DNA, 550 bp, Rattus norvegicus
  ref <308>: DATABASE ACCESSION NUMBER: EMBL / AA850781
  ref <309>: DATABASE ENTRY DATE: 2000-03-03
ttttttttaacacttacaagcaattttattgagacagagccatacctgctggtttatacacataattgtaacaggttacatccttctcaaccttctgagtgctacaaccttttagtgccattcatgaccccaaacataaatttattcttttgctactttggaactgtgattttgctactgttctgaaccgtaagtaaaaatatctgtgttttccagtggacccacagattgaggactactgggctagaaggtcctcttagaatctaaacattggccagataccactcttggtgaaaatgcagacagaaacactttataatgagattcactgtaattcgtaactttattaaggaaccgatgtcagcactgctatgtaaacaatgacaaagatcaagggaaacacatcagggattatgtagacagtaatatacattgtcctttatataatcaatgtataatagttaaggaaactttaatccttattaagcaaacatttttgcatacactgccttctctttatctttctgtgcctttatcatttgtttgactt

SEQ ID NO: 4891 - DNA, 1812 bp, Homo sapiens
  misc_feature (1)..(1812): n=a, c, g or t
  ref <308>: DATABASE ACCESSION NUMBER: EMBL / L11667
  ref <309>: DATABASE ENTRY DATE: 2000-03-04
cgtcgctgccggtctcccggagaganctctggagtttgggcggcccgggcggccactaggtactctgatattccgtactaaacacgtctgcaagtcaagatgtcgcacccgtccccccaagccaagccctccaaccccagtaaccctcgagtcttctttgacgtggacatcggaggggagcgagttggtcgaattgtcttagaattgtttgcagatatcgtacccaaaactgcggaaaattttcgtgcactgtgtacaggagaaaaaggcattggacacacgactgggaaacctctccatttcaaaggatgcccttttcatcgaattattaagaaatttatgattcagggtggagacttctcaaatcagaatgggacaggtggagaaagtatttatggtgaaaaatttgaagatgaaaatttccattacaagcatgatcgggagggtttactgagcatggcaaatgcaggccgcaacacaaacggttctcagttttttatcacaacagttccaactcctcatttggatgggaaacatgtggtgtttggccaagtaattaaaggaataggagtggcaaggatattggaaaatgtggaagtgaaaggtgaaaaacctgctaaattgtgcgttattgcagaatgtggagaattgaaggaaggagatgacgggggaatattcccaaaagatggctctggcgacagtcatccagatttccctgaggatgcggatatagatttaaaagatgtagataaaattttattaataacagaagacttaaaaaacattggaaatacttttttcaaatcccagaactgggagatggctattaaaaaatatgcagaagttttaagatacgtggacagttcaaaggctgttattgagacagcagatagagccaagctgcaacctatagctttaagctgtgtactgaatattggtgcttgtaaactgaagatgtcaaattggcagggagcaattgacagttgtttagaggctcttgaactagacccatcaaataccaaagcattgtaccgcagagctcaaggatggcaaggattaaaagaatatgatcaagcattggctgatcttaagaaagctcaggggatagcaccagaagataaagctatccaggcagaattgctgaaagtcaaacaaaagataaaggcacagaaagataaagagaaggcagtatatgcaaaaatgtttgcttagaaaggattcagttttgcttattgtgtgttgattgtataaatgcaataagaaaatgtaaaggtttttgtctatgaatatgatccctaatgtgtttcttttgacaccttagttccttactgtttacagtttaggagtactgataggggttcatgcttaataaacatgtcacaatacagtaagtaaagtggttttgtttgtttctttgagatggagtcttgctctgtcacccaggctggagtgcggtggcgcaatctcggctcactgcatcctctgcctcccgggttcaagcaattctcctgcctcagcttcccaagtagctgggattacaggcacgtgccaccacgcccagactaatttttgtatttttagtagagatggggtttcaccatattggtcacgtcacgttggtcttgaactcctgaccttgtgatccaccccgccttggcctcccaaagtgctgggattacaggtgtgagccaccgtgcccggccaagtaaaatgttttttaaaatggttatgtgcattattcataaaaaataatggtgtccagtctttttaaacttgtaaagacacatcttattgaataaagagatgagagcg

SEQ ID NO: 4892 - protein, 370 aa, Homo sapiens
  ref <308>: DATABASE ACCESSION NUMBER: SWISS-Prot / Q08752
  ref <309>: DATABASE ENTRY DATE: 2002-06-15
MSHPSPQAKPSNPSNPRVFFDVDIGGERVGRIVLELFADIVPKTAENFRALCTGEKGIGHTTGKPLHFKGCPFHRIIKKFMIQGGDFSNQNGTGGESIYGEKFEDENFHYKHDREGLLSMANAGRNTNGSQFFITTVPTPHLDGKHVVFGQVIKGIGVARILENVEVKGEKPAKLCVIAECGELKEGDDGGIFPKDGSGDSHPDFPEDADIDLKDVDKILLITEDLKNIGNTFFKSQNWEMAIKKYAEVLRYVDSSKAVIETADRAKLQPIALSCVLNIGACKLKMSNWQGAIDSCLEALELDPSNTKALYRRAQGWQGLKEYDQALADLKKAQGIAPEDKAIQAELLKVKQKIKAQKDKEKAVYAKMFA

SEQ ID NO: 4893 - DNA, 619 bp, Rattus norvegicus
  ref <308>: DATABASE ACCESSION NUMBER: EMBL / AA850940
  ref <309>: DATABASE ENTRY DATE: 2000-03-03
ttttttttttttttttttttttttcactgcatctttgatttattcaaataggctgtatctttttgctctctggaatttaacaaattttaatagtttatgcagcagactttttttcttctgtggtaggtttcttctctgctggtttcttggtaaccacctttttccctgcaggcttcttcagcttcttggcatccacaggcttctttccttttttgcctactgcaggttttttgtctccagcccccttctctggaacaatcttctccgatttggctgccagtgcagcagctgcggcttccagctttttcactcgaagtttgtgattcctagcctggcggagaatggtgttcctacgcatagtctttgcgtaagggttcagcttcaacatgatcctcagattcttcagtggattcttcttcaagactctgcgctgaatcttcttgcgtggtgctcgaagggctctttggatctctgggcttttcaagattctgctaaggtctgtgttcatcatcttgtgcatggggaggttgtagttactcttgagggaagcagccttacgccaagtgccatacaactcatccaacttccggaaagcactttcagtccaaatgcagaaacg

SEQ ID NO: 4894 - protein, 421 aa, Rattus norvegicus
  ref <308>: DATABASE ACCESSION NUMBER: SWISS-Prot / P50878
  ref <309>: DATABASE ENTRY DATE: 2002-06-15
MACARPLISVYSEKGESSGKNVTLPAVFKAPIRPDIVNFVHTNLRKNNRQPYAVSELAGHQTSAESWGTGRAVARIPRVRGGGTHRSGQGAFGNMCRGGRMFAPTKTWRRWHRRVNTTQKRYAICSALAASALPALVMSKGHCVEEVPELPLVVEDKVESYKKTKEAVQLLKKLKAWNDIKKVYASQRMRAGKGKMRNRRRIQRRGPCIIYNEDNGIIKAFRNIPGITLLNVSKLNILKLAPGGHVGRFCIWTESAFRKLDELYGTWRKAASLKSNYNLPMHKMMNTDLSRILKSPEIQRALRAPRKKIHRRVLKKNPLKNLRIMLKLNPYAKTMRRNTILRQARNHKLRVKKLEAAAAALAAKSEKIVPEKGAGDKKPAVGKKGKKPVDAKKLKKPAGKKVVTKKPAEKKPTTEEKKSAA

SEQ ID NO: 4895 - DNA, 1379 bp, Homo sapiens
  ref <308>: DATABASE ACCESSION NUMBER: EMBL / L20868
  ref <309>: DATABASE ENTRY DATE: 2000-03-04
tctcctctctccgccatggctgttgctcgcccactgatatccgtgtactccgaaaagggggagtcatctggcaaaaatgtcactttgcctgctgtcaaggctcctattcgaccagatatggtgaactttgttcacaccaaccttcgcgaaaaacaagaacagccctatgctgtcagtgaattagcaggtcatcagactagagctgagtcttggggtactggcagagctgtggctcgaattcccagagttcgaggtggtgggactcaccgctctggccagggtgcttttggaaacatgtgtcgtggaggccgaatgtttgcaccaaccaaaacctggcgccgttggcatcgtagagtgaacacaacccaaaaacgatacgccatctgttctgccctggctgcctcagccctaccagcactggtcatgtctaaaggtcatcgtattgaggagttccctgaacttcctttggtagttgaagataaagttgaaggctacaagaagaccaaggaagctgttttgctccttaagaaacttaaagcctggaatgatatcaaaaaggtctatgcctctcagcgaatgagagctggcaaaggcaaaatgagaaaccgtcgtatccagcgcaggggcccgtgcatcatctataatgaggataatggtatcatcaaggccttcagaaacatccctggaattactctgcttaatgtaagcaagctgaacattttgaagcttgctcctggtgggcatgtgggacgtttctgcatttggactgaaagtgctttccggaagttagatgaattgtacggcacttggcgtaaagccgcttccctcaagagtaactacaatcttcccatgcacaagatgattaatacagatcttagcagaatcttgaaaagcccagagatccaaagagcccttcgagcaccacgcaagaagatccatcgcagagtcctaaagaagaacccactgaaaaacttgagaatcatgttgaagctaaacccatatgcaaagaccatgcgccggacaccattcttcgccaggccaggaatcacaagctccgggtggataaggcagctgctgcagcagcgggcactacaagccaaatcagatgagaaggcggcggttgcaggcaagaagcctgtggtaggtaagaaaggaaagaaggctgctgttggtgttaagaagcagaagaagcctctggtgggaaaaaaggcagcagctaccaagaaaccagcccctgaaagaagcctgcagagaagaaacctaactacagaggagaagaagcctgctgcataaactcttaaatttgattattccataaaggtcaaatcattttggacagcttcttttgaataaagacctgttatacaggcagtgagaaa

SEQ ID NO: 4896 - protein, 427 aa, Homo sapiens [sequence omitted]

SEQ ID NO: 4897 - DNA, 618 bp, Rattus norvegicus
  ref <308>: DATABASE ACCESSION NUMBER: EMBL / AA851381
  ref <309>: DATABASE ENTRY DATE: 2000-03-03
cgcgcggtcacgtgggtgtgttgttgggggagggcccgcgcgttcggttccgggcggttgagcgagctagagaacgagcgagcaagaggcagccgcgcccgccgccgcgctctgtatgccgcgttcccccggcgcacccgccgccgatagtctgagccggaggagtcgccgccgctgcggttgatgtggttgggccggggctgaccaggctaccaagatgcctcagtccaagtcccggaagatcgccatcctgggctatcggtctgtgggaaagtcctcattgacaattcagtttgttgaaggtcaatttgttgattcctacgatccaaccatagaaaacacattcaccaagctgatcacagtaaatgggcaagagtatcatcttcagcttgtagacacagcagggcaggatgaatattccatttttcctcagacatactccatagatattaatggttatattcttgtgtattctgttacatcaatcaaaagctttgaagtaattaaagttatccacggcaagctgttggacatggtggggaaagtgcagataccgattatgttagtcggaaataaaaaagacctgcatatggaaagggtgatcagttatgaagaagg

SEQ ID NO: 4898 - protein, 184 aa, Rattus norvegicus
  ref <308>: DATABASE ACCESSION NUMBER: SWISS-Prot / Q62639
  ref <309>: DATABASE ENTRY DATE: 2001-10-16
MPQSKSRKIAILGYRSVGKSSLTIQFVEGQFVDSYDPTIENTFTKLITVNGQEYHLQLVDTAGQDEYSIFPQTYSIDINGYILVYSVTSIKSFEVIKVIHGKLLDMVGKVQIPIMLVGNKKDLHMERVISYEEGKALAESWNAAFLESSAKENQTAVDVFRRIILEAEKIDGAASQGKSSCSVM

SEQ ID NO: 4899 - DNA, 241 bp, Homo sapiens
  ref <308>: DATABASE ACCESSION NUMBER: EMBL / AW020414
  ref <309>: DATABASE ENTRY DATE: 1999-09-14
gcacgagtttatatattgtatttcttaatattatgaccaagaattttatcggcattaatttttcagtgtagtttgttgtttaaaataatgtaatcatcaaaatgatgcatattgttacactactattaactaggcttcagtatatcagtgtttatttcattgtgttaaatgtatacttgtaaataaaatagctgcaaacctcaaaaaaaaaaaaaaaaaaaaaaaaaaaaaaaaaaaaaaa

SEQ ID NO: 4900 - protein, 184 aa, Homo sapiens
  ref <308>: DATABASE ACCESSION NUMBER: SWISS-Prot / Q15382
  ref <309>: DATABASE ENTRY DATE: 2002-06-15
MPQSKSRKIAILGYRSVGKSSLTIQFVEGQFVDSYDPTIENTFTKLITVNGQEYHLQLVDTAGQDEYSIFPQTYSIDINGYILVYSVTSIKSFEVIKVIHGKLLDMVGKVQIPIMLVGNKKDLHMERVISYEEGKALAESWNAAFLESSAKENQTAVDVFRRIILEAEKMDGAASQGKSSCSVM

SEQ ID NO: 4901 - DNA, 393 bp, Rattus norvegicus
  ref <308>: DATABASE ACCESSION NUMBER: EMBL / AA851403
  ref <309>: DATABASE ENTRY DATE: 2000-03-03
aaggtgaaacctctaggaacaaggagtcccattcagagggcacgagagcccacggagcctcctcagatctcatagtgaaccacgggctcaggttctttggaaggatcaccgcctcgctccaggtacagattattgtacgggtactgcttcggaccctaaggaaggacacaagagaagagaaggtgcacgtgtcagcaagaacaatagccagccagtcagccaatacctgactacaccctacttgagttcacaatcacgcagagcaaaagggggtacagtagcctctggtcagactccgaggagctaaactggcagaaggatgctcttgccctgctcaacccacagcagagagcgcctcagttatgagagaagtagtgtctgccggcaagtgag

SEQ ID NO: 4902 - protein, 186 aa, Rattus norvegicus
  ref <308>: DATABASE ACCESSION NUMBER: Refseq / NP_080337
  ref <309>: DATABASE ENTRY DATE: 2002-01-07
MAAARAAALGVRWLQRTTRGVVPLEARRAFHMTKDMLPGSYPRTPEERAAAAKKYNMRVEDYEPYPDDGMGYGDYPMLPNRSQHERDPWYQWDHSELRMNWGEPIHWDLDMYIRNRVDTSPTPVSWDVMCKHLFGFVAFMVFMFWVGHVFPSYQPVGPKQYPYNNLYLERGGDPTKEPEPVVHYDI

SEQ ID NO: 4903 - DNA, 904 bp, Homo sapiens
  ref <308>: DATABASE ACCESSION NUMBER: EMBL / BI488555
  ref <309>: DATABASE ENTRY DATE: 2001-08-29
tgaagatggcggtggccaggccggggtcttgggagtccagtggctgcaaagggcatcccggaacgtgatgccgctgggcgcacggacagcctcccacatgaccaaggacatgttcccggggccctatcctaggaccccagaagaacgggccgccgccgccaagaagtataatatgcgtgtggaagactacgaaccataccttccaggggacccaggtgccccatgctctagtgtcctcccaaccactggcatcttgactcctcacccaggacctcaagattcctggaaagaagccccagcccccaggggaaacctccagaggaacaagctgccagagacatttatgcccccagcaccaattactgctccagttatgagcctcacccctgagctacaagggattcttccctcacagccccctgtctccagtgtgagtcatgctcccccaggagttccaggagaactcagcctgcagcagcttcagcacctgccacctgagaagatggaaaggaaggagctgcccccagagcatcagtccttgaagagcagctttgaggcgcttctccaacgctgctccctgtctgcaactgacttaaagacaaaaaggaagctggaagaggcagcccagcgtctggagtatctatatgagaagctctgtgaggggacactctcacctcatgtcgtggctgggctgcatgaggttgcccgatgtgtggatgcaggaagctttgagcagggccttgccagtgccatgcccaggtggcgggctgtagcagcttcagccaaggtgtccagcttcatgcctatcctgaaggtctgtcctcatcatcgtcataagctgctggtctaaaccaggcagcctctcttgcctagaggggccacttctgtggttcttaattctccg

SEQ ID NO: 4904 - DNA, 393 bp, Rattus norvegicus; identical to SEQ ID NO: 4901
  ref <308>: DATABASE ACCESSION NUMBER: EMBL / AA851403
  ref <309>: DATABASE ENTRY DATE: 2000-03-03

SEQ ID NO: 4905 - protein, 186 aa, Rattus norvegicus; identical to SEQ ID NO: 4902
  ref <308>: DATABASE ACCESSION NUMBER: Refseq / NP_080337
  ref <309>: DATABASE ENTRY DATE: 2002-01-07

SEQ ID NO: 4906 - DNA, 904 bp, Homo sapiens; identical to SEQ ID NO: 4903
  ref <308>: DATABASE ACCESSION NUMBER: EMBL / BI488555
  ref <309>: DATABASE ENTRY DATE: 2001-08-29

SEQ ID NO: 4907 - DNA, 393 bp, Rattus norvegicus; identical to SEQ ID NO: 4901
  ref <308>: DATABASE ACCESSION NUMBER: EMBL / AA851403
  ref <309>: DATABASE ENTRY DATE: 2000-03-03

SEQ ID NO: 4908 - protein, 186 aa, Rattus norvegicus; identical to SEQ ID NO: 4902
  ref <308>: DATABASE ACCESSION NUMBER: Refseq / NP_080337
  ref <309>: DATABASE ENTRY DATE: 2002-01-07

SEQ ID NO: 4909 - DNA, 904 bp, Homo sapiens; identical to SEQ ID NO: 4903
  ref <308>: DATABASE ACCESSION NUMBER: EMBL / BI488555
  ref <309>: DATABASE ENTRY DATE: 2001-08-29

SEQ ID NO: 4910 - DNA, 393 bp, Rattus norvegicus; identical to SEQ ID NO: 4901
  ref <308>: DATABASE ACCESSION NUMBER: EMBL / AA851403
  ref <309>: DATABASE ENTRY DATE: 2000-03-03

SEQ ID NO: 4911 - protein, 186 aa, Rattus norvegicus; identical to SEQ ID NO: 4902
  ref <308>: DATABASE ACCESSION NUMBER: Refseq / NP_080337
  ref <309>: DATABASE ENTRY DATE: 2002-01-07

SEQ ID NO: 4912 - DNA, 904 bp, Homo sapiens; identical to SEQ ID NO: 4903
  ref <308>: DATABASE ACCESSION NUMBER: EMBL / BI488555
  ref <309>: DATABASE ENTRY DATE: 2001-08-29

SEQ ID NO: 4913 - DNA, 368 bp, Rattus norvegicus
  ref <308>: DATABASE ACCESSION NUMBER: EMBL / AA852004
  ref <309>: DATABASE ENTRY DATE: 2000-03-03
aacatttaaatataaaaatactactctgctttgagttataaatggaggaccaagaaacttttttcttcctttacagtagggccatttgtcaggtgaactgtgtttcatgaagggagggtgaactccccttccctaagctaaggaagccaagagaccaacctccaactcctcaccagacttcaatagaaagctggtttcaccggaagaaataacagctctctactgacagagaaaatgttaatctaagctgttgggcctgccctttcaattatcctgaaggaaaaaaaaaaccagtcctccctcaccacaagtacacccgatttgtgacagctatgcctacaggacatgcattcccgctgagatgaagc

SEQ ID NO: 4914 - protein, 373 aa, Rattus norvegicus; identical to SEQ ID NO: 4080
  ref <308>: DATABASE ACCESSION NUMBER: SWISS-Prot / P09606
  ref <309>: DATABASE ENTRY DATE: 1998-12-15

SEQ ID NO: 4915 - DNA, 494 bp, Rattus norvegicus
  ref <308>: DATABASE ACCESSION NUMBER: EMBL / AA852055
  ref <309>: DATABASE ENTRY DATE: 2000-03-03
gctcatgggagccccagtgaagatgacagtgtctcaggggcagccagtgaagcttaactgcagtgtggaagggatggaggaccctgacatacactggatgaaggatggcgctgtggtccagaatgcaagccaggtgtccatctcaataagcgaacagaactggattggcttactcagcctaaagtcagcggagcggtctgatgccggcctgtactggtgccaggtgaaggatggggaggaaaccaagatctctcagtcagtatggctcactgttgaaggtgtgccattcttcacggtggaaccaaaagatctggcggtgccacccaatgtcccttttcaactgtcttgtgaggctgtgggtccaccagaacccgtaaccattttctggtggagaggacccactaaggttgggggacctgcttcctctccctctgttttaaatgtaacaggagtgactcagcgcacagagttttcttgtgaagctcataacataa

SEQ ID NO: 4916 - protein, 880 aa, Rattus norvegicus; identical to SEQ ID NO: 2010
  ref <308>: DATABASE ACCESSION NUMBER: SWISS-Prot / P55146
  ref <309>: DATABASE ENTRY DATE: 2002-06-15

SEQ ID NO: 4917 - DNA, 3031 bp, Homo sapiens; identical to SEQ ID NO: 2011
  ref <308>: DATABASE ACCESSION NUMBER: EMBL / U02566
  ref <309>: DATABASE ENTRY DATE: 1999-06-30

SEQ ID NO: 4918 - protein, 890 aa, Homo sapiens; identical to SEQ ID NO: 2012
  ref <308>: DATABASE ACCESSION NUMBER: SWISS-Prot / Q06418
  ref <309>: DATABASE ENTRY DATE: 2002-06-15

SEQ ID NO: 4919 - DNA, 453 bp, Rattus norvegicus
  ref <308>: DATABASE ACCESSION NUMBER: EMBL / AA858572
  ref <309>: DATABASE ENTRY DATE: 2000-03-03
tttttttttttttttttctgtttgggggcgttccactttattgtttctgagacagggtttcatggagctctggctggccaacgatgaccttaaacttctacttttccaacatgtacatcctgggttctgggattacaggtgcgagccactgtgagtgatttatgtggttagggatggaatccgggactttgatgcagtccctattaactgaatcccggccctggccctatgtctgtgtacactggcagacacgttcagaggtccatgtgcagatgggtacacgtgcaggtagaagccagaggttcttcgggagtcatcaccttgttatttgagatgggatcctccactgccctggaactcaccaggcagatcaggttccctaactaggaagccctagggaccctcctgactctccgtcctaagcactgggattacaagtgcctgaagccacac

SEQ ID NO: 4920 - DNA, 430 bp, Rattus norvegicus
  ref <308>: DATABASE ACCESSION NUMBER: EMBL / AA858586
  ref <309>: DATABASE ENTRY DATE: 2000-03-03
tttttttttttttttttcatgcagtttctctttattgaaaggcctgaacacaaaggcaagctgggacagcagaaagaaggcaggacattcctcatactgctctgattcctagagtaccactggaggaggaaaaggaaatccacattgattgccctggcttgccccatactcagggttccatccgaggccaatcattgccagatctggctgcttgctccgtgtctgcactgcacgcttgggcctcaggcctcgatcagcttccctaagaagcggaggtttagaatcttgatctgctggtcttccaggtccattcggctgatgccatcctcaccatcagtactcagaacgacccccgtacccactcggtcctcacccagaatcactttcaccttgttgttcttggtagcggtcatgggctccagatgctcac

SEQ ID NO: 4921 - protein, 1082 aa, Rattus norvegicus
  ref <308>: DATABASE ACCESSION NUMBER: SWISS-Prot / AAC40052
  ref <309>: DATABASE ENTRY DATE: 2003-02-01
MSDSEDSNFSEEEDSERSSEAEEAEVEEDQRSAAGSEKEEEPEEEEEEEEEYDEEEEEEDDDRPPKKPRHGGFILDEADVDDEYEDEDQWEDGAEDILEKEEIEASNIDNVVLDEDRSGARRLQNLWRDQREEELGEYYMKKYAKSSVGETVYGGSDELSDDITQQQLLPGVKDPNLWTVKCKIGEERATAISLMRKFIAYQFTDTPLQIKSVVAPEHVKGYIYVEAYKQTHVKQAIEGVGNLRLGYWNQQMVPIKEMTDVLKVVKEVANLKPKSWVRLKRGIYKDDIAQVDYVEPSQNTISLKMIPRIDYDRIKARMSLKDWFAKRKKFKRPPQRLFDAEKIRSLGGDVASDGDFLIFEGNRYSRKGFLFKSFAMSAVITEGVKPTLSELEKFEDQPEGIDLEVVTESTGKEREHNFQPGDNVEVCEGELINLQGKVLSVDGNKITIMPKHEDLKDMLEFPAQELRKYFKMGDHVKVIAGRFEGDTGLIVRVEENFVILFSDLTMHELKVLPRDLQLCSETASGVDVGGQHEWGELVQLDPRTVGVIVRLERETFQVLNMHGKVVTVRHQAVTQKKDNRFAVALDSDQNNIHVKDIVKVIDGPHSGREGEIRHLYRSFAFLHCKKLVENGGMFVCKARHLVLAGGSKPRDVTNLTVGGFTPMSPRISSPMHPSAEGQHGGFGSPGGMSRGRGRRDNELIGQTVRISQGPYKGYIGVVKDATESTARVELHSTCQTISVDRQRLTTVDSQRPGGMTSTYGRTPMYGSQTPMYGSGSRTPMYGSQTPLQDGSRTPHYGSQTPLHDGSRTPAQSGAWDPNNPNTPSRAEEEYEYAFDDEPTPSPQAYGGTPNPQTPGYPDPSSPQVNPQYNPQTPGTPAMYNTDQFSPYAAPSPQGSYQPSPSPQSYHQVAPSPAGYQNTHSPASYHPTPSPMAYQASPSPSPVGYSPMTPGAPSPGGYNPHTPGSGIEQNSSDWVTTDIQVKVRDTYLDTQIVGQTGVIRSVTGGMCSVYLKDSEKVVSISSEHLEPITPTKNNKVKVILGEDREATGVLLSIDGEDGIIRMDLEDQQIKILNLRFLGKLLEA

SEQ ID NO: 4922 - DNA, 3600 bp, Homo sapiens
  ref <308>: DATABASE ACCESSION NUMBER: EMBL / U56402
  ref <309>: DATABASE ENTRY DATE: 2000-03-04
cgggcagctggtaccgaaggcggaggtggagcccgagagcagcggaagatgtcggacagcgaggacagcaacttttccgaggaggaggacagcgagcgcagcagtgacggcgaggaggccgaggtagacgaagagcggcggagtgcagcgggcagtgagaaagaagaagagcctgaggacgaagaggaggaggaagaggaggaggaatatgatgaggaagaggaggaagaagatgatgaccgaccccccaagaaaccccgccatggaggcttcattctggacgaggctgatgttgacgatgagtatgaggacgaggaccagtgggaggatggagcagaggacattctagagaaagaagagattgaagcctccaatatcgataatgttgtcctggatgaagatcgttctggggctcgccgcctgcaaaacctctggagggaccagcgagaagaagaactgggcgagtattacatgaagaaatacgccaagtcatctgtgggagagacggtgtatggaggatctgatgagctctcagacgacatcacccagcagcagctgctcccaggagtcaaggatcccaatctgtggattgtcaaatgtaagattggggaggaacgggccacggccatttccttgatgcgcaagttcattgcctaccagttcacagacacgcccctgcagatcaagtcagtagtggcaccagagcatgtgaagggctacatctacgtggaggcctacaagcagacccacgtgaagcaggccattgagggggtgggcaacctgcggcttggctactggaaccagcagatggtgcccatcaaggagatgacagacgtgctcaaagtggtgaaggaggtggccaacctgaaaccaaagtcctgggtccgcctcaagcggggcatctacaaggatgacattgctcaggtggactacgtggagcccagccagaacaccatctccctgaagatgatcccacgcatcgactacgatcgcatcaaggcccgcatgagcttgaaagactggtttgccaaaaggaagaagtttaagcggcctccacagaggctgtttgatgctgagaagatcaggtccctggggggtgatgttgcctctgatggtgacttcctcatctttgaggggaaccgttacagccggaagggctttctgttcaagagcttcgccatgtctgctgtgatcacggagggtgtgaagccaacactctctgagctggaaaagtttgaggaccagccagagggcattgacctggaggtggtgactgagagcacagggaaggagcgggagcacaacttccaacctggggacaacgtggaggtctgtgagggtgagctcatcaacctgcagggcaagatcctcagcgtggatggcaacaagatcaccatcatgcccaagcatgaggacctcaaggacatgttggagttcccagcccaggaacttagaaaatacttcaagatgggggaccacgtgaaggtgattgctgcccgattcgagggcgacacaggcctcattgtgcgggtggaggagaatttcgttatcctgttctctgacctcaccatgcatgagctgaaggtgctcccccgggacctgcagctctgctcagagacagcatcaggtgtggatgttgggggccagcatgaatggggcgagctggtgcagctggatccccagactgtgggtgtcatcgtgcgactagaacgggagaccttccaggtgctgaacatgtacgggaaggtggtgactgtcagacatcaggctgtgacccggaagaaggacaaccgctttgctgtggccttggactcagagcagaacaacatccatgtgaaagacatcgttaaggtcattgatggcccccactcaggccgagaaggggagattcgccatctcttccgaagcttcgccttcctacattgcaagaaactggtggagaacgggggcatgtttgtctgcaagacccgccacctggtgctggctgggggctcaaagccccgtgatgtgaccaacttcaccgtgggtggctttgcgcctatgagtccccggatcagcagccccatgcaccccagtgctggaggtcagcgtggcggctttggtagcccaggtggcggcagtggtggcatgagcaggggccggggccggagggacaacgaactcatcggccagaccgtgcgcatctcccaggggccctacaaaggctacatcggtgtggtgaaagatgccacagagtccacggcccgtgtggagctgcactccacctgccagaccatctctgtggaccgtcagcggctcaccacggtgggctcacggcgcccgggcggcatgacctcgacctatgggaggacgcccatgtatggctcccagacgcccatgtatggctctggctcccgaacacccatgtacggctcacagacacccctccaggatggtagccgcaccccacactacggatcacagacgcccctgcatgatggcagccgcactcctgcccagagtgggggctgggaccccaacaaccccaacacgccgtcacgggctgaggaagaatatgagtatgctttcgatgatgagcccaccccgtccccgcaggcctatgggggaacccccaatccccaaacacctggctacccagacccctcgtccccacaggtcaacccacaatacaacccgcagacgccagggacgccggccatgtacaacacagaccagttctctccctatgctgccccctccccacaaggttcctaccagcccagccccagcccccagagctaccaccaggtggcgccaagcccagcaggctaccagaatacccactccccagccagctaccaccctacaccgtcgcccatggcctatcaggctagccccagcccgagccccgttggctacagtcctatgacacctggagctccctcccctggtggctacaacccacacacgccaggctcaggcatcgagcagaactccagcgactgggtaaccactgacattcaggtgaaggtgcgggacacctacctggatacacaggtggtgggacagacaggtgtcatccgcagtgtcacggggggcatgtgctctgtgtacctgaaggacagtgagaaggttgtcagcatttccagtgagcacctggagcctatcacccccaccaagaacaacaaggtgaaagtgatcctgggcgaggatcgggaagccacgggcgtcctactgagtattgatggtgaggatggcattgtccgtatggaccttgatgagcagctcaagatcctcaacctccgcttcctggggaagctcctggaagcctgaagcaggcagggccggtggacttcgtcggatgaagagtgatcctccttccttccctggcccttggctgtgacacaagatcctcctgcagggctaggcggattgttctggatttccttttgtttttccttttagttttccatcttttccctccctggtgctcattggaatctgagtagagtctgggggagggtccccaccttcctgtacctcctccccacagcttgcttttgttgtaccgtctttcaataaaaagaagctgtttggtctaaaaaaaaaaaaaaaaaaaaa

SEQ ID NO: 4923 - protein, 220 aa, Homo sapiens; identical to SEQ ID NO: 697
  ref <308>: DATABASE ACCESSION NUMBER: SWISS-Prot / P51809
  ref <309>: DATABASE ENTRY DATE: 2002-06-15

SEQ ID NO: 4924 - DNA, 430 bp, Rattus norvegicus; identical to SEQ ID NO: 4920
  ref <308>: DATABASE ACCESSION NUMBER: EMBL / AA858586
  ref <309>: DATABASE ENTRY DATE: 2000-03-03

SEQ ID NO: 4925 - protein, 1082 aa, Rattus norvegicus; identical to SEQ ID NO: 4921
  ref <308>: DATABASE ACCESSION NUMBER: SWISS-Prot / AAC40052
  ref <309>: DATABASE ENTRY DATE: 2003-02-01

SEQ ID NO: 4926 - DNA, 3600 bp, Homo sapiens; identical to SEQ ID NO: 4922
  ref <308>: DATABASE ACCESSION NUMBER: EMBL / U56402
  ref <309>: DATABASE ENTRY DATE: 2000-03-04

SEQ ID NO: 4927 - protein, 220 aa, Homo sapiens; identical to SEQ ID NO: 697
  ref <308>: DATABASE ACCESSION NUMBER: SWISS-Prot / P51809
  ref <309>: DATABASE ENTRY DATE: 2002-06-15

SEQ ID NO: 4928 - DNA, 504 bp, Rattus norvegicus
  misc_feature (1)..(504): n=a, c, g or t
  ref <308>: DATABASE ACCESSION NUMBER: EMBL / AA858607
  ref <309>: DATABASE ENTRY DATE: 2000-03-03
tttttttttttttttttggctgtttaagtcagtgtcttgattcccccacactctgttaaaagaaatcttatgtcatccaagagcatgaaacaggtaattaaactaagtagtacctctttggaataaaagatgtactgttttaaattgtgttgctgtgtgtctatgtgtgggtgtgtgtattccagtgcaggtgaccttggaggctanaggtatttgatctcctggagctggagttctgggcatatgtgcctgtctgaccccttgcgggtactgaacttgggtcctctgctagagcagtcatcttacaagctgagccatcctctggtgcagagacatgttttgttgttgttgtagtttgtttttatgccacagtaccgtggtacatcccacagaggacgcaggcagcagcaccaggagcttcaagatacagaatgccggaggagggcttggattgcggctggcacagggttaagtcttacgaaaaagagcccaacatatgcgaaa

SEQ ID NO: 4929 - DNA, 563 bp, Rattus norvegicus
  ref <308>: DATABASE ACCESSION NUMBER: EMBL / AA858617
  ref <309>: DATABASE ENTRY DATE: 2000-03-03
tttttttttttttttttagaagaagcaaaaatatatttcagaaattctaaacaacagacaaacaatcaagccccccaaagactgaagaggtgtcatggaaacactcaagaagacccataccatacattttcttctgtggttcttctaagagcagaaaagactagaaagattgagagtttttttttccccaacagagggagcttcaatcaagaaaaagtaaaataaattcttattgctaagatatgaataaagttaaaaaaatgataaatcagtttccctgggtaattcctgggcatttgtaagcaagtaaggctaaccagggcccatcaccgcttctaattaaaacatagagagtccctggctgtttgaaactgtcctgtcaggggcaggattcctcgctgggagcttttcccactcagggccaaaccccttctcccaaatgtcctcagtggacaggcttcaccgcttaagcccattctccatggacatttgggagagggtatggaggaaagaaagagagggggcaatgattccatactggctgagactagaaactgtcctta

SEQ ID NO: 4930 - protein, 214 aa, Rattus norvegicus
  ref <308>: DATABASE ACCESSION NUMBER: Refseq / NP_075764
  ref <309>: DATABASE ENTRY DATE: 2002-03-06
MSCRERTDSSCGCNGHEENRILKCVVVGDGAVGKTCLLMSYANDAFPEEYVPTVFDHYAVTVTVGGKQHLLGLYDTAGQEDYNQLRPLSYPNTDVFLICFSVVNPASYHNVQEEWVPELKDCMPHVPYVLIGTQIDLRDDPKTLARLLYMKEKPLTYEHGVKLAKAIGAQCYLECSALTQKGLKAVFDEAILTIFHPKKKKKGCLGCHGCCAII

SEQ ID NO: 4931 - DNA, 1671 bp, Homo sapiens
  ref <308>: DATABASE ACCESSION NUMBER: EMBL / AK027278
  ref <309>: DATABASE ENTRY DATE: 2002-08-06
cattaaaaagcccagctttcctccatgttagatgtgacttggaaaatgagaaagatttagcaaaattccaccgtatcttttgccaggctagagacagggagagcagggtaaaaccctcaggctgctgaaatttctaggctgttaggaagcccctcgaattctgtgaaaatgagggtttcttaactcacactgagagcggaaaggggcagacccttttcataactccctcaagtgtgtgttacctttctttaccagcatggtaagcaacaggacatatcccagcctcggacatgtctgtatgatccaaggtacccaaagtcagacagagtaaactcaagcctggcactggctttctgccgcttcatgtgctttggaaaaagcaggagaagcaatagcagcaggagtccccagcagctggagccgcaagaatgaaccgcaaagagggaactgacagcagctgcggctgcaggggcaacgacgagaagaagatgttgaagtgtgtggtggtgggggacggtgccgtggggaaaacctgcctgctgatgagctacgccaacgacgccttcccagaggaatacgtgcccactgtgtttgaccactatgcagttactgtgactgtgggaggcaagcaacacttgctcggactgtatgacaccgcgggacaggaggactacaaccagctgaggccactctcctaccccaacacggatgtgtttttgatctgcttctctgtcgtaaaccctgcctcttaccacaatgtccagattgatctccgtgatgacccaaaaaaccttggcccgtttgctgtatatgaaagagaaacctctcacttacgagcatggtgtgaagctcgcaaaagcgatcggagcacagtgctacttggaatgttcagctctgactcagaaaggtctcaaagcggtttttgatgaagcaatcctcaccattttccaccccaagaaaaagaagaaacgctgttctgagggtcacagctgctgttcaattatctgaggttgtctgggacctgcctccaccccatccagggatgagaatggcagccaatctctgtggccaagctccagccaaaaaggagggcacgaccagaaagaacctgtcaaaaaaaaaaaaaaaacaacctacatttcaagtactatttcccttctctcccatctaattgctaaagattttctttcatacgcacacactccagtgactggaaaaacgggagttttcagtcaaagcttgacatttagagaaaacaaggactttctgcctttataaatggaaatcaactgtgtatgaactataactctgcagaggttatgaattcatcctttacaaacaataatgaacttttagtcctgtaataaatgaaatgttattaggcagctttgttgcatgattgcatagttatatcttgctaacgggccactcatttctcactgatgtggatgaaaaaatgagagcagtatgtttccaggtgtgtgcactcaacaggcaaatagctcccgaggtcaccacttccctaatgggccacaggaagtaagttgatcatgatggggagatcacgtcacccagaaccagcaactggatagagactgttgttagcgtctgggtagagcacaggcttccaggggtcttaagagctaattactgaataaaacaatctagaac

SEQ ID NO: 4932 - protein, 166 aa, Homo sapiens
  misc_feature (1)..(166): Xaa=Unknown amino acid
MNRKEGTDSSCGCRGNDEKKMLKCVVVGDGAVGKTCLLMSYANDAFPEEYVPTVFDHYAVTVTVGGKQHLLGLYDTAGQEDYNQLRPLSYPNTDVFLICFSVVNPASYHNVQIDLRDDPKNLGPFAVYERETSHLRAWCEARKSDRSTVLLGMFSSDSERSQSGFX

SEQ ID NO: 4933 - DNA, 480 bp, Rattus norvegicus
  ref <308>: DATABASE ACCESSION NUMBER: EMBL / AA858640
  ref <309>: DATABASE ENTRY DATE: 2000-03-03
tttttttttttttttttcaggaatgtacaaatgtctttattcaaaaatacaaaataaattatctgtaggcatggacaatgacagcagtaaaccattatgtattgtcaaaggaaaccagtaactgatggttacagtgatcagccagccttctcttcagtcattttcttcaggtgacttctctgaagttattggtgaggaacctgccttgagcttcctgccacagttcattgataagggcggcgataatgaatgggaggatgaagtggaatgcgaagaagcgtgttagggttgctttgtctactgagaagcctcctcagattcattcgactagggtagtcccaatgtaagggatagctgataataggtttgtaattactgtagctcctcagaatgatatttgtcctcatgggagtacatagcccatgaatgcagttgctatgactgcaaatagtagaatgattccaatgtttcaggtttcta

SEQ ID NO: 4934 - DNA, 537 bp, Rattus norvegicus
  ref <308>: DATABASE ACCESSION NUMBER: EMBL / AA858879
  ref <309>: DATABASE ENTRY DATE: 2000-03-03
tttttttttttttttttgaacaatgcaaaggcatttattatagaagcactctcagaccacactggaaaggtccactcaggtggatttgggtggagactactctgtccccattcccattcatgcccttcctcatcacctaggcctggagcccccctcccacggcttgcgggctacaaaagaccccacacaggagccttctccaagtagtacacccccatcagtgacagatctctgcatttatagcaagaacagttcccactcctagcaggatcccaaactccatcccaaatgaatacagatctctgctgatggtttcgggggtcaccttgcagggtgaggcagggtgaggcgggtctgcaggaccctggggcgttaggtgaggatgtcttgagcctggtgttctaccagcagctccatgctcttcacatcagtgcaccagagctccagacggtccttcatccccttgatctgctgcaaatccagcactcgaggctgcacccacgtcatgtgaacccgcttgtccacctcgtctatgct

SEQ ID NO: 4935 - protein, 376 aa, Rattus norvegicus
  ref <308>: DATABASE ACCESSION NUMBER: Refseq / NP_036005
  ref <309>: DATABASE ENTRY DATE: 2002-09-19
MKDVPAFLQQSQSSGPGQAAVWHRLEELYTKKLWHQLTLEVLDFVQDPCFAQGDGLIKLYENFISEFEHRVNPLSLVEIILHVVRQMTDPNVALTFLEKTREKVKSSDEAVILCKTAIGALKLNIGDLQATKETIEDVEEMLNNLPGVTSVHSRFYDLSSKYYQTIGNHASYYKDALRFLGCVDIKDLPVSEQQERAFTLGLAGLLGEGVFNFGELLMHPVLESLRDTDRQWLIDTLYAFNSGAVDRFQTLKCAWGQQPDLAANEAQLLRKIQLLCLMEMTFTRPANHRQLTFEEIAKSAKITVNKVELLVMKALSVGLVRGSIDEVDKRVHMTWVQPRVLDLQQIKGMKDRLELWCTDVKSMEMLVEHQAQDILT

SEQ ID NO: 4936 - DNA, 1584 bp, Homo sapiens
  ref <308>: DATABASE ACCESSION NUMBER: EMBL / AB009398
  ref <309>: DATABASE ENTRY DATE: 2001-07-31
tttccggcagccatccccgcggtgctgacatcccggttgttcttctgtgccgggggtcttcctgctgtcatgaaggacgtaccgggcttcctacagcagagccagaactccgggcccgggcagcccgctgtgtggcaccgtctggaggagctctacacgaagaagttgtggcatcagctgacacttcaggtgcttgattttgtgcaggatccgtgctttgcccaaggagatggtctcattaagctttatgaaaactttatcagtgaatttgaacacagggtgaaccctttgtccctcgtggaaatcattcttcatgtagttagacagatgactgatcctaatgtggctcttacttttctggaaaagactcgtgagaaggtgaaaagtagtgatgaggcagtgatcctgtgtaaaacagcaattggagctctaaaattaaacatcggggacctacaggttacaaaggaaacaattgaagatgttgaagaaatgctcaacaaccttcctggtgtgacatcggttcacagtcgtttctatgatctctccagtaaatactatcaaacaatcggaaaccacgcgtcctactacaaagatgctctgcggtttttgggctgtgttgacatcaaggatctaccagtgtctgagcagcaggagagagccttcacgctggggctagcaggacttctcggcgagggagtttttaactttggagaactcctcatgcaccctgtgctggagtccctgaggaatactgaccggcagtggctgattgacaccctctatgccttcaacagtggcaacgtagagcggttccagactctgaagactgcctggggccagcagcctgatttagcagctaatgaagcccagcttctgaggaaaattcagttgttgtgcctcatggagatgactttcacacgacctgccaatcacagacaactcacttttgaagaaattgccaaaagtgctaaaatcacagtgaatgaggtggagcttctggtgatgaaggccctttcggtggggctggtgaaaggcagtatagacgaggtggacaaacgagtccacatgacctgggtgcagccccgagtgttggatttgcaacagatcaagggaatgaaggaccgcctggagttctggtgcacggatgtgaagagcatggagatgctggtggagcaccaggcccatgacatcctcacctagggccccctggttccccgtcgtgtctcctttgactcacctgagagaggcgtttgcagccaatgaagctggctgctcagacggtcgacattgaatttgggtgggggttgggatcctgtctgaagtacagactgttcttgctctaaaaacaggactgtccctgatgggagccaggccacagggaggaggcttctttgtgggtctctcctgcagagggtgggggtctcagggtcttaggtgatacgggagagaaagaacgtgccaggcaggaggccccctgaagtctgtgtactccgaggtggatctccatccccatccacctgtacggacatcttttccgttgcggtttgagaatgttcctataataaacccctctgctttgttaac

SEQ ID NO: 4937 - protein, 376 aa, Homo sapiens
  ref <308>: DATABASE ACCESSION NUMBER: SWISS-Prot / Q9UNM6
  ref <309>: DATABASE ENTRY DATE: 2002-06-15
MKDVPGFLQQSQSSGPGQPAVWHRLEELYTKKLWHQLTLQVLDFVQDPCFAQGDGLIKLYENFISEFEHRVNPLSLVEIILHVVRQMTDPNVALTFLEKTREKVKSSDEAVILCKTAIGALKLNIGDLQVTKETIEDVEEMLNNLPGVTSVHSRFYDLSSKYYQTIGNHASYYKDALRFLGCVDIKDLPVSEQQERAFTLGLAGLLGEGVFNFGELLMHPVLESLRNTDRQWLIDTLYAFNSGNVERFQTLKTAWGQQPDLAANEAQLLRKIQLLCLMEMTFTRPANHRQLTFEEIAKSAKITVNEVELLVMKALSVGLVKGSIDEVDKRVHMTWVQPRVLDLQQIKGMKDRLEFWCTDVKSMEMLVEHQAHDILT

SEQ ID NO: 4938 - DNA, 433 bp, Rattus norvegicus
  ref <308>: DATABASE ACCESSION NUMBER: EMBL / AA859483
  ref <309>: DATABASE ENTRY DATE: 2000-03-03
tttttttttttttttttaagtgtttatgaattttattatgactgtgtttgtttaaatatatatatatatatttatagctctatgcatcccccgcaccacccccccaagcccctagttcttgcccttagctttctgtttggtggctgtgtagggcagcactgtctgcgtgctcttgtctgatactgtctgagtgctgctgttccttgtgaccctccgggtctgttctggggccaacgtggggacacaggagggcaaggggaggggccttgggcccaagaacagcttccaggacttgaagtgccaatggtgtacagagctgatctttgcctgaatctggatgcggaggcagggggatgattctgcaaggactaagggtaagagatgcccttgggatgggggaaggcatcaatcccctcgcaactcctaggcagtt

SEQ ID NO: 4939 - DNA, 216 bp, Homo sapiens
  ref <308>: DATABASE ACCESSION NUMBER: EMBL / AW905020
  ref <309>: DATABASE ENTRY DATE: 2001-08-31
cgttgtcagtggtggtgagcgggagcggattcgacagcgcatgaagatggtcatcgggcagcttgagggcatccttcgcgagctcaaggaggtggccaaggagctgagggaggtggtgagccagatcgataagctaacctcggacttcgactttgaactggagccggacgactggaccacggccactgtgagcagcacctctagcactgacaacgg

SEQ ID NO: 4940 - DNA, 499 bp, Rattus norvegicus
  ref <308>: DATABASE ACCESSION NUMBER: EMBL / AA859524
  ref <309>: DATABASE ENTRY DATE: 2000-03-03
tttttttttatttttttgatgcaaacgcaagagatttatttttccagcgtattggggtctaccttctatcagcccctcgtgtcgagtgactgtcgggctataacacagtttttatactttttaggggtacaggttatgtcagaaaggttgcagtttaaacttattggctaagcatattgacctttgaatctattggctagcaagcatatgacatacattcgaactctatttggaaccagaaggtcaggtgactatcagtcagtacattctgtggtttttcaagaatgtccctgctcctcctgagaactgtgggcggagaatggaacttagcctagccttgacctgaagtgggaagctggtacttggcctaatcttgacctgaggtggtgggtataaggctggtgaaagcctctaaagtccttcacacgtaccccataatctacctactttctaccaggtcaagcttcttaatagctcttacacttcagtaagaatgagg

SEQ ID NO: 4941 - DNA, 448 bp, Rattus norvegicus
  ref <308>: DATABASE ACCESSION NUMBER: EMBL / AA859529
  ref <309>: DATABASE ENTRY DATE: 2000-03-03
tttttttttttttttttaaggtttttagatagctctttattgatatcctcagcccctggtcagcacagactcccagcactggctcataccagctggactcaggtgccatccccaagagcaggagtaggccccataggggcagagaggcctcccagactaggaggagtgtgcaggcagccaggaagccctccagaactccaggcccaggttagggagggctggcctttggcagtagctcaggcccccactggggcatcatagttgagcacgtagtagtcgtggacatacatgagcacagccaccggttgcccaatgatgagtgtcacccacacagctgcattgccatagttcccttggaagaagcggttcacaatccaggccagtgggacctgagccatcatggctgtgaatgcccagaggcggaacatcctcaggggaatgctcacta

SEQ ID NO: 4942 - protein, 498 aa, Rattus norvegicus
  ref <308>: DATABASE ACCESSION NUMBER: SWISS-Prot / Q9ERM3
  ref <309>: DATABASE ENTRY DATE: 2002-06-15
MGDRGGAGSSRRRRTGSRVSVQGGSGPKVEEDEVREAAVSPDLGAGGDAPAPAPAPAHTRDKDRQTSVGDGHWELRCHRLQDSLFSSDSGFSNYRGILNWCVVMLILSNARLSLENLIKYGILVDPIQVVSLFLKDPYSWPAPCLIIASNIFIVATFQIEKRLSVGALTEQMGLLLHVVNLATIICFPAAVALLVESITPVGSLFALASYSIIFLKLSSYRDVNLWCRQRRVKAKAVSAGKKVSGAAAQNTVSYPDNLTYRDLYYFIFAPTLCYELNFPRSPRIRKRFLLRRVLEMLFFTQLQVGLIQQWMVPTIQNSMKPFKDMDYSRIIERLLKLAVPNHLIWLIFFYWLFHSCLNAVAELLQFGDREFYRDWWNAESVTYFWQNWNIPVHKWCIRHFYKPMLRLGSNKWMARTGVFWASAFFHEYLVSIPLRMFRLWAFTAMMAQVPLAWIVNRFFQGNYGNAAVWVTLIIGQPVAVLMYVHDYYVLNYDAPVGA

SEQ ID NO: 4943 - DNA, 863 bp, Homo sapiens
  ref <308>: DATABASE ACCESSION NUMBER: EMBL / BI521353
  ref <309>: DATABASE ENTRY DATE: 2001-08-30
gaactccatgaagcccttcaaggaacatggactactcacgcatcatcgagcgcctcctgaagctggcggtccccaatcacctcatctggctcatcttcttctactggctcttccactcctgcctgaatgccgtggctgagctcatgcagtttggagaccgggagttctaccgggactggtggaactccgagtctgtcacctacttctggcagaactggaacatccctgtgcacaagtggtgcatcaggtaggtggggtgtgtgtgtgtgtgatgtggaacatggctgtgaacctgaaccgctttccatgccccctcctctgcagacacttctacaagcccatgcttcgacggggcagcagcaagtggatggccaggacaggggtgttcctggcctcggccttcttccacgagtacctggtgagcgtccctctgcgaatgttccgcctctgggcgttcacgggcatgatggctcagatcccactggcctggttcgtgggccgctttttccagggcaactatggcaacgcagctgtgtggctgtcgctcatcatcggacagccaatagccgtcctcatgtacgtccacgactactacgtgctcaactatgaggccccagcggcagaggcctgagctgcacctgagggcctggcttctcactgccgactcacacccgctgccagagcccactctcctcctaggccttcgagtgctgcggatgggcctggctgcacagtatcctcctctggtcccaggggaggcctctctgccctaatggggctctgtcctgcacccctcagggatggcaacagcaggccagacacagtctgatgccagctgggagtcttgcttgaaccttgccccg

SEQ ID NO: 4944 - protein, 488 aa, Homo sapiens
  ref <308>: DATABASE ACCESSION NUMBER: Refseq / XP_035370
  ref <309>: DATABASE ENTRY DATE: 2002-08-01
MGDRGSSRRRRTGSRPSSHGGGGPAAAEEEVRDAAAGPDVGAAGDAPAPAPNKDGDAGVGSGHWELRCHRLQDSLFSSDSGFSNYRGILNWCVVMLILSNARLFLENLIKYGILVDPIQVVSLFLKDPYSWPAPCLVIAANVFAVAAFQVEKRLAVGALTEQAGLLLHVANLATILCFPAAVVLLVESITPVGSLLALMAHTILFLKLFSYRDVNSWCRRARAKAASAGKKASSAAAPHTVSYPDNLTYRDLYYFLFAPTLCYELNFPRSPRIRKRFLLRRILEMLFFTQLQVGLIQQWMVPTIQNSMKPFKDMDYSRIIERLLKLAVPNHLIWLIFFYWLFHSCLNAVAELMQFGDREFYRDWWNSESVTYFWQNWNIPVHKWCIRHFYKPMLRRGSSKWMARTGVFLASAFFHEYLVSVPLRMFRLWAFTGMMAQIPLAWFVGRFFQGNYGNAAVWLSLIIGQPIAVLMYVHDYYVLNYEAPAAEA

SEQ ID NO: 4945 - DNA, 557 bp, Rattus norvegicus
  ref <308>: DATABASE ACCESSION NUMBER: EMBL / AA859581
  ref <309>: DATABASE ENTRY DATE: 2000-03-03
tttttttttttttttttaggaaccatttgtacttttgctcatgtggatgcgtgtggcgtctgtggagatcatggatctcctagagttagtcataggtgggttatagttatagtctgtgagtcgtgggaactgagctcaggtcctctggtagagctgttaatcaccaagtcacctccccagcctttcaactgggggacagcattctgttttattttctactcccaccccctttcttttgtctaagaaatgtttggctggatcatgaaaccctgtttgaggccaacattcacaggcaactgtgcccaggactggggtgggattccaccttctctagagaaagctgtttacaaaagcaggtttcattttacagcgggtttggaccaggctcctaagtgatggaagccaggactcaccacactcttggagcccgggactctggcaagcgctgaggggttcttcctgtgtgtccctgcccctctctctctggtggctggtgtgtcatgggtggttttacaaccacaggtcactccattaacccccaggaggaatgcgccagc

SEQ ID NO: 4946 - protein, 188 aa, Rattus norvegicus
  ref <308>: DATABASE ACCESSION NUMBER: SWISS-Prot / AAD16986
  ref <309>: DATABASE ENTRY DATE: 2002-06-01
MLHNKLRGQVYPPASNMEYMTWDEELERSAAAWAQRCLWEHGPASLLVSIGQNLAVHWGRYRSPGFHVQSWYDEVKDYTYPYPHECNPWCPERCSGAMCTHYTQMVWATTNKIGCAVHTCRSMSVWGDIWENAVYLVCNYSPKGNWIGEAPYKHGRPCSECPSSYGGGCRNNLCYREEHYHQKPEWMR

SEQ ID NO: 4947 - DNA, 4574 bp, Homo sapiens
  ref <308>: DATABASE ACCESSION NUMBER: Refseq / NM_031476
  ref <309>: DATABASE ENTRY DATE: 2002-05-14
ggcggctgctcccattgagctgtctgctcgctgtgcccgctgtgcctgctgtgcccgcgctgtcgccgctgctaccgcgtctgctggacgcgggagacgccagcgagctggtgattggagccctgcggagagctcaagcgcccagctctgcccgaggagcccaggctgccccgtgagtcccatagttgctgcaggagtggagccatgagctgcgtcctgggtggtgtcatccccttggggctgctgttcctggtctgcggatcccaaggctacctcctgcccaacgtcactctcttagaggagctgctcagcaaataccagcacaacgagtctcactcccgggtccgcagagccatccccagggaggacaaggaggagatcctcatgctgcacaacaagcttcggggccaggtgcagcctcaggcctccaacatggagtacatgacctgggatgacgaactggagaagtctgctgcagcgtgggccagtcagtgcatctgggagcacgggcccaccagtctgctggtgtccatcgggcagaacctgggcgctcactggggcaggtatcgctctccggggttccatgtgcagtcctggtatgacgaggtgaaggactacacctacccctacccgagcgagtgcaacccctggtgtccagagaggtgctcggggcctatgtgcacgcactacacacagatagtttgggccaccaccaacaagatcggttgtgctgtgaacacctgccggaagatgactgtctggggagaagtttgggagaacgcggtctactttgtctgcaattattctccaaaggggaactggattggagaagccccctacaagaatggccggccctgctctgagtgcccacccagctatggaggcagctgcaggaacaacttgtgttaccgagaagaaacctacactccaaaacctgaaacggacgagatgaatgaggtggaaacggctcccattcctgaagaaaaccatgtttggctccaaccgagggtgatgagacccaccaagcccaagaaaacctctgcggtcaactacatgacccaagtcgtcagatgtgacaccaagatgaaggacaggtgcaaagggtccacgtgtaacaggtaccagtgcccagcaggctgcctgaaccacaaggcgaagatctttggaactctgttctatgaaagctcgtctagcatatgccgcgccgccatccactacgggatcctggatgacaagggaggcctggtggatatcaccaggaacgggaaggtccccttcttcgtgaagtctgagagacacggcgtgcagtccctcagcaaatacaaaccttccagctcattcatggtgtcaaaagtgaaagtgcaggatttggactgctacacgaccgttgctcagctgtgcccgtttgaaaagccagcaactcactgcccaagaatccattgtccggcacactgcaaagacgaaccttcctactgggctccggtgtttggaaccaacatctatgcagatacctcaagcatctgcaagacagccgtgcacgcgggagtcatcagcaacgagagtgggggtgacgtggacgtgatgcccgtggataaaaagaagacctacgtgggctcgctcaggaatggagttcagtctgaaagcctggggactcctcgggatggaaaggccttccggatctttgctgtcaggcagtgaatttccagcaccaggggagaaggggcgtcttcaggagggcttcggggttttgcttttatttttattttgtcattgcggggtatatggagagtcaggaaacttcctttgactgatgttcagtgtccatcactttgtggcctgtgggtgaggtgacatctcatcccctcactgaagcaacagcatcccaaggtgctcagccggactccctggtgcctgatcctgctggggcccgggggtctccatctggacgtcctctctcctttagagatctgagctgtctcttaaaggggacagttgcccaaaatgttccttgctatgtgttcttctgttggtggaggaagttgatttcaacctccctgccaaaagaacaaaccatttgaagctcacaattgtgaagcattcacggcgtcggaagaggccttttgagcaagcgccaatgagtttcaggaatgaagtagaaggtagttatttaaaaataaaaaacacagtccgtccctaccaatagaggaaaatggttttaatgtttgctggtcagacagacaaatgggctagagtaagagggctgcgggtatgagagaccccggctccgccctggcacgtgtccttgctggcggcccgccacaggcccccttcaatggccgcattcaggatggctctatacacagcagtgctggtttatgtagagttcagcagtcacttcagagatgtatcttgtctttgtcaggcccttcatcttcatggcccacctgttttctgccgtgacctttggtcccattgaggactaaggatcgggaccctttctttaccccctacccattgtggctcccaccctgcctcggactggtttacgtgtcctggttcacacccaggacttttctttgcaagcgaacctgtttgaagcccaagtcttaactcctggtctcgtaaggttccactgagacgagatgtctgagaacaaccaaagaaggcctgctctttgctgcttttaaaaaatgacaattaaatgtgcagattccccacgcacccgatgacctattttttcagccgtgggaggaatggagtctttggtacattcctcaccgaggttagcagctcagtttgtggttatgaaaccgtctgtggcctcatgacagcgagagatgggaatacactagaaggatctcttttcctgttttcgtgaaacgactcttgccaaacgttcccgaggcgccaaggagtgtagtacaccctggctgccatcactctataaaagtgcttcatgagcccagaccaaaagcccacagtgaaatgaagtacccttttgtaaatagcatttttttgcagaaggtgaaaattccactctctaccaccgggccagccaatagatcactttggtgaatgctagtttcaaatttgattcaaaatatttcttaggtgaaagaactagcagaaagtcaaaaactaagatactgtagactggacaagaaattctacctgggcacctaggtgatgccttctttctttgattgcctttctaataaatgcagaatctgaaggtaaataggtttaaaacaaaacaaaaacccacccctttaaggagttggtaaaaagcagttcaactcttagcttgactgagctaaaattcacaggactacgtgctttgtgcattgtagtctagtcgtaattcataggtactgactcctcagccccaaatgtcggagaggaagaattcggtcagcctgtcaggtcgtgagtccagttaccaccaaacatctgggaaacttctgggtgctgggtgctctgctgctggacttttgtggctgtgtctgtgtctgcaagataaattagatcgccctgtggggtttgcagaattagtgaagggtccaggacgatcccagtgggctcgcttccaaagcatcccactcaagggagacttgaaacttccagtgtgagttgaccccatcatttaaaaataaagtccccgggttccttaatgcctccttcactgggccttcctagcaggatagaaagtccttgcccagagcaggacctggctgtctttttttttttttttttcccgagaccaagtttcactctgttgcccaaggtagagtgcagtggcgtgatctctgctcattgcaactgccgcctcccgggttcaagcaattctcatgcatcagcctcccaagtacctgggactacaggcgtgagctaccatgcccggctaatttttgtatttttagtagagatggggtttcattatgttggccaggctggtctcgaactccttacctcaggtgatccacccaccttggcctcccgaagtgctgggattacaggcatgagccactgcgcccggccatggacctggctgtctttatcatccccacaaacattttgaaactggaatatttgtcttcagaaaatggaaacaagactataaatgataagccctgtccctagcaccacctctcctgtgtgtggaatagaggcccctcgtgctaccaacacttaccctgtgtttaaaaagatcttgtaccaagccaacggcgttcctggctctcctgcccacaggatgaacattttcggcttccttaggagttttgccctaccgtattccaaagcgtgtgctggtttctcatattgtctgtaggctcactcagcccgcagtttatgtgtgtgcttttttctatgaaaaatgatgtattttgctacttcctgtgtacaaagttttattgtaaatgttttttgtgctttgcatgaacaggggccacgttgttgcaattgtttcagtagaactggtttgatttctaaaatgttcctgtaacatatcttttatgaacaaatctgaacaatttgtgaaataaaacattgaaaaccaaaaaaaaaaaaaaaaa

SEQ ID NO: 4948 - protein, 497 aa, Homo sapiens
  ref <308>: DATABASE ACCESSION NUMBER: Refseq / NP_113664
  ref <309>: DATABASE ENTRY DATE: 2002-05-14
MSCVLGGVIPLGLLFLVCGSQGYLLPNVTLLEELLSKYQHNESHSRVRRAIPREDKEEILMLHNKLRGQVQPQASNMEYMTWDDELEKSAAAWASQCIWEHGPTSLLVSIGQNLGAHWGRYRSPGFHVQSWYDEVKDYTYPYPSECNPWCPERCSGPMCTHYTQIVWATTNKIGCAVNTCRKMTVWGEVWENAVYFVCNYSPKGNWIGEAPYKNGRPCSECPPSYGGSCRNNLCYREETYTPKPETDEMNEVETAPIPEENHVWLQPRVMRPTKPKKTSAVNYMTQVVRCDTKMKDRCKGSTCNRYQCPAGCLNHKAKIFGTLFYESSSSICRAAIHYGILDDKGGLVDITRNGKVPFFVKSERHGVQSLSKYKPSSSFMVSKVKVQDLDCYTTVAQLCPFEKPATHCPRIHCPAHCKDEPSYWAPVFGTNIYADTSSICKTAVHAGVISNESGGDVDVMPVDKKKTYVGSLRNGVQSESLGTPRDGKAFRIFAVRQ

SEQ ID NO: 4949 - DNA, 557 bp, Rattus norvegicus; identical to SEQ ID NO: 4945
  ref <308>: DATABASE ACCESSION NUMBER: EMBL / AA859581
  ref <309>: DATABASE ENTRY DATE: 2000-03-03

SEQ ID NO: 4950 - protein, 188 aa, Rattus norvegicus; identical to SEQ ID NO: 4946
  ref <308>: DATABASE ACCESSION NUMBER: SWISS-Prot / AAD16986
  ref <309>: DATABASE ENTRY DATE: 2002-06-01

SEQ ID NO: 4951 - DNA, 4574 bp, Homo sapiens; identical to SEQ ID NO: 4947
  ref <308>: DATABASE ACCESSION NUMBER: Refseq / NM_031476
  ref <309>: DATABASE ENTRY DATE: 2002-05-14

SEQ ID NO: 4952 - protein, 497 aa, Homo sapiens; identical to SEQ ID NO: 4948
  ref <308>: DATABASE ACCESSION NUMBER: Refseq / NP_113664
  ref <309>: DATABASE ENTRY DATE: 2002-05-14

SEQ ID NO: 4953 - DNA, 478 bp, Rattus norvegicus
  ref <308>: DATABASE ACCESSION NUMBER: EMBL / AA859597
  ref <309>: DATABASE ENTRY DATE: 2000-03-03
ttttttttttttttgctttctagatacaaggtctcatataactcagactggcctggaacttattacgtagctggggctaaatttgtattcaggacctcctgtctgcacctcctaatgctgggatttcagacagggttttctctctgaagccctggcattcccggaacttagtatgtagaccagccttgaactcacagagatctgccttactgctggatctaaggcttacaccacaagtttttaaatttatgtttaaataaaaattaaatgggaagtctgaagattacagaaaggtagtcggggaaatttttcttgcatcttttgttttgctttggtttttggaaacagtcttgggactggagcgatgactcagcagataagagccatcttccagggctgttcttccagaggacccaggttaattcccaggtcacacgtggtgacttatggctggcgagctctaatttctgggctctcc

SEQ ID NO: 4954 - DNA, 478 bp, Rattus norvegicus; identical to SEQ ID NO: 4953
  ref <308>: DATABASE ACCESSION NUMBER: EMBL / AA859597
  ref <309>: DATABASE ENTRY DATE: 2000-03-03

SEQ ID NO: 4955 - DNA, 437 bp, Rattus norvegicus
  ref <308>: DATABASE ACCESSION NUMBER: EMBL / AA859627
  ref <309>: DATABASE ENTRY DATE: 2000-03-03
tttttttttttttctttggtttttaattctttttttttttattattattattggtttgtgtgagagaggttgagaaggtttggtttacactgagtatatgttgtcaagtggccaaagtccacatagctctcctgttttctgtatacgttcacagcctcaaaaaaaaaaaaaaaaataattgaaatggctttaaaaaccgaacagaacacctccatcctgcgataagtacctcgaatggattcagctttacccctctgtgactcatcctcacattctcagcatatttaacagaccaacaaaaccaagtactagtagtgaggggctgacccacgtggctttgcagtgctcttcgtccagaagcatggcacacgatgcttgtgcatgtggaaacttagcgactgtcaacatacattctcagggatttatccctcgtgccg

SEQ ID NO: 4956 - DNA, 4087 bp, Homo sapiens
  ref <308>: DATABASE ACCESSION NUMBER: EMBL / AB046797
  ref <309>: DATABASE ENTRY DATE: 2001-02-22
ggaatagtgttgatgtctgtccatgggaagatggaaatcatggcagtgaattacccaacttaaccaatgctctgcctcagggtgcaaatgccaaccaagattcatcgaacaggccacatcggacagtgttcacccgagccatcgaggcatgcgatctccactggcaggatagccacttgcagcacattatcagcagtgacctatacaccaactactgttaccatgacgacactgaaaactccctcttcgactcccgcgggtggcccctctggcatgaacatgttcctacagcctgtgcaagagtggacgcattacgttctcatgggtaccccagagaagcactgagactagcaatagctattgttaatacattaagacgacagcagcagaaacagttggaaatgttccgaacccaaaaaaaagagctaccccataaaaacataacctcgataaccaatctggagggctgggttggacatcccctggaccctgtgggcactctcttcagtagccttatggaagcctgccgcattgatgatgagaacctctctgggttctcagattttacagagaatatgggacagtgcaagtctctggaataccagcatctacctgcacacaaattcttagaagaaggggaatcctatttaacgctggctgtggaagtagccctgatagggctaggacagcagcgtatcatgcctgatgggctgtacacacaagagaaagtttgccggaatgaggagcagctcatttctaagcttcaggaaattgaattggatgacacactggtgaaaatttttcgcaagcaagcagtcttcctattagaagccggaccatatagtggtttaggtgaaataatccatcgggagagcgttccaatgcacacatttgccaagtatctcttcacctctctcctacctcacgatgctgaattggcatacaaaattgcactgagagcaatgcggttactagtattggaatctactgctccatcaggagacctcacccgcccacaccacattgcatcagttgttcccaaccgctaccctcgctggttcactctaagccacattgagtcccagcagtgtgagctggcatccaccatgctaactgcagccaaaggcgatgttcggaggctggaaacagtattagaatccatccagaaaaacattcactcctcatcacacatcttcaagcttgcccaagatgcatttaaaatagcaactctcatggacagtttgccagacatcactcttttgaaagtgtctctggagctgggcctgcaggttatgcgaatgacactgtcaaccttaaattggcgacggcgggagatggtgaggtggctggtaacgtgtgctactgaagtcggggtttatgccctggacagcatcatgcagacctggtttacactctttactcccaccgaggccacaagtatagttgcaactaccgtgatgtccaacagcaccatcgtccgcctccacctggactgccaccagcaggaaaagctggccagcagcgcccggacacttgcactgcagtgtgccatgaaggatccacagaactgtgccctctctgcgctaaccctttgtgaaaaggatcacatagcttttgagacggcgtaccaaattgttctcgacgctgctacgactggcatgagctatacacagctctttacaatagcacggtacatggagcaccgcgggtaccccatgagggcctacaagctggccaccctggccatgacccatctcaacctgagctacaatcaggacacacaccctgccattaatgatgttttgtgggcctgtgcgcttagccactcccttggtaaaaatgagcttgcagctataatacctctggtggtcaagagtgtcaagtgtgcaacggtactgtcagacattttgcgcagatgcactctgaccactcctggcatggtgggacttcatgggaggaggaactctggtaagctcatgtcactggacaaagcccccttgaggcaactcttggatgccacgatcggggcctacatcaacacaacgcactcacggctcacacacatcagtcctcggcactatagtgagtttatagagttcctcagcaaagcccgagagaccttcttaatggcgcatgatggacacattcagtttacacagtttattgacaacctgaaacaaatctacaaaggcaaaaagaaactgatgatgttggttcgggagaggtttggttgatagatcttgtatgaatggggtggggggtggggatgggagggatggtttgtttttacttgagcctgcctttgtaccctttttaacttaaagaacagagccacaccggtattatatgtgtatagttatattgcgtttgcagactaaattgtcatgttgtgaaagtttgtgtgttttttattttttccctatttctttctttcctttattttattattttttttaattttttttttctggttttgtatgagagagaggttaaaaaggtttggtttacactgagtatatgttgtcaagtggcaaaagtccacatagctctcctgttttctgtatacgttcacagcctcaaaaaaaataattgaaatggctttaaaaaccaaacaaaacacctccatcctgtgataagtacctcgaatggattcagctttactcctttgtaactcatctttacattttcagcatatttaaacaaaccaacaaaatgaaatactaatagtaaaaaggctgacccatgtggctttgcagtgctgttcgtccagaagcatggcacacgatgcttgtgcatgtggaaacttagcgactgtcaacatacattctcagggatttatccaaaaaaattaaaaaaagaatgagagcatttattgtactgtatatatattatagtatatgtctgaatattgaaaatataacattaactaatttataaaaaatattctatgtaatgcaaaatacttgaagctgcagtagcttggttttaaacaaaaacaaaaaaaaaactgagagaaaacctatcagaaggactaaaagtacgccttgcttcagggttggctcaggtggtgaacttcatgctgggcatctatgcagagccaccttttggattgcatggttggactgagatctattgggagaaattatatatgtatatatatttatacaacttatgtatacatatatatatgtatacacacagacacacacacacaccaccaacaaccaccactacaccacacatgcttataacaggcactagaataaagagggacaacaaaatacacagccagagcagcaagccttagcattaagaatatacaatatgccggaattggggttcgtgcctcctagcctaggaaacttaaaagaaatatccttttgacacaaaacacaaaatgttttccaaaacaattgacataatgatacattacgcctttgcagtgagctaataataagctaacctttgtgcacaaataacattatatatattatatatctattctgcataggtattttgactttgtgcaggacagaaagttgtgtaggtatgactgttctacttttcagttttctttttttttaatatattttattttctctagaaattactcaaacaaaagcagccttctatcttgccttgtcttaatgctttaaaataaccaaactggagatctaactaccaaactgttcattatattattaaataccaactttggttacagtatagtgtctttactttagctgatggttctgtaaccttgtgctttttaaagcaatttttatgttttggtgcaaaagttgtccagtgtctcttgttcccttcactagagaacatgcttagaggtatgtttgtaggtatttttgtttagaagaactatttcatgcgctccattttatttattataataggtaaaaagaaaaaaaaaggttgtaattcatcacccatgtaaacatgctcatgaagttgaaagtaattaagatttgatacactgatatcaatttatttatgtaactaaatcactgttttataaacttgttaatgatcaacaatttttgttttgattaaaattagttttttgaaagtt

SEQ ID NO: 4957 - DNA, 455 bp, Rattus norvegicus
  ref <308>: DATABASE ACCESSION NUMBER: EMBL / AA859632
  ref <309>: DATABASE ENTRY DATE: 2000-03-03
tttttttttgcttttttttttagaaaacatggtagctcttattttatggtcaaactgtaaataaaccttaatccaaagcacccatcatttggagccgagcattcttggtctgtactcatgtatctcgcaaagagtgcatcaggaatcaggtgtccatgtgatgcatgggtcacttttgtcaccttgaatagcaaactattatgctggtataatactctccttattaatttggttggattagaatattcagcatttcttactaactctgtgaattgcaattctgcaagtgaacggtcagagctcaagttcccagcatccctttgcactgaccacattgctgctgtacgtagtctcaggccacttggctagtcagggtgagtagacacgggactgctacacattcctgtccccgtgcagtcataaacctcaggttgaaacaaagtctaagctgggtc

SEQ ID NO: 4958 - protein, 1131 aa, Rattus norvegicus
  ref <308>: DATABASE ACCESSION NUMBER: Refseq / NP_035388
  ref <309>: DATABASE ENTRY DATE: 2002-01-07
MDIRKFFGVISSGKKPVNETVKNEKTKASEGTVKGKKGVKEAKVNNSGKEDASKPKQHSKKKRIIYDSDSESEETVQVKNAKKKSEKLSLSYKPGKVSQKDPVTYVSETDEDDDFVCKKAASKSKENGVSTNSYLGTSNVKKNEENVKTKNKPLSPIKLTPTSVLDYFGTESVQRSGKKMVTSKRKESSQNTEDSRLNDEAIAKQLQLDEDAELERQLHEDEEFARTLALLDEEPKIKKARKDSEEGEESFSSVQDDLSKAEKQKSPNKAELFSTARKTYSPAKHGKGRASEDAKQPCKSAHRKEACSSPKASAKLALMKAKEESSYNETELLAARRKESATEPKGEKTTPKKTKVSPTKRESVSPEDSEKKRTNYQAYRSYLNREGPKALGSKEIPKGAENCLEGLTFVITGVLESIERDEAKSLIERYGGKVTGNVSKKTNYLVMGRDSGQSKSDKAAALGTKILDEDGLLDLIRTMPGKRSKYEMAAEAEMKKEKSKLERTPQKNDQGKRKISPAKKESESKKCKLTLLKNSPMKAVKKEASTCPRGLDVKETHGNRSSNKEECLLWVDKYKPASLKNIIGQQGDQSCANKLLRWLRNWHKSSPEEKKHAAKFGKLASKDDGSSFKAALLSGPPGVGKTTTASLVCQELGYSYVELNASDTRSKNSLKAVVAESLNNTSIKGFYTSGAAPSVSARHALIMDEVDGMAGNEDRGGIQELIGLIKHTKIPIICMCNDRNHPKIRSLVHYCFDLRFQRPRVEQIKSAMLSIAFKEGLKIPPPAMNEIILGANQDVRQVLHNLSMWCAQSKALTYDQAKADSQRAKKDIRLGPFDVTRKVFAAGEETAHMSLMDKSDLFFHDYSIAPLFVQENYLHVKPVAAGGDMKKHLMLLSRAADSICDGDLVDNQIRSKQNWSLLPTQAIYASVLPGELMRGYMTQFPSFPSWLGKHSSTGKHDRIVQDLSLHMSLRTYSSKRTVNMDYLSHIRDALVRPLTSQGVEGAQHVIKLMDTYYLMKEDFENIMEVSSWGGKPSAFSKLDPKVKAAFTRAYNKEAHLTPYSLQVVKTSRLSTGPALDSEYSEEFQEDDTQSEKEQDAVETDAMIKKKTRSSKPSKSEREKESKKGKGKNWKK

SEQ ID NO: 4959 - DNA, 4952 bp, Homo sapiens; identical to SEQ ID NO: 612
  ref <308>: DATABASE ACCESSION NUMBER: EMBL / L23320
  ref <309>: DATABASE ENTRY DATE: 1999-07-01

SEQ ID NO: 4960 - protein, 1147 aa, Homo sapiens [sequence omitted]

SEQ ID NO: 4961 - DNA, 417 bp, Rattus norvegicus
  ref <308>: DATABASE ACCESSION NUMBER: EMBL / AA859665
  ref <309>: DATABASE ENTRY DATE: 2000-03-03
tttttttttttttttttcacgaccttttttgcttttattcttttggtagatattcaaggcatgggcagatgctcacagagcatcgccaccacagagacaagttcctgacagtgcccgtgagtctgacgcctgtcagctccacaggcacggggctgcacagcactgttctgaaatgcgtccctcatttcatctttgggaagctgggcagacccaatgcgaacaggccgggcctgtggtaacagacgcagcagcttgcttgctaggaaccaattctccatgctaaaggcaaacaaactttgcacagcacctccctagatccgcagcccaagcagcagacaggcatgagcagacacacgccgaaacgctcagcagagcgctgtcacccacctcaacaacaggcaagcagctttgggctca

SEQ ID NO: 4962 - DNA, 455 bp, Rattus norvegicus
  misc_feature (1)..(455): n=a, c, g or t
  ref <308>: DATABASE ACCESSION NUMBER: EMBL / AA859688
  ref <309>: DATABASE ENTRY DATE: 2000-03-03
tttttttttttttttttgggatacagaaatagttttattttcttaatgcagcacagtagacatacaatcgattattccctagagtgtgcaatataaattattcacattaaaaaattaacgacaaagcctgatatgcgggaaatattaaaaacatacacctaatttttatgtgttctgactgcggacatggctagctttataaatctgaataaataggacatggcgcacagtggcttgagtatagacgggcctgctccaggtgtagtgagaacccactctccactttggtcatcgagattccccgtggcagcgtggggcggctctgaaacacttctggcactccagggagggcgtctcgggcgctccccctactctcccttgtancgagggggtcttttctccttgaaagcaagaagaccttccagtctgtccttcgttgagatggtctgagcata

SEQ ID NO: 4963 - protein, 314 aa, Rattus norvegicus
  ref <308>: DATABASE ACCESSION NUMBER: Refseq / NP_057918
  ref <309>: DATABASE ENTRY DATE: 2002-01-07
MAAAAPGALGALRTGRVRLVAACCARLGPAAWARGTAPRRGYSSEVKTEDELRVRHLEEENRGIVVLGINRAYGKNALSKNLLKMLSKAVDALKSDKKVRTIIIRSEVPGIFCAGADLKERAKMHSSEVGPFVSKIRSVINDIANLPVPTIAAIDGLALGGGLELALACDIRVAASSAKMGLVETKLAIIPGGGGTQRLPRAIGMSLAKELIFSARVLDGQEAKAVGLISHVLEQNQEGDAAYRKALDLAREFLPQGPVAMRVAKLAINQGMEVDLVTGLAIEEACYAQTISTKDRLEGLLAFKEKRPPRYKGE

SEQ ID NO: 4964 - DNA, 1548 bp, Homo sapiens
  ref <308>: DATABASE ACCESSION NUMBER: EMBL / X79888
  ref <309>: DATABASE ENTRY DATE: 1995-04-18
caacatggcggccgcggtggcggcggcacctggggccttgggatccctgcatgctggcggcgcccgcctggtggccgcttgcagtgcgtggctctgcccggggttgaggctgcccggctcgttggcaggccggcgagcgggcccggcgatctgggcccagggctgggtacctgcggccgggggtcccgccccgaaaaggggctacagctctgagatgaagacggaggacgagctgcgggtgcggcacctggaggaggagaaccgaggaattgtggtgcttggaataaacagagcttatggcaaaaattcactcagtaaaaatcttataaaaatgctatcaaaagctgtggatgctttgaaatctgataagaaagtacggaccataataatcaggagtgaagtcccagggatattctgtgctggtgctgaccttaaggaaagagccaaaatgagttccagtgaagttggtccttttgtctccaaaataagagcagtgattaacgatattgctaatcttccagtgccaacaattgcagcaatagatggactcgctttaggtggtggtcttgaactggctttagcctgtgatatacgagtagcagcttcctctgcaaaaatgggcctggttgaaacaaaattggcgattattcctggtggaggggggacacagcgattgccacgcgccattggaatgtccctggccaaggagctcatattctctgcgcgagtcctcgatggcaaagaagccaaagcagtgggcttaatcagccacgttctggaacagaaccaggagggagacgcggcctacaggaaggccttggacctggcgagagagtttttacctcagggacctgttgcaatgagagtggcaaaattagcaattaatcaagggatggaggtcgatttagtaacagggttagccatagaagaagcttgttatgctcagaccattccaacaaaagacagacttgaaggtcttcttgcttttaaagagaaaaggccccctcgctataaaggagaataaaaggaacagaaattcttaagatgccaatgtaataaatgtacttcctggaagtgtctttcggatccactatatgcctcagcacatggaaccttaatgaccaaagtgaagagcagattattcatacggtgtaataagcgtctggaatggacccatccgtgtacttcattcaaatgtgtaaatgtcatattcattcagatttataaagctagtagtgtatagtcagaaacagaatcaaagttagatatacatttttaaatatttactgcatatgaggctttctgttaattttttaatgtgaataatttatatattgcacattctaggaataatattgattgtatgtctactgtgctgcattaagaaaataaaatttctatataccaaaaatgtgaagttataccaaataaagtttctaagtgattaatgcatacgaacagctacatatacatatatctaaacctgaaaaatgaattgatattctgagtgaaaactacctaatataaataaaattagtgaaaagaaaa

SEQ ID NO: 4965 - protein, 339 aa, Homo sapiens
  ref <308>: DATABASE ACCESSION NUMBER: Refseq / NP_001689
  ref <309>: DATABASE ENTRY DATE: 2002-11-05
MAAAVAAAPGALGSLHAGGARLVAACSAWLCPGLRLPGSLAGRRAGPAIWAQGWVPAAGGPAPKRGYSSEMKTEDELRVRHLEEENRGIVVLGINRAYGKNSLSKNLIKMLSKAVDALKSDKKVRTIIIRSEVPGIFCAGADLKERAKMSSSEVGPFVSKIRAVINDIANLPVPTIAAIDGLALGGGLELALACDIRVAASSAKMGLVETKLAIIPGGGGTQRLPRAIGMSLAKELIFSARVLDGKEAKAVGLISHVLEQNQEGDAAYRKALDLAREFLPQGPVAMRVAKLAINQGMEVDLVTGLAIEEACYAQTIPTKDRLEGLLAFKEKRPPRYKGE

SEQ ID NO: 4966 - DNA, 436 bp, Rattus norvegicus
  ref <308>: DATABASE ACCESSION NUMBER: EMBL / AA859690
  ref <309>: DATABASE ENTRY DATE: 2000-03-03
tttttttttttttttttacaaccattcatagaaattttattggacaaagcaaaatgctcttcaataagcaaacaaccataaaaacatggtgcgtccgcaccactcagcagggaagtcatgcaatttctggaacagagcacaaggtattacactgagtgagagcatctccaatgcttctgtcaacacgcttccatctcagcgctgcagagctggaggagagttggtatggtagcgaggtatgaagagttaggtggtagtgaggcagctgggtgactataagacagaatcaacgggccctctggagtactgagctcgttctatacattggtcatacataattgcatgaatcggcacacatgataaaatagcacgaagccacatacatactgttccaattaacaagtccttgcttttgatatgttacaccatatgttct

SEQ ID NO: 4967 - DNA, 522 bp, Rattus norvegicus
  ref <308>: DATABASE ACCESSION NUMBER: EMBL / AA859693
  ref <309>: DATABASE ENTRY DATE: 2000-03-03
tttttttttttttttttctgtgtcagagccagcccaatccaggtgggctgctgggagggtttactctcattttctcctcagacttttctgagaagcccagaaaaccacggagaccagattagtgtccttaacatctcaactctacagtagtcggacagccacgtcctaaatcctgtcagctacttcaggctaaaatccatcaagtgctgctgagcccaaggctaggcgatggagaggtggcttataactcatccctcatggcctgcatcctacttcctgtctccagtcactgccttcccgagtaatgagataatgaagaaaataagagtggatggaaatcaccaagcagaaattacacggtgccattagcaagcactataaaaacaaaattacaggttaccctcatttcccatgctcacacctgtctaaccagaaacactagattaatctaaccagtatatgcaagaggaaaacctcaaacagtaatttcaaattttaaacctgtcagccattcaaattgtt

SEQ ID NO: 4968 - DNA, 2659 bp, Homo sapiens
  ref <308>: DATABASE ACCESSION NUMBER: EMBL / AK001631
  ref <309>: DATABASE ENTRY DATE: 2002-08-06
catttggcccggggatggtcacacgcgcgggggccggaactgccgtcgccggcgcggtcgttgtcgcattgctctcggccgcactcgcgctgtacgggccgccactggacgcagttttagaaagagcgttttcgctacgtaaagcacattcgataaaggatatggaaaatactttgcagctggtgagaaatatcatacctcctctgtcttccacaaagcacaaagggcaagatggaagaataggcgtagttggaggctgtcaggagtacactggagccccatattttgcagcaatctcagctctcaaagtgggcgcagacttgtcccacgtgttctgtgccagtgcggccgcacctgtgattaaggcctacagcccggagctgatcgtccacccagttcttgacagccccaatgctgttcatgaggtggagaagtggctgccccggctgcatgctcttgtcgtaggacctggcttgggtagagatgatgcgcttctcagaaatgtccagggcattttggaagtgtcaaaggccagggacatccctgttgtcatcgacgcggatggcctgtggctggtcgctcagcagccggccctcatccatggctaccggaaggctgtgctcactcccgaccacgtggagttcagcaggctgtatgacgctgtgctcagaggccctatggacagcgatgacagccatggatctgtgctaagactcagccaagccctgggcaacgtgacggtggtccagaaaggagagcgcgacatcctctccaacggccagcaggtgcttgtgtgcagccaggaaggcagcagccgcaggtgtggagggcaaggggacctcctgtcgggctccctgggcgtcctggtacactgggcgctccttgctggaccacagaaaacaaatgggggcatatcagacttgaaattgacaatttggggtcctgagattgaaacaggagtcaaaaccagagcccagggtagctgcggcccccggaccacgacgcccacttccccacacctcctgctgtccccctctccgcaggtccagccctctcctggtggccgcgtttggcgcctgctctctcaccaggcagtgcaaccaccaagccttccagaagcacggtcgctccaccaccacctccgacatgatcgccgaggtgggggccgccttcagcaagctctttgaaacctgagcccgcgcagaccagaagtaaacaggcaccttggacgggggagagcgtgtgtgtgatgggaaaatccggacccacgcgtgtgctgaaggcgtacggtgcttgccagattttcaacttgagcataaattggttgccattgagaatttaagaatctggaatattgcagcttttggttaaacttaatgcatggttggagatgttatggcgacactaaacaaagtattcctgaactttccttagctccttggtagtaactgggaagacggaaatgaagaaaatcacatgagaatgaagaattctttagcagctcaacagagtttctcggcctgctcccagatcggcgaagtttctacttgttactctctctgccggcgcccttcgttcctcctctgcttcccttccctagtctttcctccggcagggagctgggcaggggtccccgggtgtctccctgagtcccgactgcactgactgggtccatcagagggctgcttcgttctccagctcatcttcttttaaagtggtgactagcttggtggtatctggctgctggtgtttggcttattgacatactccagggtaatcaatgatgactttgtttggaaacccttttggaggcaccatgggaacagaaggaaacatgagtgacgctgacccttgagtgtgtgggtggggagctctgagacgcctcctgtcccacgctctccggtgtccgtgtctacacaggggtccccatgatacccaccggccccagcagggcagaccggaccggggacgggcacggtgaagggctgcagcctggggtctgacgtggcccctagtgctgtctcaggagaaggctctggaggacttgaggcatgctgggcctggtgcagtgatggcgctaaggagacccggggaaagacagtatcgtggtcacgtatgcttaggaagcagcacagccgtgtccttagggatgttcgcgtccagtaaagacactggtaactgcggtttcagccaacactcttcatggcagtgtcgacctcgggttagcttctgttgtctttgtggatggttttcctggagcggcctgacgttgacgtgttctctggtcccatgtcttagcggggcatggtacggtttcgtgcctgacgcgtgcattagggtgttctcttatactttcagtagcatctttccacagcaagggccaaaccctcctggttcccttcagagtctttttggcctgatgatgactcttgagtgataccctgtgatgcagacatgccccagatggattctactttctttaaaactagggactttcaagattaaaaaaaagattgtcactactaatttgacgcctaacttcagaagcttcactgcctacatgtgaacttttccagaaaaactgtgccatggacatttttcctctggggaattaacatctaaattctggtaactattaaaagacagatctggttaattt

SEQ ID NO: 4969 - protein, 391 aa, Homo sapiens
  misc_feature (1)..(391): Xaa=Unknown amino acid
MVTRAGAGTAVAGAVVVALLSAALALYGPPLDAVLERAFSLRKAHSIKDMENTLQLVRNIIPPLSSTKHKGQDGRIGVVGGCQEYTGAPYFAAISALKVGADLSHVFCASAAAPVIKAYSPELIVHPVLDSPNAVHEVEKWLPRLHALVVGPGLGRDDALLRNVQGILEVSKARDIPVVIDADGLWLVAQQPALIHGYRKAVLTPDHVEFSRLYDAVLRGPMDSDDSHGSVLRLSQALGNVTVVQKGERDILSNGQQVLVCSQEGSSRRCGGQGDLLSGSLGVLVHWALLAGPQKTNGGISDLKLTIWGPEIETGVKTRAQGSCGPRTTTPTSPHLLLSPSPQVQPSPGGRVWRLLSHQAVQPPSLPEARSLHHHLRHDRRGGGRLQQALX

SEQ ID NO: 4970 - DNA, 485 bp, Rattus norvegicus
  ref <308>: DATABASE ACCESSION NUMBER: EMBL / AA859702
  ref <309>: DATABASE ENTRY DATE: 2000-03-03
cggccgcgacgaagagcggcggaagctggccgacatcattcaccactggaacgccaaccggctggacctgttcgagatcagccagccgaccgaggatttggagtttcatggagtcatgagattttattttcaagataaagctgctggaaactttgcaacaaaatgtattcgggtctctagcacagcaaccactcaagatgtcattgaaacactggcagagaagttccgccctgatatgcgcatgctctcctctcccaagtactccctctatgaagtgcatgtcagtggagaaagaagattggacattgatgagaaacctctagttgtacagttgaattggaacaaagatgatcgggagggtagattcgtccttaagaacgagaatgacgccattcctgccaagaaggctcaaagtaatggacctgagaagcaggagaaagaaggtgttattcagaacttcaaaagaactctgtcaaagaaaaaaa

SEQ ID NO: 4971 - protein, 442 aa, Rattus norvegicus; identical to SEQ ID NO: 2335
  ref <308>: DATABASE ACCESSION NUMBER: SWISS-Prot / Q01205
  ref <309>: DATABASE ENTRY DATE: 2002-06-15

SEQ ID NO: 4972 - DNA, 510 bp, Homo sapiens; identical to SEQ ID NO: 2336
  ref <308>: DATABASE ACCESSION NUMBER: EMBL / AI184508
  ref <309>: DATABASE ENTRY DATE: 2000-03-03

SEQ ID NO: 4973 - protein, 1816 aa, Homo sapiens; identical to SEQ ID NO: 2337
  ref <308>: DATABASE ACCESSION NUMBER: SWISS-Prot / P55196
  ref <309>: DATABASE ENTRY DATE: 2002-06-15

SEQ ID NO: 4974 - DNA, 493 bp, Rattus norvegicus
  ref <308>: DATABASE ACCESSION NUMBER: EMBL / AA859718
  ref <309>: DATABASE ENTRY DATE: 2000-03-03
ttttttttttttttattgatacggtttctctgcagccctggctgtcctggagctcgggcaccagactggcctcaaacttacagagctccacctgtctctgcctcccaagtgctgggattaaaggtgtgtgccaccactccttagttgatgtgaatcaggcaccggcttgcagggctagccatgaaagtctagcagcctcttttgcactacaaggtccatgctgatggacccaacagtctggggctagtgaggtcttacgtccaaacacttccttcttactccgtgacagggtttacctggatcagcgaaagtctgctccagcactcgaaggagcaggtccaccgcccttgggacaccagcctctttagacgctaagcgttagccataacatgcttcttcagaagaggcctgtagaagaggtgctgtggtgatgttagcagacacctctctgtgctttcaagccgcttgtcaataaagtgtctttgggggctgg

SEQ ID NO: 4975 - DNA, 531 bp, Rattus norvegicus
  ref <308>: DATABASE ACCESSION NUMBER: EMBL / AA859719
  ref <309>: DATABASE ENTRY DATE: 2000-03-03
tttttttttttttttttggtagtatagcaactcatttactctgaacatttattacacatttacgccaaatatattttagtaattgttgatagggaaagttcttaaaaaacaaaatgacaacaaaaacccaagagatgcagcaaagatagaattataaactcattacaattcttaacaaaaacagatccgtgccacacaacaatcattgaaatgtctaagccactaggcaacaggtaagctttaaatgttggttcctcacaactaacttgggatccagtgccttcctcttgccttcagtaccaggcccagaccacacggagcacaggtttacatgcatataaaacactgataacgcattaatgggaaattttaaaggatgaaacaactatttagcagttctttaattcactgtcacataaagttgaccctaaatatttagaatattctgtttaactctccatctattgttatccaaaaagtgatagtaactgcagaccagggacactaagctagctcaagaatatagcatag

SEQ ID NO: 4976 - protein, 128 aa, Rattus norvegicus
  ref <308>: DATABASE ACCESSION NUMBER: Refseq / NP_079750
  ref <309>: DATABASE ENTRY DATE: 2002-01-07
MAASVLGSLLRTFRQAVPPSASGQVRGYYVDWRMLRDLKRRKMAYEYADERLRINSLRKNTILPKDLQEMAGDEIAALPRDSCPVRIRNRCVMTSRPRGVKRRWRLSRIVFRHLADHGLLSGVQRAIW

SEQ ID NO: 4977 - DNA, 435 bp, Rattus norvegicus
  ref <308>: DATABASE ACCESSION NUMBER: EMBL / AA859740
  ref <309>: DATABASE ENTRY DATE: 2000-03-03
tttttttttttttttttggcctagtgccctatcccttacgttctttaagaggccctggcaagcccttagtggaggtgccatgactttttcagagtccatatgcatgcagccaagggttgtgagctgtccctgagataggacagggcccactccctgcctctgcctcactctgcactcaggctaagaaggggagggtcaccacagacaggagtgggggccattatgtagcacagcaatattctagatgttggcaggtgtcactgctgccccagagcaatggcttaatcttcacgtgtgtggtataggatcaggcactgggcacttgaccttggggtccatgggcaagatgagttctgattgtgcactgtccggcccaatctagggccacctttatggtggttgatcactctgaagatatgggtggcaagatgagtt

SEQ ID NO: 4978 - protein, 401 aa, Rattus norvegicus
  ref <308>: DATABASE ACCESSION NUMBER: SWISS-Prot / BAA89248
  ref <309>: DATABASE ENTRY DATE: 2001-12-01
MVERASKFVLVVAGSACFMLILYQYAGPGLSLGAPGGRVPPDDLDLFPTPDPHYEKKYYFPVRELERSLRFDMKGDDVIVFLHIQKTGGTTFGRHLVQNVRLEVPCDCRPGQKKCTCYRPNRRETWLFSRFSTGWSCGLHADWTELTNCVPGVLDRRDPAGLRSPRKFYYITLLRDPVSRYLSEWRHVQRGATWKTSLHMCDGRTPTPEELPPCYEGTDWSGCTLQEFMDCPYNLANNRQVRMLADLSLVGCYNLSFIPESKRAQLLLESAKKNLRGMAFFGLTEFQRKTQYLFERTFNLKFIRPFMQYNSTRAGGVEVDEDTIRHIEELNDLDMQLYDYAKDLFQQRYQYKRQLERREQRLRNREERLLHRSKEALPREDPEEPGRVPTEDYMSHIIEKW

SEQ ID NO: 4979 - DNA, 2055 bp, Homo sapiens
ggcgccgagtagccgggccgggccggagcgcgggcggcggcggaggcagctgcgcccgcgcctcctgccctcccaggccccgcgccccgcgcccgggccccggcgatggtgacacatgcggcggcggcgcgccggcggcaggaccatggttgagcgcgccagcaagttcgtgctggtggtggcgggctcggtgtgcttcatgctcatcttgtaccagtacgcgggcccaggactgagcctgggcgcgcccggcggccgcgcgccgcccgacgacctggacctgttccccacgcccgacccccactacgagaagaagtactacttcccggtccgcgagctggagcgctcgctgcgcttcgacatgaagggcgacgacgtgatcgtcttcctgcacatccagaagacgggcggcaccaccttcggccgccacctcgtgcagaacgtacgcctcgaggtgccgtgcgactgccggcccggccagaagaagtgcacctgctaccggcccaaccgccgcgagacttggctcttctcccgcttctccaccggctggagctgcgggctgcacgccgactggaccgagctcaccaactgcgtgcccggcgtgctggaccgccgcgactccgccgcgctgcgcacgcccaggaagttctactacatcaccctgctacgagaccccgtgtcccgctacctgagcgagtggcggcatgtgcagaggggtgccacgtggaagacgtcgttgcatatgtgtgatgggcgcacgcccacgcctgaggagctgccgccctgctacgagggcacggactggtcgggctgcacgctacaggagttcatggactgcccgtacaacctggccaacaaccgccaggtgcgcatgctggccgacctgagcctggtgggctgctacaacctgtccttcatccccgagggcaagcgggcccagctgctgctcgagagcgccaagaagaacctgcggggcatggccttcttcggcctgaccgagttccagcgcaagacgcagtacctgttcgagcggacgttcaacctcaagttcatccggcccttcatgcagtacaatagcacgcgggcgggcggcgtggaggtggatgaagacaccatccggcgcatcgaggagctcaacgacctggacatgcagctgtacgactacgccaaggacctcttccagcagcgctaccagtacaagcggcagctggagcgcagggagcagcgcctgaggagccgcgaggagcgtctgctgcaccgggccaaggaggcactgccgcgggaggatgccgacgagccgggccgcgtgcccaccgaggactacatgagccacatcattgagaagtggtagtggcggtggtggccacggggaggcctcttggggggtgtgggggataaaacaggacagacgacaggtccacccaagactgtcaagggatgagcatcccaaacctgctccacagaggtagctgcgtcctgaaaaaaaacagagcagggatgtagtggggctgggcagggatgggggcttgagaaatcaacaggtgcagcccagtgggtcagaggaaagcgtgctcgaaggatgccatggtcagggcagggcctccagagcaggtgttgtgcctggagctgctctcctggcctccttggatttatcgcaaaaactgaaggtttgcgcaagagacgaggacagcggaaagtggacctgccaggccgggagtgtgtccctcaccaactatgcacacagcactcgctcttagctcctctgtccgggctactaggagtgagaccagcttctggcaactgccccagctccaggccatcccatagcccctcctcttctggctgcccccaatgccccgaggcctggggagcccccagctcacccatctgtagctccctcaaagtcagggcccaccccatctgaggcagagaagactcgagtccagcccccaggaagcctgctcccctctctggcccatggtcctgcttcatgctttgggtcaggaggccaaagctgatgttcaggccccacccactccctacagtcctcagacc

SEQ ID NO: 4980 - protein, 401 aa, Homo sapiens [sequence omitted]

SEQ ID NO: 4981 - DNA, 458 bp, Rattus norvegicus
  ref <308>: DATABASE ACCESSION NUMBER: EMBL / AA859750
  ref <309>: DATABASE ENTRY DATE: 2000-03-03
tttttttttttttttctgaagtaaatagagacatgtagagtcttccctccatgtcaggctgcacttcattagccccagctcagtaatgcagggaaccctagtgacccatcggccaagaaactcccagaagcattaaaaaaaaagttatattccgctgccaagtggatagtcatttagctgtttgtcccttgttttttatttattccataattatgtttgtgctttttcttgtgtgaacagtagtgaggcgtatgtttttatgtggctttagagaaaacttcagtcttcaaagaactgttctaattagttccttctcggaaaaagttatgcgttaatttgtttcaaaatatttaggcattctttgaattataaacttgtgatgcagggatttgtgaacgagacgttcacaagtgaagatgacttcacttagcatctgtgtaaacagaataagatgtgta

SEQ ID NO: 4982 - DNA, 357 bp, Homo sapiens
  ref <308>: DATABASE ACCESSION NUMBER: EMBL / AI671553
  ref <309>: DATABASE ENTRY DATE: 1999-12-22
ttttttttttttttacttaaaagcatttttttatttaatttctgagggaaaatacttttttctttcaacttccataacaaaatacagagctatcagatacccctggaaaaaatatgtatattatacatatatttctataacattacatcatatatatataatatatatgcaaaaatttgaagactttatagaaagcggaacatctaaaaggcactgcacaatggagttaagattacttacattttatgtacatatacacactttactctgctcaagcaggtaactagtgaagtcacctttcacatgtaaatgtctcattcacaaatccctgcatcacaattctataactcaaagaat

SEQ ID NO: 4983 - DNA, 497 bp, Rattus norvegicus
  ref <308>: DATABASE ACCESSION NUMBER: EMBL / AA859783
  ref <309>: DATABASE ENTRY DATE: 2000-03-03
tttttttttttttttttaccagtaacaataacttttattctctagcaggtcatttttctactgcttcagtattttcctctaagaaaacacaagttttagaactggatcacttgaccctttctcttcttgtcgcctcccagttcaaaatgcttgcatctcttaatggccagcatcctcttagatctgcagttgggctcaacacactcaagcctgagcacaatcttctttgtggttttggccttctttcgaaaaattggctttgtttgcccgccatagccactctgcttccggtcgtagcgccgctttccttgggcatacagggaatccttgcccttcttatactgggtcactttgtgaggctggtgcttgccacatttcttacagaaagtccttcgggttttaggtacgttgaccatctttgcagcagaagtgtctgcgatgaaaacgagagaccggcagcagcgatcccgcctcaaccggcacctcgtgccgaattc

SEQ ID NO: 4984 - protein, 105 aa, Rattus norvegicus
  ref <308>: DATABASE ACCESSION NUMBER: SWISS-Prot / P09896
  ref <309>: DATABASE ENTRY DATE: 2002-06-15
VNVPKTRRTFCKKCGKHQPHKVTQYKKGKDSLYAQGKRRYDRKQSGYGGQTKPIFRKKAKTTKKIVLRLECVEPNCRSKRMLAIKRCKHFELGGDKKRKGQVIQF

SEQ ID NO: 4985 - DNA, 425 bp, Homo sapiens
  ref <308>: DATABASE ACCESSION NUMBER: Refseq / NM_021029
  ref <309>: DATABASE ENTRY DATE: 2002-11-05
gcggtttctttctttccgcgccgatagcgctcacgcaagcatggttaacgtccctaaaacccgccggactttctgtaagaagtgtggcaagcaccaaccccataaagtgacacagtacaagaagggcaaggattctctgtacgcccagggaaagcggcgttatgacaggaagcagagtggctatggtgggcaaactaagccgattttccggaaaaaggctaaaactacaaagaagattgtgctaaggcttgagtgcgttgagcccaactgcagatctaagagaatgctggctattaaaagatgcaagcattttgaactgggaggagataagaagagaaagggccaagtgatccagttctaagtgtcatcttttattatgaagacaataaaatcttgagtttatgttcaaaaaaaaaaaaaaaaaa

SEQ ID NO: 4986 - protein, 106 aa, Homo sapiens [sequence omitted]

SEQ ID NO: 4987 - DNA, 440 bp, Rattus norvegicus
  ref <308>: DATABASE ACCESSION NUMBER: EMBL / AA859788
  ref <309>: DATABASE ENTRY DATE: 2000-03-03
tttttttttttttttttacagagaacagtcctttattttcagagcagaggctggagctggccacagtggccagcagttcccactccctcatgtccaagaggccagcctcggcacctccagcttctgtgcaaggagaggaatgttctcccaaggaaggctcgagaacagcccgctccagcagcctccacagtgggctttctgtaggatccacctgagtcaagactttaggtcaggttcaggtccaggtttccttgctatcacagtcttcgagccttccggggtcggcagccattgtgtgggacaggggtgttgtctgtgatggagatcacttccagaccacccatggtcagtcctttgatggcagaccagcgtcctggtccaatgcctttcactacgactctgatgtgggtcactcctttgcctgtggctttctggagaga

SEQ ID NO: 4988 - protein, 191 aa, Rattus norvegicus
  ref <308>: DATABASE ACCESSION NUMBER: SWISS-Prot / BAB40998
  ref <309>: DATABASE ENTRY DATE: 2002-06-15
MQVLRNSGSWLLRSWTGHGMTRFVGIAPAKNIHTGAPRLEDSAARQNTEREAAPSRFSLYPPVPGQESSLQWAGMKFEDVPIAHIKATYNNTQIQVVSATNASLARASCGTEGFRNAKKGTGIAAQTAGIAAAAKATGKGVTHIRVVVKGMGPGRWSAIKGLTMGGLEVISITDNTPVPHNGCRPRKARRL

SEQ ID NO: 4989 - DNA, 894 bp, Homo sapiens
  ref <308>: DATABASE ACCESSION NUMBER: EMBL / AK026165
  ref <309>: DATABASE ENTRY DATE: 2000-09-29
aattcaagtcatgcaggctgtgagaaacgcggggtcgcggttcctgcggtcctggacttggccccagacagccggcagggtcgtggccagaacgccggccgggaccatctgcacaggcgctcgacagctccaagacgctgcggccaagcagaaagttgaacagtacgcggctcccagccacaccaagttcagcatttaccctcccattccaggagaggagagctctctgaggtgggcaggaaagaaatttgaggagatcccaattgcacacattaaagcatcccacaacaacacacagatccaggtagtctctgctagtaatgagccccttgcctttgcttcctgtggcacagagggatttcggaatgccaagaagggcacaggcatcgcagcacagacagcaggcatagccgcagcggcgagagctaaacaaaagggcgtgatccacatccgagttgtggtgaaaggcctggggccaggacgcttgtctgccatgcacggactgatcatgggcggcctggaagtgatctcaatcacagacaacaccccaatcccacacaacggctgccgccccaggaaggctcggaagctgtgatgggaaggaggcctgcacttggacctgacctcaagcctcagctccagtgggaccttgtaaaatgctccctgtcagagctctccagaatatgcttgttggagatccttcaggcagtaagggagagttttgcctccttacacagtggcctttgcttgcacctccagctggagatgggtgtgccccagaagtaagctttgcatctcttacaagaggggagctacaggggcagccgtggcctaggcccaaactctgctctgagaaaataaatatctgtaccacctgtcaaaaaaaaaaaaaaa

SEQ ID NO: 4990 - protein, 194 aa, Homo sapiens
  ref <308>: DATABASE ACCESSION NUMBER: SWISS-Prot / P82912
  ref <309>: DATABASE ENTRY DATE: 2002-06-15
MQAVRNAGSRFLRSWTWPQTAGRVVARTPAGTICTGARQLQDAAAKQKVEQNAAPSHTKFSIYPPIPGEESSLRWAGKKFEEIPIAHIKASHNNTQIQVVSASNEPLAFASCGTEGFRNAKKGTGIAAQTAGIAAAARAKQKGVIHIRVVVKGLGPGRLSAMHGLIMGGLEVISITDNTPIPHNGCRPRKARKL

SEQ ID NO: 4991 - DNA, 450 bp, Rattus norvegicus
  ref <308>: DATABASE ACCESSION NUMBER: EMBL / AA859805
  ref <309>: DATABASE ENTRY DATE: 2000-03-03
tttttttttttttttttgactagaaaacccttgttttattaagcacccgggcaatcttgctgtgtgggatggccaaaacatcaaaattaaaaccaacaacagacaaaatggtgttgtagaggagacttaggtacaaaacggggtctggcatccagaatccctgtgggtttggtccatgttcactccctgaggccggcagggagggatgccccagcggccagctgccctcgccctccggctaggcggctatgcttcttgggggaggctgcctggaagcaggtcctgcttttcaaggggagacaaggggggctccgtccactgagatcaggactggacgattttgcagtttgttgtagagacgaagcgacctgtgtagtggatgttgcatctcaccacgttgttggtgaagtcagactccagaacaatgtacttggggttcacgtgcacctt

SEQ ID NO: 4992 - DNA, 2328 bp, Homo sapiens
  ref <308>: DATABASE ACCESSION NUMBER: EMBL / L21186
  ref <309>: DATABASE ENTRY DATE: 1999-07-02
gccagccgagcggccagccagtgcggggctggccatgtaaggcccacaggcggtcctgcccgcccggtgccctgcggagagcctcgtgcagccctgggcaccgcccctgccctgccctgaccccttggccttgaaatgctgtcatcggaggagccgtcccgctcgggacaaggccagcatggacaaagctagagctggggcaagcaaggagccttcctgtcctcgaggccgtgggaagagaagcacgcccagggggccactcctgagagcctctctgtccaccaggcctctgcagaggggtcaccatggctctggcccgaggcagccggcagctgggggccctggtgtggggcgcctgcctgtgcgtgctggtgcacgggcagcaggcgcagcccgggcagggctcggaccccgcccgctggcggcagctgatccagtgggagaacaacgggcaggtgtacagcttgctcaactcgggctcagagtacgtgccggccggacctcagcgctccgagagtagctcccgggtgctgctggccggcgcgccccaggcccagcagcggcgcagccacgggagcccccggcgtcggcaggcgccgtccctgcccctgccggggcgcgtgggctcggacaccgtgcgcggccaggcgcggcacccattcggctttggccaggtgcccgacaactggcgcgaggtggccgtcggggacagcacgggcatggccctggcccgcacctccgtctcccagcaacggcacgggggctccgcctcctcggtctcggcttcggccttcgccagcacctaccgccagcagccctcctacccgcagcagttcccctacccgcaggcgcccttcgtcagccagtacgagaactacgaccccgcgtcgcggacctacgaccagggtttcgtgtactaccggcccgcgggcggcggcgtgggcgcgggggcggcggccgtggcctcggcgggggtcatctacccctaccagccccgggcgcgctacgaggagtacggcggcggcgaagagctgcccgagtacccgcctcagggcttctacccggcccccgagaggccctacgtgccgccgccgccgccgccccccgacggcctggaccgccgctactcgcacagtctgtacagcgagggcacccccggcttcgagcaggcctaccctgaccccggtcccgaggcggcgcaggcccatggcggagacccacgcctgggctggtacccgccctacgccaacccgccgcccgaggcgtacgggccgccgcgcgcgctggagccgccctacctgccggtgcgcagctccgacacgcccccgccgggtggggagcggaacggcgcgcagcagggccgcctcagcgtaggcagcgtgtaccggcccaaccagaacggccgcggtctccctgacttggtcccagaccccaactatgtgcaagcatccacttatgtgcagagagcccacctgtactccctgcgctgtgctgcggaggagaagtgtctggccagcacagcctatgcccctgaggccaccgactacgatgtgcgggtgctactgcgcttcccccagcgcgtgaagaaccagggcacagcagacttcctccccaaccggccacggcacacctgggagtggcacagctgccaccagcattaccacagcatggacgagttcagccactacgacctactggatgcagccacaggcaagaaggtggccgagggccacaaggccagtttctgcctggaggacagcacctgtgacttcggcaacctcaagcgctatgcatgcacctctcatacccagggcctgagcccaggctgctatgacacctacaatgcggacatcgactgccagtggatcgacataaccgacgtgcagcctgggaactacatcctcaaggtgcacgtgaacccaaagtatattgttttggagtctgacttcaccaacaacgtggtgagatgcaacattcactacacaggtcgctacgtttctgcaacaaactgcaaaattgtccaatcctgatctccgggagggacagatggccaatctctccccttccaaagcaggccctgctccccgggcagcctcccgccgaggggcccagcccccaacccacaggcagggaggggcatccctccctgccggcctcagggagcgaacgtggatgaaaaccacagggattccggatgccagaccccattttatacttcacttttctctacagtgttgttttgttgttgttggtttttattttttatactttggccataccacagagctagattgcccaggtctgggctgaataaaacaaggtttttct

SEQ ID NO: 4993 - protein, 574 aa, Homo sapiens
  ref <308>: DATABASE ACCESSION NUMBER: SWISS-Prot / Q08397
  ref <309>: DATABASE ENTRY DATE: 2002-06-15
MALARGSRQLGALVWGACLCVLVHGQQAQPGQGSDPARWRQLIQWENNGQVYSLLNSGSEYVPAGPQRSESSSRVLLAGAPQAQQRRSHGSPRRRQAPSLPLPGRVGSDTVRGQARHPFGFGQVPDNWREVAVGDSTGMALARTSVSQQRHGGSASSVSASAFASTYRQQPSYPQQFPYPQAPFVSQYENYDPASRTYDQGFVYYRPAGGGVGAGAAAVASAGVIYPYQPRARYEEYGGGEELPEYPPQGFYPAPERPYVPPPPPPPDGLDRRYSHSLYSEGTPGFEQAYPDPGPEAAQAHGGDPRLGWYPPYANPPPEAYGPPRALEPPYLPVRSSDTPPPGGERNGAQQGRLSVGSVYRPNQNGRGLPDLVPDPNYVQASTYVQRAHLYSLRCAAEEKCLASTAYAPEATDYDVRVLLRFPQRVKNQGTADFLPNRPRHTWEWHSCHQHYHSMDEFSHYDLLDAATGKKVAEGHKASFCLEDSTCDFGNLKRYACTSHTQGLSPGCYDTYNADIDCQWIDITDVQPGNYILKVHVNPKYIVLESDFTNNVVRCNIHYTGRYVSATNCKIVQS

SEQ ID NO: 4994 - DNA, 517 bp, Rattus norvegicus
  ref <308>: DATABASE ACCESSION NUMBER: EMBL / AA859827
  ref <309>: DATABASE ENTRY DATE: 2000-03-03
tttttttttttttttttatatatatgtatgtatgtgtgtatttataactggttacacgttggattcataattaggcatcaccagtactagttggcacagtttgtcacttaagctcagggtcaagttcggtcaagatttgctgttccaaagtacaaaagggcagaaaggaaaatcaaggcatttcatctccgtggtgttttcttaaatacagtaatttcagaggaggcatatgtacaggtgaccaaagcctctcgacccctcctgcgtcttggagctgggggctggggtatggagtcagggcacgggggggtcaatgtggccggctgctggactctgacgcctgcctcttgcgggaaggggtatagccgttgagatagccgttcgtctgccgcttggagagcccgccgttcaggatgtcctgtatatgctgcacgatgaggttgatggccacgagattgtctgcacctctaggaatgatcacatcagcatatttctttgttggcaagcagaactcctc

SEQ ID NO: 4995 - protein, 105 aa, Rattus norvegicus
  ref <308>: DATABASE ACCESSION NUMBER: SWISS-Prot / BAA83085
  ref <309>: DATABASE ENTRY DATE: 2002-10-01
KLFVDTDADTRLSRRVLRDISERGRDLEQILSQYITFVKPAFEEFCLPTKKYADVIIPRGADNLVAINLIVQHIQDILNGGLSKRQTNGYLNGYTPSRKRQASES

SEQ ID NO: 4996 - DNA, 437 bp, Homo sapiens
  ref <308>: DATABASE ACCESSION NUMBER: EMBL / BF745219
  ref <309>: DATABASE ENTRY DATE: 2001-08-31
gctgccggtcgctctagcaggatccccttgaatggccggaggcgttgaatggcccggaggcgttgaatggcccggaggcgttgaatggcccggaggcgttgaatggcccggaggcgttgaatggcccggaggcgttgaatggcccggaggcgttgaatggcccggagggccctccattcaggatgtcctggatgtgctgcacgatgaggttgatggccaccagattatctgcacctctagggatgatcacatcagcatacttctttgttggcaagcagaattcctcaaagtcagtgacacgccaggtagcaaagcatgacaggatgctcaggtagggacttgcccagacccaggcagggagctggagtgaacacaggaggtgaggctgaatgcggagtcacacagacaagccttgtttgaaggaaggaatctgcaag

SEQ ID NO: 4997 - protein, 84 aa, Homo sapiens
  ref <308>: DATABASE ACCESSION NUMBER: SWISS-Prot / P04155
  ref <309>: DATABASE ENTRY DATE: 2002-06-15
MATMENKVICALVLVSMLALGTLAEAQTETCTVAPRERQNCGFPGVTPSQCANKGCCFDDTVRGVPWCFYPNTIDVPPEEECEF

SEQ ID NO: 4998 - DNA, 575 bp, Rattus norvegicus
  ref <308>: DATABASE ACCESSION NUMBER: EMBL / AA859832
  ref <309>: DATABASE ENTRY DATE: 2000-03-03
tttttttttttttttttactggccacttccaagaatgctttacaggttgtgcaaaaacatttacaggctccatgtggtatttgtttgtttgtttttttaaacaagtttttccaactacaactacaacagacatctgataaaacactaaacaactcttctaaggaaaacaaaaccagggattcctcttaataccataatctacaacccatacctgccccaataacatttcttttcataataaaaacacaagacagaaacaaaatgcagacatccactttgatacaggagacctcctgaacaaacccaacaaggatgtggcagtttcattctccattcaactagaaaaacagctttttaaaaagaggactttgacttttctggtgttgtaaaccaacagcgagtatactctctaacccctgttgccccaaacttcagtgttaagtttttgcccttcttatggctccatcacctagaatccaggtcacagacactgtaagtgttacttgttggaggactaacatctgaagggacagcttctgcctcaggaaattaagtttcctattaaaacataattt

SEQ ID NO: 4999 - DNA, 479 bp, Homo sapiens
  ref <308>: DATABASE ACCESSION NUMBER: EMBL / AI139056
  ref <309>: DATABASE ENTRY DATE: 2000-03-03
ttttttttttttttttgaattcaatccaaatggttatttattctaaaactggaagctactttgcctacattttcgccagaatggtgtaatgagaacaggggaggaaaaagttacagatgtaaacaatgacacagttacattttttttttaaatggtaaaacccctttttactggccacttccaagaatgctttacaggttgtgcaaaaacatttacaggctccatgtggtgtttttctcacaagctttcctgtctacaactacaacagacgtctgataaaacactaaacaagtcttctaaggaaaacaaggctagggattcctctggttaccataatccacattttcccccttaacatagtttttcataataaaaagacagaaacaaaacccggacatctactgttgttgcaaatgatctcttggactaaaccaacaaggatgtggcagtttcactttccacccacctagaaaaacagt

SEQ ID NO: 5000 - DNA, 503 bp, Rattus norvegicus
  ref <308>: DATABASE ACCESSION NUMBER: EMBL / AA859837
  ref <309>: DATABASE ENTRY DATE: 2000-03-03
tttttttttttttttttgaatatactttctgatcggtccctgggtacaaggaagatagcagactcatgtcctcccaggagagcgtcatggatgtccaagggccttacacggagctggagaatggaacgacctgctttccacccacataaacctcctcaatgtttcggtcatctcctagatagaggaacttctggataacagcctcagaaatatcaccaacgaaatccccacaaaacagatcaatgggagagtccgatgctctggggttgatcaagagggcatcaaaatccttgccgacctcaaagtttccaatttcacgatcaagccccagggcttggcttcctccaagagtggctagtctgaagacttctttgagggtgaggcttttctcattcaccttattaattaagaggacgttggaaaccatcactgctcttcggatggcgtcaagcatggaataggagtaaccaccagccacatctgtcccaagccctatcttcact

SEQ ID NO: 5001 - protein, 71 aa, Rattus norvegicus
  ref <308>: DATABASE ACCESSION NUMBER: SWISS-Prot / P36577
  ref <309>: DATABASE ENTRY DATE: 1999-07-15
LKHEDTNLSVSLTDSSVVSLYSGTVLFKSMHTLPTNARCPNLSVISATSGMSQCELSQSSMPWWCRSLVFS

SEQ ID NO: 5002 - DNA, 1630 bp, Homo sapiens
  ref <308>: DATABASE ACCESSION NUMBER: Refseq / NM_004293
  ref <309>: DATABASE ENTRY DATE: 2000-11-01
cggcagccgcccgcagctgcagagagtcccgctgcgtctccgccgcgtgcgccctcctcgaccagcagacccgcgctgcgctccgccgctgacatgtgtgccgctcagatgccgcccctggcgcacatcttccgagggacgttcgtccactccacctggacctgccccatggaggtgctgcgggatcacctcctcggcgtgagcgacagcggcaaaatagtgtttttagaagaagcatctcaacaggaaaaactggccaaagaatggtgcttcaagccgtgtgaaataagagaactgagccaccatgagttcttcatgcctgggctggttgatacacacatccatgcctctcagtattcctttgctggaagtagcatagacctgccactcttggagtggctgaccaagtacacatttcctgcagaacacagattccagaacatcgactttgcagaagaagtatataccagagttgtcaggagaacactaaagaatggaacaaccacagcttgttactttgcaacaattcacactgactcatctctgctccttgccgacattacagataaatttggacagcgggcatttgtgggcaaagtttgcatggatttgaatgacacttttccagaatacaaggagaccactgaggaatcgatcaaggaaactgagagatttgtgtcagaaatgctccaaaagaactattctagagtgaagcccatagtgacaccacgtttttccctctcctgctctgagactttgatgggtgaactgggcaacattgctaaaacccgtgatttgcacattcagagccatataagtgaaaatcgtgatgaagttgaagctgtgaaaaacttataccccagttataaaaactacacatctgtgtatgataaaaacaatcttttgacaaataagacagtgatggcacacggctgctacctctctgcagaagaactgaacgtattccatgaacgaggagcatccatcgcacactgtcccaattctaatttatcgctcagcagtggatttctaaatgtgctagaagtcctgaaacatgaagtcaagatagggctgggtacagacgtggctggtggctattcatattccatgcttgatgcaatcagaagagcagtgatggtttccaatatccttttaattaataaggtaaatgagaaaagcctcaccctcaaagaagtcttcagactagctactcttggaggaagccaagccctggggctggatggtgagattggaaactttgaagtgggcaaggaatttgatgccatcctgatcaaccccaaagcatccgactctcccattgacctgttttatggggacttttttggtgatatttctgaggctgttatccagaagttcctctatctaggagatgatcgaaatattgaagaggtttatgtgggcggaaagcaggtggttccgttttccagctcagtgtaagaccctcgggcgtctacaaagttctcctgggattagcgtggttctgcatctcccttgtgcccaggtggagttagaaagtcaaaaaatagtaccttgttcttgggatgactatccctttctgtgtctagttacagtattcacttgacaaatagttcgaaggaagttgcactaa

SEQ ID NO: 5003 - protein, 454 aa, Homo sapiens
  ref <308>: DATABASE ACCESSION NUMBER: SWISS-Prot / Q9Y2T3
  ref <309>: DATABASE ENTRY DATE: 2002-06-15
MCAAQMPPLAHIFRGTFVHSTWTCPMEVLRDHLLGVSDSGKIVFLEEASQQEKLAKEWCFKPCEIRELSHHEFFMPGLVDTHIHASQYSFAGSSIDLPLLEWLTKYTFPAEHRFQNIDFAEEVYTRVVRRTLKNGTTTACYFATIHTDSSLLLADITDKFGQRAFVGKVCMDLNDTFPEYKETTEESIKETERFVSEMLQKNYSRVKPIVTPRFSLSCSETLMGELGNIAKTRDLHIQSHISENRDEVEAVKNLYPSYKNYTSVYDKNNLLTNKTVMAHGCYLSAEELNVFHERGASIAHCPNSNLSLSSGFLNVLEVLKHEVKIGLGTDVAGGYSYSMLDAIRRAVMVSNILLINKVNEKSLTLKEVFRLATLGGSQALGLDGEIGNFEVGKEFDAILINPKASDSPIDLFYGDFFGDISEAVIQKFLYLGDDRNIEEVYVGGKQVVPFSSSV

SEQ ID NO: 5004 - DNA, 503 bp, Rattus norvegicus; identical to SEQ ID NO: 5000
  ref <308>: DATABASE ACCESSION NUMBER: EMBL / AA859837
  ref <309>: DATABASE ENTRY DATE: 2000-03-03

SEQ ID NO: 5005 - protein, 71 aa, Rattus norvegicus; identical to SEQ ID NO: 5001
  ref <308>: DATABASE ACCESSION NUMBER: SWISS-Prot / P36577
  ref <309>: DATABASE ENTRY DATE: 1999-07-15

SEQ ID NO: 5006 - DNA, 1630 bp, Homo sapiens; identical to SEQ ID NO: 5002
  ref <308>: DATABASE ACCESSION NUMBER: Refseq / NM_004293
  ref <309>: DATABASE ENTRY DATE: 2000-11-01

SEQ ID NO: 5007 - protein, 454 aa, Homo sapiens; identical to SEQ ID NO: 5003
  ref <308>: DATABASE ACCESSION NUMBER: SWISS-Prot / Q9Y2T3
  ref <309>: DATABASE ENTRY DATE: 2002-06-15

SEQ ID NO: 5008 - DNA, 3346 bp, Rattus norvegicus
  misc_feature (1)..(3346): n=a, c, g or t
  ref <308>: DATABASE ACCESSION NUMBER: EMBL / AF031381
  ref <309>: DATABASE ENTRY DATE: 1997-11-18
ggtcatagcacttagtgtgagtggtggcacctggcatctgaccctgcaagggtgttgggcattatgtgctgcaancagtaattagagatctgcttctggtgtctcnaggtncctgttggtatagtgtgacattaaaccctgggaggtgaagggtctctttacaagagaacactttatgtaacactggctttccctggagaaaaagacggttccaacattgactgaatctctgtcctttcccagggctgtggctagggtgcttagtcagtgtttttaggaggggctgagcaaaggaatagtaacatggattatttagaaggtcnctttttttnctttttttccagagtcacttatttctgcaattcaaggtgatattgaagaagctaaaaagcaactggatttacccgaacatttgaaactcaaagatgataatttcttccaagtttctaaaggcaaaattatgaatggccactaatgaaaagtcccttacctgcctaccactagtgtcacgcatagtgtcacagtgcttctgatacactctcatctkgatcatattttaaatcaagcgttttcctgtagctgtcaagtggtctccagcagttcactccatcatgttgcacagtactaagagactcattcagaaatcaagactttagatgtaatatgttgattaaaatgtagcactaagaaagcttgtactgaaaataaagtctgtgagtgtgggtggaaaagcaagttcctgaggaaaatgaggactgaccatagttcttgtgactgagtgtgctggcactggtgagcccagccagcctgtgctgaacagaggcttttcaggaagtgcaccacacacacacacacacacacacacacacacagagcttacccatgaaggaaaaattagagttacttttctcattttgtgcattgatatatttttacaatcctgcaaacttccttgagtcactcacgactccccctgaggtcacttcctggtagtgtcccaatgctctgtgtgcagttacttcaggttgaagttgcctttgatcgcctgcccctcatcagggcttttgcttttcttcaaagtactgaggatccaacccagtgccttacacgccaggcaagtgtgaccactgagctaggctcccgccccctttactttttgaagccatacaatggatgtctatatgttgcctttttgaagattaggtggttttgctctttaacatttttgtgactttggtttattttcttcccatgtcgcccagagattacttgtgtgtgtgccattctgctcaaaactaaatggtggtcaggttcaagtaaagaaaaataaaacaagctgcatttatagacttgcttggaattgaaatgaacatagccagttcctacccaaccctgccctgccttttttttttttttaaagtgtggtcctgtgctttcaaactaagtacagttctctatgaccaggcacttaaacataatttaaaagtccttgatgcttcagaaccggataagttccagttgcatatctctatatctcctgtttccctcttgttttcccctggttcctcccctttccctcttggtgcctgagttgttatgttggcagaaggttgacattggatgctcgattgcttcagcctcaccggggcattgaatcatcatttgttgaatggcaacaggttgctggggcagaggcactgcctaagtggagcatgcacgtgaaaatagaaaggtaatttaacaacacacagacacccagagacttggtctcttgcatgtgtgtagaagtagtggtbtgggganggatgggactcactcagccctgtgaatgtgttctatggctgagcaacattcctagccttcagaatagaatttttgatgttggaaatcctgtatttaaaggaaaccttaattatcaatggatttatgaaggaaagttaaaaacaaatatgcacagtacaaaatagatctgtggctttttttttttaaagtaagaatagcttgttagtatatcaatgttcatgggtaatgttatctcattttgttagtcgttattttggaattacatgatgtgtgatttagggcttagttaattctctagaattcaaaaactattattgatgtattaaaagaaattacggtaccacgttgattagtctgaatgtttgcaggcattggaataaaatttgacttattttttccctcttcccctgtcaacctgaatcctgtatctgtttggggtatactggctgtttgttactatacacctgtatttacaatcctgagtagacctatcaagtaagggtgctcatgtgactaagagctttattttcaaggaccctccccctcccagtccccccatctcagggggtctttcctccttttaaaagaccttacaaggtctctatatctggctatccttgaaagtacagagatccatgtgtgtctttccttctgaatgctgggattaaaagtgtgcatcaagcctggccaagacacacacaccabcaccaccaccacccacccacccctttaaaattcctgtagcaaggtgactttacatggaaaggattcagaggatatcattactcaaaaagtcaactctttaagaataaaggttcctattgggagctaaaggagccagacaagtctaactcctgtataatcctcaagattgttttgtaaccatggatgtgccacaaccccacacattgctgcagggcattctttccatttgttacaaagaagtgcatttcagcactcatctgaatgaactctgagatgacttagccagcttgcaggtagggcacttaggtgatggggaggtgtgagaaccagtgacttgaaacttacaaggaccatcttcctttcccagtgctgttgtcttccagttcccccttgtacttgggacagaaatgagactgatagagaaaaatcagtttgattgtttagagactgagctagaaaacaaatcagatctgccaaagaggatgtgatcataagtcagaaacactggatggagagttttctacagacagcagagagtgagttcttgaaaggactgcattcctgagagttagagagttttctaactccatggaagttacagagacaaagttcagagctgagatggaaggaaggaccatccagagactgacccacatggggatctatcccatatacaaccaccaaactccgacactattgnatatggcaacaagattttgctgacaggaacctgacatacctctcttgtgaggctatgccagtgactggcaaatacagaagtggatgctctcagtcatctattggatggagcacagggtccctaatgaaggagctcgag

SEQ ID NO: 5009 - protein, 42 aa, Rattus norvegicus
  ref <308>: DATABASE ACCESSION NUMBER: SWISS-Prot / AAB86495
  ref <309>: DATABASE ENTRY DATE: 2001-12-01
SLISAIQGDIEEAKKQLDLPEHLKLKDDNFFQVSKGKIMNGH

SEQ ID NO: 5010 - DNA, 2617 bp, Homo sapiens
  ref <308>: DATABASE ACCESSION NUMBER: Refseq / NM_018339
  ref <309>: DATABASE ENTRY DATE: 2002-05-14
acttcggctgtctccgctgccctccagcggagacgcagctcctcaggcgcccggcggtatttgttgggtcggcggcgtcagggattcgcagtggcctgtggtcggcgtcgtccggccactggtgcgcccccgcgacaggcagagctcacgctcctgtcccccggctggtccggggtctgggcgccgcgtcgacggcggctccgcaggacgcgcagaccgggccgcagcccatgccccgagcggactgcattatgaggcacctgccttacttctgccggggtcaagtggtgcggggcttcggccgcggctccaagcagctgggcatccccacagctaattttcctgagcaagtggtagataatcttccagctgatatatccactggtatttactatggttgggccagtgttggaagtggagatgtccataagatggtggtgagcataggatggaacccatattacaagaatacgaagaagtctatggaaacacatatcatgcataccttcaaagaggacttctatggggaaatcctcaatgtcgccattgttggctacctgagaccagaaaagaactttgattctttagagtcacttatttcagcaattcaaggtgatattgaagaagctaagaaacgactagagttaccagaacatttgaaaatcaaagaagacaatttcttccaggtttctaaaagcaaaataatgaatggccactgatgaaaaattgtattatttattcattcactgttttctagtgtttctgtgtttattactgttcagcatcatcttggttatatactgaaaatcaaacactttactacagttgtgaattagtttaaaccgtacaatgttgttatcatatcatgcttcaactattaaattaagcccatcatatcatagcactaaaaagattgagttaaaaataagatttaaaaaatatatattgattaaaatgtaccactagaaaggtgttacatgtgtataagtatgggtaaaaaggcaagtcactagtttgagatgaaaactaaaattttcatggtaaaatgccagcatgtatgtacttgtgtagtgtgtacttctaaacagagaaggcttataaaagtaaatgcattaaggccaagtgcagttgctcacaccggtaatcccagcactttgggaggccgaggtgggaggattgcttgagctcatgagttcaagaccagtctgggcaacatagcgagactccatctctataaataaaaaaaaaggaaatgcattaaatagaaggttgatagtttatcataaacctgcggggaagaaactcagactttctatttttgatattttgtgcattaatacattacaaacatgaagatgtttgtaaagttttgttttagtcattttctttgcagtcacatcattgtaccaccttcattattgtatagagctgcttcaattctgagtcctctggacttcccctgcctatctgtttgttgttgttgttgaagacagtaaaataagtgttttcaaatctatatgtctcctttttgttggataatgtttcttctttttaatggtaaatattcttgttcttcaacatttttctttggttcttttttccttttttaggaaaaacaaaacaacagacttcatccttaggttttctcaagatttaagtgaacacatttacacatatcaatttcttaaagaacacaaaatgtttcctccctagcaaaactatttaagagccaattaaactatgaaatagttataaaattatttttaatatttaaggccttgaaattatattccaaggcaaatctaaatgggtgtagttgtatatgcacgatgtaatttaatgctaaagagtacttacagcttgagggaaaagcataaagttttagttaaatagccttcatactgtggatttttcctcctactaactaatatgtgggaaattaagattacagatgctttgggccccctcaaacagtacattgctacagttcactgtagcaacagatttggtggtgatggggggatagaggtagaagcagatagaaggtaattttaaagttaatttattatgaatcattttcccctaatctgcataaatgaattagaactgattttaataaaaatattctgtgtaaaaagtactcagaaaaacatctaaagctgttggagaagagggactcatataaatagttggattgcgttttgctttttatttctttataaaaatatgtcaaaaacagtttttaattttagaaatcttatacttgaaagaaacctcaattatcagtggctttatgaagtaaagttaaaaacaaacataggaaatgtgaaaatatttgtgtttgttttgtctgactaacttgctgctaaatgctatctttaggtgtgtgaaagttctttgatatgttattgtccttttacatcttgttaaatagccattgcttttgagaatcagatagtgtgttgtttaggggttaattgtgtctatatctttcaaaaacttttatattatgtattataagaagttacagtagtaccattttgattagtctgaatgttttcaggccttgaaataaattttgactaagtaaaaaaaaaaaaaaaaaaaaaaaaaaaaa

SEQ ID NO: 5011 - protein, 162 aa, Homo sapiens
  ref <308>: DATABASE ACCESSION NUMBER: Refseq / NP_060809
  ref <309>: DATABASE ENTRY DATE: 2002-05-14
MPRADCIMRHLPYFCRGQVVRGFGRGSKQLGIPTANFPEQVVDNLPADISTGIYYGWASVGSGDVHKMVVSIGWNPYYKNTKKSMETHIMHTFKEDFYGEILNVAIVGYLRPEKNFDSLESLISAIQGDIEEAKKRLELPEHLKIKEDNFFQVSKSKIMNGH

SEQ ID NO: 5012 - DNA, 599 bp, Rattus norvegicus
  misc_feature (1)..(599): n=a, c, g or t
  ref <308>: DATABASE ACCESSION NUMBER: EMBL / AA859897
  ref <309>: DATABASE ENTRY DATE: 2000-03-03
tttttttttttttttttagccagagatgggatctttatttcacaagtttcaagatacagtacaaaatgagtctgtacatctctctattaacaggatttgtttacacaattataatacacttcaccagccgttatactgcattccattaaatataaaataaatttacaaaaagtctagtatggtgttccttcacaatgtcagcttatgttctttaaatacgtccctcagcgtttatagtggtcatattttgatcatatcaacattgtttttaaataaaagagaaatagtgtcagatcgttcaccaataaatagtaaaggaagaacatctgaatgcctccttgaacataaccaaaggggcccttcatctgcatacaaaaccggcttttaatgtgtaaacagtctctttaagatacagatcattggtatatggggctatttcactangggtattttcttgaaacccctaatgggtgaagacacttaggtcctttttcaaagaacactactcatttaaaaacctgacaatatagcatccagaaatagtttctctcgtatctgatcaaattttttttttgcataaaattgtttttttttttttt

SEQ ID NO: 5013 - protein, 151 aa, Rattus norvegicus
EDAAKRRQMQEAEAIYQSGMKILNGSTRKNQKREAYRYLQKAAGMNHTKALERVSYALLFGDYLTQNIQAAKEMFEKLTEEGSPKGQTGLGFLYASGLGVNSSQAKALVYYTFGALGGNLIAHMVLGYRYWAGIGVLQSCESALTHYRLES

SEQ ID NO: 5014 - DNA, 3444 bp, Homo sapiens
aagagcagcggcgaggcggcggtggtggctgagtccgtggtggcagaggcgaaggcgacagctctaggggttggcaccggccccgagaggaggatgcgggtccggatagggctgacgctgctgctgtgtgcggtgctgctgagcttggcctcggcgtcctcggatgaagaaggcagccaggatgaatccttagattccaagactactttgacatcagatgagtcagtaaaggaccatactactgcaggcagagtagttgctggtcaaatatttcttgattcagaagaatctgaattagaatcctctattcaagaagaggaagacagcctcaagagccaagagggggaaagtgtcacagaagatatcagctttctagagtctccaaatccagaaaacaaggactatgaagagccaaagaaagtacggaaaccagctttgaccgccattgaaggcacagcacatggggagccctgccacttcccttttcttttcctagataaggagtatgatgaatgtacatcagatgggagggaagatggcagactgtggtgtgctacaacctatgactacaaagcagatgaaaagtggggcttttgtgaaactgaagaagaggctgctaagagacggcagatgcaggaagcagaaatgatgtatcaaactggaatgaaaatccttaatggaagcaataagaaaagccaaaaaagagaagcatatcggtatctccaaaaggcagcaagcatgaaccataccaaagccctggagagagtgtcatatgctcttttatttggtgattacttgccacagaatatccaggcagcgagagagatgtttgagaagctgactgaggaaggctctcccaagggacagactgctcttggctttctgtatgcctctggacttggtgttaattcaagtcaggcaaaggctcttgtatattatacatttggagctcttgggggcaatctaatagcccacatggttttgggttacagatactgggctggcatcggcgtcctccagagttgtgaatctgccctgactcactatcgtcttgttgccaatcatgttgctagtgatatctcgctaacaggaggctcagtagtacagagaatacggctgcctgatgaagtggaaaatccaggaatgaacagtggaatgctagaagaagatttgattcaatattaccagttcctagctgaaaaaggtgatgtacaagcacaggttggtcttggacaactgcacctgcacggagggcgtggagtagaacagaatcatcagagagcatttgactacttcaatttagcagcaaatgctggcaattcacatgccatggcctttttgggaaagatgtattcggaaggaagtgacattgtacctcagagtaatgagacagctctccactactttaagaaagctgctgacatgggcaacccagttggacagagtgggcttggaatggcctacctctatgggagaggagttcaagttaattatgatctagcccttaagtatttccagaaagctgctgaacaaggctgggtggatgggcagctacagcttggttccatgtactataatggcattggagtcaagagagattataaacaggccttgaagtattttaatttagcttctcagggaggccatatcttggctttctataacctagctcagatgcatgccagtggcaccggcgtgatgcgatcatgtcacactgcagtggagttgtttaagaatgtatgtgaacgaggccgttggtctgaaaggcttatgactgcctataacagctataaagatggcgattacaatgctgcagtgatccagtacctcctcctggctgaacagggctatgaagtggcacaaagcaatgcagcctttattcttgatcagagagaagcaagcattgtaggtgagaatgaaacttatcccagagctttgctacattggaacagggccgcctctcaaggctatactgtggctagaattaagctcggagactaccatttctatgggtttggcaccgatgtagattatgaaactgcatttattcattaccgtctggcttctgagcagcaacacagtgcacaagctatgtttaatctgggatatatgcatgagaaaggactgggcattaaacaggatattcaccttgcgaaacgtttttatgacatggcagctgaagccagcccagatgcacaagttccagtcttcctagccctctgcaaattgggcgtcgtctatttcttgcagtacatacgggaaacaaacattcgagatatgttcacccaacttgatatggaccagcttttgggacctgagtgggacctttacctcatgaccatcattgcgctgctgttgggaacagtcatagcttacaggcaaaggcagcaccaagacatgcctgcacccaggcctccagggccacggccagctccaccccagcaggaggggccaccagagcagcagccaccacagtaataggcactgggtccagccttgatcagtgacagcgaaggaagttatctgctgggaacacttgcatttgatttaggaccttggatcagtggtcacctcccagaagaggcacggcacaaggaagcattgaattcctaaagctgcttagaatctgatgcctttattttcagggataagtaactcttacctaaactgagctgaatgtttgtttcagtgccatatggaataacaactttcagtggcttttttttttcttttctggaaacatatgtgagacactcagagtaatgtctactgtatccagctatctttcttggatccttttggtcattatttcagtgtgcataagttcttaatgtcaaccatctttaaggtattgtgcatcgacactaaaaactgatcagtgtaaaaaggaaaacccagttgcaagtttaaacgtgttcgaaagtctgaaaatagaacttgccttttaagttaaaaaaaaaaaaagctatcttgaaaatgttttggaactgcgataactgagaaactcttaccagtccacatgcaattagacatattcagcatatttgttattttaaaagggagggttgggaggtttcttattggtgattgtcacacggtataccatactcctctccttcaaagaatgaaaggccttgttaaggagttttttgtgagctttacttctttggaatggaatatacttatgcaaaaccttgtgaactgactccttgcactaacgcgagtttgccccacctactctgtaatttgcttgtttgttttgaatatacagagccttgatccagaagccagaggatggactaagtgggagaaattagaaaacaaaacgaactctggttggggtactacgatcacagacacagacatacttttcctaaagttgaagcatttgttcccaggatttattttactttgcatttctttttgcacaaagaacacatcacc

SEQ ID NO: 5015 - protein, 794 aa, Homo sapiens
MRVRIGLTLLLCAVLLSLASASSDEEGSQDESLDSKTTLTSDESVKDHTTAGRVVAGQIFLDSEESELESSIQEEEDSLKSQEGESVTEDISFLESPNPENKDYEEPKKVRKPALTAIEGTAHGEPCHFPFLFLDKEYDECTSDGREDGRLWCATTYDYKADEKWGFCETEEEAAKRRQMQEAEMMYQTGMKILNGSNKKSQKREAYRYLQKAASMNHTKALERVSYALLFGDYLPQNIQAAREMFEKLTEEGSPKGQTALGFLYASGLGVNSSQAKALVYYTFGALGGNLIAHMVLGYRYWAGIGVLQSCESALTHYRLVANHVASDISLTGGSVVQRIRLPDEVENPGMNSGMLEEDLIQYYQFLAEKGDVQAQVGLGQLHLHGGRGVEQNHQRAFDYFNLAANAGNSHAMAFLGKMYSEGSDIVPQSNETALHYFKKAADMGNPVGQSGLGMAYLYGRGVQVNYDLALKYFQKAAEQGWVDGQLQLGSMYYNGIGVKRDYKQALKYFNLASQGGHILAFYNLAQMHASGTGVMRSCHTAVELFKNVCERGRWSERLMTAYNSYKDGDYNAAVIQYLLLAEQGYEVAQSNAAFILDQREASIVGENETYPRALLHWNRAASQGYTVARIKLGDYHFYGFGTDVDYETAFIHYRLASEQQHSAQAMFNLGYMHEKGLGIKQDIHLAKRFYDMAAEASPDAQVPVFLALCKLGVVYFLQYIRETNIRDMFTQLDMDQLLGPEWDLYLMTIIALLLGTVIAYRQRQHQDMPAPRPPGPRPAPPQQEGPPEQQPPQ

SEQ ID NO: 5016 - DNA, 464 bp, Rattus norvegicus
  ref <308>: DATABASE ACCESSION NUMBER: EMBL / AA859911
  ref <309>: DATABASE ENTRY DATE: 2000-03-03
ttttttttttttttgttcccttttttccccttgagaaagggtctcatatatcccaggttagtttgaaagttaccatatagctgaggctatcctttaacttactttcctgctgcagactcctaactgctaggattaaaggcacataccaccatgcctggcataataaattgatttttccaaaccataatactcatccctctgtggggggacttcggagtgcagagcccatgaaaaggcttctcaggtgtaagaggttatcagagttgccttgttcccccaaacatctttacctcctcagaatcacctatgaggggtacagttcagaacagatgagtaactctatggacttcgttctttttaattcacgaaaagaaacagagggaaaaattgaatgtttaaataactgtacaagaaaaacgatgtgggtgctgggacctaccttttctagaatggtgactcatggt

SEQ ID NO: 5017 - protein, 350 aa, Rattus norvegicus
  ref <308>: DATABASE ACCESSION NUMBER: SWISS-Prot / Q11205
  ref <309>: DATABASE ENTRY DATE: 2002-06-15
MKCSLRVWFLSMAFLLVFIMSLLFTYSHHSMATLPYLDSGTLGGTHRVKLVPGYTGQQRLVKEGLSGKSCTCSRCMGDAGTSEWFDSHFDSNISPVWTRDNMNLTPDVQRWWMMLQPQFKSHNTNEVLEKLFQIVPGENPYRFRDPQQCRRCAVVGNSGNLRGSGYGQEVDSHNFIMRMNQAPTVGFEKDVGSRTTHHFMYPESAKNLPANVSFVLVPFKALDLMWIASALSTGQIRFTYAPVKSFLRVDKEKVQIYNPAFFKYIHDRWTEHHGRYPSTGMLVLFFALHVCDEVNVYGFGADSRGNWHHYWENNRYAGEFRKTGVHDADFEAHIIDILAKASKIEVYRGN

SEQ ID NO: 5018 - DNA, 1623 bp, Homo sapiens
  ref <308>: DATABASE ACCESSION NUMBER: EMBL / X96667
  ref <309>: DATABASE ENTRY DATE: 1997-09-12
accagggtggcaggagaggcagagcctctgtggcctagctagtgacggagagacccgatgaagccctaagcaggggccccgcctgactcagggacaggacagccactcctgccaacgtgtgttctccctacatgagggagggcgtggcaagggacccctgccactgtcccctgctgcagcacgtgcccctatgccctttacatgtggtgccagaataggcaggctacgccgtggctggcccctcagcgggctgggaaaagagtggccacggtgaccgtcacccgcctgccggcaccatgaagtgctccctgcgggtgtggttcctctccgtggccttcctgctggtgttcatcatgtccctgctcttcacctactcgcaccacagcatggccacgctcccctacctggactcaggggccctggatgggacgcaccgggtgaagctggtgcccggctatgccggcctgcagcgcctcagcaaggagaggctctcgggcaagagctgtgcctgtcgccgctgcatgggcgatgccggtgcctccgactggtttgacagccactttgacggtaacatttcccccgtctggacccgagagaacatggatcttccaccggacgtccagaggtggtggatgatgctgcagccccagttcaagtcacacaacaccaatgaggtgctggagaagctgttccagatagtgcctggcgagaacccctaccgcttccgggacccccaccagtgccggcgctgtgccgtggtggggaactcgggcaacctgcggggctctggctatgggcaggacgtggacgggcacaacttcatcatgaggatgaatcaggcgccaaccgtgggctttgagcaggatgttggcagccgaaccacccaccatttcatgtaccctgagagtgccaagaacctgcccgccaacgtcagcttcgtgctggtgcccttcaaggtcctggaccttctgtggatcgccagcgccttgtccacggggcagatccgattcacctacgccccagtgaagtccttccttcgagtggataaagaaaaggtccagatctacaacccagccttcttcaagtatatccacgacaggtggacagagcatcacgggcggtacccttccacggggatgctggtgcttttctttgccctgcatgtgtgtgatgaggtgaacgtgtacgggttcggggccgacagccggggcaactggcaccactactgggagaacaaccggtacgcgggcgagttccggaagactggcgtgcacgacgcggacttcgaggcccacatcatcgacatgctggccaaggccagcaagatcgaagtctaccggggcaactgagccgggcctcgccgcgacccttccggcccatctatcgggcaccggggctccggcccgggacccaggaccagcaacccgcgaccaatcatgctgcagcccaggggcgtctgctgtgccccgccaatcacgagactgggggaccggccgggcctggcaccaatctgcgctgcggtcgggcggagcttctgtttctcccagccaatcatgtgactcaaggaaaacttccggcgctgtgtccagtctcctccaatcaatggccttcgggggcgggcca

SEQ ID NO: 5019 - protein, 351 aa, Homo sapiens
  misc_feature (1)..(351): Xaa=Unknown amino acid
MKCSLRVWFLSVAFLLVFIMSLLFTYSHHSMATLPYLDSGALDGTHRVKLVPGYAGLQRLSKERLSGKSCACRRCMGDAGASDWFDSHFDGNISPVWTRENMDLPPDVQRWWMMLQPQFKSHNTNEVLEKLFQIVPGENPYRFRDPHQCRRCAVVGNSGNLRGSGYGQDVDGHNFIMRMNQAPTVGFEQDVGSRTTHHFMYPESAKNLPANVSFVLVPFKVLDLLWIASALSTGQIRFTYAPVKSFLRVDKEKVQIYNPAFFKYIHDRWTEHHGRYPSTGMLVLFFALHVCDEVNVYGFGADSRGNWHHYWENNRYAGEFRKTGVHDADFEAHIIDMLAKASKIEVYRGNX

SEQ ID NO: 5020 - DNA, 464 bp, Rattus norvegicus; identical to SEQ ID NO: 5016
  ref <308>: DATABASE ACCESSION NUMBER: EMBL / AA859911
  ref <309>: DATABASE ENTRY DATE: 2000-03-03

SEQ ID NO: 5021 - protein, 350 aa, Rattus norvegicus; identical to SEQ ID NO: 5017
  ref <308>: DATABASE ACCESSION NUMBER: SWISS-Prot / Q11205
  ref <309>: DATABASE ENTRY DATE: 2002-06-15

SEQ ID NO: 5022 - DNA, 1623 bp, Homo sapiens; identical to SEQ ID NO: 5018
  ref <308>: DATABASE ACCESSION NUMBER: EMBL / X96667
  ref <309>: DATABASE ENTRY DATE: 1997-09-12

SEQ ID NO: 5023 - protein, 351 aa, Homo sapiens; identical to SEQ ID NO: 5019
  misc_feature (1)..(351): Xaa=Unknown amino acid

SEQ ID NO: 5024 - DNA, 491 bp, Rattus norvegicus
  ref <308>: DATABASE ACCESSION NUMBER: EMBL / AA859919
  ref <309>: DATABASE ENTRY DATE: 2000-03-03
tttttttttttttttttcattattagccaaacctttaggcctgttatattttaaagcaacccaatatagttacaacagaattgcaggaggcttagaataacagagccatttgtcgggggtcatcagggagaatactgatagtatcttcggctttgccacacaacagacacagcatggtatattcctgaaattcatccatgatgctgaatgtatactcatgtctggctatgacatgatgacaattcttacacaaatggtcataggtaactatttcttctccatcttcctctttcagggatctgtttgtgatcagcataaagtcccgcttactgcacacggcgcatcctgcaaagttcagtaagaacgagccattctccagacaggtgttccccttatttggatggaaaatactgcatccccattcctgatcagtcttccttttcacatcgattaaatagcactctgtcaatcatacttcccaaactgcaagt

SEQ ID NO: 5025 - DNA, 459 bp, Homo sapiens
  misc_feature (1)..(459): n=a, c, g or t
  ref <308>: DATABASE ACCESSION NUMBER: EMBL / AV699259
  ref <309>: DATABASE ENTRY DATE: 2002-01-12
ctcgtgccgaattcggcacgagctgatcacaaacaaatccttgaaagaagaagatggagaagaaatagttacctatgatcgagtataccatgctgtgtctgttatgcggcaaagccgaagatactatcagtattctccctgatgacccccgacaaatgactctcttattctaaggatccttctacagatctgttataactatattgtgttggtttacaatacagcaagcctgatggtttgtcttatttcattcataaaaaaaaaaaaaaaaaactcgagttttttttttttttttttgaccaaaggtatattaatatattgattctttgaaaatgagaattgagacatgggctaaaattaaatacatcaacaacaaaaatcttgtaaggagaagttaaaagcagttatttcaaggataagggatatttgnttcattttgaacctgatatacattacttt

SEQ ID NO: 5026 - DNA, 491 bp, Rattus norvegicus; identical to SEQ ID NO: 5024
  ref <308>: DATABASE ACCESSION NUMBER: EMBL / AA859919
  ref <309>: DATABASE ENTRY DATE: 2000-03-03

SEQ ID NO: 5027 - DNA, 459 bp, Homo sapiens; identical to SEQ ID NO: 5025
  misc_feature (1)..(459): n=a, c, g or t
  ref <308>: DATABASE ACCESSION NUMBER: EMBL / AV699259
  ref <309>: DATABASE ENTRY DATE: 2002-01-12

SEQ ID NO: 5028 - DNA, 331 bp, Rattus norvegicus
  ref <308>: DATABASE ACCESSION NUMBER: EMBL / AA859921
  ref <309>: DATABASE ENTRY DATE: 2000-03-03
tttttttttttttttttgtttttccaagttgcattaatttaaagcggtagccaacaagcagctcgagcacatggccatcggcgaatgctccccgtggctgggtgcagctgcgagtggggtccagcagcacggtggagagcgggacgaggcatttggctaccttaagagagtcatagttactcccgccgtttacccgcgcttcattgaatttcttcactatgacattcagagcactgggcagaaatcacatcgcgtcaacacccgccgcgggccttcgcgatgctttgttttaattaaacagtcggattcccctggtccgcaccagttctaa

SEQ ID NO: 5029 - DNA, 523 bp, Rattus norvegicus
  misc_feature (1)..(523): n=a, c, g or t
  ref <308>: DATABASE ACCESSION NUMBER: EMBL / AA859931
  ref <309>: DATABASE ENTRY DATE: 2000-03-03
tttttttttttttttttcccttttaacaacagtctttattgataacttcccaacatctgtaaacatcaggtataaaaatattccattcagctgttttctaaggtgactggccagctcctggagataacctgatggaccttggagaaacacagctcctcacagtcaaggctgcctcttcctccagaattcaacacaacaggaaaaaagtactccacagagggaaaggagacatagttgaatcagcagctgccagtgggtaggaacaagctcatccctcctgtgcccacccagggtgtgggggatgacaatctggctttggtctctggagaccttagaagcactgttcaaagctggcccaggctgatttcaaggttacctctacccatccccactgccccagctagacatacatgctggcatacgaagtcctgctcttacggggagtggcaggaattangaaccctgcctacaaaagaaaggagcagcaaagctgactgactgttaccctacgagaaccactgct

SEQ ID NO: 5030 - DNA, 1444 bp, Homo sapiens
  ref <308>: DATABASE ACCESSION NUMBER: EMBL / BC001080
  ref <309>: DATABASE ENTRY DATE: 2001-07-13
ggcacgaggacgcacgcaagcggctccagggtacgtccccgccacgcgcgctcgcaggatcggtgcgtggtgacgtttcgccggcgcgggcgccatcccggaagcgcgagcaaggccgccagatgtgcaggcagcggaggaggagaaagagatggacctcccggactcggcctcgagggtcttctgcggccgcatcctgagcatggtgaacacagatgatgtcaacgccatcatcctggcccagaagaacatgctggaccgctttgagaagaccaatgagatgctgctcaacttcaacaacctgtccagtgcccgcctgcagcagatgagcgaacgcttcctgcaccacacgaggaccctagtagagatgaaacgggacctggacagcatcttccgccgtatcaggacgctgaaagggaaactggccaggcagcacccagaggccttcagccatatcccagaggcatccttcctggaggaagaggatgaagaccccatcccacccagcaccacgaccaccattgccacctcagaacagagcacgggctcatgtgacaccagccccgacaccgtctcgccctccctgagccccggcttcgaggacctgtcccatgtccaggctggctccccagccatcaacggccgcagccagacagatgacgaggagatgacgggcgaatagccctgctgcccggtgccttgagggggtctcagggcagcagcatacaaggtggcagcgggtaaccctgccttgttctgtcatccagggctcctttgctgccccgttctgtcacccagggctcctagggggacaaggctctctcccgaggggtgtggaattcctgggggggtctttaattctggctccttccttcctcagaacatctctattctgcaagacccctctgccatgccagggcacgcccattccagctggagtcgtggggctgggcacaggggaatttttccagagctgagcctgacgtctgctctgaagaatgcttagaaggttcccagacaccagagccagatgtcccccaccaccggtcaggacctccttgaggtgcacaagcacggtctcctctgagttcaccccagcccacccccgcacccactaattctgcttttcctgccccttgctccgtaaaagtatcaaatactttctccttggtatctcaaggaggtttctgagataggtagaagtcttgagacggaggctggccatccattcagccctgagcgtgctgagttctgtgtttctctgaatagaggtgtggaacctgaggggccagcaggcctctctgaaggcctccatggagcaaacggagccacctcgggaaagagtttaatggaatatttttgtacccgatgtttacagatgctgttgggaagttatcaataaaaagacaccattactaaaaagggaaaaaaaaaaaaaaaaaaa

SEQ ID NO: 5031 - protein, 177 aa, Homo sapiens
  misc_feature (1)..(177): Xaa=Unknown amino acid
MDLPDSASRVFCGRILSMVNTDDVNAIILAQKNMLDRFEKTNEMLLNFNNLSSARLQQMSERFLHHTRTLVEMKRDLDSIFRRIRTLKGKLARQHPEAFSHIPEASFLEEEDEDPIPPSTTTTIATSEQSTGSCDTSPDTVSPSLSPGFEDLSHVQAGSPAINGRSQTDDEEMTGEX

SEQ ID NO: 5032 - DNA, 523 bp, Rattus norvegicus; identical to SEQ ID NO: 5029
  misc_feature (1)..(523): n=a, c, g or t
  ref <308>: DATABASE ACCESSION NUMBER: EMBL / AA859931
  ref <309>: DATABASE ENTRY DATE: 2000-03-03

SEQ ID NO: 5033 - DNA, 1444 bp, Homo sapiens; identical to SEQ ID NO: 5030
  ref <308>: DATABASE ACCESSION NUMBER: EMBL / BC001080
  ref <309>: DATABASE ENTRY DATE: 2001-07-13

SEQ ID NO: 5034 - protein, 177 aa, Homo sapiens; identical to SEQ ID NO: 5031
  misc_feature (1)..(177): Xaa=Unknown amino acid

SEQ ID NO: 5035 - DNA, 534 bp, Rattus norvegicus
  ref <308>: DATABASE ACCESSION NUMBER: EMBL / AA859933
  ref <309>: DATABASE ENTRY DATE: 2000-03-03
tttttttttttttttttgcaccaattcaagtttggttttattagaaatcccaccataatcagatttttaaagactggatggttgccttgtaacttttccattcccatttagaaagataactagaagcaatgacaaaaataaccacttaaaataggggattcttcccccgagtttcttgtaagcgtaagtccaggcattccactcttccactcagaaaagaaaaataaaaggctttggagcacaccaacctttactcagatggacaaaacatctgcctccagttctcacgttagaccaggacgcatatccagagtggctggtctccatccagcccatgcttgctaaagcagccgagtaaatcccaaggtcagtcccaaccccaaccttcaacagtatgaactgcttacacctcttatgacacaagccatgcttcggcggaagggtcgggtcagacacccctcatctcccgtgggtgaatcacaacagcagtcatgtttgtgttctcttccctacagttcagtgtgcaaagccatt

SEQ ID NO: 5036 - DNA, 534 bp, Rattus norvegicus; identical to SEQ ID NO: 5035
  ref <308>: DATABASE ACCESSION NUMBER: EMBL / AA859933
  ref <309>: DATABASE ENTRY DATE: 2000-03-03

SEQ ID NO: 5037 - DNA, 534 bp, Rattus norvegicus; identical to SEQ ID NO: 5035
  ref <308>: DATABASE ACCESSION NUMBER: EMBL / AA859933
  ref <309>: DATABASE ENTRY DATE: 2000-03-03

SEQ ID NO: 5038 - DNA, 534 bp, Rattus norvegicus; identical to SEQ ID NO: 5035
  ref <308>: DATABASE ACCESSION NUMBER: EMBL / AA859933
  ref <309>: DATABASE ENTRY DATE: 2000-03-03

SEQ ID NO: 5039 - DNA, 436 bp, Rattus norvegicus
  ref <308>: DATABASE ACCESSION NUMBER: EMBL / AA859937
  ref <309>: DATABASE ENTRY DATE: 2000-03-03
attttttttttttttttgctttgcaagtcacacattttattacaaatttattttgcgcccagtagaaaagcaaattctgaatctatttacaagcactatgtatttacatatattatatacaattaatgaatctaaagaaagttggaggagaaacgatatgtttgggggactatgccactgtacagggtttcatgttctttaatgtcactgtatccttcctgtagtaataaatacaattctctatgtacacatcttataaaacatctcataaatgtattttttaaaaaattccacattaaaacatctggtcaaaataaaacatgcttatataaaaataaatctacctgatggccttttggtttgggtgcaatgaggctaatgtatgaccacagaagtttagaataaacttttcacttttcaaatttaatagtttgtc

SEQ ID NO: 5040 - DNA, 401 bp, Homo sapiens
  ref <308>: DATABASE ACCESSION NUMBER: EMBL / AI581056
  ref <309>: DATABASE ENTRY DATE: 1999-12-15
tttttgtttcatagtcacacattttattacaaatttattttttacccaatagaaaagcaaatttggaatctatttacaagtactatatatttacatatatacagttaatgaatttaaagaaaatgggcagagaaacacaatataaatcaaagaatatgccactgtacaaggtttattatcattatcatggtccttaatgttactgaacctttactatagtaataaatacagttctatatttacacatcttataaaacatctcataaatgtattttttcaaatccaagttaaaacatctgatcaaaataaacatgcttatataaaaataaatctacctaacagccatttggttttgatgtatgaagctaatataggataatagaagggagaattaatacttt

SEQ ID NO: 5041 - protein, 907 aa, Homo sapiens
  ref <308>: DATABASE ACCESSION NUMBER: SWISS-Prot / O75473
  ref <309>: DATABASE ENTRY DATE: 2002-06-15
MDTSRLGVLLSLPVLLQLATGGSSPRSGVLLRGCPTHCHCEPDGRMLLRVDCSDLGLSELPSNLSVFTSYLDLSMNNISQLLPNPLPSLRFLEELRLAGNALTYIPKGAFTGLYSLKVLMLQNNQLRHVPTEALQNLRSLQSLRLDANHISYVPPSCFSGLHSLRHLWLDDNALTEIPVQAFRSLSALQAMTLALNKIHHIPDYAFGNLSSLVVLHLHNNRIHSLGKKCFDGLHSLETLDLNYNNLDEFPTAIRTLSNLKELGFHSNNIRSIPEKAFVGNPSLITIHFYDNPIQFVGRSAFQHLPELRTLTLNGASQITEFPDLTGTANLESLTLTGAQISSLPQTVCNQLPNLQVLDLSYNLLEDLPSFSVCQKLQKIDLRHNEIYEIKVDTFQQLLSLRSLNLAWNKIAIIHPNAFSTLPSLIKLDLSSNLLSSFPITGLHGLTHLKLTGNHALQSLISSENFPELKVIEMPYAYQCCAFGVCENAYKISNQWNKGDNSSMDDLHKKDAGMFQAQDERDLEDFLLDFEEDLKALHSVQCSPSPGPFKPCEHLLDGWLIRIGVWTIAVLALTCNALVTSTVFRSPLYISPIKLLIGVIAAVNMLTGVSSAVLAGVDAFTFGSFARHGAWWENGVGCHVIGFLSIFASESSVFLLTLAALERGFSVKYSAKFETKAPFSSLKVIILLCALLALTMAAVPLLGGSKYGASPLCLPLPFGEPSTMGYMVALILLNSLCFLMMTIAYTKLYCNLDKGDLENIWDCSMVKHIALLLFTNCILNCPVAFLSFSSLINLTFISPEVIKFILLVVVPLPACLNPLLYILFNPHFKEDLVSLRKQTYVWTRSKHPSLMSINSDDVEKQSCDSTQALVTFTSSSITYDLPPSSVPSPAYPVTESCHLSSVAFVPCL

SEQ ID NO: 5042 - DNA, 436 bp, Rattus norvegicus; identical to SEQ ID NO: 5039
  ref <308>: DATABASE ACCESSION NUMBER: EMBL / AA859937
  ref <309>: DATABASE ENTRY DATE: 2000-03-03

SEQ ID NO: 5043 - DNA, 401 bp, Homo sapiens; identical to SEQ ID NO: 5040
  ref <308>: DATABASE ACCESSION NUMBER: EMBL / AI581056
  ref <309>: DATABASE ENTRY DATE: 1999-12-15

SEQ ID NO: 5044 - protein, 907 aa, Homo sapiens; identical to SEQ ID NO: 5041
  ref <308>: DATABASE ACCESSION NUMBER: SWISS-Prot / O75473
  ref <309>: DATABASE ENTRY DATE: 2002-06-15

SEQ ID NO: 5045 - DNA, 479 bp, Rattus norvegicus
  ref <308>: DATABASE ACCESSION NUMBER: EMBL / AA859951
  ref <309>: DATABASE ENTRY DATE: 2000-03-03
tttttttttttttttttcaatgtcaaaaacattactttatttttttaggatgaaatgtcctatcacgtacaaaaaaattatttagaatttgctacaatttgttaaaaacatagcaatctattgcctacaggtaggaaagctcttgctggaacaagcttaagtgattaagcccatatatacttagatatataaatagatggtaaggacaggaatactgggccggggagatgcagaatccctttaaatcattaggatgtagaattcttgcatcagcacaatgcttacaacatgggacatttgtccttttgtaaactaaaaggacagaacagcctgtatttaactacttccaccttaatagcttaagcaaatctttgtgaccatactgagcagctaagtctctttagttgtaagcataggctaaagtgacattttatgtacagagggaggagcagggcttcgacagaacctgtacacctgag

SEQ ID NO: 5046 - DNA, 305 bp, Homo sapiens
  misc_feature (1)..(305): n=a, c, g or t
  ref <308>: DATABASE ACCESSION NUMBER: EMBL / R40468
  ref <309>: DATABASE ENTRY DATE: 2000-03-04
ttttttttttttttttttttttttcaatgtcaaaaacattactttatttttctaggatgaaatgtcctattacgtacaaaaganttgctgtttagantttgccacaatttgttaaaaacatagcaatctattgcctacaggtnggaaagttcttgctgcaacaaattttaaatgattangcccatatatatttatatatatggantaaatnggtacaggaantactgtgangtgatggggatggcaggantaattttatanttcattaaantgtgggatttcttgncatcagcacagnggcatac

SEQ ID NO: 5047 - DNA, 460 bp, Rattus norvegicus
  ref <308>: DATABASE ACCESSION NUMBER: EMBL / AA859952
  ref <309>: DATABASE ENTRY DATE: 2000-03-03
tttttttttttttttttaagttttatttaaaaaaccttcggtgcaatattaaaaagcaatacagccaggtggaacagtcgacagacagaaagggaaggagctagaggacccaaggtcctttacctcacctgttccccagaagctgggggtcaagggggagggtctgggggtggtgggacgaggaaaaaccaccacatccatgactgtccactccactgggtccgttggcttctccttgcgcccaggaggacagccaaatggtgtcccatcagccccaggtagggctggttttcctggaggcaaaggcacaggagatggagaatctggagcagctgtaacacaagccgatcccccttctttattcatagctgtcatcgagaacacctggtgtgtgcagctgccaggtgctggtccccgcccttcatcctggccctggaaaggtccacagggcgaccactcc

SEQ ID NO: 5048 - DNA, 991 bp, Homo sapiens
  ref <308>: DATABASE ACCESSION NUMBER: EMBL / BC007384
  ref <309>: DATABASE ENTRY DATE: 2001-06-08
ggcacgaggcccggacgggcgccgccggccgccagcgcccgcccgtctcgcagcaagagaggtggagaagagcgagtacttgagaaagaagaggaagaagatgatgatgaagatgaagatgaggaagatgatgtgtcagagggctctgaagtgcccgagagtgaccgtcctgcaggtgcccagcaccaccagcttaacggcgagcggggacctcagagtgccaaggagagggtcaaggagtggaccccctgcggaccgcaccagggccaggatgaagggcgggggccagccccgggcagcggcacccgccaggtgttctccatggcagccatgaacaaggaagggggaacagcttctgttgccaccgggccagactccccgtcccccgtgcctttgcccccaggcaaaccagccctacctggggccgacgggaccccctttggctgtcctcccgggcgcaaagagaagccatctgatcccgtcgagtggaccgtgatggatgtcgtcgaatattttactgaggctggattcccggagcaggcgacagctttccaagagcaggaaattgatggcaaatctttgctgctcatgcagcgcacagatgtgctcaccggcctgtccatccgcctcgggccagccctgaaaatctacgagcaccacatcaaggtgcttcagcaaggccactttgaggatgatgaccccgatggcttcttaggctgagcgcccagcctcacccctgccccagcccattccggcccccatctcacccaagatcccccagagtccaggagctggacggggacaccctcagccctcataacagattccaaggagagggcaccctcttgtccttatctttgccccttgtgtctgtctcacacacatctgctcctcagcacgtcggtgtggggaggggattgctccttaaaccccaggtggctgaccctccccacccagtccaggacattttaggaaaaaaaaaaaaaaaaaa

SEQ ID NO: 5049 - protein, 132 aa, Homo sapiens
  ref <308>: DATABASE ACCESSION NUMBER: Refseq / XP_031299
  ref <309>: DATABASE ENTRY DATE: 2002-08-01
MAAMNKEGGTASVATGPDSPSPVPLPPGKPALPGADGTPFGCPPGRKEKPSDPVEWTVMDVVEYFTEAGFPEQATAFQEQEIDGKSLLLMQRTDVLTGLSIRLGPALKIYEHHIKVLQQGHFEDDDPDGFLG

SEQ ID NO: 5050 - DNA, 536 bp, Rattus norvegicus
  ref <308>: DATABASE ACCESSION NUMBER: EMBL / AA859954
  ref <309>: DATABASE ENTRY DATE: 2000-03-03
tttttttttttttttttggaatgatcaaagatgtctttataaagtttttcacgacttcattctaaatatacagaataaaaaatggcgtactcatttgtgagacaccaaccagattttccttatactgtctcaaaatttaaagatcaatttccccagagggtgtgcaatgcatcataaaatggcctttttgagggtgggaaaggaaggcatattacattgttccatgataggcatgcaagactgctatccaacatatataacttatatacatttggtgacttagaaaaaccaatcatttgtgacaagcctgaaaagcctggcatatttaacatacgtcagaaggttctgtgtggccgaggttctccagttggaccatgtggccctgtgaaagtgtcagaaggccaattttgttaagtttgcagcagaacatcatatccaccctaaagaatacaatgtggattgaatcgaaggtggagaccttaccttaacaaagaaagcaaaagtatgtcagtgtaaaatgtggactaaactgcttt

SEQ ID NO: 5051 - DNA, 2047 bp, Homo sapiens
  ref <308>: DATABASE ACCESSION NUMBER: EMBL / AK024969
  ref <309>: DATABASE ENTRY DATE: 2000-09-29
gcgggttccggttgtctggagcccagcggcgggtgtgagagtccgtaaggagcagcttccaggatcctgagatccggagcagccggggtcggagcggctcctcaagagttactgatctatgaaatggcagagaatggaaaaaattgtgaccagagacgtgtagcaatgaacaaggaacatcataatggaaatttcacagacccctcttcagtgaatgaaaagaagaggagggagcgggaagaaaggcagaatattgtcctgtggagacagccgctcattaccttgcagtatttttctctggaaatccttgtaatcttgaaggaatggacctcaaaattatggcatcgtcaaagcattgtggtgtcttttttactgctgcttgctgtgcttatagctacgtattatgttgaaggagtgcatcaacagtatgtgcaacgtatagagaaacagtttcttttgtatgcctactggataggcttaggaattttgtcttctgttgggcttggaacagggctgcacacctttctgctttatctgggtccacatatagcctcagttacattagctgcttatgaatgcaattcagttaattttcccgaaccaccctatcctgatcagattatttgtccagatgaagagggcactgaaggaaccatttctttgtggagtatcatctcaaaagttaggattgaagcctgcatgtggggtatcggtacagcaatcggagagctgcctccatatttcatggccagagcagctcgcctctcaggtgctgaaccagatgatgaagagtatcaggaatttgaagagatgctggaacatgcagagtctgcacaagactttgcctcccgggccaaactggcagttcaaaaactagtacagaaagttggattttttggaattttggcctgtgcttcaattccaaatcctttatttgatctggctggaataacgtgtggacactttctggtacctttttggaccttctttggtgcaaccctaattggaaaagcaataataaaaatgcatatccagaaaatttttgttataataacattcagcaagcgcatagtggagcaaatggtggctttcattggtgctgtccccggcataggtccatctctgcagaagccatttcaggagtacctggaggctcaacggcagaagcttcaccacaaaagcgaaatgggcacaccacagggagaaaactggttgtcctggatgtttgaaaagttggtcgttgtcatggtgtgttacttcatcctatctatcattaactccatggcacaaagttatgccaaacgaatccagcagcggttgaactcagaggagaaaactaaataagtagagaaagttttaaactgcagaaattggagtggatgggttctgccttaaattgggaggactccaagccgggaaggaaaattcccttttccaacctgtatcaatttttacaacttttttcctgaaagcagtttagtccatactttgcactgacatactttttccttctgtgctaaggtaaggtatccaccctcgatgcaatccaccttgtgttttcttagggtggaatgtgatgttcagcagcaaacttgcaacagactggccttctgtttgttactttcaaaaggcccacatgatacaattagagaattcccaccgcacaaaaaaagttcctaagtatgttaaatatgtcaagctttttaggcttgtcacaaatgattgctttgttttcctaagtcatcaaaatgtatataaattatctagattggataacagtcttgcatgtttatcatgttacaatttaatattccatcctgcccaacccttcctctcccatcctcaaaaaagggccattttatgatgcattgcacaccctctggggaaattgatctttaaattttgagacagtataaggaaaatctggttggtgtcttacaagtgagctgacaccattttttattctgtgtatttagaatgaagtcttgaaaaaaactttataaagacatctttaatcattccaaaaaaaaaaaaaaaaaaaaaaaaa

SEQ ID NO: 5052 - protein, 164 aa, Homo sapiens
  ref <308>: DATABASE ACCESSION NUMBER: SWISS-Prot / AAF28970
  ref <309>: DATABASE ENTRY DATE: 2000-10-01
RAKLAVQKLVQKVGFFGILACASIPNPLFDLAGITCGHFLVPFWTFFGATLIGKAIIKMHIQKIFVIITFSKHIVEQMVAFIGAVPGIGPSLQKPFQEYLEAQRQKLHHKSEMGTPQGENWLSWMFEKLVVVMVCYFILSIINSMAQSYAKRIQQRLNSEEKTK

SEQ ID NO: 5053 - DNA, 409 bp, Rattus norvegicus
  ref <308>: DATABASE ACCESSION NUMBER: EMBL / AA859966
  ref <309>: DATABASE ENTRY DATE: 2000-03-03
tttttttttttttttttcaactttattccagtaatttaagagaagattaaaataatagataatatgaaacagatgaagataaccgagctggtacaggtccaggccagcctagtataaagttaaggaggcatggagaatggtgaggcaggggagtggagatctctgttgcaatggcggaaagcagcttggagtatggttgatggtactgtctccttctacacgtgtgttcaatgtgttaacaaatgggaaacggaatcctgcctcattctaaaccagatggtaagagaaatatggcagaacgaggttgtggtatccaggcggctcgggcctgctttgaacactctaattttttcaaagtaaacgcttcgggccccgcgggacactcagctaagagcatcgagggggcgcc

SEQ ID NO: 5054 - DNA, 549 bp, Rattus norvegicus
  ref <308>: DATABASE ACCESSION NUMBER: EMBL / AA859982
  ref <309>: DATABASE ENTRY DATE: 2000-03-03
ggttttattttgtttttagtttttggcaaaatgccaagccctgggtcatgcctgccttctgtgtgtaagttagaacctttcattgagtagtaaagagttaatgtgcatgactaaacagtgccatctagctactataaagacattggaacaagcagtatgcttctgaccttatcctatgttgtagatatgtccacactttgggagaattcccaaagttgtaacattgagaaattcctttatgccattatgcaaaattaattttctgtccataatgactgtctagagacagtaaaaatagaaagttgggccaaaaagcaatgtgaagtaagaatttaaatacaaccccattttaaaaaaatgaatttctatttaagtaatttgttgtaataaagcccagtatttaataaaatgtacaatgtataagtctcagctaacttcttggtttgatttctagagttctgcctctcacttggctcccttgattggttttatttgtttgtttgcttgttttttaatttttttaaaaggttcttatattaacctaccttc

SEQ ID NO: 5055 - DNA, 570 bp, Rattus norvegicus
  ref <308>: DATABASE ACCESSION NUMBER: EMBL / AA859996
  ref <309>: DATABASE ENTRY DATE: 2000-03-03
tttttttttttttttttatttttatattttatataattaataaaacagtgcttgtataaaaattcacacaaagttgctagagagcatacaagttccaaaaaatgtcctgggtttgtggtacattcagttttctaagggtgcactcagatcagtgtaacaggcagacatgacgtggtatctcgttctctttggtaaaactattcttgttatatcactcctcacagtagtcactctgatatccactttgtgcaaggtctgcgcttcctgggatgtcagacatactattttagtgaacatcagaatgtcggggctaatctctagtcctctggatacaaggcaaaaataatctaaaacacggagaatttagatggggacaggaaaagcaattgccaacaagattttatgagacccattaaattctgaaaaaataagtattttatattatattgcttcatggaaaaaaaaatgcccactggagcttcctgtacggatggggaactgaggaccatacagtccagcaggggcacgaaacagctcccagagtgtccagctcgtttcactgaaagggac

SEQ ID NO: 5056 - DNA, 5538 bp, Homo sapiens
  ref <308>: DATABASE ACCESSION NUMBER: EMBL / AB046773
  ref <309>: DATABASE ENTRY DATE: 2001-02-22
ggcaaacgccagcaacagcccctcgtcactgcggctcctgaatgagccacagaagcgggactgtggcagcaccggggcaggcactgacaacgaccccaacatctacttcctgatccagaagatgttctacatgctgaacaccctcacgtccaacatgtcccagctgcacagcaaggtggacctgctctcccttgaggtgagccgcatcaagaagcaggtgagccccactgagatggtggccaaattccagccgccccctgagtaccagctcacagccgcagagctcaagcagatcgtggaccagagcctgtcagggggggacctggcctgccgcttgctggtgcagctcttccccgagctcttcagcgacgtggacttctcccggggctgcagtgcctgtggctttgcggccaagcgcaagctggagtcgctgcacctgcagctcatccgcaactatgtggaggtctactacccctcggtgaaggacacggctgtgtggcaggccgagtgcctgccccagctgaacgacttcttcagccgcttctgggcccagcgggaaatggaggacagccagcccagcggccaggtcgccagcttctttgaggcagagcaggtggaccccggccacttcctggacaacaaagaccaggaggaggccctgtctcttgaccggagcagcaccatcgcctcagaccacgtggtggacacgcaggacctcactgagttcctggacgaagcctcctcaccaggcgactttgccgtcttcctcctccaccggctcttccccgagctcttcgaccaccgcaagctgggtgaacagtacagctgctacggggacggtggaaagcaggagctggacccgcagcggctgcagatcatccgcaactacacggagatctacttccctgacatgcaggaggaggaggcctggctgcagcagtgtgcccagcgcatcaacgacgagctcgagggcctggggctggacgcgggcagtgaaggcgaccccccgcgtgatgactgctacgactcctccagtctgcccgacgacatctcagtggtcaaggtggaggacagcttcgagggcgagcggccgggtcgccgctccaagaagatctggctggtgcccatcgacttcgacaagttagagatcccccagcctgacttcgaggtgcccggtgccgactgcctgctcagcaaggagcagctacgcagcatctacgagagcagcctgtccatcggcaacttcgcctcgcgcctgctggtgcacctgttccccgagctcttcacgcacgagaacctgcgcaagcagtacaactgcagcggctccctgggcaagaagcagctggacccctcccgcatcaagctcatccgccactacgtgcagctgctctacccacgcgccaaaaacgaccgcgtctggaccctggagttcgtgggcaaactggatgagcgctgccggcgccgggacacggagcaaaggcgctcctaccagcagcagcgcaaggtccacgtgccgggccctgagtgcagagacttgaccagctatgcaatcaaccccgagaggttccgggaggagtttgaggggcccccactgccccccgagaggagcagcaaggacttttgcaagatccccttggacgagctggtggtcccctcgcctgacttcccggtgccttctccctacctgctgtctgacaaggaggtgcgtgagatcgtgcagcagagcctctccgtgggcaactttgccgcccggctcctcgtccgcctgtttcccgaactcttcaccgccgagaacctccggctgcagtacaaccattccggggcttgcaacaagaagcaactggaccccacgcggctgcggctcatccgccactacgtggaagccgtctacccggtggagaagatggaggaggtgtggcactacgaatgtatccccagcatcgatgagaggtgccgccgccccaacaggaaaaaatgcgacatcctcaagaaagcaaagaaagtggagaagtgaaggcccgtgacctgcccagagattcggggtcaccagaggctgagcgatgggcacccttgggactgagcaatacttgggagcacgcctatggcatccacagacaggcaccttatgtccgtggggagtggcttactacatttgcacacgtaaacacccacccaaccgcaagaaagaagccttgagtttggtctcttgtacttacaacttctgtcctatgtgccccggcggggcagcctgagtgtggggagagcaagctgtgagggcagggaccagaggttaggggtcctctctccctggttgtgccctccccagcccctcacagcttataatgcaaacccagcaactctcttgcccctcttcccatattttacatcttccattttgacccatttttttttaattaaaaagaaacccttaaaaaaaatcattgggctctttgggggccattttacttagaaaaaaatctctttaaaagtgccatgttcgtgcacagtggctaatcatagcttcaggtggcatggatactgattttactgaccttgttttttacatctgattttggaagagtcaagatgccccttggatggcagtagaggggatggaatagtgcgaagtcctttacgaccacatgcaagttttcccttctgctctggtgccagggaaggcttccgttcagcttggcctgtccttcaggcgcgttggtagaatgttgtgtcactctttaggcgagaacactggatgatgatgatatgaatgtagacagccgtggaaacacgttcgcagtgtctccatctgagccgtgtccttccgctgcccccattccttctccatacatggttgctggttggagggagtggacatgtttccttggaaaacagtgcaggggcttttggcttcttgttagatttaagggtgggcctctttgagctcaccatgaactgtttacttttccgtgtgtgtatttgtacaaaatccaggttccgggagctttgtggtgacttccccagacctcagtgttagctactccaggcagtactacatcctcattcctcagggcgggcccaggtctgggcccctcttggggataccatgcattggaaggacacaggccattttagatggggtacacatgtcccttcccagggtccactcagaactttcctcttggactctctagaaggtcctgctgtcctatacctggccaccccctgccttggggggcacatgtcttcgttccctcccgactgggaatgtcaggctcctgcaggccagctgcatgctctccaggagcaccaactgggaaatcccctgacaggtaaagtcctttaaaatgatacttttacctacctaactctgggggccaaatgcttaagagggaaaggaaacagtcgaatgcaaacagtatgtcataccagagtcctggaaaatttattgaatcacacagggtagtcatagaacccctgtgggatggcttaatattttgctactttaaaatgcagagataacagaaacaatctggattttcttcattcagctgataagaacttcagttccagtggctgtatgacataattttgcctgtacccaggagcattttttaaaatacaggattttaaaagcaatgttaagttgctgatctaactagtaaatttgctcctaagtgtcatttacagattatttctgttgaaactgcaaacagatttagaaaggcacagggactgaatgactctctgtcttacacagctactcatgcacacacgcactgcttactaaaagctgaagtgagatgaagggggcctacacgaataacaagttcaacttctttgtgcctggaaaggagggactggagcagccaggagactcactttcccccctcgcttgggcccttctctatgccttagtctctccagcacatgcacacagcatgcacacacacgcaccctacccaaagacagctgtggccctctcccaccacctcccccttcccaccgctggttgttgggggctggaggcgggaggtcccatggaatttgttctggtttctaggatgtaaacgaggactccaagccatgaattgccctgctttctagagggtggaatgttgaccctgcaactttagaagcacaatcatttattaataatttttttgaaactcccatctacccctgttagagaaatcaacaggttctaggaattaaatatgtctctttgtaacccagagcatgttcaatttttggaaaccgtatttcagtgattttcttaataccttacatgtgtagggcatcttcccccagaatcttacagtccctttctgtgaagagaagtggacacacgtgggaactctcaccatctctggactgtcgtcaggaaacgcctgcaggtccttgccctgtctgtatggtgtcctcacttctccatccatacaggtggctccagtgggcatttttttattttaaattttttacatgaagcaatagaagtacaaaatacttattttttcaaaatttaatgtgttccatgaaacctgttggcagtcgctttccttcccccacatctaaattctttggtttttagttgtttgttttttggaatttttttttttttttttttggccttgtatcccaaggactaaaagattagcacagacacgttttgatgttgaatgaactagtaagtcacagtaggtggtagtcttcattgatttctctgtaagtttttaaagaatgtatgaagatagtcacgaatgtactgagtgttcgcatcccccttcagttcaccttggctgtgtctacaggacaacaaatgtttgacagggaataaagtcgtgtctggtgtcatttgcgctagcgtgcccctcccctttcggtgttggctccaaaccttcctttccttttatgtttgtggggagtggggaaccacatcagcagcaatcatcaaccaaccaaccaatgggatctacttagtggtgaatagattggctatttaattggtaaaagttgctggtctgaccacaccacagcatgaccactgggttcatttagagatggcctccgtttccaacgttccccacaaatgtttgcttctttcccagtcaagaggggatctcgagactcccaagtggaggtcgtgagcttgcaccccgcctggctgtgtagatcgactgtatagatacatgaagtgggggtgagggccaaggggctattactgctgttgggaaatacttgcctctcgtagatccagccttaatgtttttctgacatcctagtaatagcagaccctgcacaaagtggatatcagacttaatactgtgaggagacaaaataatgagaatagttttaccaaagataatgaaatctcgcatcatgtctgcattttaccatagattggagtgcatccttaggaaactgaatgtaacaaaaacccaggacatttttggaaattgtatgctctctagcaactttgtgtgaatttttatacaaacactgttttatgagttatataaaatgttataaaaatagaaaaac

SEQ ID NO: 5057 - DNA, 417 bp, Rattus norvegicus
  misc_feature (1)..(417): n=a, c, g or t
  ref <308>: DATABASE ACCESSION NUMBER: EMBL / AA860010
  ref <309>: DATABASE ENTRY DATE: 2000-03-03
tttttttttttttttttgacagtagccatttcagttttattttgacatttcactcacatgcaagggggtgggaggtgtagataatccagcaagcatctccccatcaggaaattatgtcttggggcttggaatacagaggggaggtgcagactgcattcagtggagaaaggggaagcccagggggagctgaaactgagtagggtcttatgagaactggtagcaaggagcctgggtaaggcctctggcaagcaggtcccctaagtctgtcaagatgctgtgtatggggttcagaaggacagcaccctaaaacagagaacaaacttgccctactttgcttcctaccttggtctctatatgcattcatgaccctgaatcccattgctgttaacctctgaggtctaattccttanggactgg

SEQ ID NO: 5058 - protein, 512 aa, Rattus norvegicus
  ref <308>: DATABASE ACCESSION NUMBER: SWISS-Prot / AAH11490
  ref <309>: DATABASE ENTRY DATE: 2003-02-01
MAPSHPAFQFWIHLYLWCLLLMPAVLAQQGSHTHAEDRLFKHLFGGYNRWARPVPNTSDVVIVRFGLSIAQLIDVDEKNQMMTTNVWLKQEWNDYKLRWDPAEFGNITSLRVPSEMIWIPDIVLYNNADGEFAVTHMTKAHLFFTGTVHWVPPAIYKSSCSIDVTFFPFDQQNCKMKFGSWTYDKAKIDLEQMERTVDLKDYWESGEWAIINATGTYNSKKYDCCAEIYPDVTYYFVIRRLPLFYTINLIIPCLLISCLTVLVFYLPSECGEKITLCISVLLSLTVFLLLITEIIPSTSLVIPLIGEYLLFTMIFVTLSIVITVFVLNVHHRSPSTHNMPNWVRVALLGRVPRWLMMNRPLPPMELHGSPGLKLSPTYHWLETNMDAEEREETEEEEEEEEDENICMCAGLPDSSMGVLYGHGSLHLRAMGPEAKTPSQASEILLSPQIQKALEGVHYIADHLRSEDADSSVKEDWKYVAMVVDRIFLWLFIIVCFLGTIGLFLPPFLAGMI

SEQ ID NO: 5059 - DNA, 2664 bp, Homo sapiens
  ref <308>: DATABASE ACCESSION NUMBER: Refseq / NM_000742
  ref <309>: DATABASE ENTRY DATE: 2000-10-31
gagagaacagcgtgagcctgtgtgcttgtgtgctgagccctcatcccctcctggggccaggcttgggtttcacctgcagaatcgcttgtgctgggctgcctgggctgtcctcagtggcacctgcatgaagccgttctggctgccagagctggacagccccaggaaaacccacctctctgcagagcttgcccagctgtccccgggaagccaaatgcctctcatgtaagtcttctgctcgacggggtgtctcctaaaccctcactcttcagcctctgtttgaccatgaaatgaagtgactgagctctattctgtacctgccactctatttctggggtgacttttgtcagctgcccagaatctccaagccaggctggttctctgcatcctttcaatgacctgttttcttctgtaaccacaggttcggtggtgagaggaagcctcgcagaatccagcagaatcctcacagaatccagcagcagctctgctggggacatggtccatggtgcaacccacagcaaagccctgacctgacctcctgatgctcaggagaagccatgggcccctcctgtcctgtgttcctgtccttcacaaagctcagcctgtggtggctccttctgaccccagcaggtggagaggaagctaagcgcccacctcccagggctcctggagacccactctcctctcccagtcccacggcattgccgcagggaggctcgcataccgagactgaggaccggctcttcaaacacctcttccggggctacaaccgctgggcgcgcccggtgcccaacacttcagacgtggtgattgtgcgctttggactgtccatcgctcagctcatcgatgtggatgagaagaaccaaatgatgaccaccaacgtctggctaaaacaggagtggagcgactacaaactgcgctggaaccccgctgattttggcaacatcacatctctcagggtcccttctgagatgatctggatccccgacattgttctctacaacaatgcagatggggagtttgcagtgacccacatgaccaaggcccacctcttctccacgggcactgtgcactgggtgcccccggccatctacaagagctcctgcagcatcgacgtcaccttcttccccttcgaccagcagaactgcaagatgaagtttggctcctggacttatgacaaggccaagatcgacctggagcagatggagcagactgtggacctgaaggactactgggagagcggcgagtgggccatcgtcaatgccacgggcacctacaacagcaagaagtacgactgctgcgccgagatctaccccgacgtcacctacgccttcgtcatccggcggctgccgctcttctacaccatcaacctcatcatcccctgcctgctcatctcctgcctcactgtgctggtcttctacctgccctccgactgcggcgagaagatcacgctgtgcatttcggtgctgctgtcactcaccgtcttcctgctgctcatcactgagatcatcccgtccacctcgctggtcatcccgctcatcggcgagtacctgctgttcaccatgatcttcgtcaccctgtccatcgtcatcaccgtcttcgtgctcaatgtgcaccaccgctcccccagcacccacaccatgccccactgggtgcggggggcccttctgggctgtgtgccccggtggcttctgatgaaccggcccccaccacccgtggagctctgccaccccctacgcctgaagctcagcccctcttatcactggctggagagcaacgtggatgccgaggagagggaggtggtggtggaggaggaggacagatgggcatgtgcaggtcatgtggccccctctgtgggcaccctctgcagccacggccacctgcactctggggcctcaggtcccaaggctgaggctctgctgcaggagggtgagctgctgctatcaccccacatgcagaaggcactggaaggtgtgcactacattgccgaccacctgcggtctgaggatgctgactcttcggtgaaggaggactggaagtatgttgccatggtcatcgacaggatcttcctctggctgtttatcatcgtctgcttcctggggaccatcggcctctttctgcctccgttcctagctggaatgatctgactgcacctccctcgagctggctcccagggcaaaggggagggttcttggatgtggaagggctttgaacaatgtttagatttggagatgagcccaaagtgccagggagaacagccaggtgaggtgggaggttggagagccaggtgaggtctctctaagtcaggctggggttgaagtttggagtctgtccgagtttgcagggtgctgagctgtatggtccagcaggggagtaataagggctcttccggaaggggaggaagcgggaggcaggcctgcacctgatgtggaggtacaggcagatcttccctaccggggagggatggatggttggatacaggtggctgggctattccatccatctggaagcacatttgagcctccaggcttctccttgacgtcattcctctccttccttgctgcaaaatggctctgcaccagccggcccccaggaggtctggcagagctgagagccatggcctgcaggggctccatatgtccctacgcgtgcagcaggcaaacaaga

SEQ ID NO: 5060 - protein, 529 aa, Homo sapiens
  ref <308>: DATABASE ACCESSION NUMBER: SWISS-Prot / Q15822
  ref <309>: DATABASE ENTRY DATE: 2002-06-15
MGPSCPVFLSFTKLSLWWLLLTPAGGEEAKRPPPRAPGDPLSSPSPTALPQGGSHTETEDRLFKHLFRGYNRWARPVPNTSDVVIVRFGLSIAQLIDVDEKNQMMTTNVWLKQEWSDYKLRWNPADFGNITSLRVPSEMIWIPDIVLYNNADGEFAVTHMTKAHLFSTGTVHWVPPAIYKSSCSIDVTFFPFDQQNCKMKFGSWTYDKAKIDLEQMEQTVDLKDYWESGEWAIVNATGTYNSKKYDCCAEIYPDVTYAFVIRRLPLFYTINLIIPCLLISCLTVLVFYLPSDCGEKITLCISVLLSLTVFLLLITEIIPSTSLVIPLIGEYLLFTMIFVTLSIVITVFVLNVHHRSPSTHTMPHWVRGALLGCVPRWLLMNRPPPPVELCHPLRLKLSPSYHWLESNVDAEEREVVVEEEDRWACAGHVAPSVGTLCSHGHLHSGASGPKAEALLQEGELLLSPHMQKALEGVHYIADHLRSEDADSSVKEDWKYVAMVIDRIFLWLFIIVCFLGTIGLFLPPFLAGMI

SEQ ID NO: 5061 - DNA, 607 bp, Rattus norvegicus
  misc_feature (1)..(607): n=a, c, g or t
  ref <308>: DATABASE ACCESSION NUMBER: EMBL / AA860015
  ref <309>: DATABASE ENTRY DATE: 2000-03-03
tttttttttttttttttgcatttcattttttattaccaatcaaaaataaattccatatattgtttagcaaatattataattgttttgtgacaaaagacacaagagtcataacaacaaaactccccgagagtcaaactcataacaatgccaaaataaatcacaaaaatatacagattaaaatcttaatgcaaaataaataggagtcatctgctatggcggctgtgacttgcctacccacttggacgccgtctgtggagtcctcccctgctgggaagacacgcagaccaggccagttccagggtatggctctgcccaggaaccagaggttggaagaagtgaaaaattgcactatgaggaggaagtcatcagaacagtaatatttggaaataattatgaccctctgcaagaagtgattctaagtgaggaagggaggggcggggcccggctgtcggtgactgtgtatgcacagaggtanctgtggaagtgtgtgcacctgctacgtttgcctcacacccaccacagggttttgctctacctggcacttaggtctcacagtaacacagctatgcacctcatctacagactcaggagcatgccgcacctacag

SEQ ID NO: 5062 - DNA, 374 bp, Homo sapiens
  misc_feature (1)..(374): n=a, c, g or t
  ref <308>: DATABASE ACCESSION NUMBER: EMBL / F34867
  ref <309>: DATABASE ENTRY DATE: 1999-05-08
tagcattcgacngcnctcctcctnttccctggcccattgatcatcccttctcacagagggtcatcattatttccaaatattgtttgtctgatgacttcctcttcccagtgcaatttttcccttcctatttcaacctctgggtcctgggatgagccataccctggaactggcccacccactgtgtcttccacgtaagggagacctttgcaaagggcatccaaatgggtaggcaggtgacagccgccgtatttattttgcataatattttaatttgtatatttttgtgatttattttggcgttatgagtttgactctcggggagntttgttgttatgactcttgtgtcttttgtcacaaaacaatgatatttgcta

SEQ ID NO: 5063 - DNA, 543 bp, Rattus norvegicus
  ref <308>: DATABASE ACCESSION NUMBER: EMBL / AA860017
  ref <309>: DATABASE ENTRY DATE: 2000-03-03
tttttttttttttttggttttaaaagcacaatcactaaactttatttgtaaaccattgtaactattaaccttttttgtcttattgaggaagctgttgagaagtgtttttagcctgttttgttaatgctctgtgtttctatttgcaatatttgaatggtgacagctagcaaggtcaggtaccttatcgtgggctgtgaaccaagtggttccaattttttgtggacttaaagagaaaaaaaaaaaaaagagttgttttaagtttgttgtggccaatgttgaatcttataagatttccttagacactcatgagaggcattccgacttggaactgagaagtgatgctccgtgactgtagatttctatgggttttcttttttctttttttttttttttgtttgttttttggtgtttttacattttacaaatttcattgactttataattggtgctatttgaagaaaacaaaatgaacctttagtcatacataggtatcaggcttgaccccaaaaaaccaaacaaaattgacccacaaaatagataaat

SEQ ID NO: 5064 - protein, 1612 aa, Rattus norvegicus
  ref <308>: DATABASE ACCESSION NUMBER: SWISS-Prot / CAA76850
  ref <309>: DATABASE ENTRY DATE: 2003-02-01
MIAEPAHFYLFGLICLCSGSRLRQEDFPPRIVEHPSDLIVSKGEPATLNCKAEGRPTPTIEWYKGGERVETDKDDPRSHRMLLPSGSLFFLRIVHGRKSRPDEGVYICVARNYLGEAVSHNASLEVAILRDDFRQNPSDVMVAVGEPAVMECQPPRGHPEPTISWKKDGSPLDDKDERITIRGGKLMITYTRKSDAGKYVCVGTNMVGERESEVAELTVLERPSFVKRPSNLAVTVDDSAEFKCEARGDPVPTVRWRKDDGELPKSRYEIRDDHTLKIRKVTAGDMGSYTCVAENMVGKAEASATLTVQEPPHFVVKPRDQVVALGRTVTFQCEATGNPQPAIFWRREGSQNLLFSYQPPQSSSRFSVSQTGDLTITNVQRSDVGYYICQTLNVAGSIITKAYLEVTDVIADRPPPVIRQGPVNQTVAVDGTLILSCVATGSPAPTILWRKDGVLVSTQDSRIKQLESGVLQIRYAKLGDTGRYTCTASTPSGEATWSAYIEVQEFGVPVQPPRPTDPNLIPSAPSKPEVTDVSKNTVTLSWQPNLNSGATPTSYIIEAFSHASGSSWQTAAENVKTETFAIKGLKPNAIYLFLVRAANAYGISDPSQISDPVKTQDVPPTSQGVDHKQVQRELGNVVLHLHNPTILSSSSVEVHWTVDQQSQYIQGYKILYRPSGASHGESEWLVFEVRTPTKNSVVIPDLRKGVNYEIKARPFFNEFQGADSEIKFAKTLEEAPSAPPRSVTVSKNDGNGTAILVTWQPPPEDTQNGMVQEYKVWCLGNETKYHINKTVDGSTFSVVIPSLVPGIRYSVEVAASTGAGPGVKSEPQFIQLDSHGNPVSPEDQVSLAQQISDVVRQPAFIAGIGAACWIILMVFSIWLYRHRKKRNGLTSTYAGIRKVPSFTFTPTVTYQRGGEAVSSGGRPGLLNISEPATQPWLADTWPNTGNNHNDCSINCCTAGNGNSDSNLTTYSRPADCIANYNNQLDNKQTNLMLPESTVYGDVDLSNKINEMKTFNSPNLKDGRFVNPSGQPTPYATTQLIQANLSNNMNNGAGDSSEKHWKPPGQQKPEVAPIQYNIMEQNKLNKDYRANDTIPPTIPYNQSYDQNTGGSYNSSDRGSSTSGSQGHKKGARTPKAPKQGGMNWADLLPPPPAHPPPHSNSEEYNMSVDESYDQEMPCPVPPAPMYLQQDELQEEEDERGPTPPVRGAASSPAAVSYSHQSTATLTPSPQEELQPMLQDCPEDLGHMPHPPDRRRQPVSPPPPPRPISPPHTYGYISGPLVSDMDTDAPEEEEDEADMEVAKMQTRRLLLRGLEQTPASSVGDLESSVTGSMINGWGSASEEDNISSGRSSVSSSDGSFFTDADFAQAVAAAAEYAGLKVARRQMQDAAGRRHFHASQCPRPTSPVSTDSNMSAVVIQKARPAKKQKHQPGHLRREAYADDLPPPPVPPPAIKSPTVQSKAQLEVRPVMVPKLASIEARTDRSSDRKGGSYKGREALDGRQVTDLRTNPSDPREAQEQPNDGKGRGTRQPKRDLPPAKTHLGQEDILPYCRPTFPTSNNPRDPSSSSSMSSRGSGSRQREQANVGRRNMAEMQVLGGFERGDENNEELEETES

SEQ ID NO: 5065 - DNA, 3215 bp, Homo sapiens
  ref <308>: DATABASE ACCESSION NUMBER: EMBL / BC001969
  ref <309>: DATABASE ENTRY DATE: 2001-06-06
gtagtacatctgggagtcaggggcacaagaaaggggcaagaacacccaaggtaccaaaacagggtggcatgaactgggcagacctgcttcctcctcccccagcacatcctcctccacacagcaatagcgaagagtacaacatttctgtagatgaaagctatgaccaagaaatgccatgtcccgtgccaccagcaaggatgtatttgcaacaagatgaattagaagaggaggaagatgaacgaggccccactccccctgttcggggagcagcttcttctccagctgccgtgtcctatagccatcagtccactgccactctgactccctccccacaggaagaactccagcccatgttacaggattgtccagaggagactggccacatgcagcaccagcccgacaggagacggcagcctgtgagtcctcctccaccaccacggccgatctcccctccacatacctatggctacatttcaggacccctggtctcagatatggatacggatgcgccagaagaggaagaagacgaagccgacatggaggtagccaagatgcaaaccagaaggcttttgttacgtgggcttgagcagacacctgcctccagtgttggggacctggagagctctgtcacggggtccatgatcaacggctggggctcagcctcagaggaggacaacatttccagcggacgctccagtgttagttcttcggacggctcctttttcactgatgctgactttgcccaggcagtcgcagcagcggcagagtatgctggtctgaaagtagcacgacggcaaatgcaggatgctgctggccgtcgacattttcatgcgtctcagtgccctaggcccacaagtcccgtgtctacagacagcaacatgagtgccgccgtaatgcagaaaaccagaccagccaagaaactgaaacaccagccaggacatctgcgcagagaaacctacacagatgatcttccaccacctcctgtgccgccacctgctataaagtcacctactgcccaatccaagacacagctggaagtacgacctgtagtggtgccaaaactcccttctatggatgcaagaacagacagatcatcagacagaaaaggaagcagttacaaggggagagaagtgttggatggaagacaggttgttgacatgcgaacaaatccaggtgatcccagagaagcacaggaacagcaaaatgacgggaaaggacgtggaaacaaggcagcaaaacgagaccttccaccagcaaagactcatctcatccaagaggatattctaccttattgtagacctacttttccaacatcaaataatcccagagatcccagttcctcaagctcaatgtcatcaagaggatcaggaagcagacaaagagaacaagcaaatgtaggtcgaagaaatattgcagaaatgcaggtacttggaggatatgaaagaggagaagataataatgaagaattagaggaaactgaaagctgaagacaaccaagaggcttatgagatctaatgtgaaaatcatcactcaagatgcctcctgtcagatgacacatgacgccagataaaatgttcagtgcaatcagagtgtacaaattgtcgtttttattcctcttattgggatatcattttaaaaactttattgggtttttattgttgttgtttgatccctaaccctacaaagagccttcctattcccctcgctgttggagcaaaccattataccttacttccagcaagcaaagtgctttgacttcttgcttcagtcatcagccagcaagagggaacaaaactgttcttttgcattttgccgctgagatatggcattgcactgcttatatgccaagctaatttatagcaagatattgatcaaatatagaaagttgatattcaacctcacaagggctctcaaagtataatctttctatagccaactgctaatgcaaattaaaacatatttcattttaacatgatttcaaaatcagtttttcatactaccctttgctggaagaaactaaaaatatagcaaatgcagaaccacaaacaattcgaatggggtagaaacattgtaaatatttactctttgcaaaccctggtggtattttattttggcttcatttcaatcattgaagtatattcttattggaaatgtacttttggataagtagggctaagccagttggatctctggttgtctagtcattgtcataagtaaacctagtaaaaccttgttctatttttcaatcatcaaaaagtaattataaatacgtattacaaacaagtggatgtttttaatgaccaattgagtaagaacatccctgtcttaactggcctaaatttcttctggtagtgtcagttcaactttcagaagtgccacttaaggaagtttgatttttgtttttgtaatgcactgtttttaatctctctctcttttttttttttttttggttttaaaagcacaatcactaaactttatttgtaaaccattgtaactattaaccttttttgtcttattgaaaaaaaaaatgttgagaagcgtttttaacctgttttgttaatgctctatgtttgtatttggaatatttgaataatgacagatggtgaagtaacatgcatactttattgtgggccatgaaccaaatggttcttacttttcctggacttaaagaaaaaaagaggtttaagtttgttgtggccaatgtcgaaacctacaagatttccttaaaatctctaatagaggcattacttgctttcaattgacaaatgatgccctctgactagtagatttctatgatccttttttgtcattttatgaatatcattgattttataattggtgctatttgaagaaaaaaatgtacatttattcatagatagataagtatcaggtctgaccccagtggaaaacaaagccaaacaaaactgaaccacaaaaaaaaaggctggtgttcaccaaaaccaaacttgttcatttagataatttgaaaaagttccatagaaaaggcgtgcagtactaagggaacaatccatgtgattaatgttttcattatgttcatgtaagaagccccttatttttagccataattttgcatactgaaaatccaataatcagaaaagtaattttgtcacattatttattaaaaatgttctcaaatacaaaaaaaaaaaaaaaaaaaaaaaaaaaaaaaaaaaaaaaaaaaaaaaaaaaaaaaa

SEQ ID NO: 5066 - protein, 1651 aa, Homo sapiens
  ref <308>: DATABASE ACCESSION NUMBER: SWISS-Prot / AAC39575
  ref <309>: DATABASE ENTRY DATE: 2003-02-01
MKWKHVPFLVMISLLSLSPNHLFLAQLIPDPEDVERGNDHGTPIPTSDNDDNSLGYTGSRLRQEDFPPRIVEHPSDLIVSKGEPATLNCKAEGRPTPTIEWYKGGERVETDKDDPRSHRMLLPSGSLFFLRIVHGRKSRPDEGVYVCVARNYLGEAVSHNASLEVAILRDDFRQNPSDVMVAVGEPAVMECQPPRGHPEPTISWKKDGSPLDDKDERITIRGGKLMITYTRKSDAGKYVCVGTNMVGERESEVAELTVLERPSFVKRPSNLAVTVDDSAEFKCEARGDPVPTVRWRKDDGELPKSRYEIRDDHTLKIRKVTAGDMGSYTCVAENMVGKAEASATLTVQEPPHFVVKPRDQVVALGRTVTFQCEATGNPQPAIFWRREGSQNLLFSYQPPQSSSRFSVSQTGDLTITNVQRSDVGYYICQTLNVAGSIITKAYLEVTDVIADRPPPVIRQGPVNQTVAVDGTFVLSCVATGSPVPTILWRKDGVLVSTQDSRIKQLENGVLQIRYAKLGDTGRYTCIASTPSGEATWSAYIEVQEFGVPVQPPRPTDPNLIPSAPSKPEVTDVSRNTVTLSWQPNLNSGATPTSYIIEAFSHASGSSWQTVAENVKTETSAIKGLKPNAIYLFLVRAANAYGISDPSQISDPVKTQDVLPTSQGVDHKQVQRELGNAVLHLHNPTVLSSSSIEVHWTVDQQSQYIQGYKILYRPSGANHGESDWLVFEVRTPAKNSVVIPDLRKGVNYEIKARPFFNEFQGADSEIKFAKTLEEAPSAPPQGVTVSKNDGNGTAILVSWQPPPEDTQNGMVQEYKVWCLGNETRYHINKTVDGSTFSVVIPFLVPGIRYSVEVAASTGAGSGVKSEPQFIQLDAHGNPVSPEDQVSLAQQISDVVKQPAFIAGIGAACWIILMVFSIWLYRHRKKRNGLTSTYAGIRKVPSFTFTPTVTYQRGGEAVSSGGRPGLLNISEPAAQPWLADTWPNTGNNHNDCSISCCTAGNGNSDSNLTTYSRPADCIANYNNQLDNKQTNLMLPESTVYGDVDLSNKINEMKTFNSPNLKDGRFVNPSGQPTPYATTQLIQSNLSNNMNNGSGDSGEKHWKPLGQQKQEVAPVQYNIVEQNKLNKDYRANDTVPPTIPYNQSYDQNTGGSYNSSDRGSSTSGSQGHKKGARTPKVPKQGGMNWADLLPPPPAHPPPHSNSEEYNISVDESYDQEMPCPVPPARMYLQQDELEEEEDERGPTPPVRGAASSPAAVSYSHQSTATLTPSPQEELQPMLQDCPEETGHMQHQPDRRRQPVSPPPPPRPISPPHTYGYISGPLVSDMDTDAPEEEEDEADMEVAKMQTRRLLLRGLEQTPASSVGDLESSVTGSMINGWGSASEEDNISSGRSSVSSSDGSFFTDADFAQAVAAAAEYAGLKVARRQMQDAAGRRHFHASQCPRPTSPVSTDSNMSAAVMQKTRPAKKLKHQPGHLRRETYTDDLPPPPVPPPAIKSPTAQSKTQLEVRPVVVPKLPSMDARTDRSSDRKGSSYKGREVLDGRQVVDMRTNPGDPREAQEQQNDGKGRGNKAAKRDLPPAKTHLIQEDILPYCRPTFPTSNNPRDPSSSSSMSSRGSGSRQREQANVGRRNIAEMQVLGGYERGEDNNEELEETES

SEQ ID NO: 5067 - DNA, 459 bp, Rattus norvegicus
  ref <308>: DATABASE ACCESSION NUMBER: EMBL / AA860044
  ref <309>: DATABASE ENTRY DATE: 2000-03-03
tttttttttttttttttggaggttgcgtaactttattgtgtagacataaatattttgtttaaatattaaacattaaaccttttcctgacatccagacagaaatagggagagcaggaacaacaggcaagagaagaaacagtccactgaacagacgtgtgactcctatgccatccacaggagggatttcagcatgggttcaaaatgccaagaagctaagtttctaaaaaattcacctctactcagcataaacctctttactgttttcccctacacagaggagaagaaacccagaaactgaaaactgaaccgaggtgatctgctgcagacctcttaccactctacagccctcattacacatcctgccatgctgaagagctcttcctgagaaattaaaaactttaaccctggttattcccaaagaacaccttgagcctggttcggtactaaagggtcaagatt

SEQ ID NO: 5068 - protein, 137 aa, Rattus norvegicus
  ref <308>: DATABASE ACCESSION NUMBER: SWISS-Prot / AAH03203
  ref <309>: DATABASE ENTRY DATE: 2001-12-01
EVARRRLQEIEDRIIDEDEEVESDRNVSHLPSLVLSDTMKTGLKREFDEVFTKRMIESMSRPSMELVLWKPLPELLPEKPKPSSSPKNYRRESQAKHAAPGTAFPQRTEGLLEPQCADAPLYRSLEAATSTEEEMEL

SEQ ID NO: 5069 - DNA, 31737 bp, Homo sapiens
  ref <308>: DATABASE ACCESSION NUMBER: EMBL / Z93930
  ref <309>: DATABASE ENTRY DATE: 1999-12-12
aagcttgttttgttttgttttgttttgtgttttgagacagggtctcactctgtcacccaggctggagtgtagtggcatgatcacagctcaccacagccttgacctcctgggctcaggtgatactcccacctcagcctcccgagtagctgggactacagtcacctgctaccacacccagctaatttttgtattttttgtagagacggggttcaccacattgcccgggctggttgcaaactcctgggctcaaaccatctgcctggcttggcctcccaaagtgctaggattacaggcatgagccactgtgcctggcccataaagcattatactttgtacctatactaaaaggcatctgagatactttcagcatgtttgtccagtgtttccttttcatttataatgatttagtatgagctagctgcctacatgtaatattaaccacaacttaaaaaaatttccaacaatcaagggctctgcgttttcatattggatttttaaatacttccaatcacagcatcattacaaccacttgatttggttaaatatacatgttgaagtgtgcaatgttatgtatttgaggggcctttctaaagatcagttggagccaggcatggtggtatgtgcctgtagtcctaattactgggaaggctgaagtgggtagattgcttgaccccaggagttaaaggctgcggtgagctatgactgtaccactgtactccactgtggacaacacagcaagaccccatctcttaaaaaaaaaaaaaaaaagaaagtaaagatcagtttgtgtgttctaaatctcctgttttgctatcatcagtccttaagatactaggtaatgttggcttttcaacctacagcttttgttttcatgtcctaaaattttttgataaaagtctgtattttatgtcttaggagccgtccttccatggagcttgttctctggaaacccctccctgaactcctttctgataagccaaagccatcctctaatactaagaactatacaggagagagccaagctaagcatgtagctgctggcactgccttccctcagagaactgaactgttttcggaacctcggccaacagggatgtctctttataatagtttggagacagctactagcacagaagaagagatggaactctagaaaccaatttctacactaaagttgtcaaatgttagaagaatcctgtgttcagttatgagactctttgcatagtatagggacttgaaagttttatgagacgggtgtaataatatctccacctgtgatttgggggtgggactcttattttgggtagccatttattgacttcacctttttgccaaggacgtttgtctcaagggaaaagcagttttctgtggggcttattaaaggaatgttggtttacattgtcttcaaagacaagtatagaagctgtatgtgtaagggtgacttaaatcatatgtcacattgtctaaactattcagacacttggagaatattctccttgaattaaaaaagatgattaagaaggatgctcctacaactgtatcctgacagttaagtcacagcttaatgtgtagatatgagctgtttacagtggtgactatatataattggggagaagaagggaagagagcagcagtagcttaagcctgttgctaagaaatttaatttcttagcaacttgtaatttagttatcaattcaatatagctctgttgattaaatagccgatagtattgtggctctcctctttgactatgaaaatatagagaaagttttttctttaaggcttttttgccttgtgccactgttgctccttggtttcccttgcgtaattgataagcccagttattcagtaatgtttacaaattaattgactttgatagttaaaagattatgaggtaacccatctgcaatttgcctgtgggagaagcatcctttagttcatcttaaggaagtgctttatcagctaaacccaacattgataactttggtaatttttttaaaaagttatacttgtattagcaagtttttttttttttcccccaccgcaacctccatctcccgggttcaagcaattctcctgcctcaccctcccaagtagctgggattacaggtgcccacctccacgcccagctaatttttgtatttttaatagagaccggttttgccatgttggccaggctggtctcgaactcctgacctcaggtgatctgcccaccccagcctcccaaaatgctgggattacaggcgtgagccacggcacgcagccagcaagttgtttttaaatgttaatatagaaaacagtgaaggattagctgaaaatatatgagcaggtgacattgaggtttactgaaatagccaatttgactggtgcttagactattgtgcagtaaacctaaaaggtagtggagaattgcttcctgctagcaggaagccttcatcttcttgagtacccaaaccaggcttcaggtgtcctttgaggatagccaggtttgaaatttttagtttctcaggaagagctcttctatgtggcaggggctgatagggcaaaataaaatgacaatttctttattgctacagagtatcctctataagttattaaacgagtgtaatggtataatgcccttccatcacacaacaggacaccaccccagttttgttttctgggtttcttccccctttgtaggaatcagataccttttgtagaaaaaaatggcttatgccacgtaaaggtgaatttttagaaaccaccttctaggcgtttttggaacccttactgaaatccctccccttgttacagatggcgtagaagtcacaagtctgttaattggactgttgcttctttgcctgttcctgctttctctttctgtctggatagtcaggaaaagatttaatgtttaatatttaaacaaaatatttaatgtctatacagtaaaattattcaaacttcaaaccagtattgaaagcagttggaaaccagctaatagtttcttaatctcagatttcgagatgaatgtaaactgtattcttttgaaatgtgcaagtgtttgattcatgccatttgataaacttctgccttgtagtcattgtttgatgggaccaacttgtaaagtatgagccttaaataaatctccatgctgaaaaatgtgttctaatgcaacacaaaaacatgaagtgactgcccagaggtagagttagtgtttaggtggaaagggagatgacagctttccaaagaaggacctaaaacacaccaagattgtcttctacaggaattgctgggcaggtctccgactaaaggtcttatgatgaaaaggaagaaacaagcccccaacacaaggctctgatactactggtaaatgtaggagagaattaagaatctgttaattaaaatccaaacagagcttatttcagtagtcaagttacctgacatgataattatttctgcaggataattgatgttttatgttcttttttggactttatcttcttgcaaaaatttctacaaaaattgttttcttcatccttgtggtgcttattcatctgagccgtctccacagtcccaatgcctctgctttttgttttacttttgtagcataaggtttttgcttttgctttgccttaagagttccctagggagttaccagggcttttcgttttgtgtagcttttgcagcatggatcaaacattggcttactgtgctaatgtgtgaagagaaaaaattctctaaagcaggtgagctttaatgaacaaatgtgtattttatctgagtttgagtagggtgcgttgtggattttgttttttgggttttttttttttttttgtaattatatgaagaaagtccagttctcataaatattgatcacttaaaaaacttactctttcttgaaaaggtacacatgtaaaatttaggaaaataactaaagtaggggctggaaccataagaagaatgtttatcagcacgttcatttattattttggatttggaacttggctttgtttttcaatagtgacaagaatggttcagttctaggaatgttctggaagatgctgttaattttactttaaaatgagaatctggtgttactgtattttatcgttttcaataaaacttcttaagtgttttggacttttgagatatttgtattactccacttaaataatgaaatcagatatctcctttcctctgaattgtagttgaagcagcattcatatcagtgaaggacttaaatttatcctgaagggatgattatgttgggataaagctaagtatcatatttgaattagctgttcccacaataggcaggccatgtgttgctattctaaaacccatagactgctttccactcagagcagttcactgctattgttagtatttagatggcagtggtaactgtgtattcaaaaatgttaaaatgggctaggtacgatggtgcacacctgtgccagcactttgtgagactgaggcaggaggatcacttaagctgaggagagaccagcctggacaatattagcaagaccttttctcttaaaaaaaaaaaaaaagtatatatatatatattcaaatgtagagttggaagtggcatacagagttcatagagagggggttgaggatctttgaaaatggggaatggaaaacccagtgatgttcacttacatggtgttttctttttttgcgtgtgagacggagttttgcttgttgccccggctggagtgcaatggcgtgatcttggctcactgcaacctctgcctcccggattcaagcaattctcgtgcctcagcctcctgagtagctgggattacaggcatgcgccaccacacctggctaatttttgtgggttttttgttgttgttgttgttgtttttgagacggagtctcgctgtttcgccaggctggagtgcagtggtgcaatatcagctcgctgcaacctccgccacccaggttcaagcgattctactgcctcagcctcctgagtagctgagactgtaggcgcgaaccaccatgcccagctaatttttcttgtactattagtagagatggagtttctccgtgtttgtcaggctggtctcgaactcctaacctcagatgatctgcttgcctcggcctcccaaagtgctgggattacaggtgtgagccaccatgcccagccgtttcctttaagacttgacaggtcactgggtggcagtattgcctgcatatttacattctttgataaatgcattcctgatttggtgggcaggaggagttaagtttgggatacaactacaaaaagcaaagcatggtgggtttttttttgagatggagtcttccctctgttgcccaggctggagtgcagtggcacaatctcggttcactgcaacctctgcctcctgggttcaggcgattctcctgcctcagcttcctgagtagctgcgactaccggcatgtgccaccacgcccagctaatttttgtatttttagtagagacggtttcaccatattggccaggctggtctcgaactcctgaccttgtgatccacccacctcagccccccaaagtgctaggattacaggtgtgagccactgtgcccggctgcatgatgttttgtttttaatcaaaatttggaaatcacagctaaaaatgatctaattacaggtttggaaactaaagcctaagtagatcgtgtcatcctgttcctcgggtcagtgttctttccacttgaccagttggttttagagtctttgccgatctaagatgtcatttagattttgttgaaataactgataatatagttcaagcagtctaacattaaactccttgaggaaacatggtttagtatgtatcagtttggtacaaatcctatagctgtgttaattccctagttcctcagactaccagtagcatcttagagatgaagtagttgtaattagaacagtgtttggattatagctccagcaagacaatgatgtttggttgggtgcagtggctcatgcttataatcccagcattttgggaggctgaggtcggaaaattgcttgagtccacacgtttgagaccagcctggacaacacagtgggactctgtctctataagaaatttaaaaattaggtgtggtggctgttcccagctactcaggaggctgaggggggaggatggcctgagtccaggagttagaggctgcagtgagccatgattgcgccattgcagctcagcttgagtgccagtgagaccctgcctcaaaaaagactgatgttttccttcaacaactggttggttgggtaaacaagccagtcttcctattgcttttttttttttaatgtatttattttttagagatggggtcttgctttgttgcccagccggtctcgaactgggctcaagccatcctcccacctcagcctctcaaagtgctgggattatagacgtgaagcaccgtgcctggcccagtcttcctgtttcttaatgaactttatgtcataagagaattgaattcttaggagactggaacgtgactgattattttaaagtgtgcctggagtaagcagtattaccttctgcctacagttctgtccctactttctctctgctccaataacatatctagtagaaaagcaaggagggggccaggtgcagtggctcacgcctgtaatcccagcattttgtgaggctgaggtgggtggatcacttgaggtcaggagtttgagtccagccaggccaacgtggtgaaaccctatttctactaaaaatacaaagattagctgggtgtggtggcatgtgcctataatcccagctactcaagaggttgaggcagaattgcttgaacccaggaggtggaggttgcagtgagccaagatcatgccactgcaccccagcctgggcgacagagcgaaactcagtcttttttaaaaaaaaaaaaaaagagaaatagattggtgtgacagggcctagggaaatggcatgcaggcatcttaccacttgcctcttcaatctgagacaaccctctgcatttaatggaactctggctttggttttgtgggaatatcttgatttttggttctaaccattcaatttggtgtttcagtatgaaaatgtccatgaataccaggtgttttctcaaggctgtttagtaatttccacccatctgtgcaggaaatgaaaaccctgataatttacacaggttatatatgtcctgtcctgttagtacagctgcctctttcatgtggtatcattgaatataaataacttgagcctcaacctccagatgcttgtgctataatgatagaggataaagtacatctgtaattacatctgcctatacaattcctaaataggttcttggccctaaggtttgcagagttatagaaaatcaggtgagataaagttttcaatcatggggtcagctggaggctgttcttatatacagaacctttttttttttaggcagtcttgctttttcacccagtctggagtgcagtgctgcgatcttggctgactgcaacctctgccccctggcctcaagcgatcctcccacctcagcttcctgagtggctgtgaccaccagtgcacaccaccatgcctggctatttttttttacttttcatggagagacgggtttgccatgttgtccaggctagtcttgaaccaagcaatctgctggcctcggcctcccaaagtgctgggattataggtgtgagccaccatgcctggcctgtttctgaagaaacttaagagcctaagcaagtttgtattgctgagcaccaggattgggccctggcttcaacgaccggatcttgaaggcagctagctgacttgcctccagtcactacatgaaaggcattctatttttttttttcttttttaaatggagtttcgctcttgttgcccaggctggagtgcaatggcacgatctcggctcgctgcatcctctgcctcccgggttcaagtgattctgccgcctcagcctcctgagtagctgggattacaggcatatgcgccaccacacccagctaattttgtatttttactagagatggggtttcactatgttggtcaggctggccatgaactcctgacctcaggtgatccgcccacctcagcctcccaaagtgttgggattacaagcgtgagccactacacctggcctacaccaaaggtattctataatccactttgccttgctgcttgggattctctgaatcctgccttttttctactcattcactttgacctccccagagttagtctttgtaagttgggaacatagcatttaaatgctaaattggcatagaatgatttcatctactggcataggtgaaatttttataaataagtaaagtcctgtaaaaccttgtaagatttccaaggaaaagatgctatgaaggatgaggaggttatcaagtctttgggagttgtattaatatcactaggattttttcttgaagaggtttatttatttatttatttatttatttatttattttttgagacagagtctcgctctgttgcccaggctggagtgcagtggcgcgatctcccctcaccgcaagctccgcctcccgggttcacgccattctcctgcctcagcctcccaagtagctgggattacaggcgcccaccaccacgcctggctaattttttgtaattttagtagagacagggtttccccatgttaggcaggatggtctcgatctcctgacctcgtgatccacccgcctcagcctcccaaagtgctgggattacaggcatgagccaccgcgcctggccgaggtttattctttgatgaaacaaattcttgagtaaatataattctggaagagattaaaacccttccaaagtggattaggagataataactaactaactttccagtgtttaggatggtgcctagcatatactaaatgcttataatgcatcgtctctttgaatcttaacctttagagataccattatccaactttacagatgaggaaataagtgattatatataacccctgggttacccagcttaccagtggcagagttgaaaatagggagtttcagtctagaaaatgctcttaattcccataataagggcaagagaatctcgatatgtgatggtgtgtccttgtttaacatttataagatggtgtagcaaatagtggttagggttctagctcttccacttactagctgtgatattggtcagttaggctcaagaatctgtctcagaaagacagtaactgctcaaattatagcttatatcacttatggcagtccagaattaaagcaggcagtaattaaggtggaaaagccttcagtcactttaaaaagcgttaggctcacttcagttggattaattcctaccacagcacacagataaacatctggagagaaaacaagacttacggccctagaagaaatcaaacaaggatgctgcattgtaccttttaattgcatgggtagttttaaataaatggagaaagcacctttcagaagctacactagcaggaaaaaattccatcaagcatttacatagtaaatttctataatttcacaaaagattcttgatcttacttgaagtatacatgagggaaagagccccctcagcaggtgttcccgttgcttacagaagcaaactaaaggacctaaaactggaggcaagccaggatgccaaaaagggggaagagaaatgataaagaaccattcataaattccatgtctacttcaagacatttgtctaatgacccttacataataagtattttagggaaaactaccacccttttaagataaaagtacaatcttaaaagctgtagttctcaattatagtaatatttcttacttccagtaatatgtctcaataccttggactgctggatgtcaaaagacaatacctgggggtcatctatgagatctgaacaaatagaggaattctctaggactgtatactctctattttggctttttgaatgaagtacagacaggcttctctgctatcctccaggcagtgtaatagtcaaggaaaagggcaacagtattggatcattccttagacactaatcagctggggaaagagttcattggcaaaagtgtcctcccaagaatggtttacaccaagcagagaggacatgtcactgaatggggaaagggaacccccgtatccacagtcactgtaagcatccagtaggcaggaagatggctttgggcagtggctggatgaaagcagatttgagatacccagctccggaacgaggtcatcttctacaggttcttccttcactgagacaatgaattcagggtgatcattctctgaggggctgagaggtgcttcctcgattttcactaccacattagcttggctctctgtctcagagggtatctctaagactaggggcttggtatatatgtggtcaaaacgaattagttcattaatggcttccagcttggctgatgacgtccccactgacagagaaagggaggctggtaaggaactgggtccttctgggtagacctctgggagctcctccaggctggcaggctctggggaagggcatttgaagaacatgactgggtccaagttgtccagaatgcccaacaggatatcagactgtaagaggcaaaaattaaatgaagtacaactgtcagaatacaatggaaaatctaactggaacactttgtactgggttccataatgtaaattagtcattatgtgataagatgacctcgggacccaccagacccatttatctacacttcactccatgttctatattacctggaactaggaaggtagttgatgttcacctccaaccccaccaaaaactaacttcaaccctcatctgtctagttagggatgtcaagcatcaaacagatggaattaactggttatatagctctttaataagtcagaatgatccctacctctgaatctgaagagtcaataccgccagaatccatggggagatgttctggaggggtgacaactgggcctgcacctgctgcagaggtgcacgtagtctgagtgctgcggactcagcagacccggccactggcctcacttcattcccctgggaggaaagaccaaagtgaataaacagcttcaagtgcccaaggaaatgcttgctagacagctgtgattctcaactttaaagaattacttttcaaaaagattctagggttaaattgctatagaactttattatctaacaacattattattattgagaagagcaagataagatatttgccagttctgcttgaatctttgcctggaggaggaaaaatgtttcattgtgcaggaaatgtataaggaagccttacctcccttttctcatctcttgaggacttaaaagtggaaataacaatggttagggaaagatttcagctgtaaagaatggttttctagttttcttgaaatttgtcctgaacattaccttcacagagtaaaactgtgctactgtcaatcttagaccatttgattgttgtcactgaatttgccataatctgtagactaaaactcacataccacccttctcttaccacagaggtatcactattacaaagaatcctttccctactcattcatattcatcaaagaactactttaattttagtagcgttcaaaatctggtttgagtggctctcttactttggttctccttaatgattgcatggtaatcttgttggctactgcatttgttagtacttgttcttagggagccatgtaacttgttttcattattagatcttagtactgttcactacacacttaaaaaatgagtgtcaagtgcctttaggggaagaacactctgcctgcatgaaaatgtcttaaaactgaaggaaaatttcaagaacgctcttgatcagaagtccagactgtaaacataatcgctgggtcatgtcacttggaaccagtactcacatgaggcaccaaataaaggagatgatttaccttggcttccgcctcctcttcagcaaccagggcatccatccccaagcgctgtcttaactcctggttctcaactacaaggccatgagttttctctcgtaaaagctgattttctagcaaaagtttttggttctggaagaaagttcataagaggctattaaaacatctaattatttcagttaagaatctacctgattcagtataattggtttcctttccttcttgaacttttggaaaactctatgcttgtggtgttcatagtaggttttaaaaagctaggccataattatggaaaagcaagctacttaataagtgccacttcatggggtcaagaataacacactgcttccaactactaatactgacttcagcaaagggtgacttgtggctttaatgtagatataattttttttttaaactatcttggccaggctcggtggctcacacttgtaatcctaacactttgggaggccaaggcaggtggatcacctgaggtcaagagttcaaaaccagcctggccaacatggcaaacccccatctctactaaaaaatccaaaaattagctggatgtggtgaggggtgcctgtaatcccagctaatctggaggctgaagcagggagaattgcttgaacctgggaggcagaggttgcagtgagccgagattgcaccactgcactccagcctgggcaacagagtgagactccatctcaaaataatgatgatgataataataataataataatataaaataaaaataaataactatcttgaactggcaggtaataataaaagtggtagtggtgactataaatccaaaataagttaaaaaaaatccctgctcctgactcatgattcttagaagaaccaactaatgattaaaactttaaaaagctcaatatatgcaaattgaccaaggggttaaaaaaacaatataaataatctctatgtattcaagatgtgtaattggcaacaatttaagattgattaacaggtggaccctagagggggaaaggaacctttagtgaatttctggccatgccaggaagaatgtaaagtttaagcaattatttcctattagcccttgctaatttcttactacaaactcaataaacattgttaaatccatctactttgagatacatctagcaccaaatgccacaaagtcaatcacttctgccctcaacaagcttcaccacttcaccaactctctgtcctaacttagattaactttttttttttttttgagacagggtttttgctctgtcgcccagactggagtgcagtggcatgatctcgtgatctcagctcactgcaacctccgcctcctgggttcaagtgattctcctgcgtcagcctccggagcagctgggattacaggtgcctgccacgacacccggctaatttttgtatttttaatagagatggggtttcaccacgttggtcaggctggtctcgaactcctgatctcaagttatctacccaccttggcctcccaaagtgctgggattacaggtgtgagccccggtgcccagcaaactttttttttttttcttgagacagagtctcactctgttgcccaggctggagtgcagtggtgcgatctcagctcactgcaacctccctctcccaggttcaaacaatcctcccacctcaacctcccgagtagctgggactacaggcactcacgcttggccttttttttttttttttttttggtatatttttgggtagagacgggattttaccatgttggctaggctggtctcaaactgctggcttcaagtgatctgcccaactcaggctcccaaagtgctgggattacaggcatgagccaccatgcccagcctagtttaacttttaatcatatattcaattgtattctaataggggctgaaacaacttgggatgggaagcaaatatcagaacattcaccaaggaagggtatacaatggataaaagagtttgaccttaagtagttttacctcttcttctaaatctaccacttgctgttccagctcactcattcgagccttctttcgatctctggcagtctgagctgctactctgtttttcagtttcctaggaagagaaggaacataccacactgagtcatatcaaaccttatttatgtctttatttgaaaactttaccagctggtgctttcatttttatttacagtataagacagactaatgataaaatacacttcaggctcctcccctcaataaaacaaaataaaaaatacagtcttctgtcaatctagctcgaagacctgctttattctctcctatattgcatcatccgtccacctcagactcatccccgtcacagcactggggctggacacacacactattcatcttgcatcataaggaactttcctctttccccatctattcccccgctgcttcctgtctccagttctcttaaacaggatccaacctggcctcattaatctagtgaaggctgcaatcttgctatgacatcaaccctccgtcccccagtccaatttagaaaagggagaggctgatgccactccctgatctctagtgttgagatcctaggcagtgacctgctgatgggtccgtgtctgttggaggagacacttttttttttaaaagaattaactcagaagagacacttcataaatcacagaaggcacaatgatcacaaaagagtgaacatttacggaggactaagtgctaggcacattatatccaagtctcaatctccccaaagacctcatgaagtaggttccattttaagaacgcagatactgagctagaccagtgagcctcgcagaattcccagccctttcaacagctctgttatttcagctccgcgcctctccagaaatagcagtaaaccaaaacagattattcgacctcatgtccgagttaagaggctgaaccaccagtctgcggccacacagcaagagggcctggaagacaggtgcccgcatccccagctctggtcatctctaacgagagagttaaaaagtacagaaaagagccctgggccgccctaggttcccagcgtggcggatccggtcagtccgggcttcctgccccgccccgcgccacgctggcaccgacccgccaggccaaaggcgacggagccctgcggggcggccagtgctgggtccccgctcccagcccctgcccctgcccctgtccctagtcccggcttcagatctggccccagaccccggcccctcgcccacctcctcagcgccttctcctcggggctcaggtgcgtgaggcgctgtcgcttgcgcgcctggggcagccccccgctcgctgcctccgggctggcccctctctgggctggcaccatgagcggcagggcctggccggccggggctccggcggcggaggcgggctgccccgacagaagcagaactttaggggtcccgtcggccgggttcggcgcggctgccaccaccaccatagctccagactacgcaccgcgcaccgcgcgccgcagccgcccagcgcccagcctcgccgcgcccggcctttctacggtcgtggccctccgcgattggccagcgtcgcgtgacgcacggccgagctcggcgtccattggtccggcctgcccggcggggcgtttcaggaccgtggctatggagtccggcgtggcagcggcaatccctggccaaaggtacttggggtcattttccgcggggggttacgtgcgggagcgtgtcctccacaaacggattttccccccttaagcggacttatttccatccggagtgacagaatttaattccaaaccgagagctttccagactgacgaatttttaccgggactaacagagaattacctcagcctgacaacattttatctcgtgcgccacttcgggatccgagtggagccgaaagtcgagatagagcgcagttgggccttgggttcgaaaagactggacagaggtttcagtgagccgagatcgcgccactgcaccccggcctgggcgacagagcgagactccgtctcaaaaaaagaaaaagaaaaaagcctggaaagaaattctgcggaatagaagtctttaagaaatgagatcgtgccctttaaaactaagtttaacaatagtgagggcttaataaacgataggtgttatctctgggttggaggggaataccttcaattttagtttttcgttccatttctaaagtttgtactatgagcgtgcatttttttaaatttagttttattttattttttaaatagaaacgaggtctcactgtgttgcccaggctgatctcgaacttctgagctcaagtgaacctcccgcttcggcctctattatttttattttatttttttttcttattttttgagacggagtcaggctctgtcaccaggctggagtgcagtggcgagatctcagctcactgcaaccttcgcctccgggttcaagcaattctcctgcctcagcctcccgagtagctgggactacaggcgcccgccaccacacccggctaattttttgtagtttagtagaggcggggtttcaccgtgttggccaggatggtctccatctcctgacctcgtgatcgcccgcctcggcctcccaaagtgctgggattacaggcgtaagccactgcgcccagcctcttgttattttaaatgaggggacaggaaaacgtcacatgtagagactgagaccccggggttgaccctgagccccctctccgaggggaggtcgaggttcctgcctggccattgtggcgtgagggtggccaggtgtttgtgaaagaggggcccccagagagcagcacgggagcgatttatacacacgaatattaacatggagaagtccgagaaacccccgtaaatatgcctgtccactttttttaaagcaaattacaaaatgtgaaattccccagaaatgcacagcaataccttctctaacaagtaattattgcttcctcctctgcgggcagcactattccaggttctaggggtgcaaacagtagtaagactgctacctggtatttggaggatatgcaaaaagtgaaatgttaagatagcaggttcctaagtaattctttagtgttattaagtcggattagctggtcaattttattttggtagggagggaacaggatgggaaaaagaactaaaagcaagtccatctcttgatatctaagccctctaaagggacatagttttggtttttgccaggactgggccacgagtctcctaacgtgttttctccctcttcgttgggagggaaatcaatgatttttttttttttaactgggctgtcccaactccagagcctcctgagcacgtgctgtcctgtgggttggaaaagaggtgggggtgattggagtctctgccggaccaagaaaccaacttcctgtttaactctcatcagcttgggccacctgggttctgatgtgccttcagatgtggggagacttactccgggcctctgaaatgttttgggagaagtctggaggtgtcttctagccgagacctatagcttcatattaaaagaccttggaaagctgtaagaggctgttagaaaagtcatgtcatgtcatgccacctgttacgttttattttttgatgccttttttttccttttttttttttttgagactgggtttcgccacgttgcctaggctggaactcctaggctcaagcgatcctcttgccttggcctcccaaactgctgggattgcaggcaggaaccacagagcccggccctttttatttattaagtgaacatttattaatgccaagagaatgtctttcactgtgtaagaaagaaaatgctggaggacccttttagtccagcagggtgtagtgagtaactgagtagagaaagcacagggtgcgggatggggaaaaaaggttgatgaattgcactttgatcttagttaatgcgatattgaaattcacttccccagcttgttttcaaaacttttatatttttgacaaacactttaaatcatactaaaaacaataatttgacccactacagattgctgtccatgcagtcttgaacatgtgagtccaaacccttggacagtttcatatcctctctataaaatgaacctggtaattcttgcatcaggtgccataagtgtttaaaaatatttactagacacctgtgataagagctataaaatatataaattacaaagttctcggtctttgaggccaaacgcggtggctcacccctgtaatcccagcactttgggaggccgaggtgggcagatcacctgagatcaggagttcgagaccagcctggccaacatggtgaaacccagtctctactaaaaatacaaaaattagccggacatggtggggggcgcctgtaatctcagctactggggaggctgaggcaggataatgtcttgaacctgggaggcagaggttgcaattagccaagattgtgccattgcactccagcctggtcaacagagtgagactttctcaaaaaaaaaaaaaaaaaaaaaaaaagtcattattcagaaagaatcagtcaggaaagggtggacaaaacaggaacagaaataaataggcattccagaaaagggaaaacagaaaaatactgtacactggtaagcagaaaacagaaaataacatggcaggaataagtccaaatatataaataataaaacataaatgtgaatgggttatattatcttcttaatcatgctgttttgttttatgtatgtctctttataaacaacatatagctggctttggggtttctcagagctctcttttaagaagagaatataaatcatttgtatttatttttgattatttatttatttggacttatttctgccatgttatttcacattttttgtttactatatttctcaaggcaggaggattgcttgaggccaggagttcaagaccaggctgggaaacatattgtgaccttgtctctacaaaaaatttaaaaaaattaaccaggcgtggtgacttgcacctgtagtcccagctgctcggaagacggaggtggtaagatcccttgaacccaggagttcgaggctgcagtaaactatgagctatgattgaaccattgtactccaacctgggagacagaatgagctcctgcctctaaaaaacaaaaatttttttaaaaaaaaggaaaatgacttaccagccatttttatgtttatggaaatgtttatggaaagaaagcatatgtagcaatattaatatgagacagaatttatcataaaggcattaaaaggacaaagaagggtatttcatgttgattgaaggtacaagttaccatatatacatctttatgaacatagcaacataattttgaaatgtataggcctagcatgtcggctcacacctgtaatctcagcactttgggaggctgaggtcaggggttcaagaccagcctggtcaacatggcgaaaccccgtctctattaaaaatacaaaaattaactgggcatggtggcacgtgcctgtaatcccagctactgaggaggctgaggcacgagaattgcttgaacacgggaggcagaggttgtagtgagccaagatcgaaccactgctctccaacctgggtgagggacacagcaagactctgtctcaaaaaaaaaaaaaaaaaaaaaaaattagctgggcttggtagtgtgcacttgtagccccagctgctcgggaggctaaggtgggaggatcatttgagcccagaagattgaggctgcagtgagccgagatggtaccactgcattcaagcctgggtgacagagtgagatcctgtctcaaaagaaaaaacaaaagaaaattggctgggcacggtgactcatgcccgtaatcccagctctttgggaggctggggcggggatcccctgaagtcaggagtttgagaccagcctggccaacatggtgaaaccttatctgccgagaccagctcggtcagggagaccctaacccagcagtgctagaggaattaaagacacacacacagaaatatagaggtgtgaggccgggcgcggtggctcacgcttgtaatcccagcactttcggaggccgaggcaggcggatcacgaagtcaggagatcaagaccatcctggctaacacggtgaaaccccgtctctactaaaaatacaaaaaattagccgggcgtagtggcgggcgcctgtagtcccagctactcggaaggctgaggcgggagaatggcgtgaacccgggaggcggagcttgcagtgagcagagatcgtgccactgcactccagcctgggcgagagtgagactctgtctcaaaaaaaaaaaaaaaaaaaaaggaaatatagaggtgtgaagtgggaaatcagggatcttacaaccttcagagctgagaaccctgaacagagatttacccacatatttattaacagcaaaccagtcattagcattgtttctatagatattaaattaactaaaagtatcccttaagggaaacgaagggatgggctgaattaaagaaataggttgggctagttaactgcagcgggagcatgctcttaaggcatgaattgcttatgctattgtttgtggcttaagaatgcctttaagcagttttccgccctgggcaggccaggtgttccttgccctcatttccgtaaacccacagccttccagcttgggcgttatagccattatggacatgttacattgctgcagagattttatttatggccagttttggggccagtttatgaccagactttggggggcttgctcccaacagctatctctactaaaaataacaaaaattagctgggcgtggtggtgggcgcctgtaatcccagctactcaggaggctgaggcaggagaatcacttgaacccgggaaggggaggttgcagtgagccgagatcgcaccattgcactccaacctgggcaacaagagtgaaactctgtctcaaaaaaagaaaagaaaagaaatgtataaaacaaagactgaaatgatgaaaatgatccacaaatcacaatgggagataaatacaattctcagaatcaacagagggagcagacagaaaaaatttgaacagtacaactttcctcccaaccaaggacttatgttttttctttttttcgagacagagtctccctctgtcacccaggctggagtgcagtggcgcgatctcggctcactgcaaactccgcctcctgggttcaagcaattctcctgcctcagcctcccgagtacctgggattacaggcgcctgccaccatacccatctaatttttgtttttttagtagagacggtttcaccatgttggacaggctggtatagaactcctgaccttgtgatccgcccgcctcggcctcccaaagtgttgggattacaggtgtgagccactgtgcccagacaggcctatgttttttcaattaagaaacattctcacttttttttttctttttgagatggaatctcgctttgttgcccaggctggagtgcagtggcacgatctcagctcactgtcttactgcaacctccgactcttgattctcctgcctcagcttcccgagtagctgggattacgggtacaagccaccaagcctggttgatttttgtatttttagtagagacagagtttcaccatgttggccagcctggtctggaactcctgacctcaggtaatccacctaagttgggctcccaaagcgttgggattataggcgtgagccacgggacctggcgaaatctttatattttcatttctcttaggtaaatacctataagtggaattgcagtatcatatggtaaatactatgtttaaattttttagaaacttagcagctttccaaagtggctataggttataccattttacattcccaccagtgatgtactgcttttttatattgctattatagattgttatttaactctttcatggttgtccaacttcttattgtttatgttgtatgtttttcccaactggatttcaacaagctcattagacgcagaagctagggttattcgtggttccattttttgtgtgttctgtgcttacgatagtgctgagtacatacttggcattcaataaatattttcgaatgactattgaatggttacattatctgcaatatgctttattttattttattatattttgagacagggtcttactctgtcactcaggctgaagtgcagtggcatgatgtcggctcactggagctttcgcctcccgggttcaaatgattctcccgtctcagcctcctaagtagctgggattacaggcatgcaccatcatgcctggctaatttcttttgtttgtttgtatttttagtagagacggggttttgttacattggccaggctggtctcgaattcctgacctcaggtgatctacccgcctcaccctcccaaagtgctggaattacaggcatgagctaccgctcccagctgaatgaactcattttttttttctttttttgagacggagtctcactcttgttgcccaggctggagtgcaatggcgccatctcagctcaccccaacctctgcctcctgggttcaagcgattctcctgcctcagcctcccaagtagctggaattacaggcatgtgccaccatgcccagctaattttgtatttttagtagagacggggtttctccatgtgggtgaggctggtcttgaactcccaacctcaggtgatccacccccctcggcctcccaaagtgctggaattacaggcgtgagccaccgctcctggccctgaatgtactcattttaaagcactaaggcaacagttctagttacctacacggcacctattatactttttcttccttattaaaaaaaactattttgttcaagatgcccacttgaaaacactcagcttccagactccctggagtttatggatagttacataatgtggttcaggccaatgtatacatacgtggaagttctgggcacagacgattccaggaaagtttgttaagtggaggagactcaactgggaaggctttcaccttttgcctgttgctcttttccttttttcccctcttccttgcctggaatgctgatgaaacttccaaagattgagaggttcagccgccatctcacaaatatgcggattggagtcacatgctaaggacgtcagaggggaaagacagaaggagtctgggctcctgatggcaccatggagtggccatttagctctagactgcccatttccagatgtcacattacataagaattataattcctgtggtagctgggttcttgttacatgccattaaatacagtcctcgcttttactgacaattttttttttttttttgagaccgagtcttgctctgtcgcccaggctggagtgcagtggcgcaatctcggctcactggaagctccgcctcctgggttcacgccattctcctgcctcagcctcccgagtagctgggactacaggcatgcgccaccgtgcccggctaattttgtatttttagtagagacgaggtttctccatgtttgtcaggctggtctcgaagtctcaacctcaggtgatcagcctgcctcggcctcccacagtgctgggattacaggcgtgagccaccacgcccggcttactgacaattttacctgccacattgcccttccttagatttcccaagtaccgtctttgttctcatcaataagctaccagcactgctgaggaacaggtaggcttgagcaggacaattagaagtaggtgggacccaggcacacaatttttatcagtggcactttcttctgataccaggaaaagaggtgagtcattccacattatagcatcactattttgtgaatgggaaaattaaggttcaaagggaaaaaataatcagcttaagcatacagattacatctccagcttatctgtccatccctcactcctgtcttaccacttccctgaattattcttctctgtttagtttgcctggtaaaccccatttcttctgtttgtttaaactacagtttctcaacctcagtgttattgacatgtggggctggacaattctttgtggtgaggggcagctctgtcccttataggatgtttaacagtatccctggcctctgcccaccagatgccagtggcacccctcccctcctccaagttgtgacaaccaaaattgtctttggacattgcagaatgtcccctgggggccaagatctcccccactgagatcactactctcaagtcaggtcaaacaccactccaatctatacctgctttgttcccacatgtcccccacaaacttccaacataacagctgcagcactgttacctgtctgtatctccagattacactgtatggtccttgaaggctctttgactcatttctgcatctccctgtttattgactaaatgaattttaaaattgttcgggaagccaggtgtggtggcttgtgcctgtagtcctagctacctgggaggctgaggcaggaggattgcttgagcttgagcccaggagttcatggctgcagtgagctatgatcatgccactgcactccagcctgggctatagagcgagaccccatctctaaataaagtaaaataaaataaaataaaaatggcttgggcaaagaataggaatataattcaggaattctgggtccctgatgccatgatttcaacactcattgtaaaggactcgtgtcctatgcctttgcttggcattgtattttatagattccaatgctagagtcaagaggcagattctagcaaggaaggtatgttgctcattgttttaaacataccaattaatggaaaaagaggccgggtgcaggtggctcacgcctataatcccagcactttggaaatccgaggcgggcatattccaggagttctggaccagcttgggcaacgaagtgggacgctgtctctacaaaaaatacaaaaattagccgggagtcatggtgcatgcctgcagtcccagctacttggaaggctgaggtggaaggatcacttgagcccaggaggtccaggctgcagtgaggcatggtagtggtagtgccactgcactccagcttgggtgacagagagagaccctgtctcaaaaaaaaaaaaaaaaaaaaagaagaagaaaaaggaaaagaatgcaaagagtttaggaaaaccttttatattcttacaaagaaaaatgaaaaactcttaaatgttttgggagagaatgaagagtaaatttctatacaatatttttgtttccttgatggaatcaaagttgagtcaatctcgcagaaaatgctgtgtaccctcttctcagttctaacttcctcgaatgttgtcatcttaaattattgtgttacagccaggcgcggtggctcacacctgtaatccctgcattttgggaagccaaagtgggtggatcacgaggtcaggagttcgagaccagcctggccaatatggtgaaaccctgtctctactaaaaatgcaaaaattagctgggcttggtggcgagcgcctgtagtcccaggtactcgggaggctgaggcagaagaatcacttgaacctgggaggcggaggttgcaatgagctgagatcgtgccactgcactccagcctgggcgacagagcaagactccatctcaaaaaaaaaaaaattattgtgttacatttgtcataaccaagaaaaggtcttaaaaaaaaaaagaaagaaagaagaaaaaagaaaacaacttgaatgcataggacttcattattctccagaaatggatgaagtcattttggtttgctaggactactgatcccgtatttccaattttattagtatatttctaaagaaagacatctacaaaccgttcaaataacgttgagacgctgagtgtgtgggcaggaaatcctcttggttatgttgacgggtgtttccttcggtcctgtggctgcccaccactttctggaaaaaaagttgcaaaacttcctgaagttcacttgtgtgcacttgggttctaagaaattcagtacctctttggcatctacaaaatgctgcagttcatttgcccagtcaattaaaaatgacactaaaagggcatgacaacaaaaggaaaagattcattcaaaaaatgcgaagatatcgcatggctctttttcacttggcactgacctggctctgcatctggttttgctttttttttttaaaagaaagcacaaactctccattgttggtaactattctttatgctgaggttcaaaggtagcaagagaagcaagctttatcttgtttgagagaagcttagccggatgcggtgggtcatgcctgtaatcccagcgctttgggaggttgaggtgggcggatcccttgaactcaggagctcaagaccagcctgggcaacatggtgagaccccatctctacaaaaaatacaaaaaattagccagccatggtggcgtgcactggtagtcccagtttctcaggaggctgaggtgggagaaacacctgagtccaggaagtcgaggctgcagtgagctgtgatcatgccactgcattccaacctgggcaacagagtgagaccctgtctccagagaaagaagtttaagtgttacaagcccccttcagtattcctataagaaagaaaaccagttcattggtactgaaattttaaactttttattttggcataatttaaatgtacagaaaaatttcttttcttttgagacgcagtcttgctctgtcacccaggctggagtgcagtggcacaatcccagctcactgcaacctcctagtagagatgagggttcaccatgttggccaggctggtcttgaactcctgacctcatgtgatccacccgcctcggcctcccaaagtgctgggattataggcatgagctcagccaaatgtacagaaatgtttcaaagctagcacagataattctcaggcacgccctcacccggttccggtttcccctaatgttaacagcttacaccactgtggcacatttgtcaaaactgagaaaccaacactgacacattgctaggaactaaactctagtctttatttggatttcaccagtttttcctttaatgacctttttctgttccggggtcctgcattgatgttaattacttggcttccggatagtacacctacttttgcagaatgtttcatgtttaatttcagcaaaccgtatttatctgaagagcttaatttactcaagttcagtcttctcagacacacaccctggggctttgactgcaaaatggtaacaactgatccctccctccccctttggtgaggtggcttaggctttaggtgatgctgagaatttgtgcatgatctggcttgtaggagactgaatttcctgagaatgaattagggactctcagcattttaaaaaatatcctgtttttgttttgttgttttgttttgagacaaagtctcactctatcacccaggcaggagtgcagtagcgcaatctcagctcaccacaacctctgcctcctgggttcaagtgattctcctgggtcagcctcctgagtagctgagactacaggcacctgccaccatgcccggctaattttttttttttttttagtatttttagtagagacggggtttcgctatgttggccaggctgatcttgaactcctgaccttaagtgatcagcccgcctaggcctccctaagcactgggattacaggcgtgagccaatgtgcctggccaaaatatcctcttatttatagctgactttgcacatctgatattcatgtgggataagatagcaagctgtactttttctgttctttcttttttttttttccatgaaaacaaccaggatttatgtggttccaagagccagctggataaaatatagacccattctgttttgttgaataaaggtgatatgagaagaaaaaacctccaggaacagaggaagaagtataattatgtttgcctcagagaaaaccgggagagaaaccattcatcttccattcattcgtcttccattcccagaccttggaagagtagtcactgtaacatgggggctagaagcattggcttatgaaatagacaggcataagtaggttttcagctccaccacctagctaggtaaccttggacaagttgcttaacctctttgagcctcagtttccttgtctccaaaatgagggctgagctttgaataagatcctgtatttaacacagcacatgacatagagaaaacacatatttgttacctattattatttccaaagacagtccaccctaattaccaacaggcattcccaaactcttcttagtctatcattaatctcatcctttcttctatctttagatatttggtagccaagggctgggcgcagtggctcacgcctgtaatcccagcactttgggaggctgaggcgggtgaattacttgaggtcaggagttggagaccatcctggccaacatggtgaaaccccgtctctactaaaaatacaaaaattagctgggcatggtgtcgtgcacctgtaatcccagctattcgggagactgagttaggagaatcatttgaacctgaggaggcagagtttgcagtgagctgagatcgcaccactgcattccagcctgggtaacagagtgagtgagactctgtctaaaaaaaaaagaaaaaaggaatttggtaggaaagaagtttgacagttcccagaggtctacgtgaaacagtagggtactcatgtcttcaaaatatgtctaagtatgtataaaatttgatcactggtcacaagcagaaatggggtccacaaagcaggaaaaatgtcacagcgatgaaccttggataagctttctccagttgctccctcctccaaactggaaagaaaatttccatctgaccaatgagtgggctggacctggtcacaggctgccaagtatctgccctgttagtgtgacctggaacaaaattcccagcagaggacagcaaacatttgctgagcacacagacctgtgaccctcctacatgaaattctaggggcagggtttgaattacgccataactggggcttggtggcttatggggaagtgctctatactaaacaaagtgtgtgaggcagtcaggcctgggaaagaagaggttggcatctacaatttgaaaatgtgactctgctgttttatttttattttcagagacactgtcttgctctgttgcctggactggagtgcaatgctgcaatcatagttcaccataacctcaaactcctgggctcaagtgatcctcccaccacagccttccaagcacactgccatgcccagctaattaaaaacaatttttttttttttggtagagatgggagtcttgctatgttgcccaggctggtcatgatttcctgatccctagtgatcctcctgcctcagcctcccaaacacaccaccacacctagctaatttttttcttttttcttttgttattattcagctctctttataactggcttatttttattattttttgtagagaaggggtcttgttatgttatccagcctggtcttaaaatgtgactctgttgttttatacaaaacacaatcattttccatttgaaaacaagttgtattttccagcataaaattccagatttatagactatattatagtccttaggacccataatgtgtttccaaaaaatacttgccaatgtctgtactttcagtgatctgtaacctcttggagtagtggagagtttaagcaacttgtccaagtttacctagctaggatgtggtggagctgaaaacctacctttgcctgtccacttcataagccaatgcttctagcccccacattacagtgactattcttccaagatctgggaacggaagatgaatgaatggaagatgaatggtttctctcccagttttctctgaggcaaacataattatacctcctcctttgttctgggaggtttttctcttctcatctcccctccattcaccaaaacagagttgggtctatattttacccggctggctcttggaactgcataaatcctggctgttttcatttttaaaaaattatgagattaactaccaaacttgagatgtaagttgtgggttagctctcgattctgctagataacctggaacaaagcattaacttctttgagagcttccttttttttccttcattgctgttgtgtgtttctaccagaaaatgtgggaatgtgcgtgaagacgacctagcagagtgcctggcacacaggaaggagcttgttgaatgtatagttccgggctccaaaacaaaggcagcccatcttagcctgagccactctgacttcactctaggaaatactgcctagatatctaaaggaaagtgatagcaactgcaaccaactgtttctgaggtctgcctgcccaccaatggccccctcagcacatgggaacacgtgtggaggtgcctggaacagacactgactcagcggggttctgtacagaggcagtgcgggtgaagaaatgaatgcagattccccaacaatccagaggtatatgcaagaggaggggcaggggttctttcaagtcaccttccaggtgaccaggtgcctttacaactctaaggctctgtgagtatgtttttttcttaccttatggaataaagggaaaaagaagacagctgccctgggtatggctttgggtcggaataaacatttctcaaattgaagtgtttcagcaatgtcttgaaaaatcagatttgttcaggattgctggaagtgcattatttgattctaagtttcacttaaaagtcttggggaaggccaggtattgtggctcatgcctgtaatcccagcacttttagaggccaaggcaggcggatcgcttgagcctaggcattcaagaccagcctaggcaacgtggtgaaaccccgtctctacaaaaaatacaagaatcaactgggcgtggtgacacatgcctgtagtcccagctaccggggaggtttgggtgggaagagggaggatgacttgagcccagaaggctgagactgcagtgagctgagattgtaccactgcactccagcctgggcaacagagcaagacactgtctcaaaaaaacaaaacaaaacaaaaagtcttggggaaaatcactgaaaacacagttatctttcttttcttttctttttctttctttctttttttttttttttgagacagagtcttgttctgttgctcaggctggaatgtggtggcacgatctcagctcactgcaacctccgccccccgggttcaagtgattctcctgcctcagcctccctagtagctggaatttcaggtgcacgccaccacgcctggctaatttttgtatttttgtagagatggggtttcaccaggctgatctcaaactcctgaccttaggtgatctgcctgcctcggcccctcaaagtgctgggattacaggcgtgagccaccgcacccagccgaaaacacagctttataaagggattcctctggcctggtgcagtggctcacacctgtaatcccatcaccttgggaggccaaggcgagtggatcacctgaggtcaggagtttgagaccagcctggccgacatagtgaaaccccgtctctactaaaaatacaaaaaattagccaggtgtggtggcgtgtgcctgtaatcccagctactcaggaggctgaggaaggagaatcgcttgaacccgggagagggaggttgcagtgagctgagatcatgccactgcactccagcctgggcaacaagagagaaatctgtctcaaaaaaataaataaaaactaaagggactcctctaatcttgaccaagggagaagggagtgtcccacattctctcaggtaccagcatgagagggagaacaatttggttttgtgcagacttaaggttctcctaaaattcaccatccttcacctgtgctctatcatttgcattcaatgcttttttat

SEQ ID NO: 5070 - protein, 260 aa, Homo sapiens [sequence omitted]

SEQ ID NO: 5071 - DNA, 393 bp, Rattus norvegicus
  ref <308>: DATABASE ACCESSION NUMBER: EMBL / AA860049
  ref <309>: DATABASE ENTRY DATE: 2000-03-03
tttttttttttttttttcagtaattcaataatttattcctctaaaaaagtgtgtaaaagtatatagctctcatccacaaggtatatatgaatgacatttaaaatggaggcctttgtcattgtttctttttatcaaagtctttagtgtattgaaccagcactgtgctgtagttcttaaatgaacgtcaaatagttttgtattcttcccaattgtctgctatatataaaagaagctcactgcaaaatgcttgaaggaaaaaggaaacaaaaaagaaaatcagaacttcccagaaatgtacagcttttacatttaaaaaaggctctgagagatacatacaggcatgccggaccagccctcccttctctcgaataccatcaataaagcctcgtgccg

SEQ ID NO: 5072 - DNA, 308 bp, Rattus norvegicus
  ref <308>: DATABASE ACCESSION NUMBER: EMBL / AA866240
  ref <309>: DATABASE ENTRY DATE: 2000-03-03
tttttttttttaaatttaaagggaacctttattttaacccaggaatgggtacacaatgacacaagggatcaaaaattgttatatgaaaaaaataatacaagtggatttgtgcaaaaaccccaaaaactgcaagtgctttcgggatcttaaaacaaaattcaggatgggtgataaagggaagggactgggtaaaaacctgaaggggatttcaaaagggaacacatttaaacccaaaatgcccgatttattcaggaaggaatgaaccaaacctggaaaatgggtggcaaaaaggcaaaaccattcaaaac

SEQ ID NO: 5073 - protein, 490 aa, Rattus norvegicus
  ref <308>: DATABASE ACCESSION NUMBER: SWISS-Prot / AAA41036
  ref <309>: DATABASE ENTRY DATE: 2002-06-15
MDLVTFLVLTLSSLILLSLWRQSSRRRKLPPGPTPLPIIGNFLQIDVKNISQSLTKFSKTYGPVFTLYLGSQPTVILHGYEAIKEALIDNGEKFSGRGSYPMNENVTKGFGIVFSNGNRWKEMRRFTIMNFRNLGIGKRNIEDRVQEEAQCLVEELRKTKGSPCDPSLILNCAPCNVICSITFQNHFDYKDKEMLTFMEKVNENLKIMSSPWMQVCNSFPSLIDYFPGTHHKIAKNINYMKSYLLKKIEEHQESLDVTNPRDFVDYYLIKQKQANNIEQSEYSHENLTCSIMDLIGAGTETMSTTLRYALLLLMKYPHVTAKVQEEIDRVIGRHRSPCMQDRKHMPYTDAMIHEVQRFINFVPTNLPHAVTCDIKFRNYLIPKGTKVLTSLTSVLHDSKEFPNPEMFDPGHFLDENGNFKKSDYFLPFSAGKRACVGEGLARMQLFLFLTTILQNFNLKSLVHPKDIDTMPVLNGFASLPPTYQLCFIPS

SEQ ID NO: 5074 - DNA, 1473 bp, Homo sapiens
  ref <308>: DATABASE ACCESSION NUMBER: Refseq / NM_000769
  ref <309>: DATABASE ENTRY DATE: 2002-11-05
atggatccttttgtggtccttgtgctctgtctctcatgtttgcttctcctttcaatctggagacagagctctgggagaggaaaactccctcctggccccactcctctcccagtgattggaaatatcctacagatagatattaaggatgtcagcaaatccttaaccaatctctcaaaaatctatggccctgtgttcactctgtattttggcctggaacgcatggtggtgctgcatggatatgaagtggtgaaggaagccctgattgatcttggagaggagttttctggaagaggccatttcccactggctgaaagagctaacagaggatttggaatcgttttcagcaatggaaagagatggaaggagatccggcgtttctccctcatgacgctgcggaattttgggatggggaagaggagcattgaggaccgtgttcaagaggaagcccgctgccttgtggaggagttgagaaaaaccaaggcttcaccctgtgatcccactttcatcctgggctgtgctccctgcaatgtgatctgctccattattttccagaaacgtttcgattataaagatcagcaatttcttaacttgatggaaaaattgaatgaaaacatcaggattgtaagcaccccctggatccagatatgcaataattttcccactatcattgattatttcccgggaacccataacaaattacttaaaaaccttgcttttatggaaagtgatattttggagaaagtaaaagaacaccaagaatcgatggacatcaacaaccctcgggactttattgattgcttcctgatcaaaatggagaaggaaaagcaaaaccaacagtctgaattcactattgaaaacttggtaatcactgcagctgacttacttggagctgggacagagacaacaagcacaaccctgagatatgctctccttctcctgctgaagcacccagaggtcacagctaaagtccaggaagagattgaacgtgtcattggcagaaaccggagcccctgcatgcaggacaggggccacatgccctacacagatgctgtggtgcacgaggtccagagatacatcgacctcatccccaccagcctgccccatgcagtgacctgtgacgttaaattcagaaactacctcattcccaagggcacaaccatattaacttccctcacttctgtgctacatgacaacaaagaatttcccaacccagagatgtttgaccctcgtcactttctggatgaaggtggaaattttaagaaaagtaactacttcatgcctttctcagcaggaaaacggatttgtgtgggagagggcctggcccgcatggagctgtttttattcctgaccttcattttacagaactttaacctgaaatctctgattgacccaaaggaccttgacacaactcctgttgtcaatggatttgcttctgtcccgcccttctatcagctgtgcttcattcctgtctga

SEQ ID NO: 5075 - protein, 490 aa, Homo sapiens
  ref <308>: DATABASE ACCESSION NUMBER: SWISS-Prot / P33261
  ref <309>: DATABASE ENTRY DATE: 2002-06-15
MDPFVVLVLCLSCLLLLSIWRQSSGRGKLPPGPTPLPVIGNILQIDIKDVSKSLTNLSKIYGPVFTLYFGLERMVVLHGYEVVKEALIDLGEEFSGRGHFPLAERANRGFGIVFSNGKRWKEIRRFSLMTLRNFGMGKRSIEDRVQEEARCLVEELRKTKASPCDPTFILGCAPCNVICSIIFQKRFDYKDQQFLNLMEKLNENIRIVSTPWIQICNNFPTIIDYFPGTHNKLLKNLAFMESDILEKVKEHQESMDINNPRDFIDCFLIKMEKEKQNQQSEFTIENLVITAADLLGAGTETTSTTLRYALLLLLKHPEVTAKVQEEIERVIGRNRSPCMQDRGHMPYTDAVVHEVQRYIDLIPTSLPHAVTCDVKFRNYLIPKGTTILTSLTSVLHDNKEFPNPEMFDPRHFLDEGGNFKKSNYFMPFSAGKRICVGEGLARMELFLFLTFILQNFNLKSLIDPKDLDTTPVVNGFASVPPFYQLCFIPV

SEQ ID NO: 5076 - DNA, 308 bp, Rattus norvegicus; identical to SEQ ID NO: 5072
  ref <308>: DATABASE ACCESSION NUMBER: EMBL / AA866240
  ref <309>: DATABASE ENTRY DATE: 2000-03-03

SEQ ID NO: 5077 - protein, 490 aa, Rattus norvegicus; identical to SEQ ID NO: 5073
  ref <308>: DATABASE ACCESSION NUMBER: SWISS-Prot / AAA41036
  ref <309>: DATABASE ENTRY DATE: 2002-06-15

SEQ ID NO: 5078 - DNA, 1473 bp, Homo sapiens; identical to SEQ ID NO: 5074
  ref <308>: DATABASE ACCESSION NUMBER: Refseq / NM_000769
  ref <309>: DATABASE ENTRY DATE: 2002-11-05

SEQ ID NO: 5079 - protein, 490 aa, Homo sapiens; identical to SEQ ID NO: 5075
  ref <308>: DATABASE ACCESSION NUMBER: SWISS-Prot / P33261
  ref <309>: DATABASE ENTRY DATE: 2002-06-15

SEQ ID NO: 5080 - DNA, 308 bp, Rattus norvegicus; identical to SEQ ID NO: 5072
  ref <308>: DATABASE ACCESSION NUMBER: EMBL / AA866240
  ref <309>: DATABASE ENTRY DATE: 2000-03-03

SEQ ID NO: 5081 - protein, 490 aa, Rattus norvegicus; identical to SEQ ID NO: 5073
  ref <308>: DATABASE ACCESSION NUMBER: SWISS-Prot / AAA41036
  ref <309>: DATABASE ENTRY DATE: 2002-06-15

SEQ ID NO: 5082 - DNA, 1473 bp, Homo sapiens; identical to SEQ ID NO: 5074
  ref <308>: DATABASE ACCESSION NUMBER: Refseq / NM_000769
  ref <309>: DATABASE ENTRY DATE: 2002-11-05

SEQ ID NO: 5083 - protein, 490 aa, Homo sapiens; identical to SEQ ID NO: 5075
  ref <308>: DATABASE ACCESSION NUMBER: SWISS-Prot / P33261
  ref <309>: DATABASE ENTRY DATE: 2002-06-15

SEQ ID NO: 5084 - DNA, 308 bp, Rattus norvegicus; identical to SEQ ID NO: 5072
  ref <308>: DATABASE ACCESSION NUMBER: EMBL / AA866240
  ref <309>: DATABASE ENTRY DATE: 2000-03-03

SEQ ID NO: 5085 - protein, 490 aa, Rattus norvegicus; identical to SEQ ID NO: 5073
  ref <308>: DATABASE ACCESSION NUMBER: SWISS-Prot / AAA41036
  ref <309>: DATABASE ENTRY DATE: 2002-06-15

SEQ ID NO: 5086 - DNA, 1473 bp, Homo sapiens; identical to SEQ ID NO: 5074
  ref <308>: DATABASE ACCESSION NUMBER: Refseq / NM_000769
  ref <309>: DATABASE ENTRY DATE: 2002-11-05

SEQ ID NO: 5087 - protein, 490 aa, Homo sapiens; identical to SEQ ID NO: 5075
  ref <308>: DATABASE ACCESSION NUMBER: SWISS-Prot / P33261
  ref <309>: DATABASE ENTRY DATE: 2002-06-15

SEQ ID NO: 5088 - DNA, 437 bp, Rattus norvegicus
  misc_feature (1)..(437): n=a, c, g or t
  ref <308>: DATABASE ACCESSION NUMBER: EMBL / AA866257
  ref <309>: DATABASE ENTRY DATE: 2000-03-03
ttttttttttttttgttgttgatctatttttgctacacagcgtttattgaacaccgtttaataaaaatagagtaaattacaatgtgctgtggaaggttggagcttgctgctgggaagctgatgccagaagaggccgtgaacttggggatatgggctctttaaaggcagagagattatggctgggggtttgggggctggggtgcagacaacccagagccacttcctgtacaccctcacatgaggtgctctctggaaggagcgccaaaccctgggcaccagggtcaagaggtaagcagccagctgtctgaacacggtgattctgagacatggatagttagatatggtcacctactgacaagccaccaaaggctcctattctagacctcnctggggtatgctttagattgacgccctgngtgtatctgactaaaaatcaa

SEQ ID NO: 5089 - protein, 127 aa, Rattus norvegicus
  ref <308>: DATABASE ACCESSION NUMBER: SWISS-Prot / AAH05733
  ref <309>: DATABASE ENTRY DATE: 2002-06-15
MPLFGSIFSPKKTPPRKSASLSNLHSLDRSTRELELGLDYGTPTMNLAGQSLKFENGQWVADSVISGGVDRRETQRLRKRNQQLEEENNLLRLKVDILLDMLSETTAESHLKDKELDELKVTNRRRK

SEQ ID NO: 5090 - DNA, 493 bp, Rattus norvegicus
  ref <308>: DATABASE ACCESSION NUMBER: EMBL / AA866276
  ref <309>: DATABASE ENTRY DATE: 2000-03-03
tttttttttttttttttcatctttatattgagattttttctcttaaaaaaaagaacattatagatgtgaggggtgggaaaggatgactgacagcaggtgctatagaaacccaaagctccagaaaattaaaaaaaaataaaatatatatttatacatttatatatatatatataccaagtaatgcatgtgagtcccagagaagcagaaagcagcagcaagaagcaactagcacacaaggacctgggttcatgtacagcacacacaagccattccaatcctgataacccaccccaagcccagcccccacccccaagaaaagatgtttaagaaacttccctcttaaatggggctgcacaactggggtactgtggcacatctgtaatctcagcacctggacggtggagacgttaagataagggttcaatggaagccttagcgacacaattaagtttgagaccagcttgggctacattaagaacatctccaaagctat

SEQ ID NO: 5091 - protein, 296 aa, Rattus norvegicus
  ref <308>: DATABASE ACCESSION NUMBER: Refseq / NP_058665
  ref <309>: DATABASE ENTRY DATE: 2002-09-19
MPVTVTRTTITTTTSSSTTVGSARALTQPLGLLRLLQLISTCVAFSLVASVGAWTGPMGNWAMFTWCFCFAVTLIILIVELGGLQAHFPLSWRNFPITFACYAALFCLSSSIIYPTTYVQFLAHGRTRDHAIAATTFSCVACLAYATEVAWTRARPGEITGYMATVPGLLKVFETFVACIIFAFIGEPLLYNQKPALEWCVAVYAICFILAGVTILLNLGDCTNVLPIPFPTFLSGLAYSLFSFTPLPSSSGPSTNLIRDIRANPAVQWIQAALVVLVIYNPTRCVSGTDDWRCPS

SEQ ID NO: 5092 - DNA, 2676 bp, Homo sapiens
  ref <308>: DATABASE ACCESSION NUMBER: EMBL / AK027693
  ref <309>: DATABASE ENTRY DATE: 2002-08-06
ctggtgcttctgcttctccgtgaccctgatcatcctcatcgtggagctgtgcgggctccaggcccgcttccccctgtcttggcgcaacttccccatcaccttcgcctgctatgcggccctcttctgcctctcggcctccatcatctaccccaccacctatgtccagttcctgtcccacggccgttcgcgggaccacgccatcgccgccaccttcttctcctgcatcgcgtgtgtggcttacgccaccgaagtggcctggacccgggcccggcccggcgagatcactggctatatggccaccgtacccgggctgctgaaggtgctggagaccttcgttgcctgcatcatcttcgcgttcatcagcgaccccaacctgtaccagcaccagccggccctggagtggtgcgtggcggtgtacgccatctgcttcatcctagcggccatcgccatcctgctgaacctgggggagtgcaccaacgtgctacccatccccttccccagcttcctgtcggggctggccttgctgtctgtcctcctctatgccaccgcccttgttctctggcccctctaccagttcgatgagaagtatggcggccagcctcggcgctcgagagatgtaagctgcagccgcagccatgcctattacgtgtgtgcctgggaccgccgactggctgtggccatcctgacggccatcaacctactggcgtatgtggctgacctggtgcactctgcccacctggtttttgtcaaggtctaagactctcccaagaggctcccgttccctctccaacctctttgttcttcttgcccgagttttctttatggagtacttctttcctccgcctttcctctgttttcctcttcctgtctcccctccctcccacctttttctttccttcccaattccttgcactctaaccagttcttggatgcatcttcttccttccctttcctcttgctgtttccttcctgtgttgttttgttgcccacatcctgttttcacccctgagctgtttctctttttcttttctttcttttttttttttttttaagacggattctcactctgtggcccaggctggagtgcagtggtgcgatctcagctcactgcaacccccgcctcctgggttcaagcgattctcctgccccagcctcccaagtagctgggaggacaggtgtgagctgccgcacccagcctgtttctctttttccactcttcttttttctcatctcttttctgggttgcctgtcggctttcttatctgcctgttttgcaagcaccttctcctgtgtccttgggagccctgagacttctttctctccttgcctccacccacctccaaaggtgctgagctcacatccacaccccttgcagccgtccatgccacagccccccaaggggccccattgccaaagcatgcctgcccaccctcgctgtgccttagtcagtgtgtacgtgtgtgtgtgtgtgtgtttggggggtggggggtgggtagctggggattgggccctctttctcccagtggaggaaggtgtgcagtgtacttcccctttaaattaaaaaacatatatatatatatatttggaggtcagtaatttccaatgggcgggaggcattaagcaccgaccctgggtccctaggccccgcctggcactcagccttgccagagattggctccagaatttttgccaggcttacagaacacccactgcctagaggccatcttaaaggaagcaggggctggatgcctttcatcccaactattctctgtggtatgaaaaagaaaaaaaaaaaaaagaaggagtcggggccgggcgtggtggctcacgcctgtaatcccagcactttgggagaccaagtcaggcaatcatctgaagtcaggagttcaagaccagcctggccaacatggtgaaagcatgtctctattaaaaatacaaaaattagccgggcgtggtggcgggcgcctgtaatcccaggtatttggggggactgagacaggagaatcccttcaacccgggaggtggaggttgcagtaagtcaagatggcaccactgtgctccagcctgggggacagagcgagactccatctcaaaaaaaaaaggaatcggacgaagaaccacaggatgttgaagacaactgtctgaagtatttgtgagggacagcgatgtggccctctgtgttaagaataacgtgtcctgctttggcagagagaagaaaatagccactgcccgctttcaaggcaagatcgaccttttctgttttgttttgtttttctttctttttcctggccaagaggacaaaaattactgagtggcccttaaagagggaagtttgttttcagctgttctcttttgcccgtaggtgggagggtggggattgctgcgtcctagctagaggaatggctttgcttgaatgtgtagtgcacacgcacgggtgtttctgtgtgctagttgcttcttgctgctgcttcctgcttgtctgggactcacatacataacgtgatatatatatatatatataaatgtataaatatatattttatttttttttaaatccttggagcttctggttcctatcagttcctgttgttaatcgtagaaccgttgtcccttcccccattcccgtatccatcatgttctttttcttttaaatatcaatataaaggtaaaagaagg

SEQ ID NO: 5093 - protein, 322 aa, Homo sapiens
  ref <308>: DATABASE ACCESSION NUMBER: SWISS-Prot / Q96S97
  ref <309>: DATABASE ENTRY DATE: 2002-06-15
MPVTVTRTTITTTTTSSSGLGSPMIVGSPRALTQPLGLLRLLQLVSTCVAFSLVASVGAWTGSMGNWSMFTWCFCFSVTLIILIVELCGLQARFPLSWRNFPITFACYAALFCLSASIIYPTTYVQFLSHGRSRDHAIAATFFSCIACVAYATEVAWTRARPGEITGYMATVPGLLKVLETFVACIIFAFISDPNLYQHQPALEWCVAVYAICFILAAIAILLNLGECTNVLPIPFPSFLSGLALLSVLLYATALVLWPLYQFDEKYGGQPRRSRDVSCSRSHAYYVCAWDRRLAVAILTAINLLAYVADLVHSAHLVFVKV

SEQ ID NO: 5094 - DNA, 412 bp, Rattus norvegicus
  ref <308>: DATABASE ACCESSION NUMBER: EMBL / AA866299
  ref <309>: DATABASE ENTRY DATE: 2000-03-03
tttttttttttttttttcatacatataacgactttattttgtttggcaacgggaaaacaagtcatgcaccatctctactcaaacactttcaaagccaagcaaatgatatatgaattagttttgctatcttctttcttccttttttctttaacatttgaacagtatagtaacagataaggtagttacagggaaatgtacagaattttatagtttgattaccttggcaattatgctgtgaaaccttcctttcattaaataattagttcagtgattctcaacctctgggttgaactcgaaacccctttcacaggggccgcataacggattatcagctatttacatcatgattaataatagcaaaattatagttatgaagtagtaaataattttatggtggggtcaccacaatgtg

SEQ ID NO: 5095 - DNA, 412 bp, Rattus norvegicus; identical to SEQ ID NO: 5094
  ref <308>: DATABASE ACCESSION NUMBER: EMBL / AA866299
  ref <309>: DATABASE ENTRY DATE: 2000-03-03

SEQ ID NO: 5096 - DNA, 268 bp, Rattus norvegicus
  ref <308>: DATABASE ACCESSION NUMBER: EMBL / AA866306
  ref <309>: DATABASE ENTRY DATE: 2000-03-03
tttttttttttttgtttctttttttatcgttacagctttaatccaggaggcctgagctctggccaatcgggcagccagagggaagggctgtggccagctgttgataaagcccaccccccccaccggtctccacctctgcccaaactgggcaaatatgaggggccccatctttctgattgggatcctgggaagagggactacttgaaaacacagactgtgacccatgctctcatcttactcccaatgaaaatatctcatgaatcccaag

SEQ ID NO: 5097 - DNA, 1039 bp, Homo sapiens
  ref <308>: DATABASE ACCESSION NUMBER: EMBL / BG291391
  ref <309>: DATABASE ENTRY DATE: 2001-02-23
accgcggagccggggacaggcggagcaggcagtgctctgctgggtgaggggcacccagctccagaggctagtgctggccggcgaggactgcctgtggtacctggaccggaatggctcctggcatccggggtttaactgcgagttcttcaccttctgctgcgggacctgctaccatcggtactgctgcagggacctgaccttgcttatcaccgagaggcagcagaagcactgcctggccttcagccccaagaccatagcaggcatcgcctcagctgtgatcctctttgttgctgtggttgccaccaccatctgctgcttcctctgttcctgttgctacctgtaccgccggcgccagcagctccagagcccatttgaaggccaggagattccaatgacaggcatcccagtgcagccagtatacccatacccccaggaccccaaagctggccctgcacccccacagcctggcttcatgtacccacctagtggtcctgctccccaatatccactctacccagctgggcccccagtctacaaccctgcagctcctcctccctatattgccaccacagccctcttacccgggagcctgaggaaccagccatgtctctgctgccccttcagtgatgccaaccttgggagatgccctcatcctgtacctgctctggtccttggggtggcaggagtcatccagcagcagcccagaccaagccaagcctgggccctactgcggacagagccccaggaagtggacacggacctgactaaacattaggtagagagaaagttgaacaaagggaataaaggggcaaggaggaataaaccggggctaacggccgggaacaaagccccgtcgcaaaataccaggaaggggggccacgtgttcccctggagtgggggaaagagagacttcaacgtgacctaccttgtgtgagtcgaacacagcgagaattaatgtgacaaacagaaggggagagatagcgacccgtagtggtagaaaagcacgacaaggaactagatcttatagtgatcaaggagt

SEQ ID NO: 5098 - DNA, 256 bp, Rattus norvegicus
  ref <308>: DATABASE ACCESSION NUMBER: EMBL / AA866358
  ref <309>: DATABASE ENTRY DATE: 2000-03-03
tttttttttttttttttaaaataacaacccctttattagggaaacctgtggggtaggaggaaacaacagctgttcacccatggggctttcttcttcggggcccaccacacaaaggaaccccccaaatttaaacggcccttccccccagttcccatgacacagggtggacatcaattcaatttcaaatgatgaaatcctggttaaaggcttttcatttaagaaacacttaaatgataacacatataccccttttagg

SEQ ID NO: 5099 - DNA, 256 bp, Rattus norvegicus; identical to SEQ ID NO: 5098
  ref <308>: DATABASE ACCESSION NUMBER: EMBL / AA866358
  ref <309>: DATABASE ENTRY DATE: 2000-03-03

SEQ ID NO: 5100 - DNA, 398 bp, Rattus norvegicus
  misc_feature (1)..(398): n=a, c, g or t
  ref <308>: DATABASE ACCESSION NUMBER: EMBL / AA866371
  ref <309>: DATABASE ENTRY DATE: 2000-03-03
tttttttttttttttttgagagaattatttctaattataattttctgtataaaaacgtccatcagacagaagtcaaagggtgaggtggttatcaggaacagggcgggtggctccagcagccctctgaccctctctcgtgcagtccttgcttagagtcccaggcgatccacaggtccagggtgaacaatgagggtcagaggtggaaggctcagcangagagtagaggagcatcagcagaggtcgagagaaggccagagtccatggtcaggctgtcctaggcagcaactccacagccctcaccagccttctgtttctttatgggaggacccccagcttcagggacactggagctgctgggcggaggggcgtttggaggtgagaggacaccggatgtcatc

SEQ ID NO: 5101 - protein, 171 aa, Rattus norvegicus
  ref <308>: DATABASE ACCESSION NUMBER: SWISS-Prot / BAB22140
  ref <309>: DATABASE ENTRY DATE: 2003-02-01
MTSASTKVGEIFSAAGAAFTKLGELTMQLHPVSDSSPAGAKWTETEIEMLRAAVKRFGDDLNHISCVIKERTVAQIKTTVKRKVYEDSGIPLPAESPKKGPKKMTSGVLSPPNAPPPSSSSVPEAGVPPIKKQKADVTLSALNDSDANSDLVDVEGLGETPPAKKLNFDQA

SEQ ID NO: 5102 - DNA, 337 bp, Homo sapiens
  ref <308>: DATABASE ACCESSION NUMBER: EMBL / AW408241
  ref <309>: DATABASE ENTRY DATE: 2000-02-08
cacgagggcgatttggggacgatcttaatcacatcagctgtgtcatcaaggaacggacagtggcccagataaaggccactgtgaaacgcaaggtatatgaagattctggcatcccccttccagctgagtcacccaagaaagggcccaagaaggtggcatctggtgtcttgtcacctcctccagctgcccctcctcccagcagctccagtgtccctgaggccgggggtccccccataaagaaacagaaggctgatgtgacactcagtgctctgaacgactccgatgccaacagtgacgtggtggatattgaagggctaggagaaactcctccagctaa

SEQ ID NO: 5103 - DNA, 398 bp, Rattus norvegicus; identical to SEQ ID NO: 5100
  misc_feature (1)..(398): n=a, c, g or t
  ref <308>: DATABASE ACCESSION NUMBER: EMBL / AA866371
  ref <309>: DATABASE ENTRY DATE: 2000-03-03

SEQ ID NO: 5104 - protein, 171 aa, Rattus norvegicus; identical to SEQ ID NO: 5101
  ref <308>: DATABASE ACCESSION NUMBER: SWISS-Prot / BAB22140
  ref <309>: DATABASE ENTRY DATE: 2003-02-01

SEQ ID NO: 5105 - DNA, 337 bp, Homo sapiens; identical to SEQ ID NO: 5102
  ref <308>: DATABASE ACCESSION NUMBER: EMBL / AW408241
  ref <309>: DATABASE ENTRY DATE: 2000-02-08

SEQ ID NO: 5106 - DNA, 466 bp, Rattus norvegicus
  misc_feature (1)..(466): n=a, c, g or t
  ref <308>: DATABASE ACCESSION NUMBER: EMBL / AA866409
  ref <309>: DATABASE ENTRY DATE: 2000-03-03
cggccgcaaaggtttttttaatttttttttaattttttcaatttttatttaaagctgtactccaaaccaaatccttcaaatcaaaaagctgtttcaaacaaatttgtacaaatatcatgataccagtgttttaaagataacctacagacaattataaaaaagcaactattatacaaaagaattctatggtaaactgtttttataaaaccttttagaaataaacttgtttcatgatagaagataaaaattaaattaaccctaaatacattaattgctctgaagatgggctgagtgttttgaagtcacattgcttctttgagaaagggcgtttgaaccaggcactacagtaacagatgcacaccgtaccctctcactcgagccctctcatctctgggtttgaaaccctttttccagaaatggataagcaaaacctaccaaacaggagtgctgggtcncttaacttttg

SEQ ID NO: 5107 - DNA, 6871 bp, Homo sapiens
  ref <308>: DATABASE ACCESSION NUMBER: Refseq / XM_031553
  ref <309>: DATABASE ENTRY DATE: 2002-08-01
cgactcgcccgtgctgctgccgccgccgaaggaggggcaaagctcaagatggcggacaaaacgccaggcggatctcagaaggccagttcaaagacgagatcatcagatgttcattcatctggatcttcagatgcacatatggatgcatctggaccctcagatagtgatatgccaagtcggacacgacctaagagcccaagaaaacataattataggaatgaaagtgcccgtgaaagcctttgtgattctcctcatcagaatctctcaagacctcttctggaaaacaaacttaaagcattcagtattggaaaaatgagtacagctaagcgaactttaagtaaaaaggaacaggaagaattaaagaaaaaggaggatgaaaaggcagctgctgagatttatgaggagtttcttgctgcttttgaaggaagtgatggtaataaagtgaaaacatttgtgcgagggggtgttgttaatgcagctaaagaagaacatgaaacagatgaaaaaagaggtaaaatctataagccatcttcaagatttgcagatcaaaaaaatcctccaaatcagtcttccaatgaaagaccaccatctcttcttgtgatagaaaccaaaaaacctccacttaaaaaaggagagaaagaaaagaaaaaaagcaatttggaactcttcaaagaagaattaaagcaaattcaagaggaacgtgatgagagacataaaacaaaaggcagattaagtcgatttgaacctcctcagtcagattctgatggtcagcgtcgttctatggacgcgccttcaagaagaaatagatcatctggtgttcttgatgattacgcacctggctcacatgatgtaggagatccaagcactactaatttataccttggaaacattaatccacagatgaatgaagaaatgctgtgccaagaatttggaagatttggaccgttagccagtgtgaaaatcatgtggcctagaactgatgaagaaagagccagagagagaaattgcggctttgtggcctttatgaatagaagagatgctgaaagagctttaaaaaatttgaatggaaaaatgattatgtcttttgaaatgaagttaggttggggtaaagctgtacctattcctccacatccaatatacattccgccttctatgatggaacatacgcttcccccacctccatccggactgccttttaatgcgcagcctagagagcggttaaaaaaccctaatgctcctatgttaccgccacctaaaaacaaagaggattttgagaagactctgtcgcaagccatagtcaaagtggttatcccaacagaaaggaatttgctcgccctgatacatcgaatgatagagtttgttgtacgtgaagggccaatgtttgaagctatgattatgaacagagaaatcaacaatcctatgttcaggttcttatttgaaaaccagacaccagcccatgtttactataggtggaagctttattctattctgcagggagattctccaactaaatggcggacggaagattttcgtatgttcaaaaatggatctttttggaggccaccaccattaaatccgtacttgcatggaatgtcagaagagcaagaaacagaagcttttgtagaggaacctagtaaaaagggagcacttaaggaagaacagagggataaattggaagaaatcttgcggggattaactccaaggaaaaatgatattggagatgcaatggttttctgtcttaataatgctgaagctgctgaagaaatagtggattgcattactgagtcgttgtccatcttaaagacaccccttcctaaaaagattgccagattatatttggtttctgatgttttgtacaactcttcagccaaagttgctaatgcttcatattatagaaaattttttgaaacaaagttatgtcagatattttcagacctcaatgccacctatcgtacaattcaaggccatttacaatctgaaaactttaagcaacgggtaatgacttgcttcagagcatgggaagattgggcaatttatccagaaccatttttgatcaaactacaaaatattttcttaggacttgtaaatattattgaagaaaaggaaacagaggatgttccagatgaccttgatggtgcccccatcgaggaagagcttgatggtgcacctctggaagatgtagatggaattcctattgatgctactcccatcgatgatcttgatggagtccctataaaaagtcttgatgatgatcttgatggagtgcctttggatgcaactgaagactcaaaaaagaatgagcctatatttaaagttgccccatcaaaatgggaagctgtggatgaatctgaattggaagcacaggctgttacaacttctaaatgggaattatttgaccagcatgaagaatcagaagaagaagaaaatcaaaatcaagaagaagaaagtgaagatgaagaagatactcaaagttccaaatctgaagaacatcatttgtactctaatccaatcaaagaagaaatgactgagtctaagttctctaagtactctgaaatgagtgaggaaaaacgagccaaacttcgtgaaattgagctcaaagttatgaagtttcaggatgaattggaatctgggaaaagacctaaaaaaccaggccagagttttcaggagcaagtagaacactacagagataaacttcttcaacgagagaaagagaaagagttagaaagagaacgagaaagagacaagaaagataaagaaaaattggaatctcgctccaaagacaagaaggaaaaagatgagtgtactccgacaaggaaggaaaggaagaggcgacacagtacatcccccagcccatctcgcagtagcagtggtagacgagtgaaatccccatcaccaaaatcggagcgatcagagcgttcagaaagatctcataaagagagctcacggtccaggtcatctcacaaagattctcctagagatgttagcaaaaaagccaaaagatcaccatctggttcaaggacacctaaaaggtctaggcgatcacggtctagatctcctaaaaaatcaggaaagaagtccagatcccagtccagatctccacacaggtctcataaaaagtcaaagaaaaacaaacactgacgtaaatttttaagatgctgtcacttattggaaatgcgatttgttttgtgcctgaacggtctgttttttaaaaaaacaaaaaatcaaatgaaagagcattcctggggttttttgtttgtttgtgtatgcatgtgtaaactcatgagcaactgcatctgtagatctgtcattgttttatattgtgtaaattactttcattgtggctatttctcaagatgaaatttttattgttctaatggatttcatcagaaatgtgtataatggatctgctgacagtagtagtattttgttttaggatgttgtgacttagcaaaaataatacagatgtcttccccccttttgtagctttgacaatttgaattagatttcaaataaaatctgaacagaaaactataatgttgtttttttgccccaccggtgatattaagtcccttaaagtcctactgagtttcacactactgttgtgcttcttatacctgatgcactttataagccccagtgttcaagtagcttaagttttatatttactaagatgactatccaaattaagggacctgagactcctatttggtggtttgctaaccatttgcttttgataagtttctcttgggtaatactaatacccagatatcaaagactaggtagatatggcatggcgttttgttagtggaatgcctggctaaaacatttttttcacagaagcaatatgatttccatacatccaacccatgttctgagcaactacttacttttagggggaaattaaatatcttttcatttcctcttctattatgaaagaagtttatttgtaaaacaaattttctaacaaggtttggccatagaattctcttgtatgatcgttgaccttttataatcttctgtaggctatctttcaaacactggcatcagaatattttttataagtttgtgtttaaacagcttagttggtccccccccactcccaagagacttgggtttagttatagctttaagtaaaatttaaaaataaaatgtttttcaggaaacttcgtatctaatggtttgtaaattcaaggtgcaaaaagttgatttaaaccatttgcagagttgaactctattatgaaaataaatttgctacggtatgaggaagaaataaaacttgtgtaatgttggtcataatactgctataaatataataaagggttatgtagaattgaactgacactattatttgtgaatcttgatttcagttttttatgtaggcacttcatacactggtttgatgggttttttttttcctccctaaaagagaaagtagaaaactattctaacaatggattattttgatttagcttgctttttaaaaaaatcttttcaacttgttttacttaatcttgcctagtcacaaaataagatgtgcacccatggtttggagagttcctatattagctgagcagtgagatacactatttccaaacggtgcacacctacagtagctttggaaatgagccaatcactgttttacttaatggttcttatcagcatgcaaatattgcttgaaagttatttccttattcactgttttgttagtccattttgttaggaaacattaattcctaaaaatttgttcagaataattaaaagtgaacatttggtgctgatactcaaaaacctacaaatgtagccatttaaaaagtaacatgtttttctcccctgctcattgcctgggagaatggaattttatataactacctttctttgcaaaaataacggtcgtgtcgagttggtggtgattttggcattccatcttgcactggtttctagtataggcttagaaataattggtcaggtaataatctttccagtcaagttgcaagggatgcttatttctcttcaaaaaaagacatcctgcgggattgagtagaaaattttaggtcagttttgggtgcttatttgtaatatttttcctactacattggagtttagcagttctttttttctggatccagatacaagtgtcatggtttatcttacagtgggtgaaactgactttcttttggttgggtgggtgaggatttcttaggcctgatagaatatatattctgtgaagtttgttaatgtacatattagattgtattggatttttttttcttgaattgcaaatggtattattagataggttatttccagttttacttcatgacaaattacctagagtaaacctacttaatactcccatggattctatgaaagtttaatgggatcagaaattggtgacttataagggggaagatattctaccatatttttataatagcttattattcatgtttcttgtctgaaggacactcaagttacagagcaaaatttctataggttgactagaatgttcataagcatggtcttccagttgcaggaaagatcatgttctatctgtggacacttactgtcctctaccacagctacgtgccagagttgttttccacagttcttataaagggcatgacttaggctctttaccctccaacttaatgtttatacacagggattgtttactaggttaatgacatttaactcccctctcttctgtaggtgagagaaaataagtaagtcttgatctgtttcttaccaaagagagacagacctatgatggaaaatgatcacgtctctgaattttttctttaacgttatagttccttattacagatagtaagcatatgggaatttctgagctataacatgttgagaagttagaaattaaaactaacacaacaaaaggcgctgaatcaaaagatctttgcttttatttggctcagaatgtttttggcttttctgctaaagatggcagaaattactctacacagacctgatttttctttattgcagaccattcttgtgggcttaccctgagacttttatcccaattagtgaatcttggagggaatacttgcttatttatgacttaggtatttccccccaaactttaatattcttgagcacttgaaaatacttttgagaaattttaactgtgattaaatttaggtttattagaaatattctgtacacatttgcctccatggtggcgtaagttctgaaaaattatatgaccgtgacaatagtttatcatcatcattattgttattcaaaataagggtaaataaatctctgtattgccaaagtgacttaaactgttctgatgaccacacagtgtgatttctttagcagagaaagttggttttaaaaataaatagtaccacttttctaagactgtacagtttacaaataaggtttttttctttgttgttttcctcttctattaagttttagtgaaaagcctaattacagaaaattgtgcagatactagtgaagatactagtataagtttaaaggaacacgtgactgtaaaatctcacatttacaaagtgcttgatctcttcatatttcacacgcatgttttagaatagattttagggagtgtttaattcattatccttttgacttaaaatttttgttaccaacttcctaggacttagataatatataaataagtacaaatcccaggggaagtgttgtgatgctagactaaaaggtgggaatgtgctgctgttccgtgagccttgttccattgttgaaaatttgatgcctcagtgtttattcagtaccacctcatggagcttcaatgtaaatggattatatgtataattggtaatttgtatagttttgtagattgtagattaaatgcactcatcatgtc

SEQ ID NO: 5108 - protein, 1029 aa, Homo sapiens
  ref <308>: DATABASE ACCESSION NUMBER: Refseq / XP_031553
  ref <309>: DATABASE ENTRY DATE: 2002-08-01
MADKTPGGSQKASSKTRSSDVHSSGSSDAHMDASGPSDSDMPSRTRPKSPRKHNYRNESARESLCDSPHQNLSRPLLENKLKAFSIGKMSTAKRTLSKKEQEELKKKEDEKAAAEIYEEFLAAFEGSDGNKVKTFVRGGVVNAAKEEHETDEKRGKIYKPSSRFADQKNPPNQSSNERPPSLLVIETKKPPLKKGEKEKKKSNLELFKEELKQIQEERDERHKTKGRLSRFEPPQSDSDGQRRSMDAPSRRNRSSGVLDDYAPGSHDVGDPSTTNLYLGNINPQMNEEMLCQEFGRFGPLASVKIMWPRTDEERARERNCGFVAFMNRRDAERALKNLNGKMIMSFEMKLGWGKAVPIPPHPIYIPPSMMEHTLPPPPSGLPFNAQPRERLKNPNAPMLPPPKNKEDFEKTLSQAIVKVVIPTERNLLALIHRMIEFVVREGPMFEAMIMNREINNPMFRFLFENQTPAHVYYRWKLYSILQGDSPTKWRTEDFRMFKNGSFWRPPPLNPYLHGMSEEQETEAFVEEPSKKGALKEEQRDKLEEILRGLTPRKNDIGDAMVFCLNNAEAAEEIVDCITESLSILKTPLPKKIARLYLVSDVLYNSSAKVANASYYRKFFETKLCQIFSDLNATYRTIQGHLQSENFKQRVMTCFRAWEDWAIYPEPFLIKLQNIFLGLVNIIEEKETEDVPDDLDGAPIEEELDGAPLEDVDGIPIDATPIDDLDGVPIKSLDDDLDGVPLDATEDSKKNEPIFKVAPSKWEAVDESELEAQAVTTSKWELFDQHEESEEEENQNQEEESEDEEDTQSSKSEEHHLYSNPIKEEMTESKFSKYSEMSEEKRAKLREIELKVMKFQDELESGKRPKKPGQSFQEQVEHYRDKLLQREKEKELERERERDKKDKEKLESRSKDKKEKDECTPTRKERKRRHSTSPSPSRSSSGRRVKSPSPKSERSERSERSHKESSRSRSSHKDSPRDVSKKAKRSPSGSRTPKRSRRSRSRSPKKSGKKSRSQSRSPHRSHKKSKKNKH

SEQ ID NO: 5109 - DNA, 537 bp, Rattus norvegicus
  ref <308>: DATABASE ACCESSION NUMBER: EMBL / AA866419
  ref <309>: DATABASE ENTRY DATE: 2000-03-03
tttttttttttttttttaaatctcttggatgacattttcgttgataacatgcacgaggctgctgtaagttgggacagtgagacggttattttttttttttcctagccaaactaatgaggtgtattaaaataaatacctacctatacatcatttccgatgcgcctctgccttcctttaacatcttctagcttaggtcatttgagagaactatgagaatcgctcagttttgggtctccctccacccctagggaccaccctccattgctaaacggcttctgcggcagtgtggaaactcgactaagattattttatagtaagctgttgggtttcactgttaaccagaactgtgtgtgtgtgtgtggtttccttgttttggtttggttttgtaaaggtgaactttgtatttttaatattatcagtttatatacctgagagcctgctatatatatatttttttttattttgaactaaaaggagaaaaaaaaatcaacgaacttaatgcacatcagaagacaaaaaacctcgtgccgaattctt

SEQ ID NO: 5110 - DNA, 265 bp, Rattus norvegicus
  ref <308>: DATABASE ACCESSION NUMBER: EMBL / AA866439
  ref <309>: DATABASE ENTRY DATE: 2000-03-03
ttttttttattttttttagatgacatactttatttccagtctacaaccattaaaaacactttgtaagtttacactgttcagttctcatatctgaaataagacacagggcaaagacagctggtggactagatgccgtcctaccacccaatatgtcctgagaaggagcctttaaagatagaaaggcggacgggggtagtggaatgcagaggagtacgataccccagccgtatggagatgtgtctaaattttgcacagggacccttag

SEQ ID NO: 5111 - DNA, 1843 bp, Homo sapiens
  ref <308>: DATABASE ACCESSION NUMBER: EMBL / AK057056
  ref <309>: DATABASE ENTRY DATE: 2002-08-06
attctcctctggacctcaccactctcagagctgcttgtcctggcagaatctacagttcaccccaactctatgccttacccctcccaacccaacagcatttgcagtttgcaaaatatacagacccaagtcctgaggggactgaggacatgatgctgggcccaagtctcctgctcagggcttctctccaatgccagccctgccactccttcctcaccctccttggagcctcctctgctgcttgtctatcccaacggccctgctcccctcccttcctgcccttcaccagctttctggacaccatgccctgaggaagggacctttggttttctctaaacatctttgaagggctgaggcagtcagggctggctgccttgtcactctttatttggaagccactcaaaccattcccaagaagagggacctcagctggcaatctggaaacctggcccaggtctgggcagatgtcttcacttctcctaccttcccagtcttgtgatcctgtgatgagcaccaggatggccctgtggtccctagagcacccctcatgctgtagggtcctgcagccccatcctttctctactgggccctggtatcctggctcctctctcagctctgccactgatctctgtgccttagtttacttctctgcacgggggactcaccccaagaccatttccagcagcttcccaggtgatgtggtgccccaaggctgggctttgccagctgtggcccagctccttagtgctgcccaggagacaccaggctgctcagaatgaggtgactgcgggcaccattctcagccagtggttcttgtattgcattccagcagcaggaatatcacctgggaacttgatagaagtgcagattagcagccccacccaagacccactgaattagagcttgtggagtggggccctacaagctggggttttaaggagccctccaaatgattctgacgcataagaatatgccaactgctgatctgggctagccattagtagagcctggggagggactgggactggctaggccaagaacaggtggaaaacaccagccttatctggactcctgagattgggaaccaccaccaacaaaaaccaaccctatagtcgctcctcttggaagaggaagagaagttgaagggcctggagaaagcacacattgtttgtttccctgctcctgctcacctctctcacttgtcttggttttacaaaaggctgtgtggatggtgccagccagggagggggtgggagtcctggggaggcaggaggcagaagaccctgactgtttctcccttgggaacctcaccataggccagatagcgcctcttcaaactgaaagaaatcttaactccacaaagaaagcatcctaaatccccagttcctcctcctcccaaccccagggataccttgtagacagtgccaaaaaacagctccaacccccagcagctgggaagagagccagaagctgcccttcctcctcatcctggcccctccccagcccccgccaatactgtgaacccccttcccactcagcctggtttcctggtgagggtcctgcagtcatgggccctgggggacccccagggcaaggcccatgggagggaagggaccaagggcatccttgggccaactgtccacctctcttgtccactattctctcctttccacttctgtcttcaaaaggctccttcctaggatggatcgggtgctaggacaactgcagtccaatccaccagctctccctgcccctgtgtcttatttcagacatgagaataactgtacagtgtaaacttataaagcgtttttaatggttgtagattggaaataaagtatgtcatatg

SEQ ID NO: 5112 - DNA, 265 bp, Rattus norvegicus; identical to SEQ ID NO: 5110
  ref <308>: DATABASE ACCESSION NUMBER: EMBL / AA866439
  ref <309>: DATABASE ENTRY DATE: 2000-03-03

SEQ ID NO: 5113 - DNA, 1843 bp, Homo sapiens; identical to SEQ ID NO: 5111
  ref <308>: DATABASE ACCESSION NUMBER: EMBL / AK057056
  ref <309>: DATABASE ENTRY DATE: 2002-08-06

SEQ ID NO: 5114 - DNA, 293 bp, Rattus norvegicus
  ref <308>: DATABASE ACCESSION NUMBER: EMBL / AA866444
  ref <309>: DATABASE ENTRY DATE: 2000-03-03
tttttttttttttttttagtaacttacattttatttcatgtacaaaggggccttgtggcagtgaggtgacatacggcaaacagcactccggtgagcacctggaaaaggctgttgaagcacatgcagctgccagtgagcaggccctgggggccaggataggcacgcaggaaggcacaggcttggaagagcttctctctgcttccctccaagttgggaccaaacccccggcacccacaaagtcacatgtgctccggacatttgaaaatagcacagccccccctgaaaacccaaca

SEQ ID NO: 5115 - DNA, 534 bp, Rattus norvegicus
  misc_feature (1)..(534): n=a, c, g or t
  ref <308>: DATABASE ACCESSION NUMBER: EMBL / AA866454
  ref <309>: DATABASE ENTRY DATE: 2000-03-03
tttttttttttttttttcccagtgtgtgtcctttattctccccagaagccatgttgactcccttctgcaggctgatggaaggaagggcgctgcccttcatgtggactgtgctgtggacggatctgactgagaggagccccagtaccaagcagaatggagttgagaagccagggcgctcactaacagagcaggggacaagtggcctccttagaaggtgtgcatgttctgggtgttctgaggtaacaggcctgtccacatggcctgcatgtccattgatggcctcccaggctgctagtagaagtgaggctgttgctggcacgacgttactgcaagcagcaacagagttcgcgtatccacaaagctgagcatgtctaccacttagacatgcagactccttgtgtcgcagagcccctgggtcaccagcggaggtatcacctgncgggcgcaggcatgcgatcgtgaccgttccctccaacttagtcgaaacctcccgctgccgtggtgctaaaaaaaaaaaaaaaaaccctcgtgccg

SEQ ID NO: 5116 - DNA, 2174 bp, Homo sapiens
  ref <308>: DATABASE ACCESSION NUMBER: EMBL / AK000261
  ref <309>: DATABASE ENTRY DATE: 2000-02-22
catgtgggccctgggtcaagcaggttttgccaacctcaccgagggactgaaagtgtggctggggatcatgctgcctgtgctgggcatcaagtctctgtctccctttgccatcacatacctggatcggctgctcctgatgcatcccaaccttaccaagggcttcggcatgattggccccaaggacttcttcccacttctggactatgcctatatgccgaacaactccctgacacccagcctgcaggagcagctgtgtcagctctacccccgactgaaagtgctggcatttggagcaaagccggattccaccctgcatacctacttcccttctttcctgtccagagccacccctagctgtccccctgagatgaagaaagagctcctgagcagcctgactgagtgcctgacggtggaccccctcagtgccagcgtctggaggcagctgtaccctaagcacctgtcacagtccagccttctgctggagcacttgctcagctcctgggagcagattcccaagaaggtacagaagtctttgcaagaaaccattcagtccctcaagcttaccaaccaggagctgctgaggaagggtagcagtaacaaccaggatgtcgtcacctgtgacatggcctgcaagggcctgttgcagcaggttcagggtcctcggctgccctggacgcggctcctcctgttgctgctggtcttcgctgtaggcttcctgtgccatgacctccggtcacacagctccttccaggcctcccttactggccggttgcttcgatcatctggcttcttacctgctagccaacaagcgtgtgccaagctctactcctacagtctgcaaggctacagctggctgggggagacactgccgctctggggctcccacctgctcaccgtggtgcggcccagcttgcagctggcctgggctcacaccaatgccacagtcagcttcctttctgcccactgtgcctctcaccttgcgtggtttggtgacagtctcaccagtctctctcagaggctacagatccagctccccgattccgtgaatcagctactccgctatctgagagagctgcccctgcttttccaccagaatgtgctgctgccactgtggcacctcttgcttgaggccctggcctgggcccaggagcactgccatgaggcatgcagaggtgaggtgacctgggactgcatgaagacacagctcagtgaggctgtccactggacctggctttgcctacaggacattacagtggctttcttggactgggcacttgccctgatatcccagcagtaggccctgccttcctggccactgatttctgcatgggtagaccatccaagactgcagcgggtagaaggtggcagttcttcatgggagtctttttaacttggtgcctgagttctctcctaggcaagtggccagttgcctccacctcagttcttccatctttggtggggacagggcccagcagcatctcagcctcctacccacaattccactgaacacttttctggccctactgcacatggcccccagcctccatccttgtgctggtagcctctcacaactccgcccttgccctctgccttccacttccttccatctcatttctaaaccccaaacagctcatctctaaaaagatagaactcccagcaggtggcttctgtgttcttctgacaaatgattcctgcttctccagactttagcagcctcctgttcccattcttggtcacagctctagccacagcagaaggaaaggggcttccagaagaatatagcaccgcattgggaaacagcagcctcacctccacctgaagcctgggtgtggctgtcagtggacatggggagctggatggaaatgcctctcacttcaaaatgcccagcctgccccaaatgcctctaagcccctccctgtcccctcccttgtagtcctacttcttccaactttccattccccatcatgctgggggtcttggtcacaaggctcagcttctctccactgtccatccctcctatcatctgtagagcagagcacaggcagttgtgtgccttgggcccagggaaccctccatcaacctgagacaggactcagtatatggttcttgggtatgccctaccaggtggaataaaggacacagatttgaaaaaaaaaaaaaaaaaaaaaaaaaaa

SEQ ID NO: 5117 - protein, 432 aa, Homo sapiens
  misc_feature (1)..(432): Xaa=Unknown amino acid
MWALGQAGFANLTEGLKVWLGIMLPVLGIKSLSPFAITYLDRLLLMHPNLTKGFGMIGPKDFFPLLDYAYMPNNSLTPSLQEQLCQLYPRLKVLAFGAKPDSTLHTYFPSFLSRATPSCPPEMKKELLSSLTECLTVDPLSASVWRQLYPKHLSQSSLLLEHLLSSWEQIPKKVQKSLQETIQSLKLTNQELLRKGSSNNQDVVTCDMACKGLLQQVQGPRLPWTRLLLLLLVFAVGFLCHDLRSHSSFQASLTGRLLRSSGFLPASQQACAKLYSYSLQGYSWLGETLPLWGSHLLTVVRPSLQLAWAHTNATVSFLSAHCASHLAWFGDSLTSLSQRLQIQLPDSVNQLLRYLRELPLLFHQNVLLPLWHLLLEALAWAQEHCHEACRGEVTWDCMKTQLSEAVHWTWLCLQDITVAFLDWALALISQQX

SEQ ID NO: 5118 - DNA, 534 bp, Rattus norvegicus; identical to SEQ ID NO: 5115
  misc_feature (1)..(534): n=a, c, g or t
  ref <308>: DATABASE ACCESSION NUMBER: EMBL / AA866454
  ref <309>: DATABASE ENTRY DATE: 2000-03-03

SEQ ID NO: 5119 - DNA, 2174 bp, Homo sapiens; identical to SEQ ID NO: 5116
  ref <308>: DATABASE ACCESSION NUMBER: EMBL / AK000261
  ref <309>: DATABASE ENTRY DATE: 2000-02-22

SEQ ID NO: 5120 - protein, 432 aa, Homo sapiens; identical to SEQ ID NO: 5117
  misc_feature (1)..(432): Xaa=Unknown amino acid

SEQ ID NO: 5121 - DNA, 554 bp, Rattus norvegicus
  ref <308>: DATABASE ACCESSION NUMBER: EMBL / AA866471
  ref <309>: DATABASE ENTRY DATE: 2000-03-03
tttttttttttttttttaagattgctgaagtccattttattttgtatgttacattttcaaataaaagcttaatgttataaagtatttacaaaactcttatgcaaaaaatttattatttaacctatttttaacaagaattttatacaaatttatataaaagaattaaatttccctgaaaagtctaatgagagaaaaatataccttctgtactgctttaatgtctaatgcaaacatttcttgaaacatcaatgatttctgacaatctaaatatgtaagtattggtgctaggacactgtgagaagacgggtgcatttcccatgtctctcatgtctcacaaagttatcaacctgtgagctcctccctaagtgcctgaaaatgatctggcataagccagtgtcagtaggaggtcacagtgatatttgcattgaaacgtatacttctatctttccaaaaatagcaggaatgttgaataattccattcgttccaaatcctgggcataaaggcttagaatgtaataaaacttgggtattcttcaacagataagccacagcat

SEQ ID NO: 5122 - protein, 555 aa, Rattus norvegicus
  ref <308>: DATABASE ACCESSION NUMBER: SWISS-Prot / AAH08539
  ref <309>: DATABASE ENTRY DATE: 2002-06-01
MDNEIQKQFEELYNLIEDPYPRVRSTGILGVCKISSKYWEMMPPNILVDFLKKVTGELAFDISSADVRCSVFKCLPIILDNKLSHPLLEQLLPTLRYSLHDNSEKVRVAFVDLLLKIKAVRAAKFWKICPMEDILVRLEMDSRPVSRRLVSLIFNSFLPVNQPEEVWCERCVTLIQMNRAAARRFYQYAHEHTASTNIAKLIHVIRHCLNACIQRTLREGSEAHKECEKENASVLDKTLSVNDTASMAGLLEIIVILWKNIHRSLENNKEAKIYTINKFAAVLPEYLKVFKDERCKIPLFMLMSFLPASAVPVFSCGVISVLRNQESVTGRSYCTLLDCLCSWGQVGHVLELIVDWLPTVPPQAKSNLASKRKVEINDTCSVKPELALLYMEYLLTHPKNRECLLSVPQKKLNQLLKALEGSKAELESFLQSPSGNPLNFNKATALHAFGLYCRMSVHLQYKFCSEEKIHLSILDDTGSWLENKVLPLLEDQEEEYLKLRKDVYQQIIQTYLAVCKDVVMVGLGDPKFQMQLLQRSFGIMKTVKGFFMFHYFLAF

SEQ ID NO: 5123 - DNA, 2403 bp, Homo sapiens
  ref <308>: DATABASE ACCESSION NUMBER: EMBL / AK022744
  ref <309>: DATABASE ENTRY DATE: 2002-08-06
ttgttgtttgttgaagcatttcctattagggatccaaaccttcatgctattggaatggatagtgaaatccagaaacagtttgaagagctctatagccttttagaagatccttacccgatggtccgttccacagggatccttggtgtttgtaaaataacttctaagtactgggaaatgatgcccccgaccattcttattgacctcctgaagaaggtgactggggaactggcatttgacacgagctcagctgatgttcgttgttctgtctttaagtgtctgccaatgattttggacaacaaactgagccacccattgttagagcagctccttccagctctcagatacagtctccacgacaattcggagaaagtgagggtagcttttgtggacatgctgttgaagatcaaagctgtgagggctgctaagttttggaaaatatgtcccatggagcacattctggttcgtctggaaactgattctcgacctgtgtctcggcgcctggtgagcctcatctttaattctttcctgcctgtgaatcagccggaggaggtctggtgcgagcgctgtgtcaccctggtgcagatgaaccacgccgctgccaggaggttctatcagtacgcccacgaacacaccgcctgcaccaacatagcaaagctgattcacgttattcgtcattgcttaaatgcctgtatccagagggcagtgagagagcctccagaggacgaggaggaagaggacggaagggagaaggagaatgtgactgttctggacaaaacactgtcagtaaacgatgttgcatgcatggcaggtttactagaaatcattgtgattctctggaaaagtattgacagaagtatggaaaataataaagaggccaaactttacacgattaacaagtttgcctctgtgcttccagagtatctgaaagtatttaaggatgatcgctgcaagatccctttattcatgctaatgtcctttatgccggcctctgctgtccccccattcagctgtggtgtgatttccacgctgagaagccgggaggagggcgctgtggacaagagctactgcactttgttggattgcctctgctcctgggggcaggtggggcacattctggagcttgttgacaactggctgcccacagagcatgcccaggccaagagcaacacagcttctaaaggtagggtgcagatccatgacacacgcccagtcaaacctgaattggcattggtctacattgagtatctgctgactcatccaaagaaccgcgagtgcttgctctctgctcctcggaagaaacttaaccatcttttgaaagcccttgaaacgtcaaaggcagatctggagtcacttctgcagacaccgggtgggaagcctcgtggcttcagtgaagcagctgccccgcgagcctttggtctccactgtcgcctgagcatccatcttcagcacaagttctgctcagaaggaaaggtgtatttgtccatgttggaagacactggcttttggttagaaagcaaaattttatcttttattcaagatcaagaagaagactacctgaagcttcatagggtcatttatcagcaaattatccagacctacctgactgtgtgtaaagatgttgttatggtaggccttggtgaccatcagtttcagatgcaactcttacagcggagtcttggaatcatgcaaacagtgaagggatttttttatgtttcattacttcttgacattctgaaagagataactggaagttccttgattcagaaaacagattcagatgaagaagttgcaatgctgttggacacagtccagaaagtatttcagaaaatgttggaatgtattgcacggagcttcaggaagcagccggaagaaggcctgcggctgctttattctgttcagaggcctcttcatgagttcattactgctgttcagtctcggcacacagacacccctgtgcaccggggtgtactttctactctgatcgctgggcctgtggttgagataagtcaccagctacggaaggtttctgacgtagaagagcttacccctccagagcatctttctgatcttccaccattttcaaggtgtttaataggaataataataaagtcttcgaatgtggtcaggtcatttttggatgaattaaaggcatgtgtggcttctaatgatattgaaggcattgtgtgcctcacggctgctgtgcatattatcctggttattaatgcaggtaaacataaaagctcaaaagtgagggaggttgcagccactgttcacagaaaactaaagacattcatggaaattactttggaagaggatagcattgaaagatttctctatgaatcatcatcaagaactctgggagaacttttgaattcataaccaagccaacatctccagacatgt

SEQ ID NO: 5124 - protein, 774 aa, Homo sapiens
  ref <308>: DATABASE ACCESSION NUMBER: SWISS-Prot / BAB14219
  ref <309>: DATABASE ENTRY DATE: 2002-10-01
MDSEIQKQFEELYSLLEDPYPMVRSTGILGVCKITSKYWEMMPPTILIDLLKKVTGELAFDTSSADVRCSVFKCLPMILDNKLSHPLLEQLLPALRYSLHDNSEKVRVAFVDMLLKIKAVRAAKFWKICPMEHILVRLETDSRPVSRRLVSLIFNSFLPVNQPEEVWCERCVTLVQMNHAAARRFYQYAHEHTACTNIAKLIHVIRHCLNACIQRAVREPPEDEEEEDGREKENVTVLDKTLSVNDVACMAGLLEIIVILWKSIDRSMENNKEAKLYTINKFASVLPEYLKVFKDDRCKIPLFMLMSFMPASAVPPFSCGVISTLRSREEGAVDKSYCTLLDCLCSWGQVGHILELVDNWLPTEHAQAKSNTASKGRVQIHDTRPVKPELALVYIEYLLTHPKNRECLLSAPRKKLNHLLKALETSKADLESLLQTPGGKPRGFSEAAAPRAFGLHCRLSIHLQHKFCSEGKVYLSMLEDTGFWLESKILSFIQDQEEDYLKLHRVIYQQIIQTYLTVCKDVVMVGLGDHQFQMQLLQRSLGIMQTVKGFFYVSLLLDILKEITGSSLIQKTDSDEEVAMLLDTVQKVFQKMLECIARSFRKQPEEGLRLLYSVQRPLHEFITAVQSRHTDTPVHRGVLSTLIAGPVVEISHQLRKVSDVEELTPPEHLSDLPPFSRCLIGIIIKSSNVVRSFLDELKACVASNDIEGIVCLTAAVHIILVINAGKHKSSKVREVAATVHRKLKTFMEITLEEDSIERFLYESSSRTLGELLNS

SEQ ID NO: 5125 - DNA, 453 bp, Rattus norvegicus
  ref <308>: DATABASE ACCESSION NUMBER: EMBL / AA874791
  ref <309>: DATABASE ENTRY DATE: 2000-03-03
tttttttttttttttttggggtgtttccagaagagaaatttaatctaatttacatatttctaggtacattgataaccaaaaggtggccactgaaaaggttaaaagttcaattagctcctggtatctagctggcccaggattgcaaaataaaaagatccacgttccttattctctacacaaaacgcattttttaaaaaagtgaaagatctagggagctatacatagaaagcaacagtgaaaagggggagggtggcaggggtgggggaggagagtcccaccctcactctaccctcccagccctggagcccctgaggctctgacatggcaggaggcaactgtcagctttgagctcttccaagctaggaaggcccctttggggtggggaaggggcacccatcaagaatttccgtggcattgtgggctcactgggagctcccaagccctatgggatac

SEQ ID NO: 5126 - protein, 955 aa, Rattus norvegicus
  ref <308>: DATABASE ACCESSION NUMBER: Refseq / NP_035847
  ref <309>: DATABASE ENTRY DATE: 2002-01-07
MEGLLAGGLAAPDHPRGPAPREDIESGAEAAEGEGDIFPSSHYLPITKEGPRDILDGRSGISVANFDPGTFSLMRCDFCGAGFDTRAGLSSHARAHLRDFGITNWELTISPINILQELLATSAAELPPSPLGREPGGPPGSFLTSRRPRLPLTMPFPPTWAEDPGPIYGDAQSLTTCEVCGACFETRKGLSSHARSHLRQLGVAESESSGAPIDLLYELVKQKGLPDAPLGLTPSLTKKSNSPKEFLAGAARPGLLTLAKPMDAPAVNKAIKSPPGFSAKGLTHPSSSPLLKKAPLTLAGSPTPKNPEDKSPQLSLSPRPTSPRAQCPQSEDEGPLNLTSGPEPTRDIRCEFCGEFFENRKGLSSHARSHLRQMGVTEWYVNGSPIDTLREILKRRTQSRPGGHLHPPGPSPKALAKVLSTGGPGSSLEARSPSDLHISPLTKKLPPPPGSPLGHSPTASPPPTARKMFSGLATPSLPKKLKPEHMRVEIKREMLPGTLHGEPHPSEGPWGTPREDMAPLNLSRAEPVRDIRCEFCGEFFENRKGLSSHARSHLRQMGVTEWSVNGSPIDTLREILKKKSKLCLIKKEPPAGDLAPALTEDGSPTAAPGALHSPLPLSPLASRPGKPGAGPTQVPRELSLSPITGSKPSAASYLGPVATKRPLQEDRFLPAEVKAKTYIQTELPFKAKTLHEKTSHSSTEACCELCGLYFENRKALASHARAHLRQFGVTEWCVNGSPIETLSEWIKHRPQKVGAYRSYIQGGRPFTKKFRSAGHGRDSDKRPPLGLAPGGLSLVGRSAGGEPGLEAGRAADSGERPLATSPPGTVKSEEHQRQNINKFERRQARPSDASAARGGEEVNDLQQKLEEVRQPPPRVRPVPSLVPRPPQTSLVKFVGNIYTLKCRFCEVEFQGPLSIQEEWVRHLQRHILEMNFSKADPPPEEPQAPQAQTAAVEAP

SEQ ID NO: 5127 - DNA, 2058 bp, Homo sapiens
  ref <308>: DATABASE ACCESSION NUMBER: EMBL / AL390184
  ref <309>: DATABASE ENTRY DATE: 2000-07-20
ggaggggagccagggcccgaggctggccgggcagccgacggtggtgagcggcctctggcagccagcccgccaggcaccgtgaaggctgaggagcaccagcggcagaacatcaacaaatttgaacgccgacaagcccgccctccagatgcctccgcagcccggggaggcgaggacaccaatgacctacagcagaagctggaggaggtgcggcaacccccaccccgagtccggccagtcccctccctggtgccccggcccccccagacatcacttgtcaagttcgtgggcaacatctacaccctcaaatgcaggttctgtgaggtggaattccagggccccctctccatccaggaagagtgggtgcggcacttacagcggcacatcctggagatgaacttctccaaagcggaccccccacctgaggagtcccaggccccgcaggcacagacagcggcggcagaggctccctaacacaaaagcattccagatcccctctcgtgccacctctgtctcctcttcttcctcctctgtgtccttgtccctcttcctctttctttccgtttccaaaggagcaagccaaaacctcaaaccggcgccccttgggggccgggcacactacagccagggcgccgggagccagctagctgcccttcccccagcccgaggactctggggccacagggtgtcttccttcagcccatgcccacctggtccagcaggggcagcagccaggtctctgatggcagccggtctggtcacaggggaggacagcactcccccgtctagcagccaggcagggcgatgtctgccatccgtggccatttgcaaagaccccaaagacccctgttctggttccctctctcccccatgaatatcctctcacacacatgtacatgcgaacacacacaacacgcacctcgtgagacccgggacctgccccggacccccagttcctgggttgaacgaccacatcatgccacggtgcttgctcaggggaagccacgctccctctgtggggcctgctggggcctgggagccccccactgagcccacaatgccacggaaatccttgttggctgcccccgagaggggccttcccagctgggaagagctcagagctgacagctgcctcctgccatgtcaaggccccccaaagagcctcaggggctctggggccctggagggtggggttggggggtgggactctcctcccccactcctgctccctctcccttttcactgttgctttctatgtatagctccctagacctttcacttttttaaaaacgcgttttgtgtagagaataaggaacgtggatctttttattttgcaatcctgggccagctagaagccaggagctgattgaccttttaacttttttcagtggccacattttggttatcgatgtacctagaagtatgtaaattagattaaatttctcttctggaaacaccctggggcaggcggccagcgtgtgtttttctgtcaagtggacaggctggcattggctggcagccggggctgggatcggggcctcctctgtccagagcgccatggaggccctgggttttccagttggccgccaagccgaccagacgcagctggggatgagcccaagttcccagctgttggctctttaggccatggctgggagggggtctctggctggctggcaaagcggctccagtgagcagatgaaccagggttctgggcagcctgtctgggaagggagccaggatcaagaagcagttgaggctagaggagcttatcaaaggcaggagctaccagcgagggtgtcagggacccgttgggagcatttgggtgggggccagtggggttgtagagagctggaactcacctgcttttaatacatgtgacttctagtgagacacatgcacccctgacccaaggaacatgcggggaaaagaggagccactggctcctttgcgatgttatttattttctcgctctgcaaatgtttattgaacatttctgagattttaaaaaaaaaaaaaaaaaaaaaaaaaaaaaaaaaaaaaaaaaaaaaaaaaaaaaaa

SEQ ID NO: 5128 - DNA, 540 bp, Rattus norvegicus
  ref <308>: DATABASE ACCESSION NUMBER: EMBL / AA874794
  ref <309>: DATABASE ENTRY DATE: 2000-03-03
tttttttttttttttttgcttttcagttgctttattgactttacattttttccatgcaaatgggcaacactgtactgttgacagaaactcacactgagtgggaaggcaatttccaattataagttggcaacacaagccccgcctggcacatggaaataacacaaggctcaccacaaacgggtcatttaaaggcatgtcaggaaaatgcaagggctaggaatacagcgggaatcacagtatgaatctcaggggaaatgaccgaagtcaaggcataaggcagaattcatcgtgatggtcgtggtgattagagagctcccccataagaatacgcagacaatttctcaactgcagctccctaagctttctccggatctctctcatctcctccatgaacatttccatatcatctccatctccacccaacccatcattcatctgcctgttgggaatggcccatcgaaagttaggggcaagtcggcgggcctgtcctctccggtgatgattgtggttgtggttgtggttgtggttgtggttatggtt

SEQ ID NO: 5129 - protein, 120 aa, Rattus norvegicus
  ref <308>: DATABASE ACCESSION NUMBER: SWISS-Prot / AAF75130
  ref <309>: DATABASE ENTRY DATE: 2003-02-01
MEQPLQNGQEDRPVGGGEGHQPAANNNNHNHNHNHNHNHNHNHHRRGQARRLAPNFRWAIPNRQMNDGLGGDGDDMEMFMEEMREIRRKLRELQLRNCLRILMGELSNHHDHHDEFCLMP

SEQ ID NO: 5130 - DNA, 891 bp, Homo sapiens
  ref <308>: DATABASE ACCESSION NUMBER: Refseq / NM_014380
  ref <309>: DATABASE ENTRY DATE: 2002-08-04
accccatcccccactcctataccggtcctccattttggtgcctgcaaagctctgggaaagaatcccgggaaacgaaaaatggtgggtttgggggaagggaggtaaggggagaaagctggagggaggggctttaattggaggccccgtagaggacgcgcggaacttctaaggtgggaaaaaacgaaattaaaaaatcctttgatatcagggctctgaatcctgctggtcagagcaccaagcattcagtctctctccttgcctttgtcttacttgtgttcaaagaaaaacaaccagaaaaaaaaaatctcatcatggcaaatattcaccaggaaaacgaagagatggagcagcctatgcagaatggagaggaagaccgccctttgggaggaggtgaaggccaccagcctgcaggaaatcgacggggacaggctcgccgacttgcccctaattttcgatgggccatacccaataggcagatcaatgatgggatgggtggagatggagatgatatggaaatattcatggaggagatgagagaaatcagaagaaaacttagggagctgcagttgaggaattgtctgcgtatccttatgggggagctctctaatcaccatgaccatcatgatgaattttgccttatgccttgactcctgccatttatcatgagattaatactgtgattcccgctgttttctttttccttgcattttcctaatatgcctttactgatccgtttgctgtgaaccctatgttatttccatgtgtcaagtgggtcttgtgttgccagcttctatttgaagattgcctttgcactcagtgtaagtttctgtcagcagtagtttcacccatttgcatggaaaaatttaaagctaataaagcaatttaaaaagc

SEQ ID NO: 5131 - protein, 104 aa, Homo sapiens; identical to SEQ ID NO: 2668
  ref <308>: DATABASE ACCESSION NUMBER: SWISS-Prot / P00001
  ref <309>: DATABASE ENTRY DATE: 2002-06-15

SEQ ID NO: 5132 - DNA, 540 bp, Rattus norvegicus; identical to SEQ ID NO: 5128
  ref <308>: DATABASE ACCESSION NUMBER: EMBL / AA874794
  ref <309>: DATABASE ENTRY DATE: 2000-03-03

SEQ ID NO: 5133 - protein, 120 aa, Rattus norvegicus; identical to SEQ ID NO: 5129
  ref <308>: DATABASE ACCESSION NUMBER: SWISS-Prot / AAF75130
  ref <309>: DATABASE ENTRY DATE: 2003-02-01

SEQ ID NO: 5134 - DNA, 891 bp, Homo sapiens; identical to SEQ ID NO: 5130
  ref <308>: DATABASE ACCESSION NUMBER: Refseq / NM_014380
  ref <309>: DATABASE ENTRY DATE: 2002-08-04

SEQ ID NO: 5135 - protein, 104 aa, Homo sapiens; identical to SEQ ID NO: 2668
  ref <308>: DATABASE ACCESSION NUMBER: SWISS-Prot / P00001
  ref <309>: DATABASE ENTRY DATE: 2002-06-15

SEQ ID NO: 5136 - DNA, 553 bp, Rattus norvegicus
  ref <308>: DATABASE ACCESSION NUMBER: EMBL / AA874802
  ref <309>: DATABASE ENTRY DATE: 2000-03-03
tttttttttttttttttccattccagttttattttaaagttttaaaattacaaccacagtaattttttcccggcactagttacacttgtttaaaaagtggggtagggtacccgagtttcctactttattaaaataagaggacaactgtacagagtttttctcccagctcccgaggtgagactaagtactagtcttagatatggatatatacatatacacacatgcacacaatcccgcttctctaaagctacctagcaaattcgaatccacgggagtatatcccacagtccactccctgcctctccccctcctcggctacttagaaaagactcaaaagcttggaggggttttaagtggcagaagagaaaaagaaatcaggtcccccaacttaccaccattggtagggcagcccagggagtttatcctcttctcccccacaaccccccttggccaggtagatggggtatcacctgctcatcaaaggttctgaaacgctcactagggacaagcaacctagttcctgggtcctcacctacccagaactttgccagtt

SEQ ID NO: 5137 - protein, 193 aa, Rattus norvegicus
  ref <308>: DATABASE ACCESSION NUMBER: SWISS-Prot / P43278
  ref <309>: DATABASE ENTRY DATE: 2001-10-16
TENSTSTPAAKPKRAKAAKKSTDHPKYSDMIVAAIQAEKNRAGSSRQSIQKYIKSHYKVGENADSQIKLSIKRLVTTGVLKQTKGVGASGSFRLAKGDEPKRSVAFKKTKKEVKKVATPKKAAKPKKAASKAPSKKPKATPVKKAKKKPAATPKKAKKPKIVKVKPVKASKPKKAKPVKPKAKSSAKRASKKK

SEQ ID NO: 5138 - DNA, 2258 bp, Homo sapiens
  ref <308>: DATABASE ACCESSION NUMBER: Refseq / NM_005318
  ref <309>: DATABASE ENTRY DATE: 2002-04-29
gccctgtcctcaccgcggtccgcccgccgccgctaaatacccggatgcgccgcccaagcgccagacgcggagctgggaaaagggaggcagaggaggcagaggcagaggcagaggcagagcccggtgccgagaccaagcgacagaccggcggggctgggcctcgcaaagccggctcggcgagctctcccgacacccgagccggggaggaaaagcagcgactcctcgctcgcatccccgggagccgcactccagactggcccggtagtcaggggctcaggagcagatcccgaggcaggctttgctcagcctccgacgagggctggccctttggaaggcgccttcaacagccggaccagacaggccaccatgaccgagaattccacgtccgcccctgcggccaagcccaagcgggccaaggcctccaagaagtccacagaccaccccaagtattcagacatgatcgtggctgccatccaggccgagaagaaccgcgctggctcctcgcgccagtccattcagaagtatatcaagagccactacaaggtgggtgagaacgctgactcgcagatcaagttgtccatcaagcgcctggtcaccaccggtgtcctcaagcagaccaaaggggtgggggcctcggggtccttccggctagccaagagcgacgaacccaagaagtcagtggccttcaagaagaccaagaaggaaatcaagaaggtagccacgccaaagaaggcatccaagcccaagaaggctgcctccaaagccccaaccaagaaacccaaagccaccccggtcaagaaggccaagaagaagctggctgccacgcccaagaaagccaaaaaacccaagactgtcaaagccaagccggtcaaggcatccaagcccaaaaaggccaaaccagtgaaacccaaagcaaagtccagtgccaagagggccggcaagaagaagtgacaatgaagtcttttcttgcggacactccctcctgtctcctattttctgtaaataattttctccttttttctctcttgatgctcaccaccaccttttgcccccttctgttctgactttataagagacaggatttggattcttcagaaattacagaataattcatttttccttaaccagttgtgcaaggacagcaacaaccaatctaatgatgagaatgtacttatattttgttttgctattaacctacttacggggttagggatttgcggggggggcttgtgtgttttgttggcttgtttgccatgaaggtagatgtgggtggggagaagacacaaggcagtttgttctggctagatgagagggaacccaggaattgtgaggttagcaggaatatctttagggtgagtgagttttccttgagttgggcacccgttgtgagagtttcagaacctttggccagcaggagagaggtggtagggagcagccagccggcaaaggaaggaggtggaaaaaaaccgccaccgggctgacttccacctcccagtggtgagcagtgggggcccaaacccagtttccttctcatttttgttagtttgccctttcggcctccctattttcttagggaaggggagtggggtccaagtgacagctggatgggagaagccatagtttctcccagtcagctaggatgtagccattgggggatctttgtggcttcagcaaattctcttgttaaaccggagtgaaaacttcaggggaagggtggggagtcagccaagtgcctcagtgtgccctgttgaaacttaggtttttccacgcaatcgatggattgtgtcctaggaagacttttcttttcctctggatttttgttcctcctgtacaagaggtgtctttgcttggtttggtggggctgcggccacttaaaacctcccgatctctttttgagtcctttattataagtagttgtagctgcgggagggggagggggagtgggcgggcagtggatagtaagacttactgcagtcgatttgggatttgctaagtagttttacagagctagatctgtgtgcatgtgtgtgtttgtgtatatatacatatctagggctagtacttagtttcacacccgggagctgggagaaaaaacctgtacagttgtctttctcttatttttaataaaatagaaaaatcgcgcacttgcgcgtcccccccccacccccttttttaaacaagtgttacttgtgccgggaaaattttgctgtctttgtaattttaaaactttaaaataaattggaaaagggagaaactga

SEQ ID NO: 5139 - protein, 193 aa, Homo sapiens
  ref <308>: DATABASE ACCESSION NUMBER: SWISS-Prot / P07305
  ref <309>: DATABASE ENTRY DATE: 2002-06-15
TENSTSAPAAKPKRAKASKKSTDHPKYSDMIVAAIQAEKNRAGSSRQSIQKYIKSHYKVGENADSQIKLSIKRLVTTGVLKQTKGVGASGSFRLAKSDEPKKSVAFKKTKKEIKKVATPKKASKPKKAASKAPTKKPKATPVKKAKKKLAATPKKAKKPKTVKAKPVKASKPKKAKPVKPKAKSSAKRAGKKK

SEQ ID NO: 5140 - DNA, 541 bp, Rattus norvegicus
  ref <308>: DATABASE ACCESSION NUMBER: EMBL / AA874803
  ref <309>: DATABASE ENTRY DATE: 2000-03-03
tttttttttttttttttggtaacttcaaatatatttttattactttctttttcatcttagaaagaacatgaaacccgcatgcagcactcatgaatctcagcacttacatagcagattcacagccgtccagtgcggcctctactgaggggcagcgtgtggcaggggcgggtactgaagcaatatgtacacaggagagggtgcagggtcatcctaactccaaaagaggacctcgctgtttgcatatgcaccgaagggggagtgcgctttctgtgggggcgaggggaacagagctacgtgggtctccccatgccagtaggatgtgtagctctggctggatgtcatgcattgagtcctgaattttccccttttcctccacacagttttctcacgctgccgggggcttctgatgcttcagaagcatcatctaccaaagcagtgagcctttcagaaaccctcagaggttgcgagagaaagacccagctcctttaaggatcgcttgcctggttgggataggggaatgagctggggtgggggtggggct

SEQ ID NO: 5141 - DNA, 541 bp, Rattus norvegicus; identical to SEQ ID NO: 5140
  ref <308>: DATABASE ACCESSION NUMBER: EMBL / AA874803
  ref <309>: DATABASE ENTRY DATE: 2000-03-03

SEQ ID NO: 5142 - DNA, 494 bp, Rattus norvegicus
  ref <308>: DATABASE ACCESSION NUMBER: EMBL / AA874827
  ref <309>: DATABASE ENTRY DATE: 2000-03-03
tttttttttttttttttgcagatgcaaaaccttggttcacgtttaatattttaaatatcctacagggtttctacagtatcaccattaaaatccatgaacagggaacattaaaacactgcaatgcaatataaacagaccaaagagaagtgcataccagtgcatattttcaacaatttaagaatgtatcaaagaagtaacaatgtgaataaaagaatgtttgcaataatttttaaattaaaagccctcctggtgttctcttcagggtcttaacggtgagaagacgatgaggttaccgccaaaggagaactgtcggcctcgatcttgctgtctggtgtcctctcgagtgcatgggctagtgcagctgaggtcaggtggaccaagaagatggcattcagaagtgagacttttatgtagcagtactgactgggacagctcagctccttcttgtaaggagtcacgctgtgagaaggcatttgtctcagggtgactcatca

SEQ ID NO: 5143 - DNA, 2640 bp, Homo sapiens
  ref <308>: DATABASE ACCESSION NUMBER: EMBL / D13633
  ref <309>: DATABASE ENTRY DATE: 2002-09-02
aaatagacactttggtttgaaagatgtaaacattccaaccttggaaggtagaattcttgttgaattagatgagacatctcaagagcttgttccagaaaagaccaatgttaagccaagggcaatgaaaactattctaggtgatcaacgaaaacagatgctccaaaaatacaaagaagaaaagcaacttcaaaaattgaaagagcagagagagaaagctaaacgaggaatatttaaagtgggtcgttatagacctgatatgccttgttttcttttatcaaaccagaatgctgtgaaagctgagccaaaaaaggctattccatcttctgtacggattacaaggtcaaaggccaaagaccaaatggagcagactaagattgataacgagagtgatgttcgagcaatccgacctggtccaagacaaacttctgaaaagaaagtgtcagacaaagagaaaaaagttgtgcagcctgtaatgcccacgtcgttgagaatgactcgatcagctactcaagcagcaaagcaggttcccagaacagtctcatctaccacagcaagaaagccagtcacaagagctgctaatgaaaacgaaccagaaggaaaggtgccaagtaaaggaagacctgccaaaaatgtagaaacaaaacccgacaagggtatttcttgtaaagtcgatagtgaagaaaatactttgaattcacaaactaatgcaacaagtggaatgaatccagatggagtcttatcaaaaatggaaaacttacctgagataaatactgcaaaaataaaagggaagaattccttcgcacctaaggattttatgtttcagccactggatggtctgaagacctatcaagtaacacctatgactcccagaagtgccaatgcttttttgacacccagttacacctggactcctttaaaaacagaagttgatgagtctcaagcaacaaaagaaattttggcacaaaaatgtaaaacttactctaccaagacaatacagcaagattcaaataaattgccatgtcctttgggtcctctaactgtttggcatgaagaacatgttttaaataaaaatgaagctactactaaaaatttaaatggccttccaataaaagaagtcccatcacttgaaagaaatgaaggtcgaattgctcagccccaccatggtgtgccatatttcagaaatatcctccagtcagaaactgagaaattaacttcacattgcttcgagtgggacaggaaacttgaattggacattccagatgatgctaaagatcttattcgcacagcagttggtcaaacaagactccttatgaaggaaaggtttaaacagtttgaaggactggttgatgattgtgaatataaacgaggtataaaggagactacctgtacagatctggatggattttgggatatggttagttttcagatagaagatgtaatccacaaattcaacaatctgatcaaacttgaggaatctgggtggcaagtcaataataatatgaatcataatatgaacaaaaatgtctttaggaaaaaagttgtctcaggtatagcaagtaaaccaaaacaggatgatgctggaagaattgcagcgagaaatcgcctagctgccataaaaaatgcaatgagagagagaattaggcaggaagaatgtgctgaaacagcagtttctgtgataccaaaggaagttgataaaatagtgttcgatgctggatttttcagagttgaaagtcctgttaaattattctcaggactttctgtctcttctgaaggcccttctcaaagacttggaacacctaagtctgtcaacaaagctgtatctcagagtagaaatgagatgggcattccacaacaaactacatcaccagaaaatgccggtcctcagaatacgaaaagtgaacatgtgaagaagactttgtttttgagtattcctgaaagcaggagcagcatagaagatgctcagtgtcctggattaccagatttaattgaagaaaaccatgttgtaaataagacagacttgaaggtggattgtttatccagtgagagaatgagtttgcctcttcttgctggtggagtagcagatgatattaatactaacaaaaaagaaggaatttcagatgttgtggaaggaatggaactgaattcttcaattacatcacaggatgttttgatgagtagccctgaaaaaaatacagcttcacaaaatagcatcttagaagaaggggaaactaaaatttctcagtcagaactatttgataataaaagtctcactactgaatgccaccttcttgattcaccaggtctaaactgcagtaatccatttactcagctggagaggagacatcaagaacatgccagacacatttcttttggtggtaacctgattactttttcacctctacaaccaggagaattttgaatttaaaaataaatccaaacattttccttcatattatcaatgcttatatattccttagactattgaaattttggagaaaatgtatttgtgttcacttctatagcatataatgttttaatattctgtgttcatcaaagtgtattttagatatactctttctcaagggaagtggggatattttgtacattttcaacacagaataaaaaatgtactgtgccttg

SEQ ID NO: 5144 - protein, 765 aa, Homo sapiens
  ref <308>: DATABASE ACCESSION NUMBER: SWISS-Prot / Q15398
  ref <309>: DATABASE ENTRY DATE: 2002-06-15
MKTILGDQRKQMLQKYKEEKQLQKLKEQREKAKRGIFKVGRYRPDMPCFLLSNQNAVKAEPKKAIPSSVRITRSKAKDQMEQTKIDNESDVRAIRPGPRQTSEKKVSDKEKKVVQPVMPTSLRMTRSATQAAKQVPRTVSSTTARKPVTRAANENEPEGKVPSKGRPAKNVETKPDKGISCKVDSEENTLNSQTNATSGMNPDGVLSKMENLPEINTAKIKGKNSFAPKDFMFQPLDGLKTYQVTPMTPRSANAFLTPSYTWTPLKTEVDESQATKEILAQKCKTYSTKTIQQDSNKLPCPLGPLTVWHEEHVLNKNEATTKNLNGLPIKEVPSLERNEGRIAQPHHGVPYFRNILQSETEKLTSHCFEWDRKLELDIPDDAKDLIRTAVGQTRLLMKERFKQFEGLVDDCEYKRGIKETTCTDLDGFWDMVSFQIEDVIHKFNNLIKLEESGWQVNNNMNHNMNKNVFRKKVVSGIASKPKQDDAGRIAARNRLAAIKNAMRERIRQEECAETAVSVIPKEVDKIVFDAGFFRVESPVKLFSGLSVSSEGPSQRLGTPKSVNKAVSQSRNEMGIPQQTTSPENAGPQNTKSEHVKKTLFLSIPESRSSIEDAQCPGLPDLIEENHVVNKTDLKVDCLSSERMSLPLLAGGVADDINTNKKEGISDVVEGMELNSSITSQDVLMSSPEKNTASQNSILEEGETKISQSELFDNKSLTTECHLLDSPGLNCSNPFTQLERRHQEHARHISFGGNLITFSPLQPGEF

SEQ ID NO: 5145 - DNA, 585 bp, Rattus norvegicus
  ref <308>: DATABASE ACCESSION NUMBER: EMBL / AA874873
  ref <309>: DATABASE ENTRY DATE: 2000-03-03
tttttttttttttttttcaattttgccaattttattgaaccaataaaattcctactaataacaatgaaataaattctgcaggtataaacgtgatacagtttaacaaaacccattgttctgtacctataaatagattttcaaaatgtcatagaaagtgcagttatgaattgttaacatgttaatacacagctcctttatttcaggtgtgtttgtcttgattcattaacagttccttctttatctgttcaaataatattacccatccctcgaaaaacaaaaggacagccgcagaacgaggaacaacgcttctttctggtttgcaggagctgagccaagcggcaaggccaggtttcccaggtgacctaacagggttctcatctcattcaccttgaccagactgtgcgtgtgcccgttcaattcatagaaagatgccgccaggtggcctgggatttgcttccaatgttcatcttgctttgggtaaaaagagtaaatgtgaagaggaaggaaaaatcctacttcctctctcgcagagacatccaaatgcaaaggaaatgtgtgcactagatgtagatcaccatccttggt

SEQ ID NO: 5146 - protein, 28 aa, Rattus norvegicus
  ref <308>: DATABASE ACCESSION NUMBER: Refseq / NP_084537
  ref <309>: DATABASE ENTRY DATE: 2002-09-19
MALPLGSAPANLKETFLIMEELDVAFNL

SEQ ID NO: 5147 - DNA, 189 bp, Homo sapiens
  ref <308>: DATABASE ACCESSION NUMBER: EMBL / AI497723
  ref <309>: DATABASE ENTRY DATE: 2000-03-03
ggtgttcagttttgccaattttattgaaccaataaaattcctactaataacaatgaaataaatttctgcaagtataaatgtgatacagtttaacaaaacccattgttctgtacctataaatagattttcaaaatgtcataaaaagtgcagttatgaattgttaacatgttaataccacagttcctttat

SEQ ID NO: 5148 - DNA, 585 bp, Rattus norvegicus; identical to SEQ ID NO: 5145
  ref <308>: DATABASE ACCESSION NUMBER: EMBL / AA874873
  ref <309>: DATABASE ENTRY DATE: 2000-03-03

SEQ ID NO: 5149 - DNA, 189 bp, Homo sapiens; identical to SEQ ID NO: 5147
  ref <308>: DATABASE ACCESSION NUMBER: EMBL / AI497723
  ref <309>: DATABASE ENTRY DATE: 2000-03-03

SEQ ID NO: 5150 - DNA, 585 bp, Rattus norvegicus; identical to SEQ ID NO: 5145
  ref <308>: DATABASE ACCESSION NUMBER: EMBL / AA874873
  ref <309>: DATABASE ENTRY DATE: 2000-03-03

SEQ ID NO: 5151 - protein, 28 aa, Rattus norvegicus
  ref <308>: DATABASE ACCESSION NUMBER: Refseq / NP_084537
  ref <309>: DATABASE ENTRY DATE: 2002-09-19
MALPLGSAPANLKETFLIMEELDVAFNL

SEQ ID NO: 5152 - DNA, 189 bp, Homo sapiens; identical to SEQ ID NO: 5147
  ref <308>: DATABASE ACCESSION NUMBER: EMBL / AI497723
  ref <309>: DATABASE ENTRY DATE: 2000-03-03

SEQ ID NO: 5153 - DNA, 585 bp, Rattus norvegicus; identical to SEQ ID NO: 5145
  ref <308>: DATABASE ACCESSION NUMBER: EMBL / AA874873
  ref <309>: DATABASE ENTRY DATE: 2000-03-03

SEQ ID NO: 5154 - DNA, 189 bp, Homo sapiens; identical to SEQ ID NO: 5147
  ref <308>: DATABASE ACCESSION NUMBER: EMBL / AI497723
  ref <309>: DATABASE ENTRY DATE: 2000-03-03

SEQ ID NO: 5155 - DNA, 530 bp, Rattus norvegicus
  ref <308>: DATABASE ACCESSION NUMBER: EMBL / AA874874
  ref <309>: DATABASE ENTRY DATE: 2000-03-03
tttttttttttttttttcacacaaacacagagtgtatttttattacgtaaaacgttgcattggtgagcaacaattatttgtgtggagagctcagaaaggcacggcgaccagttgcctcattcatgattgcagccacgattttgcaccttccttctagtgggtcctgaagtctaagtggcagttaagcttgtaaatcctgtcggtttctattcaatcacaggaaagagtgcaggatgggcagtactctcttcagaatttacatctttagaacagttcgaatgctgtttcccgagtgcatcagatcaaaggctttgttaatctggtcgaaggacagattgccagtcacaaattcgtcaacttttacctttttggacatatattcagacaccagcttcgggacactctccacactcttccagcctccaaaggcagtgcctttccacgtgcgtcctgtcaccagttggaacggacgattggagatttcttcacctgaagcggccacaccaacatcagaatggtaaccctcgtgc

SEQ ID NO: 5156 - protein, 373 aa, Rattus norvegicus
  ref <308>: DATABASE ACCESSION NUMBER: SWISS-Prot / AAC52763
  ref <309>: DATABASE ENTRY DATE: 2000-05-30
ANQVIRCKAAVAWEAGKPLSIEEIEVAPPKAHEVRIKILATAVCHTDAYTLSGRDPEGCFPVILGHEGAGIVESVGEGVTKLKAGDTVIPLYIPQCGECKFCLNPKTNLCQKIRVTQGKGLMPDGTSRFTCKGKSVFHFMGTSTFSEYTVVADISVAKIDPSAPLDKVCLLGCGISTGYGAAVNTAKVEPGSTCAVFGLGGVGLAVIMGCKVAGASRIIGIDINKDKFAKAKEFGASECISPQDFSKSIQEVLVEMTDGGVDYSFECIGNVKVMRSALEAAHKGWGVSVVVGVAASGEEISTRPFQLVTGRTWKGTAFGGWKSVESVPKLVSEYMSKKIKVDEFVTGNLSFDQINQAFDLMHSGDSIRTVLKM

SEQ ID NO: 5157 - DNA, 1613 bp, Homo sapiens
  ref <308>: DATABASE ACCESSION NUMBER: EMBL / M29872
  ref <309>: DATABASE ENTRY DATE: 2000-03-04
gggcatgggcgcggccaccccggatgtcagccccccgcgccgaccagaatccgtgaacatggcgaacgaggttatcaagtgcaaggctgcagttgcttgggaggctggaaagcctctctccatagaggagatagaggtggcacccccaaaggctcatgaagttcgaatcaagatcattgccactgcggtttgccacaccgatgcctataccctgagtggagctgatcctgagggttgttttccagtgatcttgggacatgaaggtgctggaattgtggaaagtgttggtgagggagttactaagctgaaggcgggtgacactgtcatcccactttacatcccacagtgtggagaatgcaaattttgtctaaatcctaaaactaacctttgccagaagataagagtcactcaagggaaaggattaatgccagatggtaccagcagatttacttgcaaaggaaagacaattttgcattacatgggaaccagcacattttctgaatacacagttgtggctgatatctctgttgctaaaatagatcctttagcacctttgtataaagtctgccttctaggttgtggcatttcaaccggttatggtgctgctgtgaacactgccaagttggagcctggctctgtttgtgccgtctttggtctgggaggagtcggattggcagttatcatgggctgtaaagtggctggtgcttcccggatcattggtgtggacatcaataaagataaatttgcaagggccaaagagtttggagccactgaatgtattaaccctcaggatttaagtaaacccatccaggaagtgctcattgagatgaccgatggaggagtggactattcctttgaatgtattggtaatgtgaaggtcatgagagcagcacttgaggcatgtcacaagggctggggcgtcagcgtcgtggttggagtagctgcttcaggtgaagaaattgccactcgtccattccagctggtaacaggtcgcacatggaaaggcactgcctttggaggatggaagagtgtagaaagtgtcccaaagttggtgtctgaatatatgtccaaaaagataaaagttgatgaatttgtgactcacaatctgtcttttgatgaaatcaacaaagcctttgaactgatgcattctggaaagagcattcgaactgttgtaaagatttaattcaaaagagaaaaataatgtccatcctgtcgtgatgtgataggagcagcttaacaggcagggagaagcgcctccaacctcacagcctcgtagagcttcacagctactccagaaaatagggttatgtgtgtcattcatgaatctctataatcaaggacaaggataattcagtcatgaacctgttttctggatgctcctccacataaataattgctagttataaggatatttaacataataaaagtaattctacattgtgtgaattgtcttgtttatgctgtcatcattgtcacggtttgtctgcccattatcttcattctgcaagggaaagggaaaggaagcagggcagtggtgggtgtctgaaacctcagaaacataacgttgaacttttaagggtctcagtccccgttgattaaagaacagatccccg

SEQ ID NO: 5158 - protein, 373 aa, Homo sapiens
  ref <308>: DATABASE ACCESSION NUMBER: SWISS-Prot / P11766
  ref <309>: DATABASE ENTRY DATE: 2002-06-15
ANEVIKCKAAVAWEAGKPLSIEEIEVAPPKAHEVRIKIIATAVCHTDAYTLSGADPEGCFPVILGHEGAGIVESVGEGVTKLKAGDTVIPLYIPQCGECKFCLNPKTNLCQKIRVTQGKGLMPDGTSRFTCKGKTILHYMGTSTFSEYTVVADISVAKIDPLAPLDKVCLLGCGISTGYGAAVNTAKLEPGSVCAVFGLGGVGLAVIMGCKVAGASRIIGVDINKDKFARAKEFGATECINPQDFSKPIQEVLIEMTDGGVDYSFECIGNVKVMRAALEACHKGWGVSVVVGVAASGEEIATRPFQLVTGRTWKGTAFGGWKSVESVPKLVSEYMSKKIKVDEFVTHNLSFDEINKAFELMHSGKSIRTVVKI

SEQ ID NO: 5159 - DNA, 530 bp, Rattus norvegicus; identical to SEQ ID NO: 5155
  ref <308>: DATABASE ACCESSION NUMBER: EMBL / AA874874
  ref <309>: DATABASE ENTRY DATE: 2000-03-03

SEQ ID NO: 5160 - protein, 373 aa, Rattus norvegicus; identical to SEQ ID NO: 5156
  ref <308>: DATABASE ACCESSION NUMBER: SWISS-Prot / AAC52763
  ref <309>: DATABASE ENTRY DATE: 2000-05-30

SEQ ID NO: 5161 - DNA, 1613 bp, Homo sapiens; identical to SEQ ID NO: 5157
  ref <308>: DATABASE ACCESSION NUMBER: EMBL / M29872
  ref <309>: DATABASE ENTRY DATE: 2000-03-04

SEQ ID NO: 5162 - protein, 373 aa, Homo sapiens; identical to SEQ ID NO: 5158
  ref <308>: DATABASE ACCESSION NUMBER: SWISS-Prot / P11766
  ref <309>: DATABASE ENTRY DATE: 2002-06-15

SEQ ID NO: 5163 - DNA, 437 bp, Rattus norvegicus
  ref <308>: DATABASE ACCESSION NUMBER: EMBL / AA874897
  ref <309>: DATABASE ENTRY DATE: 2000-03-03
tttttttttttttttttggagagagcacctttatttgaaataacatcacaggtctctgatcacctcttggagacagagaatagctcagggagagcctacagggcccaggggatcaggttccagccttgcataagcaccaagaactttagggacggtcactcctgccaggcagggagacatacccaagggtggtcctttctatcctctgagtgctggggccaaggccaggttagaggagcaccaggttatgtgggtcataagagaccaagcaccagtcagtgaggtcttcagggctgtggaatagttcttctgtggaacctgctatgaccccagcctcaaggtgtgtggacacggccgctagcaagcctagggtataggctgtttgtaaaagggacacggatttgtgtcatccatcagatagcagggctctagagata

SEQ ID NO: 5164 - protein, 440 aa, Rattus norvegicus
  ref <308>: DATABASE ACCESSION NUMBER: Refseq / NP_077794
  ref <309>: DATABASE ENTRY DATE: 2002-03-08
MKLVLLLPWACCCLCGSALATGFLYPFPAAALQQHGYPEQGAGSPGNGYSSRRHWCHHTVTRTVSCQVQNGSETVVQRVYQSCRWPGPCANLVSYRTLIRPTYRVSYRTVTALEWRCCPGFTGSNCEEECMNCTRLSDMSERLTTLEAKVLLLEAAEQPSGPDNDLPPPQSTPPTWNEDFLPDAIPIAHPGPRRRRPTGPAGPPGQMGPPGPAGPPGSKGEQGQTGEKGPVGPPGLLGPPGPRGLPGEMGRPGPPGPPGPAGSPGLLPNTPQGVLYSLQTPTDKENGDSQLNPAVVDTVLTGIPGPRGPPGPPGPPGPHGPPGPPGAPGSQGLVDERVVARPSGEPSVKEEEDKASAAEGEGVQQLREALKILAERVLILEHMIGVHDPLASPEGGSGQDAALRANLKMKRGGPRPDGILAALLGPDPAQKSADQAGDRK

SEQ ID NO: 5165 - DNA, 542 bp, Rattus norvegicus
  ref <308>: DATABASE ACCESSION NUMBER: EMBL / AA874924
  ref <309>: DATABASE ENTRY DATE: 2000-03-03
tttttttttttttttttacagggcagcttttatttttattattttatttttttacatcccaggtgacttcaaagaagtgttgctaaggggcatataagaggtaactttgatgagatgcaattccataaggagagctgttatagatggggcctcgggactgcttagagtcctcagaaatagacaattttggaggttttattacattcattgggtctgggattatctgtccctagagccaagatcggcagagtgacccacgagaaacttctttgtagttcctctttgtcatcggtggttcttgcagcgaggtgaccttggggttccctgaggctgagtttcctgtgcattttcttgcaggccatgctcaggagcaggtgacagtggcattagcacaagccacagtagcatggttttcattgtacagttccagcaagagctggtattctccctgtggaacatcaagcccagggttattgacagggccggcatagtatatctgctctcctttccttcttccacagaaagagaacttgggctggtcc

SEQ ID NO: 5166 - protein, 162 aa, Rattus norvegicus
  ref <308>: DATABASE ACCESSION NUMBER: Refseq / NP_034875
  ref <309>: DATABASE ENTRY DATE: 2002-01-07
MNGVAAALLVWILTSPSSSDHGSENGWPKHTACNSGGLEVVYQSCDPLQDFGLSIDQCSKQIQSNLNIRFGIILRQDIRKLFLDITLMAKGSSILNYSYPLCEEDQPKFSFCGRRKGEQIYYAGPVNNPGLDVPQGEYQLLLELYNENRATVACANATVTSS

SEQ ID NO: 5167 - DNA, 725 bp, Homo sapiens
  ref <308>: DATABASE ACCESSION NUMBER: EMBL / AB020499
  ref <309>: DATABASE ENTRY DATE: 1999-04-01
gttgcgatccattacaagattttggcttttctgttgaaaagtgttccaagcaattaaaatcaaatatcaacattagatttggaattattctgagagaggacatcaaagagctttttcttgacctagctctcatgtctcaaggctcatctgttttgaatttctcctatcccatctgtgaggcggctctgcccaagttttctttctgtggaagaaggaaaggagagcagatttactatgctgggcctgtcaataatcctgaatttactattcctcagggagaataccaggttttgctggaactgtacactgaaaaacggtccaccgtggcctgtgccaatgctactatcatgtgctcctgactgtggcctgtagcaaaaatcacagccagctgcatctcgtgggacctccaagctcctctgactgaacctactgtgggaggagaagcagctgatgacagagagaggctctacaaagaagcgcccccaaagagtgcagctgctaattttagtcccaggaccagacatccccagactccacagatgtaatgaagtccccgaatgtatctgtttctaaggagcctcttggcagtccttaagcagtcttgagggtccatcctttttctctaattggtcgcctcccaccagactcacctgcttttcaactttttaggagtgcttcctcacagttaccaagaataaagaaagctggccaccaaaaaaaaaaaa

SEQ ID NO: 5168 - protein, 162 aa, Homo sapiens
  ref <308>: DATABASE ACCESSION NUMBER: SWISS-Prot / O95711
  ref <309>: DATABASE ENTRY DATE: 2002-06-15
MKGFTATLFLWTLIFPSCSGGGGGKAWPTHVVCSDSGLEVLYQSCDPLQDFGFSVEKCSKQLKSNINIRFGIILREDIKELFLDLALMSQGSSVLNFSYPICEAALPKFSFCGRRKGEQIYYAGPVNNPEFTIPQGEYQVLLELYTEKRSTVACANATIMCS

SEQ ID NO: 5169 - DNA, 494 bp, Rattus norvegicus
  ref <308>: DATABASE ACCESSION NUMBER: EMBL / AA874926
  ref <309>: DATABASE ENTRY DATE: 2000-03-03
tttttttttttttttttaaattagcttctcaatcatcatctggaaagaaaacattctgagcaacatcattaaaaacagctctgataaagcacggtcactactacgtatcataaagcaggtacaagctattttacatccacagaggtatgatacagtactgtcctacatctataatactagaggatacaatttaaaaggcattatttgagacttgattctacttttccagcagagggcccaaaggatggtgtgtgacacagctttgtaaagaaacatactctagacaggatttcctttcactagtggcacagttctaaggattcattctctccatgaatgtcagctaaaaccgttattaaaaaaatgaaatatccctaaaacaaaaccgtataaccaccggattcacatgaagatgacctagtggagacaagctggacctcaccttaccaacaagctatcaaatctgttacgtttaaacagtgagacctccaagg

SEQ ID NO: 5170 - DNA, 2307 bp, Homo sapiens
  misc_feature (1)..(2307): n=a, c, g or t
  ref <308>: DATABASE ACCESSION NUMBER: EMBL / AJ006470
  ref <309>: DATABASE ENTRY DATE: 2000-03-23
ggcacgaggcgatggagccggggcgccggggggccgcggcgctgctagcgctgctgtgcgtggcctgcgcgctgcgcgccgggcgcgcccaatacgaacgctacagcttccgcagcttcccacgggacgagctgatgccgctcgagtcggcctaccggcacgcgctggacaagtacagcggcgagcactgggccgagagcgtgggctacctggagatcagcctgcggctgcaccgcttgctgcgcgacagcgaggccttctgccaccgcaactgcagcgccgcgccgcagcccgagcccgccgccggcctcgccagctatcccgagctgcgcctcttcgggggcctgctgcgccgcgcgcactgcctcaagcgctgcaagcagggcctgccagccttccgccagtcccagcccagccgcgaggtgctggcggacttccagcgccgcgagccctacaagttcctgcagttcgcttacttcaaggcaaataatctccccaaagccatcgccgctgctcacacctttctactgaagcatcctgatgacgaaatgatgaagaggaacatggcatattataagagcctgcctggtgccgaggactacattaaagacctggaaaccaagtcatatgaaagcctgttcatccgagcagtgcgggcatacaacggtgagaactggagaacatccatcacagacatggagctggcccttcccgacttcttcaaagccttttacgagtgtctcgcagcctgcgagggttccagggagatcaaggacttcaaggatttctacctttccatagcagatcattatgtagaagttctggaatgcaaaatacagtgtgaagagaacctcaccccagttataggaggctatccggttgagaaatttgtggctaccatgtatcattacttgcagtttgcctattataagttgaacgacctgaagaatgcagccccctgtgcagtcagctatctgctctttgatcagaatgacaaggtcatgcagcagaacctggtgtattaccagtaccacagggacacttggggcctctcggatgagcacttccagcccagacctgaagcagttcagttctttaatgtgaccacactccagaaggagctgtatgactttgctaaggaaaatataatggatgatgatgagggagaagttgtggaatatgtggatgacctcttggaactggaggagaccagctagcccacagcaaccaaagagacttcctcttggcgttcaggaaacacagattctttgtccttttcccaacagcccaggctgttgatacctcagagccttctctttactctccaaagtgaaagggaagcccccgtctctctaactgcatgtcatcaggggtgagcctgcctttcctatcttcacacctgccacctcatgttcacacctatctttctcaccttttttttgagatggagtctcgctctcttgcccaggctggagtgcaatggcacgttctcagctcactgcaacctccgcctcttgggttcaagcaattctgctgcatcagcctcccgagtacctgggattacaggcatgtgccaccacgcccggctaattttgtatttttaagtaagagacggggttttgccatgttggccaggctggtctcgaactcttgacttcagatgatccatctgccttgggcctcccacagtgctgggattacaggcgtgagccaccatgcccggcctctttctcacctttacacctgtcttcttatcctcacatctgttttcacaccttcatccctgtcttcctcatgttcacacttgtcttccccatgttcatagctgcctttcttaccattttggtttgaagggcagtcttctctggcttgtttttttgtttttcccagaaaatcagtattattttttaaataagaaaaacattcctagaagatgataattgtgaaaacctcctttggcttatttgcttttccagattttagtctcctttctccccatccgggaaagatkgtggaagacataggctaaatttctccagcctcacaatggtcttcacttggtctgacttgtaccaattctagcacccactgaaaaacaagttgagtagagagtgtagagtgcagaaatgtggcttttgccccactttgcatctccaaaattacaacggttggccgatcnaaattgaggacaatgnttagttataagtctccgagttggaaaaggaagaaagccagagctgtctagtttcattcattctttcagtaaatatttattgagtaaaaaaaaaaaaaaaaaaaaaaaaaaaa

SEQ ID NO: 5171 - protein, 401 aa, Homo sapiens
  ref <308>: DATABASE ACCESSION NUMBER: SWISS-Prot / O75718
  ref <309>: DATABASE ENTRY DATE: 2002-06-15
MEPGRRGAAALLALLCVACALRAGRAQYERYSFRSFPRDELMPLESAYRHALDKYSGEHWAESVGYLEISLRLHRLLRDSEAFCHRNCSAAPQPEPAAGLASYPELRLFGGLLRRAHCLKRCKQGLPAFRQSQPSREVLADFQRREPYKFLQFAYFKANNLPKAIAAAHTFLLKHPDDEMMKRNMAYYKSLPGAEDYIKDLETKSYESLFIRAVRAYNGENWRTSITDMELALPDFFKAFYECLAACEGSREIKDFKDFYLSIADHYVEVLECKIQCEENLTPVIGGYPVEKFVATMYHYLQFAYYKLNDLKNAAPCAVSYLLFDQNDKVMQQNLVYYQYHRDTWGLSDEHFQPRPEAVQFFNVTTLQKELYDFAKENIMDDDEGEVVEYVDDLLELEETS

SEQ ID NO: 5172 - DNA, 350 bp, Rattus norvegicus
  ref <308>: DATABASE ACCESSION NUMBER: EMBL / AA874934
  ref <309>: DATABASE ENTRY DATE: 2000-03-03
tttttttttttttttttaaggaaagaaagagccaactctttaatacagagccttcattaaaatgtcccagccctgcgcagctgctcttctaaaggggcggccaccaagggtctctaccttcctaagatgtagcagacccttttggccactcattaaataattgttcccaggatgggggtgggtgtaagggcagggcccctgccaccttcctcggggacatttgtgcatgtttacgccttttctgattgtgtcagtggccgaagcatggcaactgggcatcaataaacatctcttgaggaagtgggctcagtgtgctggctcaggaggagcactgggcggggtgcctggca

SEQ ID NO: 5173 - protein, 405 aa, Rattus norvegicus
  ref <308>: DATABASE ACCESSION NUMBER: SWISS-Prot / BAA23430
  ref <309>: DATABASE ENTRY DATE: 2003-02-01
MRGRRGDRMTINIQEHMAINVCPGPIRPIRQISDYFPRRGPGPEGGGGGGGTGCGEAPAHLAPLALAPPAALLGATTPDDGAEVDSYDSDDTTALGTLEFDLLYDQASCMLHCRILRAKGLKPMDFNGLADPYVKLHLLPGACKANKLKTKTQRNTLNPVWNEELTYSGITDDDITHKVLRISVCDEDKLSHNEFIGEIRVPLRRLKPSQKKHFNICLERQVPLPSPSSMSAALRGISCYLKELEQAEQGPGLLEERGPILLSLSYSSRRHGLLVGIVRCAHLAAMDVNGYSDPYVKTYLRPDVDKKSKHKTCVKKKTLNPEFNEEFFYEIELSTLATKTLEVTVWDYDIGKSNDFIGGVSLGPGARGEAQKHWNDCLHQPDTALERWHTLTSELPPAAGAYPLA

SEQ ID NO: 5174 - DNA, 1621 bp, Homo sapiens
  ref <308>: DATABASE ACCESSION NUMBER: Refseq / NM_003586
  ref <309>: DATABASE ENTRY DATE: 2002-05-16
tcctgacggcgctggagctgaggggcagtgcggatgccccaggaaggctcctaggaagaggggacccacggtgacttcctaaggaagcgcggttcccagccaggggtgctgcatgaggggccgcaggggcgatcgcatgaccatcaacatccaggagcacatggccatcaacgtgtgccccgggcccatccggcccatccgccagatctctgactacttcccccggggaccaggacctgaagggggcggcgggagcggcggggaggcccccgcccatctggtccccctggctctggccccccctgcagccctccttggggccaccacgcctgaggatggtgcggaggtggacagctatgactcggatgatgccaccgccctaggcaagctggagtttgaccttctctacgaccgggcctcctgcactctgcacgtatgcatcctcagggccaagggcctcaagcccatggatttcaatggcctcgccgacccctacgtcaagctgcacttgctgcctggagcctgtaaggccaataagctaaaaacgaagactcagaggaacacactgaatcccgtgtggaatgaggacctgacttacagcgggatcacagatgacgacatcacgcacaaggtgctcaggatcgccgtctgtgatgaggacaagctgagtcacaatgagtttattggggagatccgcgtgcccctccgccgcctcaagccttcgcagaagaagcattttaacatctgcctcgagcgccaagtcccgctggcgtccccctcttccatgtcagcggcgctgaggggcatctcctgttatctgaaggacttggagcaggcggagcaggggcaggggctgctggaggagcgtggccgcatcctgctgagtctcagctacagctcgcggcgccggggactgctggtaggcatcttgcgctgcgcccatctggctgccatggacgtcaacggttactcggacccctacgtcaagacgtacctgaggcccgatgtggacaagaaatccaagcataagacgtgtgtgaagaagaagactctcaacccagaatttaacgaggagtttttctacgagatagagctctccactctggccaccaagaccctggaagtcaccgtctgggactatgacattggcaaatccaatgacttcattggtggcgtgtccctggggccaggtgcccgaggcgaggctcggaagcactggagtgactgcctgcagcagcgggacgcagccctggagcgctggcacaccctgaccagtgagctgccccctgcggccggggctctgtcctcagcctgagtggacagcagtgtcccggcacaggcccatcgagccgggtccagtacccaaccttcgcacgagtgtgttgcacgtttacacaggtgggctgccccaccctgcactacctattttgtgagtctcgtgacccgggtctgtctgctcatgaggggctgcggagttctatattcacatatgcaaacctcctgcctgactcgctagtccctgcaaatatgcaaacccccctactactgcacacccgggcagtgctcagagccgcccaggccccgcgctcctcactcctgcctctccacgctgccccgtccc

SEQ ID NO: 5175 - protein, 400 aa, Homo sapiens
  ref <308>: DATABASE ACCESSION NUMBER: Refseq / NP_003577
  ref <309>: DATABASE ENTRY DATE: 2002-05-16
MRGRRGDRMTINIQEHMAINVCPGPIRPIRQISDYFPRGPGPEGGGGSGGEAPAHLVPLALAPPAALLGATTPEDGAEVDSYDSDDATALGKLEFDLLYDRASCTLHVCILRAKGLKPMDFNGLADPYVKLHLLPGACKANKLKTKTQRNTLNPVWNEDLTYSGITDDDITHKVLRIAVCDEDKLSHNEFIGEIRVPLRRLKPSQKKHFNICLERQVPLASPSSMSAALRGISCYLKDLEQAEQGQGLLEERGRILLSLSYSSRRRGLLVGILRCAHLAAMDVNGYSDPYVKTYLRPDVDKKSKHKTCVKKKTLNPEFNEEFFYEIELSTLATKTLEVTVWDYDIGKSNDFIGGVSLGPGARGEARKHWSDCLQQRDAALERWHTLTSELPPAAGALSSA

SEQ ID NO: 5176 - DNA, 536 bp, Rattus norvegicus
  ref <308>: DATABASE ACCESSION NUMBER: EMBL / AA874982
  ref <309>: DATABASE ENTRY DATE: 2000-03-03
tttttttttttttttttgttgaaaataaaaataaagcggactttattcagaagataaaggtggtggtatcagttttggttaataaagttgggctcaagtgttttaacaggtctttaatgccttcacagactggcatgccaatggcattctgaatgccaattacagatcgatgctatcaaagctgatggaatttggacttcttctaaagtcagactacacacatcttaaaatatgagtaaggagactgcttggttctgaacattagaacaccatactgagcaagtccctccacttctccagaccctaaggcaggagtacagttgcttctgacagctacatcttcaacatatcaacagagagggaggactggggtaactgagaaaaaaatgaaaagcaaaattaaccaatgtaattggtgcaggcagctgccacttgtggcaaacccaagtctatctgatgcccattttcttcacatttgcactgacatcttccaagcagacggtaactacattcttgaaggaatgtgccaagactca

SEQ ID NO: 5177 - protein, 876 aa, Rattus norvegicus
  ref <308>: DATABASE ACCESSION NUMBER: SWISS-Prot / BAA11034
  ref <309>: DATABASE ENTRY DATE: 2002-06-15
MELITILEKTVSPDRLELEAAQKFLERAAVENLPTFLVELSRVLANPGNSQVARVAAGLQIKNSLTSKDPDIKAQYQQRWLAIDANARREVKNYVLQTLGTETYRPSSASQCVAGIACAEIPVSQWPELIPQLVANVTNPNSTEHMKESTLEAIGYICQDIDPEQLQDKSNEILTAIIQGMRKEEPSNNVKLAATNALLNSLEFTKANFDKESERHFIMQVVCEATQCPDTRVRVAALQNLVKIMSLYYQYMETYMGPALFAITIEAMKSDIDEVALQGIEFWSNVCDEEMDLAIEASEAAEQGRPPEHTSKFYAKGALQYLVPILTQTLTKQDENDDDDDWNPCKAAGVCLMLLSTCCEDDIVPHVLPFIKEHIKNPDWRYRDAAVVAFGSILEGPEPNQLKPLVIQAMPTLIELMKDPSVVVRDTTAWTVGRICELLPEAAINDVYLAPLLQCLIEGLSAEPRVASNVCWAFSSLAEAAYEAADVADDQEEPATYCLSSSFELIVQKLLETTDRPDGHQNNLRSSAYESLMEIVKNSAKDCYPAVQKTTLVIMERLQQVLQMESHIQSTSDRIQFNDLQSLLCATLQNVLRKVQHQDALQISDVVMASLLRMFQSTAGSGGVQEDALMAVSTLVEVLGGEFLKYMEAFKPFLGIGLKNYAEYQVCLAAVGLVGDLCRALQSNILPFCDEVMQLLLENLGNENVHRSVKPQILSVFGDIALAIGGEFKKYLEVVLNTLQQASQAQVDKSDFDMVDYLNELRESCLEAYTGIVQGLKGDQENVHPDVMLVQPRVEFILSFIDHIAGDEDHTDGVVACAAGLIGDLCTAFGKDVLKLVEARPMIHELLTEGRRSKTNKAKTLATWATKELRKLKNQA

SEQ ID NO: 5178 - DNA, 438 bp, Rattus norvegicus
  ref <308>: DATABASE ACCESSION NUMBER: EMBL / AA874993
  ref <309>: DATABASE ENTRY DATE: 2000-03-03
cggccgcctcactggtccttgtcgccctcgtccaccgccgccgcccgccaccgcctcgttccctttcgctggcgccaccgccgggtctcatgcgggacccgcgcttctcctcaggaaactgaggccgggaggccgggcgcctgggcaaccttgaagtcggcgctgaacggctgctgccgcgatctgtccacggtggggggcgagggtggcgagcaactccgaagagaagcagaaggaggcgccaccgtccgcgactggtcgaacgaggagagtcgtgatgaggcggtgaacagctgcgtggcccggtgcgcgagcgaacgcaggaggggcggcgaggtacttgcgaagacgaaaggccctgtcgtctcctgtagtcacccaaagaggagcgccaccatcttgggagaaacacggatctcgccctcgtgccgaattctt

SEQ ID NO: 5179 - DNA, 542 bp, Rattus norvegicus
  misc_feature (1)..(542): n=a, c, g or t
  ref <308>: DATABASE ACCESSION NUMBER: EMBL / AA874995
  ref <309>: DATABASE ENTRY DATE: 2000-03-03
tttttttttttttttttcagagtgctatacccaatcatgtaggtgtaatttatttatgttggaaatacatagatcacaattcttaaggaaagagatgtgccccccaaagtttgcatttgcacacatcagctacgctgagggcattgtcctcgggtttaacattaagacccagtgggaaagcttatggtcttatacactgggtattagccatgctaggtatggccatctgtcagacaaaggggcctagtctcctcccacaagtcatgtcctaagtcatctgcgtattatggcaacaggagcagcagggctggctanagagaggtatggtttggccagttagtattgacatcttagaatcctgggggtacatgtgttgtaagaagccaccttcagaaggctgacggtactatactggagaagctgtggaacaggctgcactgaccagggcaggctttcttagagaagcctcagctattggtttcatacagtttccatttccaaggaggcaagggcctgtttggtatgcanagagactaacaagg

SEQ ID NO: 5180 - protein, 216 aa, Rattus norvegicus
  ref <308>: DATABASE ACCESSION NUMBER: Refseq / NP_077792
  ref <309>: DATABASE ENTRY DATE: 2002-09-19
MDDSEKDFNLKVVLVSFKQCLTDKGEVLLDHYIAGWKGLVRFLNSLGAVFSFISKDVVAKLQIMERLRSSPQSEHYTSLQSMVAYEVSNKLVDMDHRSHPRHPHSGCRTVLRLHRALHWLQLFLDGLRTSSEDARTSTLCSEAYNATLANYHSWIVRQAVTVAFCALPSRKVFLEAMNMESTEQAVEMLGEALPFIEHVYDISQKLYAEHSLLDLP

SEQ ID NO: 5181 - DNA, 412 bp, Rattus norvegicus
  ref <308>: DATABASE ACCESSION NUMBER: EMBL / AA875004
  ref <309>: DATABASE ENTRY DATE: 2000-03-03
ttttttttttaatgattacaaaaaataaatatgtgtttatttttaagaaaaagaaaagcactggccaagaacaaacactgggataaagaagtcaccgtgtcctgccaaaacaacagacacataggacacagccaagattaggtgtctagcccaaaggtcagagtgacagcaagttgctgtccgtgtctcttagcaagactccattagagctgggtgcgaggtgctgctacaggcacctcagcatcgcacggcctcaggaggtcacatgtcctcaacactccacttgtaggcaagctcctccacagctttcttgctggcaagcctggcaaagcgcttctgttcaaagccattggatctgtccactccatcccagcgataccccggccaaatgttgaatctattgggaggagga

SEQ ID NO: 5182 - DNA, 2225 bp, Homo sapiens
  ref <308>: DATABASE ACCESSION NUMBER: EMBL / BC006350
  ref <309>: DATABASE ENTRY DATE: 2001-07-13
ggcacgaggcgtctctctgcccccgccgctgccatggcggcagctccgccgctttccaaggccgagtatctgaagcgttacttgtccggggcagatgccggcgtcgaccggggatctgagtccggtcgcaagcgtcgcaaaaagcggccgaagcctggcggggccggcggcaagggaatgcggattgtggatgatgatgtgagctggacagctatctccacaaccaaactagaaaaggaggaagaggaagatgatggagatttgcctgtggtggcagagtttgtggatgagcggccagaagaggtaaagcagatggaggcctttcgttccagtgccaaatggaagcttctgggaggccacaacgaagacctaccctcaaacagacattttcgtcacgataccccggattcatctcctaggagggtccgtcatggtaccccagatccatctcctaggaaggaccgtcatgacaccccggatccatctcctaggagggcccgtcatgacaccccagatccttctcccctcagaggggctcgtcatgactcagacacatctcctcccaggaggatccgtcatgactcctcagacacttcacccccaaggagggcccgtcatgattctccagatccttctcccccaaggaggcctcagcataattcttcaggtgcatctcctaggagagtccgtcatgattcaccagatccctctcctcctaggcgagcccgtcatggttcctcagatatctcttcccccagaagggtccataacaactcccctgacacatctaggaggactcttggctcttcagacacacagcaactcagaagggcccgtcatgactcccctgatttggctcctaatgtcacttattccctgcccagaaccaaaagtggtaaagccccagaaagagcctctagcaagacttctccacattggaaggagtcaggagcctcccatttgtcattcccaaagaacagcaaatatgagtatgaccctgacatctctcctccacgaaaaaagcaagcaaaatcccattttggagacaagaagcagcttgattccaaaggtgactgccagaaagcaactgattcagacctttcttctccacggcataaacaaagtccagggcaccaggattctgattcagatctgtcacctccacggaatagacctagacaccggagctctgattctgacctctctccaccaaggaggagacagaggaccaaatcttctgattctgacctgtccccgcctcgaaggagtcagcctcctggaaagaaggctgcacacatgtattctggggctaaaactgggttggtgttaactgacatacagcgagaacagcaggagctcaaggaacaggatcaagaaaccatggcatttgaagctgaatttcaatatgctgaaaccgtatttcgagataagtctggtcgtaagaggaatttgaaactcgaacgtttagagcaaaggaggaaagcagaaaaggactcagagagagatgagctgtatgcccagtggggaaaagggcttgcccagagccggcaacagcaacaaaatgtggaggatgcaatgaaagagatgcaaaagcctctggcccgctatattgatgacgaagatctggataggatgctaagagaacaggaaagagagggggaccctatggccaacttcatcaagaagaataaggccaaggagaacaagaataaaaaagtgagacctcgctacagtggtccagcacctcctcccaacagatttaatatctggcctggatatcgctgggacggagtggacagatccaatggatttgaacagaagcgctttgccaggcttgccagcaagaaggcagtggaggaacttgcctacaaatggagtgttgaggatatgtaactttcctgaggctgtgggggtggctgggctgtggtagtgggcataggcagcgagatatccagtggtaacagttgtctgtgctaataattggagcccacacagaccagcaacttgttgaatgccagttttgaccacagaagaatattcgagacctgatgtttggactgaggtacctgtacttcttgggtgtgacagcaccggctgttgctggctttcagaggaagcattgatttctcattgaccagggtttgttcttggtagggtttttctttttcttttttaaataaacatgtatttatttttttaaaaaaaaaaaaaaaaaaaaaaaaaaa

SEQ ID NO: 5183 - protein, 620 aa, Homo sapiens
  misc_feature (1)..(620): Xaa=Unknown amino acid
MAAAPPLSKAEYLKRYLSGADAGVDRGSESGRKRRKKRPKPGGAGGKGMRIVDDDVSWTAISTTKLEKEEEEDDGDLPVVAEFVDERPEEVKQMEAFRSSAKWKLLGGHNEDLPSNRHFRHDTPDSSPRRVRHGTPDPSPRKDRHDTPDPSPRRARHDTPDPSPLRGARHDSDTSPPRRIRHDSSDTSPPRRARHDSPDPSPPRRPQHNSSGASPRRVRHDSPDPSPPRRARHGSSDISSPRRVHNNSPDTSRRTLGSSDTQQLRRARHDSPDLAPNVTYSLPRTKSGKAPERASSKTSPHWKESGASHLSFPKNSKYEYDPDISPPRKKQAKSHFGDKKQLDSKGDCQKATDSDLSSPRHKQSPGHQDSDSDLSPPRNRPRHRSSDSDLSPPRRRQRTKSSDSDLSPPRRSQPPGKKAAHMYSGAKTGLVLTDIQREQQELKEQDQETMAFEAEFQYAETVFRDKSGRKRNLKLERLEQRRKAEKDSERDELYAQWGKGLAQSRQQQQNVEDAMKEMQKPLARYIDDEDLDRMLREQEREGDPMANFIKKNKAKENKNKKVRPRYSGPAPPPNRFNIWPGYRWDGVDRSNGFEQKRFARLASKKAVEELAYKWSVEDMX

SEQ ID NO: 5184 - DNA, 530 bp, Rattus norvegicus
  ref <308>: DATABASE ACCESSION NUMBER: EMBL / AA875019
  ref <309>: DATABASE ENTRY DATE: 2000-03-03
tttttttttttttttttggctttatagtgaaagtttattgtttttaatccaagtacaatcagctactagttacatacagtaaaaaacaaaacggccaccaagcaatgatgatagtctgtgacaggtgcagaggagggaatcttgttgggagtcctgtggatccacacctgacttcagcacttaagctgaccctccctccccagatcagttaaaaaaaatattaacagtgtcttgcttgggtagagcaagattctaaattttcttggggacactggagaacttttaaaaatgaaagtggtaaaacaagattgaaacgtggagacacaagaagcttcctgacaaagaagcttcaggaggtcttggcttcaggtcacctcaaatcgaatcagcttagaggagtgactccattcaaaccaaggctcatatgtatttggtccggttgagggctctctcagccaggtggccgctctcatccgtgatcttctcccagtcagtctgcccgaccacaaaacctatggcccttcaacatc

SEQ ID NO: 5185 - protein, 1386 aa, Rattus norvegicus
  ref <308>: DATABASE ACCESSION NUMBER: SWISS-Prot / BAA85182
  ref <309>: DATABASE ENTRY DATE: 2001-10-16
MYPNWGRYGGSSHYPPPPVPPPPPPVALPEASPGPGYSSSTAPAAPSSSGFMSFREQHLAQLQQLQQMHQKQMQSVLQPHHLPPPPLPPPPVMPGGGYGDWQPPPPPMPPPPGPALSYQKQQQYKHQMIHHQRDGPPGLVPMELESPPESPPVPPGSYMPPSQSYMPPPQPPPSYYPPSSAQPYLPPAQPSPSKPQLPPPPSIPSGNKTAIQQEPLESGAKNKTAEQKQAAPEPDPSTMTPQEQQQYWYRQHLLSLQQRTKVHLPGHKKGLVTAKDVPEPIKEEAPGPAASQVAEPLAAEKPPLPPPNEEAPPPLSPEEPQSEDSEDSEDSEEDARFKQLKAIAAHWQAAAAHWQQQQQQRVGFQYQGIMQRHTQLQQILQQYQQVIQHSPHIQTMSLDVQLRHYEMQQQQFQHLFQDWEREFQLWEEQLHSYPHKDQLQEYEKQWKTWQGHMKATQTYLQEKVNSFQTVKSQYLGNMAMPPPFVPYSQMPPPLPTMPPPVLPPSLPPPVMPPALPTSIPPPGMPPPVMPPSLPTSVPPPGMPPSLSSGPPPVLPPPALSSAGSPPVLPPPALPGGPPILPLPPLSSATPPPGIPPPGAPQGMPPQLTAPLPPASGSQNSQIPEKPRQALLPTPVSFGSTPPSPYHPPPQSEQVNSKPLNKVFSSEQGLGESSALSQSIIAAKDTPVKSGGLLADPPKGSFLEGPRGPREQKEQLQKLKDFGSEPQMADHLPPPDSRLQNPSRPGMYPPPGSYRPPPPMGKPPGSIVRPSAPPARSSIPMTRPPVPIPPPPPPPPPPPPPPPVIKSKTSSVKQERWDEDSFFGLWDTNDDQGLNSEFKRDTATIPSAPVLPPPPVHSSIPPPGPMPMGMPPMSKPPPVQHTVDYGHGRDMPTNKVEQIPYGERITLRPDPLPERSTFDADHAGQRDRYDRDRDREPYFDRPSNITDHRDFKRDRETHRDRDRDRVLDYERDRFDRERRPRDDRNQSYRDKKDHSSSRRGGFDRPSYDRKSDRPPYEGPPMFGGERRTYPEERMPLPAPALGHQPPPVPRVEKKPESKNVDDILKPPGRESRPERIVVIMRGLPGSGKTHVAKLIRDKEVEFGGPAPRVLSLDDYFIAEVEKEEKDPDSGKKVKKKVMEYEYEADMEETYRTSMFKTFKKTLDDGFFPFIILDAINDRVRHFDQFWSAAKTKGFEVYLAEMSADNQTCGKRNIHGRKLKEINKMAEHWEVAPRHMMRLDIRSLLQDAAIEEVEMEDFDANIEDQKEEKKDAEEEESELGYTPKSKWEMDTSEAKLDKLDGLRTGTKRKRDWEAIASRMEDYLQLPDDYETRASEPGKKRVRWADLEEKKDADRKRAIGFVVGQTDWEKITDESGHLAERALNRTKYI

SEQ ID NO: 5186 - DNA, 1601 bp, Homo sapiens
  ref <308>: DATABASE ACCESSION NUMBER: EMBL / BC007792
  ref <309>: DATABASE ENTRY DATE: 2001-06-08
ttttgataggccatcctatgaccggaagtctgaccgaccagtctatgaaggaccatccatgtttggaggagaacgaaggacttatcctgaggagcgaatgcctctgccagctccttcactgagccaccagcctcctccagctccacgagtcgagaagaagcctgaatcaaagaatgtggacgatattttgaaaccaccgggccgggagagcagacctgagagaattgttgttataatgagaggattacctggcagtggaaagacacatgttgcaaaacttattcgagataaggaggtagaatttggaggacctgcacccagagttctaagcctggatgattacttcatcactgaagtggaaaaagaagaaaaagatccagattctggaaagaaagtgaaaaagaaggtaatggaatatgaatatgaagctgagatggaggagacttaccgcaccagcatgttcaaaactttcaaaaagactctggatgatggcttttttcccttcatcatcctggatgccatcaatgacagagttaggcattttgaccagttttggagtgcagcaaaaaccaagggatttgaggtatatttggctgaaatgagtgcagataaccagacttgtggcaagagaaatattcatggaagaaagcttaaagaaataaataagatggctgatcactgggaaactgcacctcgtcacatgatgcgtctagatattcgttctttgctgcaagatgctgctattgaagaggtagagatggaagattttgatgcaaatatcgaagaacagaaagaagaaaagaaagatgcagaggaagaggaaagcgaactgggttacattccgaaaagcaaatgggagatggacacatctgaggcaaagctagacaagttggatggcttgaggactggtactaaaaggaaacgtgactgggaggccattgccagcagaatggaggattatcttcagctccccgatgattatgatactcgtgcttctgagcctgggaagaagagggtcagatgggcagacctggaagagaagaaggatgcagataggaaaagggccataggttttgtggtcggacagactgattgggagaagatcacagatgaaagtggtcacctggctgaaaaagccctcaatcgaaccaaatatatatgagacttagtttttgaacggagtcattattcctctaaggtggttcgctttgaggtggtctgaagccaaggcctcgcggagcttctttgtgtgtcaccttgcttccacgtttcagttcttgttttgtttctactgctttagttttttttaaagttctccagtgtccccaagaggtattagaatcttgctgtacccaagcaagacgttaatttttcttttaactgttttggggagggagggagtgatagcttaactgctgaagccaggcgggggtctgctggaggattccaacagagagtatttcctccactgtacaatgtcacagactatctctatcatcattgctttgtggctgtttctgttttttactgtatgtaactggtagctgattgtactaggattaaaaacaataaactttcatgataaaaaaaaaaaaaaaaaa

SEQ ID NO: 5187 - protein, 1822 aa, Homo sapiens [sequence omitted]

SEQ ID NO: 5188 - DNA, 530 bp, Rattus norvegicus; identical to SEQ ID NO: 5184
  ref <308>: DATABASE ACCESSION NUMBER: EMBL / AA875019
  ref <309>: DATABASE ENTRY DATE: 2000-03-03

SEQ ID NO: 5189 - protein, 1386 aa, Rattus norvegicus; identical to SEQ ID NO: 5185
  ref <308>: DATABASE ACCESSION NUMBER: SWISS-Prot / BAA85182
  ref <309>: DATABASE ENTRY DATE: 2001-10-16

SEQ ID NO: 5190 - DNA, 1601 bp, Homo sapiens; identical to SEQ ID NO: 5186
  ref <308>: DATABASE ACCESSION NUMBER: EMBL / BC007792
  ref <309>: DATABASE ENTRY DATE: 2001-06-08

SEQ ID NO: 5191 - protein, 1822 aa, Homo sapiens [sequence omitted]

SEQ ID NO: 5192 - DNA, 536 bp, Rattus norvegicus
  ref <308>: DATABASE ACCESSION NUMBER: EMBL / AA875023
  ref <309>: DATABASE ENTRY DATE: 2000-03-03
tttttttttttttttttaacatttttgtattttattatttttagggaagaaacacagtttcacaagaaacaatgatttttctcaaacaatagaaaaaagatctttttgaaaaaatccactgtcctagatgaaaagtctacccagcaagcactgggccagttttgagagtaaaaaccagtgaggtggaagttacctataggaaattcagtgcagaggtctccacaagtcctgatcagttctgtaaggctccaatgggccagctcggcggcagcggcgaaacagtgggaatgagctcacagacaaaggcccagtccctctgactgactgggatgcaggctggctcactccccggggggctgcatctgcttacagaactcatcaaactgctgctgctccagctccgtcatgactctgttgagagcatagatctctgctctttgtctttgcttcagctcctgctgggcagatttctgtttaaccttctccactctgaaagcaggttctttaactttggatttttctttccgcctcgtgcc

SEQ ID NO: 5193 - DNA, 486 bp, Rattus norvegicus
  ref <308>: DATABASE ACCESSION NUMBER: EMBL / AA875025
  ref <309>: DATABASE ENTRY DATE: 2000-03-03
tttttttttttttttttgcatccaaacagtttaatgactggtacaatcatgcagatgccaaaccagggatgcgggaggcaacaagggcctgaggggagggtactacaacattgtcatagggaaaatggggttgcctaatattcatgggggagaggtgtgtggaggaaagacccactggcagtgcgggaccacgacgtgctcctcgtgggaacttgtatcctgccatgaaagcagaacaagctggccacctttactcccggacataaattcttgtgcacaccacatcatcggcgccaaatgtcaggattagctcatcgttggccagctctcgggtccagtaagttttggggccatccccctcaagaagcgtctgcgtgcagtgaatcttgttctcattctcccaagtgggtaaactcctgcacttgcgtccgtccaccgtctcctcctcgaagccctctccgaccttgaagttgatccctcgtgccg

SEQ ID NO: 5194 - protein, 137 aa, Rattus norvegicus
  ref <308>: DATABASE ACCESSION NUMBER: Refseq / NP_038524
  ref <309>: DATABASE ENTRY DATE: 2002-01-07
MPNFAGTWKMRSSENFDELLKALGVNAMLRKVAVAAASKPHVEIRQDGDQFYIKTSTTVRTTEINFKVGEGFEEETVDGRKCRSLPTWENENKIHCTQTLLEGDGPKTYWTRELANDELILTFGADDVVCTRIYVRE

SEQ ID NO: 5195 - DNA, 735 bp, Homo sapiens
  ref <308>: DATABASE ACCESSION NUMBER: EMBL / S74445
  ref <309>: DATABASE ENTRY DATE: 2000-03-04
gagtctgcccttgcgagctcagagtgtgcccgtgcgccgccgccgtcgtacctgccgccgccgccaccgccaccatgcccaacttcgccggcacctggaagatgcgcagcagcgagaatttcgacgagctgctgaaggcactgggtgtgaacgccatgctgaggaaagtggccgtagcggctgcgtccaagccgcacgtggagatccgccaggacggggatcagttctacatcaagacatccaccaccgtgcgcaccactgagatcaacttcaaggtcggagaaggctttgaggaggagaccgtggacggacgcaagtgcaggagtttagccacttgggagaatgagaacaagatccactgcacccaaactcttcttgaaggggacggccccaaaacctactggacccgtgagctggccaacgatgaacttatcctgacgtttggcgccgatgacgtggtctgcaccagaatttatgtccgggaatgaaggcagctggcttgctcctactttcaggaagggatgcaggtccccgaggaatatgtcatagttctgagctgccagtggaccgcccttttcccctaccaatattaggtgatcccgttttccccatgacaatgttgtagtgtcccccacccccacccccctggccttggtgcctcttgtatccctagtgctgcatagcccggcatttgcacggtttcgaagtcattaaactggttagacgtgtctcaaa

SEQ ID NO: 5196 - protein, 136 aa, Homo sapiens
  ref <308>: DATABASE ACCESSION NUMBER: SWISS-Prot / P29762
  ref <309>: DATABASE ENTRY DATE: 2002-06-15
PNFAGTWKMRSSENFDELLKALGVNAMLRKVAVAAASKPHVEIRQDGDQFYIKTSTTVRTTEINFKVGEGFEEETVDGRKCRSLATWENENKIHCTQTLLEGDGPKTYWTRELANDELILTFGADDVVCTRIYVRE

SEQ ID NO: 5197 - DNA, 439 bp, Rattus norvegicus
  ref <308>: DATABASE ACCESSION NUMBER: EMBL / AA875033
  ref <309>: DATABASE ENTRY DATE: 2000-03-03
cggacgcaaaggtttttttttattttttttcttcaaatatttaatcagtccggatacctctgtcttccaacccagttgggtaaaaactcttaagaaagcatgattaaaggggtcttcataaaaactgggctaagacgcagggaaggctgaggttagaaagactgaacataacatgtatctgaggccttctggaaggaattctatcactttaaaaactcaaaatgaacgagaaaaggttaaacactcatacaaattgtaagaacaactaaaacttctcttatgctgaaaataccagacgtgattttaaaatagactctttaaaaacctttgatcctgctgtgacgtgttcccatagccttctcagcacatgcaagaagcaaaatagctatacccagcatttcccatgagctcatgaggacttttgcaaagcagcaatgca

SEQ ID NO: 5198 - protein, 448 aa, Rattus norvegicus
  ref <308>: DATABASE ACCESSION NUMBER: SWISS-Prot / Q9WVH8
  ref <309>: DATABASE ENTRY DATE: 2001-10-16
MPGLKRILTVTILALWLPHPGNAQQQCTNGFDLDRQTGQCLDIDECRTIPEACRGDMMCVNQNGGYLCIPRTNPVYRGPYSNPYSTSYSGPYPAAAPPVPASNYPTISRPLVCRFGYQMDEGNQCVDVDECATDSHQCNPTQICINTEGGYTCSCTDGYWLLEGQCLDIDECRYGYCQQLCANVPGSYSCTCNPGFTLNDDGRSCQDVNECETENPCVQTCVNTYGSFICRCDPGYELEEDGIHCSDMDECSFSEFLCQHECVNQPGSYFCSCPPGYVLLEDNRSCQDINECEHRNHTCTPLQTCYNLQGGFKCIDPIVCEEPYLLIGDNRCMCPAENTGCRDQPFTILFRDMDVVSGRSVPADIFQMQATTRYPGAYYIFQIKSGNEGREFYMRQTGPISATLVMTRPIKGPRDIQLDLEMITVNTVINFRGSSVIRLRIYVSQYPF

SEQ ID NO: 5199 - DNA, 2646 bp, Homo sapiens
  ref <308>: DATABASE ACCESSION NUMBER: Refseq / NM_006329
  ref <309>: DATABASE ENTRY DATE: 2002-11-05
ttctgcccgggcgctcgcagccgagcgcggccggggaagggctctcctcccagcgccgagcactgggccctggcagacgccccaagattgttgtgaggagtctagccagttggtgagcgctgtaatctgaaccagctgtgtccagactgaggccccatttgcattgtttaacatacttagaaaatgaagtgttcatttttaacattcctcctccaattggtttaatgctgaattactgaagagggctaagcaaaaccaggtgcttgcgctgagggctctgcagtggctgggaggaccccggcgctctccccgtgtcctctccacgactcgctcggcccctctggaataaaacacccgcgagccccgagggcccagaggaggccgacgtgcccgagctcctccgggggtcccgcccgcgagctttcttctcgccttcgcatctcctcctcgcgcgtcttggacatgccaggaataaaaaggatactcactgttaccattctggctctctgtcttccaagccctgggaatgcacaggcacagtgcacgaatggctttgacctggatcgccagtcaggacagtgtttagatattgatgaatgccgaaccatccccgaggcctgccgaggagacatgatgtgtgttaaccaaaatggcgggtatttatgcattccccggacaaaccctgtgtatcgagggccctactcgaacccctactcgaccccctactcaggtccgtacccagcagctgccccaccactctcagctccaaactatcccacgatctccaggcctcttatatgccgctttggataccagatggatgaaagcaaccaatgtgtggatgtggacgagtgtgcaacagattcccaccagtgcaaccccacccagatctgcatcaatactgaaggcgggtacacctgctcctgcaccgacggatattggcttctggaaggccagtgcttagacattgatgaatgtcgctatggttactgccagcagctctgtgcgaatgttcctggatcctattcttgtacatgcaaccctggttttaccctcaatgaggatggaaggtcttgccaagatgtgaacgagtgtgccaccgagaacccctgcgtgcaaacctgcgtcaacacctacggctctttcatctgccgctgtgacccaggatatgaacttgaggaagatggcgttcattgcagtgatatggacgagtgcagcttctctgagttcctctgccaacatgagtgtgtgaaccagcccggcacatacttctgctcctgccctccaggctacatcctgctggatgacaaccgaagctgccaagacatcaacgaatgtgagcacaggaaccacacgtgcaacctgcagcagacgtgctacaatttacaagggggcttcaaatgcatcgaccccatccgctgtgaggagccttatctgaggatcagtgataaccgctgtatgtgtcctgctgagaaccctggctgcagagaccagccctttaccatcttgtaccgggacatggacgtggtgtcaggacgctccgttcccgctgacatcttccaaatgcaagccacgacccgctaccctggggcctattacattttccagatcaaatctgggaatgagggcagagaattttacatgcggcaaacgggccccatcagtgccaccctggtgatgacacgccccatcaaagggccccgggaaatccagctggacttggaaatgatcactgtcaacactgtcatcaacttcagaggcagctccgtgatccgactgcggatatatgtgtcgcagtacccattctgagcctcgggctggagcctccgacgctgcctctcattggcaccaagggacaggagaagagaggaaataacagagagaatgagagcgacacagacgttaggcatttcctgctgaacgtttccccgaagagtcagccccgacttcctgactctcacctgtactattgcagacctgtcaccctgcaggacttgccacccccagttcctatgacacagttatcaaaaagtattatcattgctcccctgatagaagattgttggtgaattttcaaggccttcagtttatttccactattttcaaagaaaatagattaggtttgcgggggtctgagtctatgttcaaagactgtgaacagcttgctgtcacttcttcacctcttccactccttctctcactgtgttactgctttgcaaagacccgggagctggcggggaaccctgggagtagctagtttgctttttgcgtacacagagaaggctatgtaaacaaaccacagcaggatcgaagggtttttagagaatgtgtttcaaaaccatgcctggtattttcaaccataaaagaagtttcagttgtccttaaatttgtataacggtttaattctgtcttgttcattttgagtatttttaaaaaatatgtcgtagaattccttcgaaaggccttcagacacatgctatgttctgtcttcccaaacccagtctcctctccattttagcccagtgttttctttgaggaccccttaatcttgctttctttagaatttttacccaattggattggaatgcagaggtctccaaactgattaaatatttgaagagaaaaaaaaaaaaaaaaaaaaaaaaa

SEQ ID NO: 5200 - protein, 448 aa, Homo sapiens
  ref <308>: DATABASE ACCESSION NUMBER: SWISS-Prot / Q9UBX5
  ref <309>: DATABASE ENTRY DATE: 2001-10-16
MPGIKRILTVTILALCLPSPGNAQAQCTNGFDLDRQSGQCLDIDECRTIPEACRGDMMCVNQNGGYLCIPRTNPVYRGPYSNPYSTPYSGPYPAAAPPLSAPNYPTISRPLICRFGYQMDESNQCVDVDECATDSHQCNPTQICINTEGGYTCSCTDGYWLLEGQCLDIDECRYGYCQQLCANVPGSYSCTCNPGFTLNEDGRSCQDVNECATENPCVQTCVNTYGSFICRCDPGYELEEDGVHCSDMDECSFSEFLCQHECVNQPGTYFCSCPPGYILLDDNRSCQDINECEHRNHTCNLQQTCYNLQGGFKCIDPIRCEEPYLRISDNRCMCPAENPGCRDQPFTILYRDMDVVSGRSVPADIFQMQATTRYPGAYYIFQIKSGNEGREFYMRQTGPISATLVMTRPIKGPREIQLDLEMITVNTVINFRGSSVIRLRIYVSQYPF

SEQ ID NO: 5201 - DNA, 439 bp, Rattus norvegicus; identical to SEQ ID NO: 5197
  ref <308>: DATABASE ACCESSION NUMBER: EMBL / AA875033
  ref <309>: DATABASE ENTRY DATE: 2000-03-03

SEQ ID NO: 5202 - protein, 448 aa, Rattus norvegicus; identical to SEQ ID NO: 5198
  ref <308>: DATABASE ACCESSION NUMBER: SWISS-Prot / Q9WVH8
  ref <309>: DATABASE ENTRY DATE: 2001-10-16

SEQ ID NO: 5203 - DNA, 2646 bp, Homo sapiens; identical to SEQ ID NO: 5199
  ref <308>: DATABASE ACCESSION NUMBER: Refseq / NM_006329
  ref <309>: DATABASE ENTRY DATE: 2002-11-05

SEQ ID NO: 5204 - protein, 448 aa, Homo sapiens; identical to SEQ ID NO: 5200
  ref <308>: DATABASE ACCESSION NUMBER: SWISS-Prot / Q9UBX5
  ref <309>: DATABASE ENTRY DATE: 2001-10-16

SEQ ID NO: 5205 - DNA, 551 bp, Rattus norvegicus
  ref <308>: DATABASE ACCESSION NUMBER: EMBL / AA875037
  ref <309>: DATABASE ENTRY DATE: 2000-03-03
tttttttttttttttttccacttcttaaatttttatttatttttttaaaatttacttgtttctgcataactttgagtgatgttacatgcttatacaggatgctggggccagtagtagccaaataaaggcatcaagacatgggtggaaactggaatttccagaggttgtaagcagccatgtgggtggtgggaaatgtccctgtgtcctttgcaagatcagcaacttttcctagtatctgtccttctctccagcattcttacacattgattcagttctaccaggctgtaagttattggctataagttatgagtatcagcggcatagcaaaggctatatggcatcattagacataacctgcaaaagggcacaaatgcattcaggatagggagagctgaatgcaggcatcataagatcaggctggcaggaagaaagtatcctcatcttggaacatggtttccccctacttgcccatcctgacagagctttggattggtggagatactgaagagaggactctccccatgtagtaaatgtgtctttatggagatgag

SEQ ID NO: 5206 - protein, 416 aa, Rattus norvegicus
  ref <308>: DATABASE ACCESSION NUMBER: PIR / S19896
  ref <309>: DATABASE ENTRY DATE: 1999-07-16
MEELSMANTMFALNLLKQIEQSNSTQNIFISPWSISSTLAIVFLGAQANTEEQMAKVLNFDKIGSYDLTPGNPENFHGCDFAQHIQRDNYPVAILQAQARDKIHSAFSSLSSTINTPRLGDYLLESANKLFGEKSARFKEEYIQRCKKYYSTEPEAVDFLECANEARKKINSWVKTQTKGEIPNLLPEGSVDEDTKMVLVNTIYFKGRWKTPFQKRLNGLYPFRVNLNESKPVQMMYLREKLNIGYIKDLKTQILELPYIGNISMFLLLPDEIEDSSTGLEMLEREINFDNFNKWISKETLDEDDVLVYIPKFKLAQNYELKPILQRMGMEDAFNKGKADFSGMSESNDLFLSEVFHQATVDVNEEGTVAAGGTGAVMTGRTGHGGPQFVADHPFLFFIMNNITRTILFVGRFSSP

SEQ ID NO: 5207 - DNA, 1385 bp, Homo sapiens
  ref <308>: DATABASE ACCESSION NUMBER: EMBL / L40378
  ref <309>: DATABASE ENTRY DATE: 1999-06-30
cgcagcagcagggccgggtcctgcgcctcgggggtcggcgtccaggctcggagcgcggcacggagacggcggcagcgctggactaggtggcaggccctgcatcatggaaactctttctaatgcaagtggtacttttgccatacgccttttaaagatactgtgtcaagataacccttcgcacaacgtgttctgttctcctgtgagcatctcctctgccctggccatggttctcctaggggcaaagggaaacaccgcaacccagatggcccaggcactgtctttaaacacagaggaagacattcatcgggctttccagtcgcttctcactgaagtgaacaaggctggcacacagtacctgctgagaacggccaacaggctctttggagagaaaacttgtcagttcctctcaacgtttaaggaatcctgtcttcaattctaccatgctgagctgaaggagctttcctttatcagagctgcagaagagtccaggaaacacatcaacacctgggtctcaaaaaagaccgaaggtaaaattgaagagttgttgccgggtagctcaattgatgcagaaaccaggctggttcttgtcaatgccatctacttcaaaggaaagtggaatgaaccgtttgacgaaacatacacaagggaaatgccctttaaaataaaccaggaggagcaaaggccagtgcagatgatgtatcaggaggccacgtttaagctcgcccacgtgggcgaggtgcgcgcgcagctgctggagctgccctacgccaggaaggagctgagcctgctggtgctgctgcctgacgacggcgtggagctcagcacggtggaaaaaagtctcacttttgagaaactcacagcctggaccaagccagactgtatgaagagtactgaggttgaagttctccttccaaaatttaaactacaagaggattatgacatggaatctgtgcttcggcatttgggaattgttgatgccttccaacagggcaaggctgacttgtcggcaatgtcagcggagagagacctgtgtctgtccaagttcgtgcacaagagttttgtggaggtgaatgaagaaggcaccgaggcagcggcagcgtcgagctgctttgtagttgcagagtgctgcatggaatctggccccaggttctgtgctgaccaccctttccttttcttcatcaggcacaacagagccaacagcattctgttctgtggcaggttctcatcgccataaagggtgcacttaccgtgcactcggccatttccctcttcctgtgtccccagatccccactacagctccaagaggatgggcctagaaagccaagtgcaaagatgagggcagattctttacctgtctgccctcatgatttgccagcatgaattc

SEQ ID NO: 5208 - protein, 376 aa, Homo sapiens
  ref <308>: DATABASE ACCESSION NUMBER: SWISS-Prot / P50453
  ref <309>: DATABASE ENTRY DATE: 2002-06-15
METLSNASGTFAIRLLKILCQDNPSHNVFCSPVSISSALAMVLLGAKGNTATQMAQALSLNTEEDIHRAFQSLLTEVNKAGTQYLLRTANRLFGEKTCQFLSTFKESCLQFYHAELKELSFIRAAEESRKHINTWVSKKTEGKIEELLPGSSIDAETRLVLVNAIYFKGKWNEPFDETYTREMPFKINQEEQRPVQMMYQEATFKLAHVGEVRAQLLELPYARKELSLLVLLPDDGVELSTVEKSLTFEKLTAWTKPDCMKSTEVEVLLPKFKLQEDYDMESVLRHLGIVDAFQQGKADLSAMSAERDLCLSKFVHKSFVEVNEEGTEAAAASSCFVVAECCMESGPRFCADHPFLFFIRHNRANSILFCGRFSSP

SEQ ID NO: 5209 - DNA, 539 bp, Rattus norvegicus
  ref <308>: DATABASE ACCESSION NUMBER: EMBL / AA875040
  ref <309>: DATABASE ENTRY DATE: 2000-03-03
caggacagccatttatttacaagcactgtaaacagtacaagatacttcagaggtttagaagttaatatgagaaaaataccaacagttcatgatactaaattcaactgtttctgaggcaaggtggcttaaaaaggaaatctagaaaccgaattccaactctaggcctctggctaagtcgtcttcctagtaatgttcattccattgcatcctctcaaaccagaagtgacttgggaaacctccccgcagcagctctggggtgaaccgaagtctgtgtagtccagtcaggtcttcacaaggaactggcttttatccagcttccctctctccttaaggtaggcaaacaggtgccttctgcgtctccacgtgaccttaatcccatacttctcctcaggggtgtccttgaccagaacaggccccggctccggggtcctgggggtcctaggaccaaggatgcagctaggaagactgttttccttctggtctggggaaaagggatcttctcttaccgaaaaccctggggttcggatatcggggggcat

SEQ ID NO: 5210 - protein, 155 aa, Rattus norvegicus
  ref <308>: DATABASE ACCESSION NUMBER: SWISS-Prot / AAH05726
  ref <309>: DATABASE ENTRY DATE: 2001-12-01
RPTRRSTCKFPRLTFESPQSSSSETLLLSNRVQPQNSEKDPPRRPLVPLFSPQSCGELSVHVPHSLPHVFAPPDIQTPDSSVRDDPISPDQKENSFPSCILGPGTPSSPEPGPVLVKDTPEEKYGIKVTWRRRRHLFAYLKEKGKLDGSQFLVKI

SEQ ID NO: 5211 - DNA, 1426 bp, Homo sapiens
  ref <308>: DATABASE ACCESSION NUMBER: Refseq / NM_031465
  ref <309>: DATABASE ENTRY DATE: 2001-12-10
cgaaggctgtgcggtctgccaggagctgcggccccgtccggcccgggctggcatgggttggaattggagcctatcccccaacccgaaggctaacagcatcatgtggttactaactgttcctcattcaccggttgatgcctcccagaaaaaaacgccgccagccttcccagaaagccccgctgctgttccaccaacaaccactggagggccccaaacacagctgtgcatctacacagcttcccatcactcacactcgacaggtgcccagcaagcccattgaccacagcaccatcacttcctgggtatcacctgattttgatacagcagcaggaagcttgttcccagcctaccagaaacaccaaaaccgggcgagacactcaagtcgaaaacctaccacctccaagtttccacatctaacttttgagagtccgcaatcttccagttcagagacattggggatccccttaatccgagagtgccccagtgaatcagaaaaggatgtttccagaagacccttagttccagtgctcagtccccaaagctgtgggaacatgtcagtgcaggcacttcagagcttaccttatgtgttcattccacctgatatccagaccccagagtcatcatctgtgaaggaagaactcattccccaagatcagaaggaaaacagccttctaagctgcactcttcacactggcactcctaatagcccagagcctggacctgttctggttaaagacacccccgaggacaagtatggaataaaggtcacatggaggagacgacagcacctgcttgcttacctcagggagagagggaagctgagcagaagccaattccttgtgaaaagctgactgccatcagtaatctcaatagaaaagagatatgttttctggagtcataaaggaattcaattcctagggtttttgtttttgtttttgagatgtaatattgctctgttgcccaggctggagtgcagtggtatgatctcaccttactgcaaccaccacttcctgggttcaagcgattctcctgcctcagcctccccagtagctgggattacaggcaccagccaccatgcctggctaatttttttgtatttttagtagagatgtggtttctccatgttggccaggctggtctcaaaatcctgacctcaagtcatctgctggccttgacctcacaaagtgctggcccagccgagatttgttttctaagatactttgtgtcatgaacagttcagtttagtgtcatgaactattcacttcatatttttcttgtattaactgtttaaatttttaaaatatcttgtagtaactctttaaaatgtatgtaagtaaatggctgcagaaagtttttttagagaatcctgcttccatcagtaatacagcaatattaccccatccactaaaaaaaaaaaaaaaaaaaa

SEQ ID NO: 5212 - protein, 238 aa, Homo sapiens
  ref <308>: DATABASE ACCESSION NUMBER: Refseq / NP_113653
  ref <309>: DATABASE ENTRY DATE: 2001-12-10
MPPRKKRRQPSQKAPLLFHQQPLEGPKHSCASTQLPITHTRQVPSKPIDHSTITSWVSPDFDTAAGSLFPAYQKHQNRARHSSRKPTTSKFPHLTFESPQSSSSETLGIPLIRECPSESEKDVSRRPLVPVLSPQSCGNMSVQALQSLPYVFIPPDIQTPESSSVKEELIPQDQKENSLLSCTLHTGTPNSPEPGPVLVKDTPEDKYGIKVTWRRRQHLLAYLRERGKLSRSQFLVKS

SEQ ID NO: 5213 - DNA, 368 bp, Rattus norvegicus
  ref <308>: DATABASE ACCESSION NUMBER: EMBL / AA875043
  ref <309>: DATABASE ENTRY DATE: 2000-03-03
tttttttttaacacgtgcaaattatttaaaaatatttcaataaaactgcctggctggctccgggccatccatccactcagcggagcgccctcccctgacccatctctagttcgggaagttcttaaggaaggtcaaagtcttttctggaggcttctttactcttcccaagaatagtttctggagcagctttcaagcaagcagcaggtcgccagaccagaatcagcccttagctgggcgtgcccaagagtgagggagtgctggaggaatagcagtcttgagaattggcaggccatacgttaaggatgtaagtcacaaggtcttgttgaagtgtccatttcagttcagatggatcccatcatgaaacctga

SEQ ID NO: 5214 - protein, 628 aa, Rattus norvegicus
  ref <308>: DATABASE ACCESSION NUMBER: SWISS-Prot / Q63572
  ref <309>: DATABASE ENTRY DATE: 2002-06-15
MAGERPPLRGPGPGETPVEGPGGAGGGPGRGRPSSYRALRSAVSSLARVDDFDCAEKIGAGFFSEVYKVRHRQSGQVMVLKMNKLPSNRSNTLREVQLMNRLRHPNILRFMGVCVHQGQLHALTEYMNGGTLEQLLSSPEPLSWPVRLHLALDIAQGLRYLHAKGVFHRDLTSKNCLVRREDGGFTAVVGDFGLAEKIPVYREGARKEPLAVVGSPYWMAPEVLRGELYDEKADVFAFGIVLCELIARVPADPDYLPRTEDFGLDVPAFRTLVGNDCPLPFLLLAIHCCSMEPSARAPFTEITQHLEQILEQLPEPTPLAKMPLAKAPLTYNQGSVPRGGPSATLPRSDPRLSRSRSDLFLPPSPESPPSWGDNLTRVNPFSLREDLRGGKIKLLDTPCKPATPLPLVPPSPLTSTQLPLVASPESLVQPETPVRRCRSLPSSPELPRRMETALPGPGPSPVGPSTEERMDCEGSSPEPEPPGPAPQLPLAVATDNFISTCSSASQPWSARPGPSLNNNPPAVVVNSPQGWAREPWNRAQHSLPRAAALERTEPSPPPSAPREQEEGLPCPGCCLSPFSFGFLSMCPRPTPAVARYRNLNCEAGSLLCHRGHHAKPPTPSLQLPGARS

SEQ ID NO: 5215 - DNA, 668 bp, Homo sapiens
  misc_feature (1)..(668): n=a, c, g or t
  ref <308>: DATABASE ACCESSION NUMBER: EMBL / AF479317
  ref <309>: DATABASE ENTRY DATE: 2002-03-08
caggaccngtcctcaataacaatcccccagctgtggtggtgaactccccacaaggctgggctggggagccctggaaccgggcccagcatagcctgccccgggcggcagccctggagcggacagaaccctcgccacccccttcagctccccgggagcccgatgaggggctgccctgtcctggctgctgcctcagccccttcagctttggcttcctgtccatgtgcccccgccccacaccagctgttgcccgctaccgcaacctgaactgtgaggcgggcagtctcctctgccaccgagggcaccacgccaagccacccacacccagcctgcagctgcctggggcacgctcttagcagtggagcccgtggtctcaggcctccaactttggccttcaggacaccctgtaagaacagagcacacttgctggacagtgccagttccagatgggctgaccggctcttctccccgtgtaggggagccccagcatggactcaagggacagagcacttccagtcgaccccccggctcgcgttcccgtggggatcactgaaccagacacagcattgctgacacatgagactaacacgtgcaattatttaaaaagatttcaataaaactgcctggctggctccgggccgcccctaaaaaaaaaaaaaaaaaaaaaaaaa

SEQ ID NO: 5216 - protein, 626 aa, Homo sapiens
  ref <308>: DATABASE ACCESSION NUMBER: SWISS-Prot / Q15569
  ref <309>: DATABASE ENTRY DATE: 2002-06-15
MAGERPPLRGPGPGPGEVPGEGPPGPGGTGGGPGRGRPSSYRVLRSAVSSLARVDDFHCAEKIGAGFFSEVYKVRHRQSGQVMVLKMNKLPSNRGNTLREVQLMNRLRHPNILRFMGVCVHQGQLHALTEYMNGGTLEQLLSSPEPLSWPVRLHLALDIARGLRYLHSKGVFHRDLTSKNCLVRREDRGFTAVVGDFGLAEKIPVYREGARKEPLAVVGSPYWMAPEVLRGELYDEKADVFAFGIVLCELIARVPADPDYLPRTEDFGLDVPAFRTLVGDDCPLPFLLLAIHCCNLEPSTRAPFTEITQHLEWILEQLPEPAPLTRTALTHNQGSVARGGPSATLPRPDPRLSRSRSDLFLPPSPESPPNWGDNLTRVNPFSLREDLRGGKIKLLDTPSKPVLPLVPPSPFPSTQLPLVTTPETLVQPGTPARRCRSLPSSPELPRRMETALPGPGPPAVGPSAEEKMECEGSSPEPEPPGPAPQLPLAVATDNFISTCSSASQPWSPRSGPVLNNNPPAVVVNSPQGWAGEPWNRAQHSLPRAAALERTEPSPPPSAPREPDEGLPCPGCCLGPFSFGFLSMCPRPTPAVARYRNLNCEAGSLLCHRGHHAKPPTPSLQLPGARS

SEQ ID NO: 5217 - DNA, 547 bp, Rattus norvegicus
  ref <308>: DATABASE ACCESSION NUMBER: EMBL / AA875050
  ref <309>: DATABASE ENTRY DATE: 2000-03-03
tttttttttttttttttccaagaaacaaacattttaatgcagaaaaccatgataatctacaaatgaatcacagtggaggcctataccggaccccctcaggaactgtaaggactgggacgtggacactgaactgacaacaccgtcagcatctggacatgcccaggcagctgtgctggcctcacggcacctaggccttgcccccttgccttccaccattcattccccaatgggaagaccagaagttaagttcagaatagaagggggagaggtggaggatgctgctggctctggtacctgccccatgactcaaggccaggcctactcccaggtctctgtccctctcctctgcagggacctagcaggaacacgaggaggggacctagggaaggggtggctggatggcatctggcttggagaagttggcagcctcagataaggcagctgctggaggaactgtcaggtgcagctgggacctctccccccaagatgacagctgaattggcttcctgctggcttggagctcagcacctctcactggggcatacat

SEQ ID NO: 5218 - protein, 394 aa, Rattus norvegicus
  ref <308>: DATABASE ACCESSION NUMBER: SWISS-Prot / O54783
  ref <309>: DATABASE ENTRY DATE: 2001-10-16
MAADGTGVVGGGAVGGPLSKDGLLDAKCPEPIPNRRRSSSLSRDAQRRAYQWCREYLGGAWRRARPEELSVCPVSGGLSNLLFRCSLPNHVPSMGGEPREVLLRLYGAILQGVDSLVLESVMFAILAERSLGPQLYGVFPEGRLEQYLPSRPLKTQELRDPVLSGAIATKMARFHGMEMPFTKEPRWLFGTMERYLKQIQDLPSTSLPQMNLVEMYSLKDEMNHLRTLLDATPSPVVFCHNDIQEGNILLLSEPDSDDNLMLVDFEYSSYNYRGFDIGNHFCEWVYDYTYEEWPFYKARPADYPTREQQLLFIRHYLAEVQKGEVLSEEEQKKQEEDLLIEISRYALASHFFWGLWSTLQASMSTIEFGYLEYAQSRFQFYFQQKGQLTSFLSP

SEQ ID NO: 5219 - DNA, 4025 bp, Homo sapiens
  ref <308>: DATABASE ACCESSION NUMBER: EMBL / AB029885
  ref <309>: DATABASE ENTRY DATE: 2000-10-17
ggaattcggccttcggaaagagcccccgggccggggcacggagagagccgagcgccgcagccgtgagccgaatagagccggagagacccgagtatgaccggagaagcccaggccggccggaagaggagccgagcgcggccggaaggaaccgagcccgtccgaagggagcggagcgcagcctggcctggggcccggtcgagcccgcgccatggcggccgaggcgacagctgtggccggaagcggggctgttggcggctgcctggccaaagacggcttgcagcagtctaagtgcccggacactaccccaaaacggcggcgcgcctcgtcgctgtcgcgtgacgccgagcgccgagcctaccaatggtgccgggagtacttgggcggggcctggcgccgagtgcagcccgaggagctgagggtttaccccgtgaggtgggaggtcaggggtcagcctctccggtgcgcggatcggggtcaggggtcagccgcggggccctcaggatgctccatgttttcgcccccctcttgcgcccgcgcctggggcggggcggggccggcctggccgggagggggccggggccgcggcaggtagggccggccgcgggctgagcgcgcctggtgtgggtctgcagcggaggcctcagcaacctgctcttccgctgctcgctcccggaccacctgcccagcgttggcgaggagccccgggaggtgcttctgcggctgtacggagccatcttgcaggtgaggggggtgtgagcgccgcagcaccagtggctttagggcctgtcgcttacgcgatgcgggtagtattgttcccgttgcgcagttgaggacaccgaggttcacggtctgagtaacacctcattacaccgaagcctgggcctgtattcccagagctttgggaggctgaggcgagaggatcacttgagcacaggagttcgagaccagcctggacaacatagtgagacccccatctctaaataaaaatagaccaacgctaaagcctgtgctccagagcctccaggcaattggatcagaagtcgcagctctggtgggaggaaggcgagccctcatgtgtgtccctgtgccactttgccttggcccctttgctgtccatcctttttcagggcgtggactccctggtgctagaaagcgtgatgttcgccatacttgcggagcggtcgctggggccccagctgtacggagtcttcccagagggccggctggaacagtacatcccagtacgggcccagtcctaccctctcctccccaaggcacctccaccccctaaccctaccccagtgcccaatgtctgcctccacatccctcaccccaagtagggaatttcccccaaaaccctgacttcccctcattgccccagcccttcccactcctgccccagccccatcaccaccctgatagcttcctgggtgcagagtcggccattgaaaactcaagagcttcgagagccagtgttgtcagcagccattgccacgaagatggcgcaatttcatggcatggagatgcctttcaccaaggagccccactggctgtttgggaccatggagcggtgagtcaggagcctcctcagggctcctgtactcctgagctgaacctccatgccagcggatgtgtcgggggctctatccagccctccacttgagtggatctgatgtcatgggctgtcacagaacaggcttttaaatgcttgccagaggccacatgcagtgcctcatgcctgtaatcccagaactttgggagccgaggtgggtgaggtgggaggatcacttgagcccaggaggcggaggttgcagtgagctgagctcatgccattgcacttcagcctgggtgagagcaagactctgtctcaaaacaccaaacaaaaaaagaaaaaagaaatgattgccaaggccaggcacggtggctcatgcctgtaatcctagcacttcgggaggctgaggtgagcagattgcctgagctcaggagttcaaaaccagcctggacaacacagtgaaaccctgtctctattaaaatacaaaaaaattagccaggcatggcagcatgcacctgtagtcccagctactcgggaggctgaggcaggagaattgcttgaacccgggaggcagaggttgcagtgagccaagatcgcgccactgcactccagcctgggtgacagagcaagactccatttcaaaagaaaaaaagaaatgattgccggacaagtcacacagtgataggagcaggggtgcagtagtctggcctgaggggtagataggcgaggggtgggaaagaatagcagagccagtgtatcctattctttgggcttcaggtacctaaaacagatccaggacctgcccccaactggcctccctgagatgaacctgctggagatgtacagcctgaaggatgagatgggcaacctcaggtgagggcaggcaggacaaggctaatggtaatggtgtccgcccttccagtagttgctgagggctggtgtcagggcctggcctgttagggtggctctgatcctcctctagtcactcctgctcaggacccatgctcccatacccctgtaggaagttactagagtctaccccatcgccagtcgtcttctgccacaatgacatccaggaaggtaggagaaggcatctgagtctcctaacccaagatggaagagccagagggctctggagtgagcagaacctcaccccattcccccagggaacatcttgctgctctcagagccagaaaatgctgacagcctcatgctggtggacttcgagtacagcagttataactataggtgaggctggaaagatggcttcccatagatctgttcccacagggctcttgaaaacaggccagctgcccagggcatttggggactgaatgtccaccttattctcccaggggctttgacattgggaaccatttttgtgagtgggtttatgattatactcacgaggaatggcctttctacaaagcaaggcccacagactaccccactcaagaacagcaggtatgtgggccagaggctggggagcaggacccatcctgtgaggaaggagggaggtggagtctggaaggaatggccggaaaggatgttacctgggaaatactccacagtctccccaattcctgactcttggccattgatcgtagttgcattttattcgtcattacctggcagaggcaaagaaaggtgagaccctctcccaagaggagcagagaaaactggaagaagatttgctggtagaagtcagtcggtgaggaaggaggggcagggtggggtagggcagagcagaggaaagagggattggggaagaggcagatttatcaagctgcagggaaggtggctgtggagagtggagttaggacagtgggggagaagttaaaactgtagggattggccaacctgggtgaggggatccaagcagtgctagacatgctcttgaatgcccctccttttcctgccctccccccaggtatgctctggcatcccatttcttctggggtctgtggtccatcctccaggcatccatgtccaccatagaatttggttacttggtaagtgaccctggggatgggaatgctagctggggggctggggagcagcagcagccacactcttccaggaggcctggggagtcccgggtggctgtgggcagctgaggtggatgtagaatgctggtcccacgtcttctcaccactgtgtgggtgggtttccttccctaggactatgcccagtctcggttccagttctacttccagcagaaggggcagctgaccagtgtccactcctcatcctgactccaccctcccactccttggatttctcctggagcctccagggcaggaccttggagggaggaacaacgagcagaaggccctggcgactgggctgagcccccaagtgaaactgaggttcaggagaccggcctgttcctgagtttgagtaggtccccatggctggcaggccagagccccgtgctgtgtatgtaacacaataaacaagcttcttcttccca

SEQ ID NO: 5220 - protein, 395 aa, Homo sapiens
  ref <308>: DATABASE ACCESSION NUMBER: SWISS-Prot / Q9Y259
  ref <309>: DATABASE ENTRY DATE: 2001-10-16
MAAEATAVAGSGAVGGCLAKDGLQQSKCPDTTPKRRRASSLSRDAERRAYQWCREYLGGAWRRVQPEELRVYPVSGGLSNLLFRCSLPDHLPSVGEEPREVLLRLYGAILQGVDSLVLESVMFAILAERSLGPQLYGVFPEGRLEQYIPSRPLKTQELREPVLSAAIATKMAQFHGMEMPFTKEPHWLFGTMERYLKQIQDLPPTGLPEMNLLEMYSLKDEMGNLRKLLESTPSPVVFCHNDIQEGNILLLSEPENADSLMLVDFEYSSYNYRGFDIGNHFCEWVYDYTHEEWPFYKARPTDYPTQEQQLHFIRHYLAEAKKGETLSQEEQRKLEEDLLVEVSRYALASHFFWGLWSILQASMSTIEFGYLDYAQSRFQFYFQQKGQLTSVHSSS

SEQ ID NO: 5221 - DNA, 502 bp, Rattus norvegicus
  ref <308>: DATABASE ACCESSION NUMBER: EMBL / AA875054
  ref <309>: DATABASE ENTRY DATE: 2000-03-03
tttttttttttttttttgtcacacaggcattgtttattcctaagctttacagtgaaagtcaagtttgaaaggatagtttgctaccataataacactggggggtagggtggggtgagatacaacaggtatgagcttgtgttcagaggactgacttaagacttaaagctcttcatctctacaggtgaacatcgatggaggagccattgccttgggacatcctctgggagcatctggctgtaggattctagtgaccttgttacacaccctggagagagtgggtgggactcgtggtgttgcagccctgtgcattgggggtgggatggggatcgcaatgtgtgttcagagagggtgagccaccacccttacagttctcattcaaacactaaacagaaagaacgtgagaccagaggaccaaagtgaggacaggaacccaggtcgacagctcgttgtactttaatgtgagacacccaaggctaagacattacacccaacactgtcataa

SEQ ID NO: 5222 - protein, 556 aa, Rattus norvegicus
  ref <308>: DATABASE ACCESSION NUMBER: SWISS-Prot / P28480
  ref <309>: DATABASE ENTRY DATE: 1996-02-01
MEGPLSVFGDRSTGEAIRSQNVMAAASIANIVKSSLGPVGLDKMLVDDIGDVTITNDGATILKLLEVEHPAAKVLCELADLQDKEVGDGTTSVVIIAAELLKNADELVKQKIHPTSVISGYRLACKEAVRYINENLIINTDELGRDCLINAAKTSMSSKIIGINGDFFANMVVDAVLAVKYTDIRGQPRYPVNSVNILKAHGRSQIESMLINGYALNCVVGSQGMLKRIVNAKIACLDFSLQKTKMKLGVQVVITDPEKLDQIRQRESDITKERIQKILATGANVILTTGGIDDMCLKYFVEAGAMAVRRVLKRDLKRIAKASGASILSTLANLEGEETFEATMLGQAEEVVQERICDDELILIKNTKARTSASIILRGANDFMCDEMERSLHDALCVVKRVLESKSVVPGGGAVEAALSIYLENYATSMGSREQLAIAEFARSLLVIPNTLAVNAAQDSTDLVAKLRAFHNEAQVNPERKNLKWIGLDLVHGKPRDNKQAGVFEPTIVKVKSLKFATEAAITILRIDDLIKLHPESKDDKHGGYENAVHSGALDD

SEQ ID NO: 5223 - DNA, 634 bp, Homo sapiens
  misc_feature (1)..(634): n=a, c, g or t
  ref <308>: DATABASE ACCESSION NUMBER: EMBL / BG198443
  ref <309>: DATABASE ENTRY DATE: 2001-04-26
cacctacaagccagctcacaagataaaataggctgcaggcatgttctacctccagtaacttcaggatggttgcaccatcattagtaatggttacatcaccagtatcatccaccaacattttatccaagacaacggaccaagagcactttttacaatattggcaatcgaagctgcagccataatgttctgggagcggatcgcctccccactgctgcggtctccgaacacggacaaaggcccctccatcttcctggcggcggtacataccgaattctgctcctactgcgggcaaccagttatcgtggcctctcggccaaccggctaccacagcagtggcgacggtgtggagcggacccgagtgatgcaccgccccatccgcttcccggctgccccggctggccgcggggcacggcgggaagcagatctctgaacttttattttgccattagaaatattagctcttcttcccaactttcaggcaactatcaaagtactaaacaggatagacaacaaaatcttgtgacaacatttaaatgtatgaaatgtattttattactaaaatatataaaatttaaaaattacatttgaattatgtacttnaaaaataaaaattctaaatgtaaaaaaaaaaaaa

SEQ ID NO: 5224 - protein, 365 aa, Homo sapiens
  ref <308>: DATABASE ACCESSION NUMBER: SWISS-Prot / AAH12496
  ref <309>: DATABASE ENTRY DATE: 2002-10-01
MGTTVIKEVLQRAKVAPEEVSEVIFGHVLTAGCGQNPTRQASVGAGIPYSVPAWSCQMICGSGLKAVCLAAQSLAMGDSTIVVAGGMENMSKAPHLTHLRTGVRMGEVPLADSILCDGLTDAFHNYHMGITAENVAKKWQVSREAQDKVAVLSQNRAEHAQKAGHFDKEIVPVLVSSRKGLTEVKIDEFPRHGSNLEAMGKLKPYFLTDGTGTVTPANASGMNDGAAAVVLMKKTEAERRMLKPLARIVSWSQAGVEPSVMGVGPIPAIKQAVAKAGWSLEDVDLFEINEAFAAVSAAIAKELGLNPEKVNIDGGAIALGHPLGASGCRILVTLLHTLERVGGTRGVAALCIGGGMGVAMCVQRG

SEQ ID NO: 5225 - DNA, 507 bp, Rattus norvegicus
  ref <308>: DATABASE ACCESSION NUMBER: EMBL / AA875059
  ref <309>: DATABASE ENTRY DATE: 2000-03-03
tttttttttttttttttagaaaatatggtttttaatattttctcctttttgcatttataacataattcacttagacaatcacagaatccttttcttccaataccacaaactgtattacaaatgaaatctggtactgctgtttatcaaaatatacaagacaatcgctgttttatataaaaccactttatatgttaacttgttcccgaaaacctttttttttcttttttggcctggttttaaaaaaagttgttacaaatatttacagcattttcttctgttagatgaacattcttacaaacagaaaaagggaattttatgaacagaccatgtaaaacactagacaatgttagaggcttctagctgtgctatttgcccccctcaaatacagtactgaaaataactatccatcgttgctgtcccactctgttcatagtaaactcccattttctctaagcagtctattcaccaatagaaaatgaaaagtcaaggccgctctgcatgttatct

SEQ ID NO: 5226 - DNA, 354 bp, Homo sapiens
  ref <308>: DATABASE ACCESSION NUMBER: EMBL / R67025
  ref <309>: DATABASE ENTRY DATE: 2000-03-04
aaatgttgttacaaatatttacagcattttcttctgttagacgaacattcttaaaaactgaaaaggggaattttgatgaacagaccacgtaaaacaccagacaatgtcagaggctcctagctgtgctattttttttttcttagatacagtactgaaaatgcccatcaaactcgtcatcctaatccattctgttcacactgaaactcacattttctctaagtagtctattcagcagtagaaattgaaagtaaaggccgctctgcactggggtcttctttcagaaagggagcttgggggaaaatggcaaaatgctttacagagagggagttaaaaccacaacagtcagtctttggg

SEQ ID NO: 5227 - DNA, 558 bp, Rattus norvegicus
  ref <308>: DATABASE ACCESSION NUMBER: EMBL / AA875069
  ref <309>: DATABASE ENTRY DATE: 2000-03-03
tttttttttttttttgtaagaaattgtttataatatgttgcatttgtacttaagtcattccatctttcactcaggatgaatggaaagagtgactgttcacagacctcagtgatgtgagcactgtggctcaggagtgacaagttgctaatatgcagaagggatgggtgatacttcttgcttctcatgatgcatgtttctgtatgttaatgacttgttgggtagctattaaggtactagaattgataaatgtgtacagggtccttttgcaataaaactggttatgacttgatccaagtgtttaaccatacatcactgtgatagaatgtgggctttttcaaaggttgaagatacaagttttagccacagtgtaacagtttcctttaaaaaaaaaagtaaacctggcagctatagaatacactatgtgcatttataatagctattttatatattgtagtgttcaacatttttaaattatgttttacattcacaagtggtggggagtcttgtcattaaggtgtgtgtaatttagtccagttggtatttctgactagactgcat

SEQ ID NO: 5228 - protein, 135 aa, Rattus norvegicus
  ref <308>: DATABASE ACCESSION NUMBER: SWISS-Prot / P06351
  ref <309>: DATABASE ENTRY DATE: 2002-06-15
ARTKQTARKSTGGKAPRKQLATKAARKSAPSTGGVKKPHRYRPGTVALREIRRYQKSTELLIRKLPFQRLVREIAQDFKTDLRFQSAAIGALQEASEAYLVGLFEDTNLCAIHAKRVTIMPKDIQLARRIRGERA

SEQ ID NO: 5229 - DNA, 498 bp, Rattus norvegicus
  misc_feature (1)..(498): n=a, c, g or t
  ref <308>: DATABASE ACCESSION NUMBER: EMBL / AA875090
  ref <309>: DATABASE ENTRY DATE: 2000-03-03
tttttttttttttttttgataacagcagttgtggttttattgtgtccaacaaacacatcaataaatgaacttcaagcctgagcctgtaggtgccctgattctccttgcccaggcctaggcaccagcccccttctcacctgttccggggaggagtgggtataggaggtggcctggctgtaatgtctaactcacgtgaggtgtgcacatcagaagcacaaagtgggcaccggatgttgtgggttataagctcacttgatagcacaagcctctgatgaaaggcctgtcagctcctaggaagctgctactggttcgcctggttctgttcaggcatctgaggtaagaaggaagggctangggcgtggcttagcccaccttcaccgggcagcaggcatataaatacagagtataaatatagttgggctactagccgaaaaacaaccaagaaacaaccaggagagacggacactagccatgtgggcaggtcaagactgtgccact

SEQ ID NO: 5230 - DNA, 1542 bp, Homo sapiens
  ref <308>: DATABASE ACCESSION NUMBER: Refseq / NM_017595
  ref <309>: DATABASE ENTRY DATE: 2002-11-05
ggcacgaggcgcgagctcggagggcccggctggtgctgcgggggccccgggaggttgaaaactaagcatggggaagagctgcaaggtggtcgtgtgtggccaggcgtctgtgggcaaaacttcaatcctggagcagcttctgtatgggaaccatgtagtgggttcggagatgatcgagacgcaggaggacatctacgtgggctccattgagacagaccggggggtgcgagagcaggtgcgtttctatgacacccgggggctccgagatggggccgaactgccccgacactgcttctcttgcactgatggctacgtcctggtctatagcacagatagcagagagtcttttcagcgtgtggagctgctcaagaaggagattgacaaatccaaggacaagaaggaggtcaccatcgtggtccttggcaacaagtgtgacttacaggagcagcggcgtgtagacccagatgtggctcagcactgggccaagtcagagaaggtgaagctgtgggaggtgtcagtggcggaccggcgctccctcctggagccctttgtctacttggccagcaagatgacgcaaccccagagcaagtctgccttccccctcagccggaagaacaagggcagcggctccttggatggctgaagagctgccgttcctctttcacgatcccagccccatttcagtgtctggggctctggtagatgtgttgagggcaaagtagaggacaagctgtctttcccagtcagccagggagctccccgccaggccacgccccagccactttgctccctctcacctctgggaagtgcaaatactcttggttgacatccccttcctcagccctcccagcctactccccatcccagcttttagaggatctgctccactgtctcctggggcagttgtgggtcactgtcccttccagctgccccagacaggaagcagagtcaccacgcagcagtgtcccttcttgggtctgagttcctattataggtaggggccccaccctctgggcttcccatcagcgacacacacacacttatggcaccagcctggactccagaaaaagggtgtccaggtattgtgtgtatgcatttagttgtgcacacacaaatatgctcctatactggcattaggcgtctcctcatccctcaccctgacctttctcctgtccttttcttggctggaagaagttggcctcctgggagtgtagttttctgttttaaatcccccacccctggctgggctcagtggctcacccctgtaatcccagcactttgggaggccaaggcgggtcgattacttgaggtcaggagttcacgaccagcctggccaacattgtgaaaccccatctctgccaaaaatacaaaagttagccgggcgtagtggcacatgcctgtaatcccagctacccggggaggctgaggcaggagaattgcttgaactcagaaggcggaggctgcagtgagccgagatcgtgccactgcactccagcctggtcaacagagcaagactccatctcgaaaaaaaaaaaaaaaaaa

SEQ ID NO: 5231 - protein, 191 aa, Homo sapiens
  ref <308>: DATABASE ACCESSION NUMBER: Refseq / NP_060065
  ref <309>: DATABASE ENTRY DATE: 2002-11-05
MGKSCKVVVCGQASVGKTSILEQLLYGNHVVGSEMIETQEDIYVGSIETDRGVREQVRFYDTRGLRDGAELPRHCFSCTDGYVLVYSTDSRESFQRVELLKKEIDKSKDKKEVTIVVLGNKCDLQEQRRVDPDVAQHWAKSEKVKLWEVSVADRRSLLEPFVYLASKMTQPQSKSAFPLSRKNKGSGSLDG

SEQ ID NO: 5232 - DNA, 465 bp, Rattus norvegicus
  ref <308>: DATABASE ACCESSION NUMBER: EMBL / AA875099
  ref <309>: DATABASE ENTRY DATE: 2000-03-03
tttttttttttttttttcgacacactgaaaggatttattggccttaatcttcctcacaaaagtttcaagttacctagaagttctcagaatgtcacagtacaaagaggaaagaatgtgactaagtttaggggcaaagggaagcagcaacatggtgacgtgccctggtcagcctcagtgctcagacgtcctttttctgcagtaaaatcttgtgcaactcatcagcatcctcgctcgtcttcacccgaatcagcatggtgaccgggagagtgggctgcttctcatcaagtggggggttggggacacagacgataaggacattgttcttccctgtccgggtgcacggcatattgggtgggatcagaacattcagcagaatgttgcctaggttggtgtctgcccgcaccaagagctgggtcttctgagttgctgtgggttttaaatgcagggtccccacacccttctctt

SEQ ID NO: 5233 - protein, 467 aa, Rattus norvegicus
  ref <308>: DATABASE ACCESSION NUMBER: SWISS-Prot / O08587
  ref <309>: DATABASE ENTRY DATE: 2002-06-15
MAKRVAEKELTDRNWDEEDEVEEMGTFSVASEEVMKNRAVKKAKRRNIGFESDSGGAFKGFKGLVVPSGGGGFSGFGGGSGGKPLEGLTNGNSTDSATPFSSAKTAAEPKAAFGSFAVNGPTTLVDKKISSPKCNSSNQPPSSGPASSTSCTGNTYHKQLAGLNCSVRDWIVKHVNTNPLCDLTPIFKDYERYLATIEKQLENGGSSSSERQTDRATAAMEPPSLFGSTKLQQDSPFSFHGNKAEDTSEKLEFTAEKKSDAAQGATSASFNFGKKIESSVLGSLSSGSLTGFSFSPGNSSLFGKDAAQSKAASSPFSAKASESQAGGSSSECRDGEEEESDEPPKVVVTEVKEEDAFYSKKCKLFYKKDNEFKEKGVGTLHLKPTATQKTQLLVRADTNLGNILLNVLIPPNMPCTRTGKNNVLIVCVPNPPLDEKQPTLPVTMLIRVKTSEDADELHKILLQKKDV

SEQ ID NO: 5234 - DNA, 1757 bp, Homo sapiens
  ref <308>: DATABASE ACCESSION NUMBER: Refseq / NM_007172
  ref <309>: DATABASE ENTRY DATE: 2002-11-05
cgagcactaagtcctctgagttccgcagcgcagcaccggaagcggccgagcgcgctcagcccggcgacccctgcgggctccagacccctgcgccgctgcgccccgggtttcgccgcaaccaagacccagcgagtgcagcggcggccgctgaggaggttcgaaaacatggccaaaagaaatgccgagaaggaactgacagataggaattgggatcaagaagatgaagctgaagaggtgggaacattctccatggccagtgaggaagtcttgaagaatagagccataaagaaagcaaagcgcagaaatgttggatttgaatctgacactggaggagcctttaaaggttttaaaggtttggtggtaccttctggaggaggacgcttttctggatttggtagtggcgctggagggaagcctttggaaggactgtcgaatggaaacaacataaccagtgcccctcccttcgccagtgcaaaggcagcggcagatcccaaggtagcctttggttctcttgctgcaaatggccctaccaccttggttgataaagtttcaaatcccaaaactaatggggacagtcagcagccctcctcctctggccttgcttccagtaaagcttgtgtcggaaatgcctatcacaagcagttggccgccttgaactgctccgtgcgggattggatagtgaagcacgtgaatacaaaccccctctgtgatctgacacctatctttaaagactatgagaaatatttagcaaacattgaacagcaacacgggaacagtggcaggaattctgaaagtgaatctaacaaagtggcagctgaaacacagtctccttccctttttggctcaacaaaattacagcaagagtcaagctttttgtttcatggcaacaaaactgaagatacacctgacaagaagatggaggtggcatctgaaaagaaaacggacccatcatcactaggagcgacaagtgcctcatttaatttcggcaagaaagttgatagctctgttttgggctcattaagctctgtccccctgactggattttctttctcccctggaaactccagtttatttggcaaagatactacccagagtaaaccagtctcttcaccatttcccactaaaccattggagggccaagcagaaggtgacagtggtgaatgcaaaggtggagatgaagaagagaatgatgagccacccaaagtagtagttaccgaagtaaaagaagaagatgctttttactccaaaaagtgtaaactgttttacaagaaggacaatgagtttaaagagaaaggcataggtactctgcatttaaaacctacagcaaatcagaagacacagcttttggtgcgggcagacaccaatttaggcaacatattgctgaacgttctgattccacccaatatgccatgtacgcgaacagggaagaataacgttcttatcgtctgtgttccaaatccaccaattgacgagaagaatgccaccatgccagtcaccatgttgattcgggtaaaaaccagcgaggatgcagacgagttgcacaaaattttactggagaaaaaggatgcctgaacacgcaaagtcggctgcagaattattgccaagttgctgctgcttccaccgccccttaaagttagtcagtttttcttctcttctttgacattctaagaacttatagataacttaaaacttttgtgaggaagattaatgtggccaataaaacctttaaatgttaagtgtcaaaaaaaaaaaaaaaa

SEQ ID NO: 5235 - protein, 468 aa, Homo sapiens
  ref <308>: DATABASE ACCESSION NUMBER: SWISS-Prot / Q9UKX7
  ref <309>: DATABASE ENTRY DATE: 2002-06-15
MAKRNAEKELTDRNWDQEDEAEEVGTFSMASEEVLKNRAIKKAKRRNVGFESDTGGAFKGFKGLVVPSGGGRFSGFGSGAGGKPLEGLSNGNNITSAPPFASAKAAADPKVAFGSLAANGPTTLVDKVSNPKTNGDSQQPSSSGLASSKACVGNAYHKQLAALNCSVRDWIVKHVNTNPLCDLTPIFKDYEKYLANIEQQHGNSGRNSESESNKVAAETQSPSLFGSTKLQQESTFLFHGNKTEDTPDKKMEVASEKKTDPSSLGATSASFNFGKKVDSSVLGSLSSVPLTGFSFSPGNSSLFGKDTTQSKPVSSPFPTKPLEGQAEGDSGECKGGDEEENDEPPKVVVTEVKEEDAFYSKKCKLFYKKDNEFKEKGIGTLHLKPTANQKTQLLVRADTNLGNILLNVLIPPNMPCTRTGKNNVLIVCVPNPPIDEKNATMPVTMLIRVKTSEDADELHKILLEKKDA

SEQ ID NO: 5236 - DNA, 452 bp, Rattus norvegicus
  ref <308>: DATABASE ACCESSION NUMBER: EMBL / AA875105
  ref <309>: DATABASE ENTRY DATE: 2000-03-03
tttttttttttttttttacattgccaaatttttctttaattttttttttttgagacactgggaattcccagagcttaccaacaattaactctactgttaaatgttaactgtaagtcattacagtgggtcaaacacagagccccatgcactccaccaccaaagaaaacacccagaaaatctttaaatatttccatgactctgaaggtaggagagaaggtgtggaggcctggcctaggggatagtgcttgtctggaaaaggccttagattcaatcccaaccaccgccaaacaggacagacaggaagagaactaacagaaggttaagacagaaacaccaacagctggattggaaatacggctcttgagatgctctacacgttcacgtctttgctgaaccaatacattttctacaaaaaaaaaaaaaaaaaaaaaacaattgcggccctcgtgccg

SEQ ID NO: 5237 - DNA, 559 bp, Rattus norvegicus
  ref <308>: DATABASE ACCESSION NUMBER: EMBL / AA875107
  ref <309>: DATABASE ENTRY DATE: 2000-03-03
tttttttttttttttttgtaggattattagttttcacatttctattggagggcaacagggaagggacggattccatcaacagaagcattcacaggttcttgagccattccaagcttggacccagaggttcctgtgggtggctgggcacatcaggcatgttcccattatctctcacaggcactgggtagttgtagggtgtggccttgttgatcatgctagcatactgggtgtaggggctaatcatgggcataattatagcgaggccccagacagtgaaggacaccaccagcaccggctcctttgcccaggcattcttaaggaaggcggagattcctagaggtgagaaaaaagtcgcccttggggactgctgcggtgacctctaacactctcgtatcaccctgctctgcaccctattggctgctgcgcccctcttctgggacggatcctaccactccccaaggctctactgagcctcagccacgggtcaagccacggtttcctggaattacatggtccccgcgcgcccagaacgcgtacttactagccctcgtgccgaatt

SEQ ID NO: 5238 - DNA, 583 bp, Rattus norvegicus
  ref <308>: DATABASE ACCESSION NUMBER: EMBL / AA875121
  ref <309>: DATABASE ENTRY DATE: 2000-03-03
ttttttttttaaatacattaaagattgtgctcatctccatgcagcaatggagatgagcacaatctttaatgtatttaaaaaataaaacagtgggcagaacagtgcacaaagtcctggttctcctggatcttggagagaagggatggggaggaaaccagctctctgtggagaatgagttcatggcccacaggcaagaaatgttcccacatcttctggatgcggaaggctctaggaaaggggcagagaagaatgctggtggaaaagggtctgaccctttctctttttctgagggcagaactggcagagtggaaatcctgtacacccttgggaaggaagagcacaggctgccctgccctttagcagtggtggtgagtgcccaagccaggaaacacacaagagaattatttcttcaaccacacgtttcaagaaaatgccataaatatgttatttaatattctcgtttcatagcattggacacatagctcgatatattgaaatattgattccttggagacaaaaatgaaaaaaaaaaaaaaaaaaaacctttgcggccgctccaacatcagcctcgtgccgaattctt

SEQ ID NO: 5239 - protein, 335 aa, Rattus norvegicus
  ref <308>: DATABASE ACCESSION NUMBER: SWISS-Prot / Q62725
  ref <309>: DATABASE ENTRY DATE: 2002-06-15
MSTEGGFGSTSSSDAQQSLQSFWPRVMEEIRNLTVKDFRVQELPLARIKKIMKLDEDVKMISAEAPVLFAKAAQIFITELTLRAWIHTEDNKRRTLQRNDIAMAITKFDQFDFLIDIVPRDELKPPKRQEEVRQSVTPAEPVQYYFTLAQQPTAVQVQGQQQGQQTTSSTTTIQPGQIIIAQPQQGQTTPVTMQVGEGQQVQIVQAQPQGQAQQAQSGTGQTMQVMQQIITNTGEIQQIPVQLNAGQLQYIRLAQPVSGTQVVQGQIQTLATNAQQITQTEVQQGQQQFSQFTDGQQLYQIQQVTMPAGQDLAQPMFIQSANQPSDGQTPQVTGD

SEQ ID NO: 5240 - DNA, 2684 bp, Homo sapiens
  ref <308>: DATABASE ACCESSION NUMBER: EMBL / AK055329
  ref <309>: DATABASE ENTRY DATE: 2002-08-06
ttttaatgggtttagattgggtgtccctccatcttgcctcaagtgggcaattctggaatggtctaccatgaacttgagaggtcgttttttcttggtagttcaaattctgtgaggctggaagtctcagagaagcattttgattgaacactgcgtgcaggaatgcagcttcatcccattagcattttcctcatggaagagtcctgcagtgaagttagctcttgaaggccagagggaaatttgctccagagcagaggcaatacttgcctgttagccacaagaagcttccccttgcaacaaaggcaggctgggcagccagggcaggtggtttctggaccccgcagatagagacctagtctatccatgctcccagaacccctttcatttcctctaaattgagggtgtgaatgtctgcagtcctcctctgctgaccatcatctttgctgagctacagttctctgacgtggtaaccgccttggtcctcttttcatccccagctcaaaacactaatactttcatggtacactggagcattaagagcctgagttaaggcttttagcacacaattaaatgcagcatgtggtattattgtattatctgagatttaatcgtaagcatgagagactctaagggcgctttcgtagctttggtttcccatgatggggttttctatgaaaggtttattgattctgcttccccttgggaggtgtttggccagaagctagtgctgaacaccaaagatcctaaaagccccacagaccccccatccagcctggctcttggggacagagatggttaagcagtccagcttttgcctccaaaatgtgcagcatggggcagggcagtgtgagggctatgatgcggaatgatggctgtttgctttgggatcctggcagatgctggatctctttacagatgggagcgaaagaggcccacacttaatgtacaggcattctgatgatgtcagtcagataaattcctaagataagctgtgatcatgtagctaagagctggcaaataatgagcatgcagccatgctgttctcacctttgtgacaggatcttctgggagttttttctgaagtccattcagggaatatattctcttctgtgctgtgtgacttgtgggatgtggatgttctgattttgcttgttttgacctctgtttaaaagggacttttttcagggcaggcttctttggagggcttgaggggtagggggcaatcaacatctccggtcatggaaagtttgcctgtttgagattatactcaatgtcttatggtctctttgtctctgcccctgccctaggtgcagctgaatgccggccagctgcagtatatccgcttagcccagcctgtatcaggcactcaagttgtgcagggacagatccagacacttgccaccaatgctcaacaggtatgtgccccagagacacaaggcctgtgttggagaccaggagcagatggcttctgacaggaaaggagcgctcagcacacagctgtcttgccacctcatccttcaaccagaagcaccacccccacaccctccatatccttctgcacccaagaggcatgggtggtaattggaacattagattcaaagtgttttctcttaccatcttgttctcaaggggcaaagaaatgcaagtcaggggaagcctcgaaggtgcctgaaagaaaccttacaggtgtgcacacccatcagacctgggaaatgttcgacagatcgcctgatcgtcaggctgtttccatctttaaacccaagtggctgttgtgttctggcacctcctgtgctctttggaaagcttacttagattttacccctacctcctcttgcatccctaaccagaaaaattgcccttctcctctcctctcgtgccctacaatattgatggctatgagtcacagatggtgagggggctgcctccctgggcttgggggtgttgagggacatgggtattacttgcagaagatggggggtgctggtcaaggggaggcattgttaatggattcttttgcctcagacccaaaaaaagcagcgatcgtttaagagctggacccgtctggcccagctgcatttctggtgatgtatctattgacagtggtgacagagctgagtttgtagagcaggtctccaaagatctcatttgggaaaatacgaggaatgagccaaaagcaaggcttctgagttccatatagtctctgggatcattaagggctgtttctgtgcccactccccggcttacctaaggactcggcttttccgtaactgatactgactcacacccttcccccagcccctctttttaacctcataagattcttccctgggatccaaaaaacataacggcatgggagtgggaggaaatgagaaggaagcttcttggttcctcagaagtcagtttggggctgggcacagtgggtcacgcctgtaatcccagcactttgggagggaggctgaggcaggtgatcacgtgaggtcgggagtttgagaccagcctggccaacatggcaaaaccgtttccactaaaaatacaaaattagctgggcgtggtggtgcatgcctgtcatcccagctacttgggaggctgagacacaagaatcacttgaacccaggaggtggaggttgcagtgagctgagattgtgccactgcactccagcctgggcgacagagtgagactctgtctc

SEQ ID NO: 5241 - DNA, 136 bp, Rattus norvegicus
  ref <308>: DATABASE ACCESSION NUMBER: EMBL / AA875124
  ref <309>: DATABASE ENTRY DATE: 2000-03-03
tttttttttttttttttaattatttaaaaagaatatttaatgacaacgaaaggaagttcaagaatatctatacatctatgtctataatctatattatatttatgcagtgggaaagcagatattgaaatttgtatag

SEQ ID NO: 5242 - DNA, 596 bp, Rattus norvegicus
  ref <308>: DATABASE ACCESSION NUMBER: EMBL / AA875127
  ref <309>: DATABASE ENTRY DATE: 2000-03-03
tttttttttttttttttcactattgtatgcaagaccctttccacataaaaataaagctgttgttgaattaatattattcaagtctcttggattgctgcctgaaattgcagctagaaaagtctttccagataaaaatgatgtgcctgaggaaaaacagatactcagtatggtaaccctctgcctcgacctctgccagctgatgtgctaatgtgtcccctgtatccttgtgagtatccaggtccttgggcaggagaagtccaggtctgtccatgcatgaggctggggccacctggattttcctgtaagttaccaccatagttatagttgtgtatctttgctggcaaggggtgagtactctccggccctgtggaagggtcactgctgtttgtgaggaccgtgataggaccatggctgtactcaaatctatggtccttgtctccactaaacagcatgggaccagcattgaggtaaatgtctccgtatccagctactgaactgggaaatgactcggtgaaggcagaagtctgaggtggaccaccagtgtgagatgaagtagtactgtagttatccagagactgaatatctgagtttccgat

SEQ ID NO: 5243 - protein, 135 aa, Rattus norvegicus
  ref <308>: DATABASE ACCESSION NUMBER: SWISS-Prot / BAB26250
  ref <309>: DATABASE ENTRY DATE: 2002-10-01
METFTSMLVPCCLVETRTIDLNIAMVLSQSSQTAMTLPQGQRVLIPCQQRCTTITMVVTYRKIQVALASCMDRPGLLLPKDLDIHKDTGDTLAHQLAEVEAEGYHTEYLFFLRHIIFIWKDFSSCNFRQQSKRLE

SEQ ID NO: 5244 - DNA, 5246 bp, Homo sapiens
  ref <308>: DATABASE ACCESSION NUMBER: Refseq / NM_003718
  ref <309>: DATABASE ENTRY DATE: 2001-05-15
ggcgcttttcccggccggctctggtgctcggtgtccctccgccgccgctcccgtttccggcgggggagatggccaggatctgacccgggaggaggccgcacccgcgccgcgctctgcggctggctctaggcgatgccgagcagctcggacacggcgctggggggaggcgggggcctgagctgggcggagaagaggttggaggaacgccgcaagcggaggcgattcctgtcccctcagcagccgccgctgctgttgccgctcctgcagccgcagctcctgcaaccgccgccgcccccgccgcctctgctcttcctggctgctcccggcacggccgccgccgcagccgccgccgccgcggcctcctcctcttgcttcagcccgggcccccctctggaggtcaagcggctggcgagaggcaagaggcgcgcaggagggcggcagaagcggcgtcgcgggccccgcgccgggcaggaggcggagaagcgtcgggtcttctcgctgccccagccgcagcaggacggcggtggcggtgctagtagcggcgggggtgtgaccccgctggtggaatacgaggatgtgagctcccagtccgagcaggggctgctgctggggggggccagcgcggcaacggcggcgacggctgccgggggaacggggggcagcggcgggagtccggcctcctcctccggcacccagcggcgcggggaggggtcggagcgcaggccccgccgggaccgccgcagcagcagtggccgcagcaaagagcgccaccgcgagcaccggcggcgggatgggcagcgcggtggcagcgaggcctccaagtcccgcagccgccacagccacagcggcgaggaacgggccgaggtcgccaagagcggcagcagcagcagcagcggcggccgccggaaaagcgcttcggccacatccagcagcagtagcagccgcaaggaccgggactcgaaggcccaccgcagccggactaagtcgtccaaggagccgccttcggcctacaaggaaccgcccaaggcctaccgggaggacaagaccgagcctaaggcctacaggcggcggcggtccctcagcccactgggaggccgggacgacagcccggtgtcccacagggcctctcagagcctgaggagccgcaagtcccccagcccggcaggaggtggcagcagcccctattctcggcggctgccgcgctccccgagcccctacagtcgccgccgctcccccagctacagccgccacagctcctacgagcggggcggcgacgtgtcccctagtccctacagcagcagcagctggcgccgctctcgcagtccctacagccctgtgctcagacggtctggaaaatcccgaagcagaagcccgtattcatctaggcattcaagatctcgtagcaggcacagattgtctagatccagaagtcgtcattctagtatttctcctagcacactaactctgaagagtagcctggcagctgaattgaacaagaataaaaaagcacgagcagcagaggcagcaagagccgcagaagcagcgaaagctgcagaagcaactaaggctgctgaggctgctgccaaggctgcaaaagcttcaaacacttctacacctaccaaggggaacacggaaactagtgccagtgcatcacaaacaaaccatgtgaaggatgtgaagaaaattaaaattgaacatgcaccttctccctcaagtggtggaactttaaaaaatgacaaagcaaaaacaaagccacctcttcaggtaacgaaggtggaaaataatttgattgtagataaagccaccaagaaagcagtcatagttggaaaggagagtaaatctgctgctacaaaggaggaatcagtatctcttaaagagaaaaccaaaccacttacaccaagcataggagccaaggagaaggagcaacatgtagctttagtcacctctacattaccaccgttacctttgcctcccatgctgcctgaagataaagaagctgatagcttacgaggaaatatttcagtaaaagcagttaaaaaagaagtagaaaagaaactccgatgtcttcttgctgatttaccgctgccccctgagctaccaggaggagatgatctttcaaagagtccagaggaaaagaaaacaacaacacagttacatagtaaaaggaggcctaaaatatgtgggcctcgctatggtgaaaccaaagaaaaagatattgactggggaaaactctgcgtggataaatttgatatcatcggaattattggagaaggtacttacggacaagtttacaaagccagggataaagacactggagaaatggtagccttaaaaaaagtacgtctggataatgaaaaggaaggctttccaattacagcaattcgagaaattaaaattctccggcagcttacccatcagagtattatcaatatgaaggaaatagtgactgataaagaagatgctttggatttcaagaaggacaaaggtgcattttatctggtgtttgaatatatggaccatgatctgatgggactactggaatcaggcttggttcattttaatgaaaatcacataaagtcatttatgagacagctcatggagggtctggattattgtcataagaagaactttttgcatagagatattaaatgttccaatatccttctaaataatagagggcagataaaacttgcagactttggacttgctcgattgtatagctcagaagaaagtcggccgtatactaacaaggtaattactttatggtaccgtccacctgaactgctactgggagaagaacgatacacaccagccattgatgtatggagctgtggctgtatccttggcgaactcttcactaaaaaacctatatttcaagcaaatcaggaacttgcacaactagaattaataagccgaatatgtgggagtccatgtcctgcagtgtggcctgatgtaatcaaactaccatatttcaacaccatgaaaccaaagaagcaatatcgtcgaaagttaagagaagaatttgtttttattcctgcagctgcgctagacttatttgattacatgcttgccttggatcctagtaagcgctgcactgctgaacaggctcttcagtgcgagttcctccgagatgtggaaccctcaaaaatgcctccaccagatctccctttatggcaagattgtcatgagttatggagtaaaaagcgaagaagacagaagcagatgggcatgactgatgatgtttccacaattaaagcccccaggaaggacttgtctctgggcttggatgacagcagaaccaacacaccccagggtgtgctgccatcttcacagctgaaatctcagggcagctcaaatgtggcacctgtaaaaacaggccctggacagcacttaaaccacagtgaattggcaattctactaaacctactacaatctaaaacaagtgttaatatggctgattttgtccaagtgttgaacattaaggtaaactctgagactcaacagcagctaaataaaataaaccttcctgctggaattttggcaacaggtgaaaaacagacagatccatcaacaccacaacaggagtcttcgaaaccgttgggaggaattcagccttcttctcagaccatccagcctaaaatggagactgatgctgcccaggcggctgtgcagagtgcatttgcagttctgttgactcagttaataaaggctcagcagtcaaagcagaaagatgtgctactagaagagagggaaaatggatcgggacatgaagcgtcattacaactcaggccacctccagaacctagcactccggtgtcgggacaagatgacctcatccagcatcaagatatgaggatcttggagctaacgccagaaccagaccggcctcgaattctgcctcctgaccaacgacctcccgagcctcctgaaccaccaccagtcactgaggaagatctagattatcggacagaaaaccagcatgtacccaccaccagttcttcattaactgaccctcatgccggagtgaaggcagccctgttacagctgcttgctcagcatcagccccaggatgaccccaaaagagaaggtgggattgattatcaagcaggagacacttacgtgtccacttcagactacaaggacaactttggatcctcttctttctcttctgctccttatgttagcaatgatggtctaggaagcagttctgctccaccactagaacgacgtagtttcattggaaattcagatattcagtctttggataactacagtactgcttcatctcattctggtggtccacctcagccttctgccttttctgagtcatttcccagttcagtagctggatatggagacatttacctcaatgctggtcccatgttgtttagtggagacaaggaccatagatttgaatatagccatggtcctattgcagtcctggcaaacagcagtgacccttccacggggccagagagtactcatcctttgccagcaaagatgcacaactataactatggtggtaacttacaggaaaatccgagtggccccagcctcatgcatggacagacctggacttctcctgcccaaggacctggatattcacaaggatacaggggacatattagcacatcaactggcagaggcagaggcagagggttaccatactgagtatctgtttttcctcaggcacatcatttttatctggaaagacttttctagctgcaatttaaggcagcaatccaagagacttgaataataataattcaacaacagctttatttttatgtggagaagggtcttgcatacaatagtttaaaaaagacaaaaaaaacctttgcttaaattcatgctgttctaaaaactagatcgattgtacatcttcacaaattctagttaacaattttattttgtattcttgcagttttaagtggatgctaattttaggggcataagccttttatggccctcttgcagatcttctgaactatgcacatttgtgctttttttgtaagtttggaccaacttttatgtaacaaacagcccctccccacctccagttttacaacaatcagaaagggcactgatttatttggtatttttctttttacaaagctacctttagtcaaaggtcactgtcagtctttgcacctgctttcagtgttattgtgaaaggtgtactttgtgctcatttcagaaaataaaacacaacctttctcttgatgcaacagttttataaaaaaaaa

SEQ ID NO: 5245 - protein, 418 aa, Homo sapiens
  ref <308>: DATABASE ACCESSION NUMBER: SWISS-Prot / Q14004
  ref <309>: DATABASE ENTRY DATE: 2001-10-16
MLPEDKEADSLRGNISVKAVKKEVEKKLRCLLADLPLPPELPGGDDLSKSPEEKKTTTQLHSKRRPKICGPRYGETKEKDIDWGKLCVDKFDIIGIIGEGTYGQVYKARDKDTGEMVALKKVRLDNEKEGFPITAIREIKILRQLTHQSIINMKEIVTDKEDALDFKKDKGAFYLVFEYMDHDLMGLLESGLVHFYENHIKSFMRQLMEGLDYCHKKNFLHRDIKCSNILLNNRGQIKLADFGLARLYSSEESRPYTNKVITLWYRPPELLLGEERYTPAIDVWSCGCILGELFTKKPIFQANQELAQLELISRICGSPCPAVWPDVIKLPYFNTMKPKKQYRRKLREEFVFIPAAALDLFDYMLALDPSKRCTAEQALQCEFLRDVEPSKCLHQISLYGKIVMSYGVKSEEDRSRWA

SEQ ID NO: 5246 - DNA, 596 bp, Rattus norvegicus; identical to SEQ ID NO: 5242
  ref <308>: DATABASE ACCESSION NUMBER: EMBL / AA875127
  ref <309>: DATABASE ENTRY DATE: 2000-03-03

SEQ ID NO: 5247 - protein, 135 aa, Rattus norvegicus; identical to SEQ ID NO: 5243
  ref <308>: DATABASE ACCESSION NUMBER: SWISS-Prot / BAB26250
  ref <309>: DATABASE ENTRY DATE: 2002-10-01

SEQ ID NO: 5248 - DNA, 5246 bp, Homo sapiens; identical to SEQ ID NO: 5244
  ref <308>: DATABASE ACCESSION NUMBER: Refseq / NM_003718
  ref <309>: DATABASE ENTRY DATE: 2001-05-15

SEQ ID NO: 5249 - protein, 418 aa, Homo sapiens; identical to SEQ ID NO: 5245
  ref <308>: DATABASE ACCESSION NUMBER: SWISS-Prot / Q14004
  ref <309>: DATABASE ENTRY DATE: 2001-10-16

SEQ ID NO: 5250 - DNA, 596 bp, Rattus norvegicus; identical to SEQ ID NO: 5242
  ref <308>: DATABASE ACCESSION NUMBER: EMBL / AA875127
  ref <309>: DATABASE ENTRY DATE: 2000-03-03

SEQ ID NO: 5251 - protein, 135 aa, Rattus norvegicus; identical to SEQ ID NO: 5243
  ref <308>: DATABASE ACCESSION NUMBER: SWISS-Prot / BAB26250
  ref <309>: DATABASE ENTRY DATE: 2002-10-01

SEQ ID NO: 5252 - DNA, 5246 bp, Homo sapiens; identical to SEQ ID NO: 5244
  ref <308>: DATABASE ACCESSION NUMBER: Refseq / NM_003718
  ref <309>: DATABASE ENTRY DATE: 2001-05-15

SEQ ID NO: 5253 - protein, 418 aa, Homo sapiens; identical to SEQ ID NO: 5245
  ref <308>: DATABASE ACCESSION NUMBER: SWISS-Prot / Q14004
  ref <309>: DATABASE ENTRY DATE: 2001-10-16

SEQ ID NO: 5254 - DNA, 596 bp, Rattus norvegicus; identical to SEQ ID NO: 5242
  ref <308>: DATABASE ACCESSION NUMBER: EMBL / AA875127
  ref <309>: DATABASE ENTRY DATE: 2000-03-03

SEQ ID NO: 5255 - protein, 135 aa, Rattus norvegicus; identical to SEQ ID NO: 5243
  ref <308>: DATABASE ACCESSION NUMBER: SWISS-Prot / BAB26250
  ref <309>: DATABASE ENTRY DATE: 2002-10-01

SEQ ID NO: 5256 - DNA, 5246 bp, Homo sapiens; identical to SEQ ID NO: 5244
  ref <308>: DATABASE ACCESSION NUMBER: Refseq / NM_003718
  ref <309>: DATABASE ENTRY DATE: 2001-05-15

SEQ ID NO: 5257 - protein, 418 aa, Homo sapiens; identical to SEQ ID NO: 5245
  ref <308>: DATABASE ACCESSION NUMBER: SWISS-Prot / Q14004
  ref <309>: DATABASE ENTRY DATE: 2001-10-16

SEQ ID NO: 5258 - DNA, 598 bp, Rattus norvegicus
  ref <308>: DATABASE ACCESSION NUMBER: EMBL / AA875135
  ref <309>: DATABASE ENTRY DATE: 2000-03-03
tttttttttttttttttatgacaaaatcaaatatattcaaatggtttctcttacggccagttttaccaagatatcaagagaagataaacaactttcaaaattagtatcaaaacaggacactttaaatctacccacatgtacagaggtataatctttgttcttttcaaagctgagcacagtgaggttggatgagacgtttacttattaacacctgaaaccacaggacttgctgagttctgccctatgacatgtgaactgtcagcatggtaatcaggggaccctccggattcagacctcattaatactgttaacgacagctgtgatagttcatatattaatctttttactcagtaataattttgtttttatgtacaagtacacaggtatgatattatttgagtctaaaatagttaaaaaccaaaaaaaaaaaaaaaccaaccaaacaaacaaaaaaaaccaaaccccaaatccctcatattttgtaaatgtggtagtttcatgctttcttatgtcatgtcaatacctgactacactaagacaactttaacagtggagtaaatgctttaaacatctaattaagaataaattctagccaata

SEQ ID NO: 5259 - protein, 179 aa, Rattus norvegicus
  ref <308>: DATABASE ACCESSION NUMBER: SWISS-Prot / P51646
  ref <309>: DATABASE ENTRY DATE: 1998-07-15
MGILFTRIWRLFNHQEHKVIIVGLDNAGKTTILYQFSMNEVVHTSPTIGSNVEEIVVNNTRFLMWDIGGQESLRSSWNTYYTNTEFVIVVVDSTDRERISVTREELYKMLAHEDLRKAGLLIFANKQDVKECMTVAEISQFLKLTSIKDHQWHIQACCALTGEGLCQGLEWMMSRLKIR

SEQ ID NO: 5260 - DNA, 1281 bp, Homo sapiens
  ref <308>: DATABASE ACCESSION NUMBER: EMBL / AF100740
  ref <309>: DATABASE ENTRY DATE: 1999-06-29
tcagcctgagccgggggaagccaggcggcccgggtgtctggaggggggggggtccgctgcccgagaatgggaattctcttcactagaatatggagactgttcaatcaccaggagcacaaagttatcattgttgggctggataatgcagggaaaactaccattctttaccaattttctatgaatgaagttgtacatacatctcctacaataggaagtaatgtagaagagatagtgattaataatacacgtttcctaatgtgggatattggtggccaagaatctcttcgttcttcctggaacacttactatactaacacagagtttgtaatagttgttgtggacagtacagacagagagaggatttctgtaactagagaagaactctataaaatgttagcgcatgaggacctaagaaaagctggattgctgatttttgctaataaacaagatgttaaagaatgcatgactgtagcagaaatctcccagtttttgaagctaacttctattaaagatcaccagtggcatatccaggcatgctgtgctctaactggcgagggattgtgccaaggacttgaatggatgatgtcacgacttaagattagatgatctctactgacctcttctcatagattttgtataaatgaagtgctggactttacctgaaagctgcaaaaattaatggtttagatatatttataataaactgatttaaactttttctataagaagaaaaattaagaccacttatttgaaaacaaagatgaagtctcaccttccagtttgctttctcattagttttttccaaagtaagttattgaagctgtgattgacatttttctcataatgaatcctctcaggacattgtgtagcctatggtaagtacaaagggagaggaagacattttgaattttaagagctttattatcagtttaaccctccctagttgaatgttattttcttcttgttccattaagtcagaatacaaatcagcacagatattcgaatgtttccaatattttaaaatgtaatgttacttatgaaaagtattttgcttaaggttgtgtgtgtattgtgtatatacctcaagttcaagttaatggcattgatttatgttccagacaaaaataacacaaataataatatccttcgttataaccacaatgagataagtattggcattagtgttcagtgccattttatactttctctctgtgttctctgtattgtactaaccaacctcccaaatcgctgagctgcttgtttaaaaaaaaaaaaaaaaaa

SEQ ID NO: 5261 - protein, 179 aa, Homo sapiens
  ref <308>: DATABASE ACCESSION NUMBER: SWISS-Prot / Q9Y689
  ref <309>: DATABASE ENTRY DATE: 2002-06-15
MGILFTRIWRLFNHQEHKVIIVGLDNAGKTTILYQFSMNEVVHTSPTIGSNVEEIVINNTRFLMWDIGGQESLRSSWNTYYTNTEFVIVVVDSTDRERISVTREELYKMLAHEDLRKAGLLIFANKQDVKECMTVAEISQFLKLTSIKDHQWHIQACCALTGEGLCQGLEWMMSRLKIR

SEQ ID NO: 5262 - DNA, 487 bp, Rattus norvegicus
  ref <308>: DATABASE ACCESSION NUMBER: EMBL / AA875147
  ref <309>: DATABASE ENTRY DATE: 2000-03-03
tttttttttttttttttaaatttgttaaatgccacttttatttacagttggcgctttacacctgagagtgattatcaagcaggcagcttatttcttttcaaacatctcataacatacacacctctttgctggcttcatcctactgcacaatatatagatgctcaccacatatatgtgcacacacacagacacacacgggcacacgcaccactgcacatgctggtaacatttgcaacctacacctttttgtttgctctccacattcatgttgaattatttcataaaaaccagaacaaagtgttattcttgccaaacatcggagtcactaggaagagagaggaacagtgggtggggacgagatgtgctacgttcagtcaagaagccacagctgtgcctgggcactgatcgagactctggctgcccccctgggccttgccatgagtttcctgcccacctgtcagaacacagcctatggggcaaggggggt

SEQ ID NO: 5263 - DNA, 4404 bp, Homo sapiens
  ref <308>: DATABASE ACCESSION NUMBER: EMBL / D87440
  ref <309>: DATABASE ENTRY DATE: 2002-05-12
gtcgagcagcggcggcggcggcggcagtggcggtcccactggcaggcgggcaagaggggagtccgggcggcggccggcgtgggagccgggggaccaccatggtaaagaagcggaaaggccgcgtcgtgatcgactcggacacagaggacagcggcagcgacgagaacctggatcaggagctcttgtccctggcaaagcgaaagcgcagtgactctgaggagaaggagccgcctgtgagtcagcctgcagcctcgtcagactcggagacgtctgacagtgacgatgagtggacatttgggagcaataaaaataagaagaaaggaaaagccagaaaaatagagaagaaaggaaccatgaagaaacaggccaacaaaactgcctcctcaggcagttcagacaaagacagttcagctgagagctcagcccctgaggaaggtgaagtgtcagactctgacagcaacagctcctcttccagttcagattcagactcttcctcagaagatgaagagttccatgatggctatggagaagacctcatgggagatgaggaagacagggcccgtctggaacagatgacagagaaagagagagagcaagaactgttcaatcgcatagagaagagggaggtgttgaaaagaagatttgaaatcaagaaaaaactaaaaacagccaaaaagaaagaaaagaaagaaaagaagaaaaagcaagaagaggagcaagaaaagaaaaaactgacacagattcaagaatctcaggtaacatcccacaacaaggaacggcgttccaagcgggatgagaaactagacaagaaatctcaagccatggaggagctaaaagcagagcgagaaaaacgaaagaacagaacagctgagctccttgccaaaaaacagccattaaaaaccagtgaggtctactctgatgatgaagaggaggaagaggatgacaaatccagtgaaaagtcagaccgctcatcacgaacatcatcgtctgatgaagaagaggagaaagaagagatccctcccaaatcccaaccagtttccttacctgaagaattgaatcgggttcgattatcacggcataagctagaacgctggtgtcacatgcccttctttgctaaaactgtcacaggatgttttgtgcggattggcatcggaaaccacaacagcaaaccagtttaccgggtcgctgagattacgggtgttgtggaaactgccaaagtttaccaactaggtggcaccagaacaaacaaagggctgcaactacggcatggcaatgaccaacgcgtgttccgtttagagtttgtctcaaaccaagaattcaccgaaagtgagtttatgaagtggaaagaagcgatgttctctgctggcatgcagttgcccactctagatgaaatcaataaaaaggaattatctattaaagaagctcttaattataaattcaatgatcaggacattgaagagattgtaaaagagaaagaaaggttcagaaaagctccacccaactacgctatgaagaagactcagctactgaaggaaaaggccatggctgaggacctgggggatcaggacaaggccaaacaaatccaagatcaactgaatgagctggaggaacgggcagaggccctggaccgccagcggaccaagaacatatccgctatcagttacatcaaccagcggaaccgggagtggaacattgtagagtctgagaaggcccttgtggctgaaagtcacaacatgaaaaaccaacagatggatccctttactcggcggcagtgcaagcctaccatcgtttctaattccagagacccagctgttcaagctgccatcttggcccagctgaatgcaaaatacggttctggagtgttaccagatgctccaaaggaaatgagcaagggtcaaggcaaagataaagatttgaattctaagtcagccagtgacctctcagaagatctgttcaaagtacacgattttgatgtgaagattgacttacaagttcccagctcagagtcaaaggctttagccatcacctccaaggctccgccagccaaggatggggctccaaggagatctctgaacttggaagactacaaaaaacgacgagggcttatttgagcacacccagcctgctgcttctgaccctgcatgccccatcgcagcgtcccacctttcctcctttcctttgatttagcctctttgggctggagcagctgttgaactgggaagagactctaaactgccagtcatctgtaatataaaccatttgctgtatagacctcctttgtctgcacaccatctcccaccagcctcccctcccccagggccccacccagtgtgggcctgggctctcttgggctttatccatgtctttagatttgtgtttgccttttgtttttttaaccgcgcagttcattggccactctgcacgcattcagtattaccatggagctgggaatcttgctggagcccctggggcaatagcagcagcaccaggcggtctcctctacagactgccttggcccacccattgaacattcggcacgtgaccttgtggggggagcggggattgggcacctgcgatcctctttcctctcttcatctttctcttctgcccttctttttggaagaaggggtttcaaaaccagtttagtttccaaaaagtgtacatttgtggggggggggggtctaatttgagagcgagagtgtgtatgtgtgtgtgtgtaagtgtgtggatttttttatcatttttttaaaatgcagtactctttgtatcagtctgtcatgggtctatagctgtttcagatttttttcagctgtacttgagcatctgaaactgcaagaaagaaactcattaaatgtgattcttcttactaaacaggcctgactgctgtagctgtgtaacttccccattcccacctactcttcccatcctttcccaactttggagaaaactccccagtttagccccctgacctgcaggctgtgtcctggcaggtgtgggagggaagcccatggccaggtaccagggagggcagtgaatgtcttgctcttcccatgggtacagcccacagcttcttggctgaacgtagaacttctttttctcacccagtataccagcctcttcctggtgattctgttttgctgctttggcaagaactacattttgtttttaagagaaatttctgaatatgaatgtggagagcaaacacaaaaagatttaggttacgccgggtgcagtagctcacgcctgtaatcccagcactttgggaggcctaggcgggtggatcacctgaggtcaggagttcaagaccaatctgactaacacggtgaaaccccatctctactaaaactacaaaacttagccgggcatggtggtgcgtgcctgtaatcccagctactcggggggctgagacaggagaatcccttgaacctgggaggcggaggttgtggtgagccaagatcgtgccactgcactccagtctgggtgacagagtgagactccgcctcaaaaagatttaggttgcaaatgtttcaagcatgtgcagttttgtgtgtgtgtatacatatatatggtcagcatatatattgtgcagctagggcgaagccagcagaggtgtgtgtatgtctttatgaaatgtttgaaaagagataagctgactgcttgataatcactctcaggtgtaaagctccaagtgtaaataaaagtggcatttaacaaatctttcagaacaaagtacagctgactatatataccaagagctaagctaaaggaacagctgagagctccgatctccacgagagactaatctaaaagctctgctttgtacttcctcaccctgctttcgtacaaggaagggggacgatgggaaatcatggacttgtaagttgtatttaaacataaaaatgaacttggtaacttctgggtttagtagagcctcagtgtcgctttaacttagtttactttttttttatttttaaagcagcaatggatggttttaaaggagtattatgattgtaaaattgctaaatatgactgtaacacagctttgtggtagctgtgacacagttcacttgggcaaaggagtggtgatggactcgttaaaatcatatatacttgaatagtccattgaccgaaactctttatagactattgtgtaaatgtggaatcacagactgttaacattgcctggacttcagcagagtcctggagctgctgggacctctcctatcatgatgaacttggacttttttttttgatttctggttttaaaaaacataaaattatagaatccagataattcgctggagtcattctgatccaccatgtagatctgtatttagtatcatttggatttggagaagtgttgattacattatggctgtgtaataaaatttttattaaaactgc

SEQ ID NO: 5264 - DNA, 517 bp, Rattus norvegicus
  misc_feature (1)..(517): n=a, c, g or t
  ref <308>: DATABASE ACCESSION NUMBER: EMBL / AA875148
  ref <309>: DATABASE ENTRY DATE: 2000-03-03
tttttttttttttttttaggattttgactgtaaatgttttaatagaaatacacaatctttcactttctcagacagcaacagagggggtcctaacagcaactagaacatggggttttgcacagggatacagcatagctgactgcaaagctgaactgctaggtttgccccacagtcagtggaaggagcgccagaaggtgacacaaaaaccgttgacagaagctgcagacctggaaaatacttgggtgagatgaggtgtgtcaaagcagccagtttagtgctaatccactctgggctcatttcaaccacacaagatgggagcgtccaccctcgagctctttttttctcatgtcacttcaccacttggttacatggaatgtggtgaagagactcaagacctcttgtggtggccctaagatgtgtattctgaaccagttcctctttggggggctccctgcangaatcctggtgatttgcaagctcaggttcctactacatacagtttttaccaaaaacaaaa

SEQ ID NO: 5265 - DNA, 544 bp, Rattus norvegicus
  ref <308>: DATABASE ACCESSION NUMBER: EMBL / AA875192
  ref <309>: DATABASE ENTRY DATE: 2000-03-03
cagccgccttgcccggtttgcaaacccggggaaaccaaccctgaaacccaacaagcctcttatcttacctaatcgctttgggaaccgacgccgaaagaagggcaaggcaacttgtatcacggagatgtcaatgatgatggcttgctggaagcagaatgaattccgcgacgaggcgtgcaggaaagagatccaggacttcttcgattgttcttccaaggctcaagaagctgggaagatgagatcaatccaggagactctgggacagtctggaagtttacctccccacaaaatgactaagttgttacagagatttcccaataaatctcatctgagctgaaaatggagaaacattttcaacgaactctcatttctgaaagctacacagaggcgtattagggatgtttgcatgcattgccatgcgtttttgaagggtaaaatgaggcaaaacactcaattttgctcttctgaatgaatcgtgttctggatacgtgtcttgaaataaaaccctctaaaaagaaaaaataaaaaaaaaaacccctcgtgc

SEQ ID NO: 5266 - protein, 118 aa, Rattus norvegicus
  ref <308>: DATABASE ACCESSION NUMBER: Refseq / NP_079642
  ref <309>: DATABASE ENTRY DATE: 2002-01-07
MATPSLRGRLARFANPGKPILKPNKPLILANRVGNRRREKGEATCITEMSMMMACWKQNEFRDEACRKEIQDFFDCSSRAQEARKMRSIQESLGQSESLSPHKMTKLLQRFPNKSHLI

SEQ ID NO: 5267 - DNA, 530 bp, Rattus norvegicus
  ref <308>: DATABASE ACCESSION NUMBER: EMBL / AA875198
  ref <309>: DATABASE ENTRY DATE: 2000-03-03
tttttttttttttttttgaaattcaaaaatatagaggaaatttatttaacatgttgcaggagacatttcagaaagtagacatatttattgacaatcctgagtaaacacatttcatgcagcttttataatttctttatccagtgtaagttctagaatgtaatgatttaacatactttaataaaaaatttatgttgcaacaaaaggcattttcacaaccatatgtatatataattattaagtgcaacataaaagacaatataatgtataggcaatagagattgtaaagaatgaatcttgatttagcaaggccaccattcctacatcaacattagctaactccacttcactggcccccctgcttttcagaagatcataggcacggacagaccgaagcaactcaaccttcatgaagctctccagacatttctgaaactaacctagaagaagtagagactctttaaaataatgtcagcacgacatctcataaaccaaagaaaagatacaatttaaactagtaaaagagtgaatct

SEQ ID NO: 5268 - DNA, 527 bp, Rattus norvegicus
  ref <308>: DATABASE ACCESSION NUMBER: EMBL / AA875206
  ref <309>: DATABASE ENTRY DATE: 2000-03-03
tttttttttttttttttctgctttttaatgcctttattctacataaattactaccagagggctatgtttaaaaagcaagttagttggacagatgcaggacaaaaatgtgttcacccaattagaaaaggtgatgtttaaaagattacaacaaatgccaagtgtttgacgcatgcagcggccttaaccagagacatcgattcccactgttccaaagacacagaaacccgcacatcttactgcactccacctccagagacttcctattggtttcctttacaacagcacagaatcccaatgaaataaagcaggttattttaaagatttaagagccgttatcaaaaataaattacattttttcaggatacagaaatgctgctatgacggctgggaacccagcaacctttcaatggccgcattgatgtcgccccctgttgctatcagtgcttgtaagtttgcttcacggttcaagaatcccattgcactgagctgttccagatgctgttgaaatctgacttctggactctgca

SEQ ID NO: 5269 - protein, 582 aa, Rattus norvegicus
  ref <308>: DATABASE ACCESSION NUMBER: SWISS-Prot / BAA92267
  ref <309>: DATABASE ENTRY DATE: 2003-02-01
MAESAESGGPPGAQDSAADSGPAEPKIMKVTVKTPKEKEEFAVPENSSVQQFKEEISKRFKSHIDQLVLIFAGKILKDQDTLSQHGIHDGLTVHLVIKTQNRPQDNSAQQTNTTGNSVTSSPAPDSNPTSGPAANSSFGLGGLGGLAGLSSLGLNTTNFSELQSQMQRQLLSNPEMMVQIMENPFVQSMLSNPDLMRQLIMANPQMQQLIQRNPEISHMLNNPNIMRQTLELARNPAMMQEMMRNQERDLSNLESIPGGYNALRRMYTDIQEPMLNAAQEQFGGNPFASLVSSPSSAEGTQPSRTENRDPLPNPWAPQTPQSSPASGSTGSTTNTVSTSAGNATSTPAGQGTSGPNLVPGAGASMFNTPGMQSLLQQITENPQLMQNMLSAPYMRSMMQSLSQNPDLAAQMMLNNPLFAGNPQLQEQMRQQLPTFLQQMQNPDTLSAMSNPRAMQALLQIQQGLQTLATEAPGLIPGFTPGLAAGNSGGPAGTTAPSTAPGEDTNPQGGAAEPGHQQFIQQMLQALAGVNPQLQSPEVRFQQQLEQLSAMGFLNREANLQALIATGGDINAAIERLLGSQPS

SEQ ID NO: 5270 - DNA, 2354 bp, Homo sapiens
  ref <308>: DATABASE ACCESSION NUMBER: Refseq / NM_053067
  ref <309>: DATABASE ENTRY DATE: 2001-11-06
ggaggaagcggtggctgctgcggatgtcggtgtgagcgagcggcgcctgaacacacggcggctgccgagcgcctgacccgggcctgcgccagagcctgcaccgagctccggggccccacacccgctacggtggccctgcgcccgttgctactgaggcggcgtgctctgcattcttcgctgtccaggcctgccggctctggtgtctgctggctcctccttgctcgcctgctccctcctgcttgcctgagtcaccgccgccgccgccgccacagccatggccgagagtggtgaaagcggcggtcctccgggctcccaggatagcgccgccggagccgaaggtgctggcgcccccgcggccgctgcctccgcggagcccaaaatcatgaaagtcaccgtgaagaccccgaaggaaaaggaggaattcgccgtgcccgagaatagctccgtccagcagtttaaggaagaaatctctaaacgttttaaatcacatactgaccaacttgtgttgatatttgctggaaaaattttgaaagatcaagataccttgagtcagcatggaattcatgatggacttactgttcaccttgtcattaaaacacaaaacaggcctcaggatcattcagctcagcaaacaaatacagctggaagcaatgttactacatcatcaactcctaatagtaactctacatctggttctgctactagcaacccttttggtttaggtggccttgggggacttgcaggtctgagtagcttgggtttgaatactaccaacttctctgaactacagagtcagatgcagcgacaacttttgtctaaccctgaaatgatggtccagatcatggaaaatccctttgttcagagcatgctctcaaatcctgacctgatgagacagttaattatggccaatccacaaatgcagcagttgatacagagaaatccagaaattagtcatatgttgaataatccagatataatgagacaaacgttggaacttgccaggaatccagcaatgatgcaggagatgatgaggaaccaggaccgagctttgagcaacctagaaagcatcccagggggatataatgctttaaggcgcatgtacacagatattcaggaaccaatgctgagtgctgcacaagagcagtttggtggtaatccatttgcttccttggtgagcaatacatcctctggtgaaggtagtcaaccttcccgtacagaaaatagagatccactacccaatccatgggctccacagacttcccagagttcatcagcttccagcggcactgccagcactgtgggtggcactactggtagtactgccagtggcacttctgggcagagtactactgcgccaaatttggtgcctggagtaggagctagtatgttcaacacaccaggaatgcagagcttgttgcaacaaataactgaaaacccacaactgatgcaaaacatgttgtctgccccctacatgagaagcatgatgcagtcactaagccagaatcctgaccttgctgcacagatgcagaatcctgatacactatcagcaatgtcaaaccctagagcaatgcaggccttgttacagattcagcagggtttacagacattagcaacggaagccccgggcctcatcccagggtttactcctggcttgggggcattaggaagcactggaggctcttcgggaactaatggatctaacgccacacctagtgaaaacacaagtcccacagcaggaaccactgaacctggacatcagcagtttattcagcagatgctgcaggctcttgctggagtaaatcctcagctacagaatccagaagtcagatttcagcaacaactggaacaactcagtgcaatgggatttttgaaccgtgaagcaaacttgcaagctctaatagcaacaggaggtgatatcaatgcagctattgaaaggttactgggctcccagccatcatagcagcatttctgtatcttgaaaaaatgtaatttatttttgataacggctcttaaactttaaaatacctgctttatttcattttgactcttggaattctgtgctgttataaacaaacccaatatgatgcattttaaggtggagtacagtaagatgtgtgggtttttctgtatttttcttttctggaacagtgggaattaaggctactgcatgcatcacttctgcatttattgtaattttttaaaaacatcaccttttatagttgggtgaccagattttgtcctgcatctgtccagtttatttgctttttaaacattagcctatggtagtaatttatgtagaataaaagcattaaaaaaaaaaaaaaaaaaaaaaaaaaaaaaaaaaaaaaaaaaaa

SEQ ID NO: 5271 - protein, 589 aa, Homo sapiens
  ref <308>: DATABASE ACCESSION NUMBER: Refseq / NP_038466
  ref <309>: DATABASE ENTRY DATE: 2001-11-06
MAESGESGGPPGSQDSAAGAEGAGAPAAAASAEPKIMKVTVKTPKEKEEFAVPENSSVQQFKEEISKRFKSHTDQLVLIFAGKILKDQDTLSQHGIHDGLTVHLVIKTQNRPQDHSAQQTNTAGSNVTTSSTPNSNSTSGSATSNPFGLGGLGGLAGLSSLGLNTTNFSELQSQMQRQLLSNPEMMVQIMENPFVQSMLSNPDLMRQLIMANPQMQQLIQRNPEISHMLNNPDIMRQTLELARNPAMMQEMMRNQDRALSNLESIPGGYNALRRMYTDIQEPMLSAAQEQFGGNPFASLVSNTSSGEGSQPSRTENRDPLPNPWAPQTSQSSSASSGTASTVGGTTGSTASGTSGQSTTAPNLVPGVGASMFNTPGMQSLLQQITENPQLMQNMLSAPYMRSMMQSLSQNPDLAAQMMLNNPLFAGNPQLQEQMRQQLPTFLQQMQNPDTLSAMSNPRAMQALLQIQQGLQTLATEAPGLIPGFTPGLGALGSTGGSSGTNGSNATPSENTSPTAGTTEPGHQQFIQQMLQALAGVNPQLQNPEVRFQQQLEQLSAMGFLNREANLQALIATGGDINAAIERLLGSQPS

SEQ ID NO: 5272 - DNA, 462 bp, Rattus norvegicus
  ref <308>: DATABASE ACCESSION NUMBER: EMBL / AA875207
  ref <309>: DATABASE ENTRY DATE: 2000-03-03
tttttttttttttttttcaattttaactctttatttgaaacaattccagagacaagttagttgtgacaacagtttctcactacaacacaagggtaggcatggctcactgaaggaacaggccaggcacctcagtacaatatatacattttaacagtggctaaactgatgacagttataaaaacaccaaaaagaaggctagggaacagcaaagccaacagggaaagaactgggtgctccctctgccagacactaacttttctgggcccacaaaggtaagatggggaagagaagacgtaggcagtaggacaggaccctggcccacagctcctcacctatcttttgaccacaaaccccatcctggatggcctaagagcctgaagttctcaggatccacatgcagcttgtcacagtggagttcactgaggctggcaaaggtgcccttgaggttgtccaagtgtttca

SEQ ID NO: 5273 - protein, 146 aa, Rattus norvegicus
  ref <308>: DATABASE ACCESSION NUMBER: SWISS-Prot / P11517
  ref <309>: DATABASE ENTRY DATE: 2002-06-15
VHLTDAEKATVSGLWGKVNADNVGAEALGRLLVVYPWTQRYFSKFGDLSSASAIMGNPQVKAHGKKVINAFNDGLKHLDNLKGTFAHLSELHCDKLHVDPENFRLLGNMIVIVLGHHLGKEFTPCAQAAFQKVVAGVASALAHKYH

SEQ ID NO: 5274 - DNA, 585 bp, Homo sapiens
  misc_feature (1)..(585): n=a, c, g or t
  ref <308>: DATABASE ACCESSION NUMBER: EMBL / BG311786
  ref <309>: DATABASE ENTRY DATE: 2002-03-15
ntgtgttgactttcacaaccccagtaaacatacatcatggtgcacctgactgatgctgagaaggctgctgtctctggcctgtggggaaaggtgaacgccgatgaagttggtggtgaggccctgggcagattgctggttgtctacccttggacccagcggtactttgatagctttggagacctatcctctgcctctgctatcatgggtaatgccaaagtgaaggcccatggcaagaaagtgataactgcctttaacgatggcctgaatcacttggacagcctcaagggcacctttgccagcctcagtgagctccactgtgacaagctgcatgtggatcctgagaacttcaggctcctgggcaatatgatcgtgattgtgctgggccaccacctgggcaaggatttcacccccgctgcacaggctgccttccagaaggtggtggctggagtggccgctgccctggctcacaagtaccactaaaccccctttcctgctcttgcctgtgaacaatggttaattgttnccaagagagcatctgtcagttgttggcaaaatgataaagacatttgaaaatctgtcttctga

SEQ ID NO: 5275 - protein, 146 aa, Homo sapiens
  ref <308>: DATABASE ACCESSION NUMBER: SWISS-Prot / P02023
  ref <309>: DATABASE ENTRY DATE: 2002-06-15
VHLTPEEKSAVTALWGKVNVDEVGGEALGRLLVVYPWTQRFFESFGDLSTPDAVMGNPKVKAHGKKVLGAFSDGLAHLDNLKGTFATLSELHCDKLHVDPENFRLLGNVLVCVLAHHFGKEFTPPVQAAYQKVVAGVANALAHKYH

SEQ ID NO: 5276 - DNA, 422 bp, Rattus norvegicus
  misc_feature (1)..(422): n=a, c, g or t
  ref <308>: DATABASE ACCESSION NUMBER: EMBL / AA875217
  ref <309>: DATABASE ENTRY DATE: 2000-03-03
tttttttttttttttttcattagaaaataaagtgtttattaagaaactatacactgaacactcctataagtccctgtggaaacacaatgccccattgtcatagcacaaagtgaagaaatgccagaataaaagatgctgtgatggatggagcccgagaggctggaaatgaggtcatgatttacaacaattaaaaacatcatcctcaagcttactccttaaagccacactcaggagtagatctgaacccgagggatcatctgggtgatgagatcactgagaggacaacatggagaccccatgcttccaagcaggaaagtgagactggaacacggctggacttcaggctttctcgtgatggttgggtcaagagaatggctantgtgtttaaaaggtanctcctggtgcttgggtttggattttct

SEQ ID NO: 5277 - DNA, 402 bp, Homo sapiens
  ref <308>: DATABASE ACCESSION NUMBER: EMBL / BF512741
  ref <309>: DATABASE ENTRY DATE: 2000-12-10
tttttttttttttttttcattagaaaataaagtgtttattaagaaactatacactgaacactcctataagtctctgtggaaacacaacgccccattgtcatagcacaaggtgaggaaaatggcagaataaaagatgctgggatggatggagcctgggaggctggaaatgaggtaatgatttacaataattaaaaaacatcatcctcaagcttactccttaaagccacacttgggaggaggccctggacccaaagcatcagcagggcacaatggggaacagcctgacatggagcaatggggagcaggatgaggagagctggagggggcgagataaacacacacctggagccctggagagaacctgaactcccaggtgatactctggaggctgccccagatact

SEQ ID NO: 5278 - DNA, 438 bp, Rattus norvegicus
  ref <308>: DATABASE ACCESSION NUMBER: EMBL / AA875225
  ref <309>: DATABASE ENTRY DATE: 2000-03-03
tttttttttttttctttctacattttattatttcaaatcatgtgaacaattccataaaacatgtgaaaaaagcaaggaagtgttcaacgctggaggtcccgggcctggggcgaaggcgtgaggggcctgaccctcagcaggcagcggcggttcctagattagcgctaaggagctacatttaggttaatggagcctgggcccaaggcttcagggcagggccctcagtgacattggcagttgtctggaacagcccttgggatccaattccgtggagggcagggcatggggccgcccaaagagggatgggtgtaaacaggcagacacactcaaggcacggaatcactggaaaggggctgggggcggcgggagggatgctggtcaagacctgacagttttaaataggtttctccaaaaagttttctagatttgcaattttcc

SEQ ID NO: 5279 - protein, 354 aa, Rattus norvegicus
  ref <308>: DATABASE ACCESSION NUMBER: SWISS-Prot / P04897
  ref <309>: DATABASE ENTRY DATE: 2002-06-15
GCTVSAEDKAAAERSKMIDKNLREDGEKAAREVKLLLLGAGESGKSTIVKQMKIIHEDGYSEEECRQYRAVVYSNTIQSIMAIVKAMGNLQIDFADPQRADDARQLFALSCAAEEQGMLPEDLSGVIRRLWADHGVQACFGRSREYQLNDSAAYYLNDLERIAQSDYIPTQQDVLRTRVKTTGIVETHFTFKDLHFKMFDVGGQRSERKKWIHCFEGVTAIIFCVALSAYDLVLAEDEEMNRMHESMKLFDSICNNKWFTDTSIILFLNKKDLFEEKITQSPLTICFPEYTGANKYDEAASYIQSKFEDLNKRKDTKEIYTHFTCATDTKNVQFVFDAVTDVIIKNNLKDCGLF

SEQ ID NO: 5280 - DNA, 2167 bp, Homo sapiens
  ref <308>: DATABASE ACCESSION NUMBER: EMBL / AK055574
  ref <309>: DATABASE ENTRY DATE: 2002-08-06
agtcgctcggaactgccgacccgagtgcttcccgcagagggctggtggtgggagcggagtgggtcgggcggggccgagccgggccgtgggccgtgtgggggccgggcggcggccgggccggcggacggcgggatgggctgcaccgtgagcgccgaggacaaggcggcggccgagcgctctaagatgatcgacaagaacctgcgggaggacggagagaaggcggcgcgggaggtgaagttgctgctgttgggatcatccacgaggatggctactccgaggaggaatgccggcagtaccgggcggttgtctacagcaacaccatccagtccatcatggccattgtcaaagccatgggcaacctgcagatcgactttgccgacccctccagagcggacgacgccaggcagctatttgcactgtcctgcaccgccgaggagcaaggcgtgctccctgatgacctgtccggcgtcatccggaggctctgggctgaccatggtgtgcaggcctgctttggccgctcaagggaataccagctcaacgactcagctgcctactacctgaacgacctggagcgtattgcacagagtgactacatccccacacagcaagatgtgctacggacccgcgtaaagaccacggggatcgtggagacacacttcaccttcaaggacctacacttcaagatgtttgatgtgggtggtcagcggtctgagcggaagaagtggatccactgctttgagggcgtcacagccatcatcttctgcgtagccttgagcgcctatgacttggtgctagctgagaacgaggagatgaaccgcatgcatgagagcatgaagctattcgatagcatctgcaacaacaagtggttcacagacacgtccatcatcctcttcctcaacaagaaggacccgtttgaggagaagatcacacacagtcccctgaccatctgcttccctgagtacacaggggccaacaaatatgatgaggcagccagctacatccagagtaagtttgaggacctgaataagcgcaaagacaccaaggagatctacacgcacttcacgtgcgccaccgacaccaagaacgtgcagttcgtgtttgacgccgtcaccgatgtcatcatcaagaacaacctgaaggactgcggcctcttctgaggggcagcggggcctggcgggatgggccaccgccgactttgtaccccccaacccctgaggaagatgggggcaagaagatcacgctccccgcctgttcccccgccgcttttctcctctttcctctctttgttctcagctccccctgtcccctcagctccagacgtaggggaggggttgccacaggcctccctgtttgaagcctgcccttgtctgagatgctggtaatggccatggtacccccttctgggcatctgttctggtttttaaccattgtcttgttctgtgatgaggggaggggggcacatgctgagtctcccaaggctgcgtctggaggggcccctgcttctccagcctggacccccagctttgcccaacaccagcccctgccccagcccaagtccaaatgtttacagggagcctcctgcccagtcccccaaccccagccgctcggaggccccaaaggaaaaagcacaagaagcgtgagacgccaccattcctggaaaccacagtccacctgctcattctcgtagctttttaaaaaatgaaagtaaaggaaaaaaaaaaaactgcaaatctagaaaactttttagagaaaaactatttaaaactgtcagatcctgaccagcaagcccccccccagccccccttccaagtgactccgtgccttgagtgtgtctgcgtgtttacacccgtccctctgctggccgcccccgtgcgagcggcacccctgccctgccctccacagaattgggttccaagggctgttccagacaactgccaacgtcactgagggccctgccccagcggccctggccccaggctctattaacctaaaatgtagctccctagcgctaacctaggaaccgccgctgcctgctggggggccacgcccctcatgcccttgtcccaggcccggggccttcagcgttgaacacttccttgcttttttcacatgttttatggaattgttcacctggtttgaaataataaaatgtagaaagaaaaaaaat

SEQ ID NO: 5281 - protein, 354 aa, Homo sapiens
  ref <308>: DATABASE ACCESSION NUMBER: SWISS-Prot / P04899
  ref <309>: DATABASE ENTRY DATE: 2002-06-15
GCTVSAEDKAAAERSKMIDKNLREDGEKAAREVKLLLLGAGESGKSTIVKQMKIIHEDGYSEEECRQYRAVVYSNTIQSIMAIVKAMGNLQIDFADPSRADDARQLFALSCTAEEQGVLPDDLSGVIRRLWADHGVQACFGRSREYQLNDSAAYYLNDLERIAQSDYIPTQQDVLRTRVKTTGIVETHFTFKDLHFKMFDVGGQRSERKKWIHCFEGVTAIIFCVALSAYDLVLAEDEEMNRMHESMKLFDSICNNKWFTDTSIILFLNKKDLFEEKITHSPLTICFPEYTGANKYDEAASYIQSKFEDLNKRKDTKEIYTHFTCATDTKNVQFVFDAVTDVIIKNNLKDCGLF

SEQ ID NO: 5282 - DNA, 438 bp, Rattus norvegicus; identical to SEQ ID NO: 5278
  ref <308>: DATABASE ACCESSION NUMBER: EMBL / AA875225
  ref <309>: DATABASE ENTRY DATE: 2000-03-03

SEQ ID NO: 5283 - protein, 354 aa, Rattus norvegicus; identical to SEQ ID NO: 5279
  ref <308>: DATABASE ACCESSION NUMBER: SWISS-Prot / P04897
  ref <309>: DATABASE ENTRY DATE: 2002-06-15

SEQ ID NO: 5284 - DNA, 2167 bp, Homo sapiens; identical to SEQ ID NO: 5280
  ref <308>: DATABASE ACCESSION NUMBER: EMBL / AK055574
  ref <309>: DATABASE ENTRY DATE: 2002-08-06

SEQ ID NO: 5285 - protein, 354 aa, Homo sapiens; identical to SEQ ID NO: 5281
  ref <308>: DATABASE ACCESSION NUMBER: SWISS-Prot / P04899
  ref <309>: DATABASE ENTRY DATE: 2002-06-15

SEQ ID NO: 5286 - DNA, 540 bp, Rattus norvegicus
  misc_feature (1)..(540): n=a, c, g or t
  ref <308>: DATABASE ACCESSION NUMBER: EMBL / AA875253
  ref <309>: DATABASE ENTRY DATE: 2000-03-03
tttttttttttttttttattaaaactgatttttatttcttttcatgtgcagtttttgtattgtgtggtgaactcctcaaacagccatttgggatccttctgtatcattttactagcatagacaagagttcatacaaacattactttgaatatccgtaacaacttgagcatgaatgttttggttggttggttggttggttttctgttttgttttgagacatagcctcaagctgcccaggccggcctcagactcaccacaaagctgaattcttggtcttcttgcctctgtctcctgagtcctaggattacaggcgtgtgccaccacactgtggtgtctgtctatgctcccagtgttggcatttccgatacagtctgatttaggacagttcctgacccacaagcctgactctgaaccctataacacctcactgtanggctggcaaagcaatctagcagaaccccaccttccttacagagttcctgcacaaagttcaggtcaatacagaaaacgcttctgatgaagcgttcctcgtgccgaatt

SEQ ID NO: 5287 - protein, 181 aa, Rattus norvegicus
  ref <308>: DATABASE ACCESSION NUMBER: SWISS-Prot / P41276
  ref <309>: DATABASE ENTRY DATE: 2002-06-15
MGGFFSSIFSSLFGTREMRILILGLDGAGKTTILYRLQVGEVVTTIPTIGFNVETVTYKNLKFQVWDLGGQTSIRPYWRCYYSNTDAVIYVVDSCDRDRIGISKSELVAMLEEEELRKAILVVFANKQDMEQAMTPSEMANALGLPALKDRKWQIFKTSATKGTGLDEAMEWLVETLKSRQ

SEQ ID NO: 5288 - DNA, 1008 bp, Homo sapiens
  ref <308>: DATABASE ACCESSION NUMBER: EMBL / L28997
  ref <309>: DATABASE ENTRY DATE: 1999-06-30
aattcggtaccccgtagcgaccggcgctcagctggaattcgggggaagttgctggctgactgggcttgcgaggaaaccgcctcggagctgcagcgaaggccaaggaatcactgaagatcggcgagggaggacagggggttcatcatgggtggctttttctcaagtatattttccagtctgtttggaactcgggaaatgagaattttaattttgggattagatggagcaggaaaaaccacaattttgtacagattacaagtgggagaagttgttactactatacctaccattggatttaatgtagagacggtgacgtacaaaaaccttaaattccaagtctgggatttaggaggacagacaagtatcaggccatactggagatgttactattcaaacacagatgcagtcatttatgtagtagacagttgtgaccgagaccgaattggcatttccaaatcagagttagttgccatgttggaggaagaagagctgagaaaagccattttagtggtgtttgcaaataaacaggacatggaacaggccatgacttcctcagagatggcaaattcacttgggttacctgccttgaaggaccgaaaatggcagatattcaaaacgtcagcaaccaaaggcaccggccttgatgaggcaatggaatggttagttgaaacattaaaaagcagacagtaattcagtccattcttctcccctgaaatgaagactacatcacctctctccctttggaaacagtcaagtgtacttcacactactagatgttaaaactatatgattattggcatatactgactgactgcaatatttgtagtaaatagggaaaataagtatttagttggagggataatttgatcgaatcacctgaatgttctatgtaatgtaaaatattcttttcttgctttcttgtgttaaggtatatattctatttgtatggaattcttattcaaatacagttgtattaaagagtatactcctattggatgaaaaaaacct

SEQ ID NO: 5289 - protein, 181 aa, Homo sapiens
  ref <308>: DATABASE ACCESSION NUMBER: SWISS-Prot / P40616
  ref <309>: DATABASE ENTRY DATE: 2002-06-15
MGGFFSSIFSSLFGTREMRILILGLDGAGKTTILYRLQVGEVVTTIPTIGFNVETVTYKNLKFQVWDLGGQTSIRPYWRCYYSNTDAVIYVVDSCDRDRIGISKSELVAMLEEEELRKAILVVFANKQDMEQAMTSSEMANSLGLPALKDRKWQIFKTSATKGTGLDEAMEWLVETLKSRQ

SEQ ID NO: 5290 - DNA, 469 bp, Rattus norvegicus
  ref <308>: DATABASE ACCESSION NUMBER: EMBL / AA875263
  ref <309>: DATABASE ENTRY DATE: 2000-03-03
tttttttttttttttttactttggaactcagtactttttatttacaaaaaacgaaaacaaaaaggaggaatctaaagctgatccactggagacacaggagtgatgtggcaatggtgggggctctggctctggggaggcacaggggtcccagcctctcctggcgtccccacggtgaccccaccttgcctcaaaggctcaatcaatggtccagcagttgggccactacccactctgggtacaagcgatttccaggagcctgagttcccagctcaagggagctggaatgacaggggaaactgaggccagagaatgccctggtttctgctacccgcctcactgtggtgtgatcttggcagcctcagcccggatgagggcaatgaggtcctggttgatgaggaagacaaatcgcaggctggcgatctccaccacagagttgttgctaaggcgccacttggagccacacagcaca

SEQ ID NO: 5291 - DNA, 1866 bp, Homo sapiens
  misc_feature (1)..(1866): n=a, c, g or t
  ref <308>: DATABASE ACCESSION NUMBER: EMBL / AF015308
  ref <309>: DATABASE ENTRY DATE: 2000-03-03
ggaatgaatctcctctcagcctttaagctcacctggtcagaatccttggatgagcctgtgggaccgttcctcctagcccggtggtttggaaccagtggctttnggactgtaagaggatggacaaagattctcaggggctgctagattcatccctgatggcatcaggcactgccagccgctcagaggatgaggagtcactggcagggcagaagcgagcctcctcccaggccttgggcaccatccctaaacggagaagctcctccaggttcatcaagaggaagaagttcgatgatgagctggtggagagcagcctggcaaaatcttctacccgggcaaagggggccagtggggtggaaccagggcgctgttcggggagtgaaccctcctccagtgagaagaagaaggtatccaaagcccccagcactcctgtgccacccagcccagccccagcccctggactcaccaagcgtgtgaagaagagtaaacagccacttcaggtgaccaaggatctgggccgctggaagcctgcagatgacctcctgctcataaatgctgtgttgcagaccaacgacctgacctccgtccacctgggcgtgaaattcagctgccgcttcacccttcgggaggtccaggagcgttggtacgccctgctctacgatcctgtcatctccaagttggcctgtcaggccatgaggcagctgcacccagaggctattgcagccatccagagcaaggccctgtttagcaaggctgaggagcagctgctgagcaaagtgggatcgaccagccagcccaccttggagaccttccaggacctgctgcacagacaccctgatgccttctacctgggccgtaccgcgaaggccctgcaggcccactggcagctcatgaagcagtattacctgctggaggaccagacagtgcagccgctgcccaaaggggaccaagtgctgaacttctctgatgcagaggacctgattgatgacagtaagctcaaggacatgcgagatgaggtcctggaacatgagctgatggtggctgaccggcgccagaagcgagagattcggcagctggaacaggaactgcataagtggcaggtgctagtggacagcatcacaggcatgagctctccggacttcgacaaccagacactggcagtgctgcggggccgcatggtgcggtacctgatgcgctcgcgtgagatcaccctgggcagagcaaccaaggataaccagattgatgtggacctgtctctggagggtccggcctggaagatatcccggaaacaaggtgtcatcaagctgaagaacaacggtgatttcttcattgccaatgagggtcgacggcccatctacatcgatggacggccggtgctctgtggctccaaatggcgcctcagcaacaactctgtggtggagatcgccagcctgcgattcgtcttccttatcaaccaggacctcattgccctcatcagggctgaggctgccaagatcacaccacagtgaggagtggtggcaggactcgtgggccctctccggcctgtttcccctgccactccagcccccttgagctgggaactcaggctcctggaaaaacctgggcagtgggaggctcagctgcgggccattgatttgagcctttgagggaggatagggctggcctttgtgaagccagcagaggctgagaacctcaggcttccctagatccagagcccctccccatcttcctctctctaaaaacaaccctaccccccattgccaccttcactcctgtgtctccagctgattagcctcagactcttcttttattgtttttcttttgtaaataaaaagcacccaggttccaaaaaaaaaaaaaaaaaaaaaa

SEQ ID NO: 5292 - protein, 463 aa, Homo sapiens
  misc_feature (1)..(463): Xaa=Unknown amino acid
MDKDSQGLLDSSLMASGTASRSEDEESLAGQKRASSQALGTIPKRRSSSRFIKRKKFDDELVESSLAKSSTRAKGASGVEPGRCSGSEPSSSEKKKVSKAPSTPVPPSPAPAPGLTKRVKKSKQPLQVTKDLGRWKPADDLLLINAVLQTNDLTSVHLGVKFSCRFTLREVQERWYALLYDPVISKLACQAMRQLHPEAIAAIQSKALFSKAEEQLLSKVGSTSQPTLETFQDLLHRHPDAFYLGRTAKALQAHWQLMKQYYLLEDQTVQPLPKGDQVLNFSDAEDLIDDSKLKDMRDEVLEHELMVADRRQKREIRQLEQELHKWQVLVDSITGMSSPDFDNQTLAVLRGRMVRYLMRSREITLGRATKDNQIDVDLSLEGPAWKISRKQGVIKLKNNGDFFIANEGRRPIYIDGRPVLCGSKWRLSNNSVVEIASLRFVFLINQDLIALIRAEAAKITPQX

SEQ ID NO: 5293 - DNA, 466 bp, Rattus norvegicus
  misc_feature (1)..(466): n=a, c, g or t
  ref <308>: DATABASE ACCESSION NUMBER: EMBL / AA875268
  ref <309>: DATABASE ENTRY DATE: 2000-03-03
tttttttttttttttttggatcagggcgggtttattcacagggattctgggatcctcacgttcggcttggcagctctacctgcggtaccagatcttcagcttctgttcgcgtttgatcttccgctgcagctgcaagatgccgtagagcagcgcctcggccgtgggcgggcagcctggcacatagatgtccactggcacaattcggtcacagccacgaacaaccgagtaggagtagtggtagtagccaccgccattggcacagctccccatggacaccacataccggggttcgggcatctggtcgtacaccttgcggagtgctggagccatcttgttagtgagcgtgccagctacgatcatcacgtcagcctggcgcgggctggcacggaacaccacaccaaagcggtccatgtcatancgcggggcggccatgtgcatcatctccacggcacagcacgccaagccg

SEQ ID NO: 5294 - DNA, 968 bp, Homo sapiens
  ref <308>: DATABASE ACCESSION NUMBER: EMBL / BG675079
  ref <309>: DATABASE ENTRY DATE: 2001-05-02
ggctgcgctgtgcacgcggtcacgcgggctccggctgcgggaagcgagactgaggcaaggtccctgcaggctgcccacctacggccgaggccctgctctacggcatcctgcagctgcagaggaagatcaagcgggagcggaggctgcagatctggtaccgcaggtagcgccgccgccgccgccgccggagcctgtcgccgtcctgtccccagtcctgcttgtgtcccgtgaggttgtcaataaacctgccctcgggctgccgccaaaaaaaaaaaaaaaaaacaaaaaaaaaagaaaaaaaaaaaaaaaaacgaaacaaaaaaagaaagagggggcggagccggcctacagaacataatccccagagaggggccacaagataatcacgaccacacccccgagtttttggatggaagaaaggggcgccccacaatagagagagcgcggataatttataccacaatgcgacagaacgcgatgacccagcctgactttacaaaaccaccagcccatgcgggaatgagcgagaccacaacacgcgagtgctcaactgcggcaggacaacccatgcctggagaagaagaaacgcaccaacttaatcgacggcggggggggagggcacacgaccaatattggggcgaggcaagcaaacatcacctcccgagcaagatcagaatgttatcaaccgggccctctgcagagagggggagaatataatatataccaaaattgtagttaaaggaggagtggataataattagatgggtgggtgatacaacaacaaacatggaggtcagtaaatatagtgcagtcaagcagaggaaggtgaaagaaaaaaaaagttagttcgggtcattagcaccagcgggagagaaattatctataataagggcgacaagagaattttttcttattacatgcggcgggggagggggtgtgttccagtatatataatagaaaatcgagaa

SEQ ID NO: 5295 - DNA, 527 bp, Rattus norvegicus
  ref <308>: DATABASE ACCESSION NUMBER: EMBL / AA875269
  ref <309>: DATABASE ENTRY DATE: 2000-03-03
tttttttttttttttttgcagtcagatccatttcattttattatgaacaaacacaacctcagatgagtagaaatactttcagagttggtattaatgaaaattattagattacaaatagctactgttgcacataataaaggaaaaaaaaatcccacccaaggaaggaaaaggagtcctgcaggtttccatagcaatgagtatacattatctaatgcatccattcaacctctgagaagaatgatgtagattaacaatgtcgtctgggacataggcacgtgtcaagtccatggtggacggttactataaaaatgtgcaggacttaaatactcctctgctgaggatccccaaatgttttataaagagcatttgctcatgctcgcacctacccgtggaggtaggtcaggaatattatcccatgtctcacagaatactgagtcacattatattgttaggcgacatgcccagtgctacggtttgagtctgtcccatgattcacgggttggaaacttaatccccaatgcaacagt

SEQ ID NO: 5296 - protein, 358 aa, Rattus norvegicus; identical to SEQ ID NO: 765
  ref <308>: DATABASE ACCESSION NUMBER: Refseq / NP_114029
  ref <309>: DATABASE ENTRY DATE: 2002-05-19

SEQ ID NO: 5297 - DNA, 5221 bp, Homo sapiens; identical to SEQ ID NO: 758
  ref <308>: DATABASE ACCESSION NUMBER: EMBL / AF097514
  ref <309>: DATABASE ENTRY DATE: 2000-03-03

SEQ ID NO: 5298 - protein, 359 aa, Homo sapiens; identical to SEQ ID NO: 759
  ref <308>: DATABASE ACCESSION NUMBER: SWISS-Prot / O00767
  ref <309>: DATABASE ENTRY DATE: 2002-06-15

SEQ ID NO: 5299 - DNA, 552 bp, Rattus norvegicus
  misc_feature (1)..(552): n=a, c, g or t
  ref <308>: DATABASE ACCESSION NUMBER: EMBL / AA875275
  ref <309>: DATABASE ENTRY DATE: 2000-03-03
tttttttttttttttttgacaacaggatgctgcattctaaaactttcagagttttagactatctatgacatgctgttctctccatcagcatagggtagaggtcaaggccttatttgcccgtgtattctgcatgccactgggctttgaaatgtgaaaaaggaaaaaagaaaaaaaaaaaaagcaaagcaaaccccagtggcatagtcagttccgtttgttttgtttttgacaagcaagacttcccgcttgtttttaacgttgagttgagagcggttttgttttttttaaacaaatcatggagctgaagcatttttaggattgtcggtgcttagtagacttgatgactattttaaaactgcgtgaatttagtgaaaaatctttttttctcactctgcatgtgtaagtgtttgtagcctggcccctcctccagggcanaaagacctgtgccgactaaaggtttgggtttcttttcctccagtaaaaatcttggtaccttatttgatgtttacattaagatatgacattacacatggcaatgctaagatttttttc

SEQ ID NO: 5300 - DNA, 424 bp, Homo sapiens
  ref <308>: DATABASE ACCESSION NUMBER: EMBL / AA761673
  ref <309>: DATABASE ENTRY DATE: 2000-03-03
tttttttttggtgacacgatgctgcattctaaaacttttatagttttagactatgtatgatgtgttgttgtaatctccatccaccataggatagagttaaaggcattctttgcaggcatattttgtatgccactgttttttgaaatgtgaaaaaaacgttggcatacttagttatttttttggacaagctacacttcaagcttgtttttaatgttaatttgatagtgtgtgtttttttttttaaacaaatcaagaagctgaaaaatttttaggattgttggtgcttagtagacttgataactattttaaaaatgcgtgaatttagtaaaattctttttttctcactatgcatgtgtaaatgtttgtaacctggcttccctcttctccagtggtataaagaattgtgccgctttaaggtttgggt

SEQ ID NO: 5301 - DNA, 547 bp, Rattus norvegicus
  ref <308>: DATABASE ACCESSION NUMBER: EMBL / AA875278
  ref <309>: DATABASE ENTRY DATE: 2000-03-03
tttttttttttttttttgtggatgaattgtcttctctttattaagaaccattacagaattactcagttcagaagggggtcacaacacacacatgagcacgaaagattcccgctcatcctccaccggccctggatcgagatgttgtcaggagtggaggagcagccagggcctcctctctgctctctgtggagacaagatggcccctgcacagcctggggtgtgggtggtcagcgggccagatgtctcatggctgcctgcagggacttcttcaggaaggtggcgttgggctctagggccacagccaggtccagactctgctgctgtgagatgctggcctggtacttggtcatcaccgtcagcatcagcttggcataggccatggaggtggtggctgccggcccctctttgcacagcctctgcatcaagacactgaagagctccgaggtcatctccacctgccgctccaggagcgcctgcaacaccaggaacgtctcttccctccaggccagctccaggacctgccccagaatctggacctgcatgtctg

SEQ ID NO: 5302 - DNA, 2565 bp, Homo sapiens
  ref <308>: DATABASE ACCESSION NUMBER: EMBL / AF265210
  ref <309>: DATABASE ENTRY DATE: 2000-11-08
aacggctgcggcttcgggcggccgggtttctccggtctcccaacgccgaggagagcttgtaacaggcgctggagctggcccgccaccgccgcgtcagggacggcgctggagtcctccgttcccctcagcctctgagctgaggccccacaccagagtagggggcggcgcggcacccgtgccccggcatggcgacaccggacgcggggctccctggggctgagggcgtggagccggcgccctgggcgcagctggaggcccccgcccgcctcctgctgcaggcgctgcaggcggggcctgagggggcgcggcgcggcctgggggtgctccgggcgctgggcagccgcggctgggagcccttcgactggggtcgcttgctcgaggccctgtgccgggaggagccggtcgtgcaggggcctgacggccgtctggagctgaaaccactgttgctgcgattgccccggatatgccagaggaacctgatgtccctgctgatggccgttcggccatcgctgccggaaagtgggctcctctctgtgctgcagattgcccagcaggacctagcccctgaccccgatgcctggctccgtgccctgggggaattgctgcgaagggatttgggggtggggacctccatggagggagcttctccactgtctgaaagatgccagagacagctccaaagtctatgtagggggctgggcctggggggcaggaggttgaaatccccccaggctccagaccctgaagaagaggagaacagggactcccagcagcctgggaaacgcagaaaggactcagaggaagaggctgccagtcctgaggggaagagggtccccaaaagattacggtgttgggaagaggaagaagatcatgagaaggagagacccgaacataagtcactggaatccctggcagatggaggaagtgcatctcctattaaggaccagcctgtcatggcagttaagactggcgaggacggttcgaatctggatgatgctaaaggtctggctgagagtttggagttgcccaaagctatccaggaccagcttcccaggctgcagcagctgctgaagaccttggaggaggggttagagggattggaggatgcccccccagttgagctacagcttcttcacgaatgtagtcccagccagatggacttgctgtgtgcccagctgcagctccctcagctctcagacctcggtctcctgcggctctgcacctggctgctggccctttcacctgatctcagcctcagcaatgctactgtgctgaccagaagcctctttcttggacggatcctctccttgacttcctcagcctcccgcctgcttacaactgccctgacctccttctgtgccaaatatacataccctgtctgcagcgccctccttgaccctgtgctccaggccccaggcacaggtcctgctcaaacagagttactgtgttgccttgtgaagatggagtccctggagccagatgcacaggttctaatgctgggacagatcttggagctgccctggaaggaggaaactttcttggtgttgcagtcactcctagagcggcaggtggagatgacccctgagaagttcagtgtcttaatggagaagctctgtaaaaaggggctggcagccaccacctccatggcctatgccaagctcatgctgacagtgatgaccaagtatcaggctaacatcactgagacccagaggctgggcctggctatggccctagaacctaacaccaccttcctgaggaagtccctgaaggccgccttgaaacatttgggcccctgaccatccaccaagggaccaccctcttggtgctccatcaccagcttcctgaagggcatttctttcttcaccaccttgtcttgagccctagcctgaggataaaggctgagcctggccatcccagattgcaactgcctccctgttacaggctgcatagggaatattggcttcccagccagcagggaggctcctgggctaagggagctcagctatattttctttttcatttcttttgtttttgagagaaggtattgctctgtcatccaggctggagtgcagtgatgcgattgatcatggctcactgtaacctctgcctcccaggctcgatcctcccatgtcagcctcccaagtagctgggactacatgcacatgacactatgcccagctaattttttattttgtagataatatgctggtcagggctggtcttgaactcctgagctcaagtgatcttcctgccttggcacccaaagtgttgagatttacaggtgtgagccaccacaccaggccagagctatatttccaaaggctgctggccccaggcacactcctcatcaattctcaggctgcagggacaaactttccgatagggctcagtaggatcaagccgacccagagtgggcatgggatgctccaggaggtctggggtaccagtgggctcagatgaagctcttgtgctcatgtatattatgaccttctgtgtttttgtttctgacttgaataatttatcaatggtgttgaataaaagcaagttcaataatgaaaaaaaaaa

SEQ ID NO: 5303 - protein, 537 aa, Homo sapiens
  misc_feature (1)..(537): Xaa=Unknown amino acid
MATPDAGLPGAEGVEPAPWAQLEAPARLLLQALQAGPEGARRGLGVLRALGSRGWEPFDWGRLLEALCREEPVVQGPDGRLELKPLLLRLPRICQRNLMSLLMAVRPSLPESGLLSVLQIAQQDLAPDPDAWLRALGELLRRDLGVGTSMEGASPLSERCQRQLQSLCRGLGLGGRRLKSPQAPDPEEEENRDSQQPGKRRKDSEEEAASPEGKRVPKRLRCWEEEEDHEKERPEHKSLESLADGGSASPIKDQPVMAVKTGEDGSNLDDAKGLAESLELPKAIQDQLPRLQQLLKTLEEGLEGLEDAPPVELQLLHECSPSQMDLLCAQLQLPQLSDLGLLRLCTWLLALSPDLSLSNATVLTRSLFLGRILSLTSSASRLLTTALTSFCAKYTYPVCSALLDPVLQAPGTGPAQTELLCCLVKMESLEPDAQVLMLGQILELPWKEETFLVLQSLLERQVEMTPEKFSVLMEKLCKKGLAATTSMAYAKLMLTVMTKYQANITETQRLGLAMALEPNTTFLRKSLKAALKHLGPX

SEQ ID NO: 5304 - DNA, 547 bp, Rattus norvegicus; identical to SEQ ID NO: 5301
  ref <308>: DATABASE ACCESSION NUMBER: EMBL / AA875278
  ref <309>: DATABASE ENTRY DATE: 2000-03-03

SEQ ID NO: 5305 - DNA, 2565 bp, Homo sapiens; identical to SEQ ID NO: 5302
  ref <308>: DATABASE ACCESSION NUMBER: EMBL / AF265210
  ref <309>: DATABASE ENTRY DATE: 2000-11-08

SEQ ID NO: 5306 - protein, 537 aa, Homo sapiens; identical to SEQ ID NO: 5303
  misc_feature (1)..(537): Xaa=Unknown amino acid

SEQ ID NO: 5307 - DNA, 394 bp, Rattus norvegicus
  ref <308>: DATABASE ACCESSION NUMBER: EMBL / AA875327
  ref <309>: DATABASE ENTRY DATE: 2000-03-03
tttttttttttttttttgttatgtaaggttctcttttatttaaaagatcattcacaaaataccatatccatagactcactttctgtcatagaactgaatgtgttaagtgtttggaattccattcttacagagtcagctgggcgcccagcagtgtggatggacgtgcctgttctgtcttttccgcattggagatggattagatcatctgaaagcatcagctttgattacaaccacgcaatgcatgtctccaattctgtgtgctcatcccagctggatacctaccaacaggccaccacagccgcctagctagtggccccagctctttcccagaagccaaggggtggctggcaggaagctgctggctaacgagcaagctgcgcacctcagcccttct

SEQ ID NO: 5308 - protein, 647 aa, Rattus norvegicus
  ref <308>: DATABASE ACCESSION NUMBER: SWISS-Prot / AAD34858
  ref <309>: DATABASE ENTRY DATE: 2002-06-15
MRLTLLCCTWREERMGEEGSELPVCASCGQRIYDGQYLQALNADWHADCFRCCECSVSLSHQYYEKDGQLFCKKDYWARYGESCHGCSEHITKGLVMVAGELKYHPECFICLACGNFIGDGDTYTLVEHSKLYCGQCYYQTVVTPVIEQILPDSPGSHLPHTVTLVSIPASAHGKRGLSVSIDPPHGPPGCGTEHSHTVRVQGVDPGCMSPDVKNSIHVGDRILEINGTPIRNVPLDEIDLLIQETSRLLQLTLEHDPHDSLGHGPVSDPSPLSSPVHTPSGQAASSARQKPVLRSCSIDTSPGTSSLASPASQRKDLGRSESLRVVCRPHRIFRPSDLIHGEVLGKGCFGQAIKVTHRETGEVMVMKELIRFDEETQRTFLKEVKVMRCLEHPNVLKFIGVLYKDKRLNFITEYIKGGTLRGIIKNMDSQYPWSQRVSFAKDIASGMAYLHSMNIIHRDLNSHNCLVRENRNVVVADFGLARLMIDEKNQSEDLRSLKKPDRKKRYTVVGNPYWMAPEMINGRSYDEKVDVFSFGIVLCEIIGRVNADPDYLPRTMDFGLNVRGFLDRYCPPNCPPSFFPITVRCCDLDPEKRPSFVKLEQWLETLRMHLSGHLPLGPQLEQLERGFWETYRRGESSLPAHPEVPD

SEQ ID NO: 5309 - DNA, 2477 bp, Homo sapiens
  ref <308>: DATABASE ACCESSION NUMBER: EMBL / D26068
  ref <309>: DATABASE ENTRY DATE: 2002-09-02
gacggcaaatggcggacttcgacacctacgacgatcgggcctacagcagcttcggcggcggcagagggtcccgcggcagtgctggtggccatggttcccgtagccagaaggagttgcccacagagcccccctacacagcatacgtaggaaatctacctttcaatacggttcagggcgacatagatgctatctttaaggatctcagcataaggagtgtacggctagtcagagacaaagacacagataaatttaaaggattctgctatgtagaattcgatgaagtggattcccttaaggaagccttgacatacgatggtgcactgttgggcgatcggtcacttcgtgtggacattgcagaaggcagaaaacaagataaaggtggctttggattcagaaaaggtggaccagatgacagaggcttcagggatgacttcttagggggcaggggaggtagtcgcccaggcgaccggcgaacaggcccccccatgggcagccgcttcagagatggccctcccctccgtggatccaacatggatttcagagaacccacagaagaggaaagagcacagagaccacgactccagcttaaacctcgaacagtcgcgacgcccctcaatcaagtagccaatcccaactctgctatcttcgggggtgccaggcctagagaggaagtcgttcaaaaggagcaagaatgagcctgcggttgggagggaatggggcgtggggggttagagcaggaccacagcctggtgagtccccgggcagccgtcctgcagccgccactcctgcgcctgccattggcctcctcacagcggaaacacagcttgtgagtgcatgtcagctgttaacaagtggtttttagtacattctgggctttgctgtatctatctagtgcctgtttgtgcgtttttttctttcttccgctgcttccccattttccttctgtcctttttctcctgctccttgttttcccagcagcacatggggttcctcggaggagcagaggtggccgccgtgggggggcgtttgggctgcggtgctgcgtcatttttcctttgctttctctttactttagacactggcccaactccaggcgtttcctttcattccctcagtgcttctcttctgacctgcatgttgagttctgtattgctggggcttccaacaaaaaccagagtcactgacagagggaacagcagagaccttgttggtattcagctgtgatggatatagagaatcagaggcaccttgttttcacaactaggataaaaatatctgcagggtcctttccattcctatttagagggagtcctggctccatgaccccctcccgagtggactgtccaagcagataggctcacacgagaaacagtgaggctgaaagggggggctatggaagagcggtagggagtccacggagaagatgcagtgaatgcttgcatgcattcacacgtgtgtgtgtcccagctagttcactcctttcgccgtgcgtggtggaggctggcctctctggctgggtgcagtgaatggccagcgggtttcttttctgctgggccaaggcgctttgggggtggagggggtggtgctggtgctgcactgggctgactgcggcgctgacgcagcgtttccccccatccctgttgcctgtgtgttgtgtggatctgttcctagtataggcaacataatgagatactgtgcttcccacctccccttcagttcagagccaaaatgggtctagaatctggctttactcatttcctttgataaattgtactatgcagagctgtcaggaaccttcagatagcagtagaggactgcagctgtctaggtctgcggccacatcttggggacacactggactgttcccatgtgcagggttcagcagttatgtgggagtgctaggggttaggcttttgagcttgaacgcctgcgtgtgaacagatgaaaaatccttcagtacccaagtcccagtctgtcctatggggagcagtttgggggcggccggcagcaggagcctgggaaagaggccctcgccaggtgatggcagggccagggtggcctggggcacccagcggaatgtgcttagtatttggtcaccagccgtcatcctgggcttttcctactgtgtcttgttacaaggcctcagcaatccacagaactctctctccttccttccacctgtcagcttctctgcttctgagataagaaccatttgtgtaacaccaacacttaacttcagaaagacatgcattatgtggtgtaatcaaacccgatgctttcagatgacctacttacatcttcaatgtggataagataaagaacaaaacacatgcatctaaactgctgggcaatccagttgacttttaaatgtaagaatggaattccaaacacttaacacattcagctatatgacagaaagtaaatctatggatatggtattttgtgaatgatcttttaaataaaagaaaaccttacgt

SEQ ID NO: 5310 - protein, 248 aa, Homo sapiens
  ref <308>: DATABASE ACCESSION NUMBER: SWISS-Prot / Q15056
  ref <309>: DATABASE ENTRY DATE: 2002-06-15
MADFDTYDDRAYSSFGGGRGSRGSAGGHGSRSQKELPTEPPYTAYVGNLPFNTVQGDIDAIFKDLSIRSVRLVRDKDTDKFKGFCYVEFDEVDSLKEALTYDGALLGDRSLRVDIAEGRKQDKGGFGFRKGGPDDRGMGSSRESRGGWDSRDDFNSGFRDDFLGGRGGSRPGDRRTGPPMGSRFRDGPPLRGSNMDFREPTEEERAQRPRLQLKPRTVATPLNQVANPNSAIFGGARPREEVVQKEQE

SEQ ID NO: 5311 - DNA, 394 bp, Rattus norvegicus; identical to SEQ ID NO: 5307
  ref <308>: DATABASE ACCESSION NUMBER: EMBL / AA875327
  ref <309>: DATABASE ENTRY DATE: 2000-03-03

SEQ ID NO: 5312 - protein, 647 aa, Rattus norvegicus; identical to SEQ ID NO: 5308
  ref <308>: DATABASE ACCESSION NUMBER: SWISS-Prot / AAD34858
  ref <309>: DATABASE ENTRY DATE: 2002-06-15

SEQ ID NO: 5313 - DNA, 2477 bp, Homo sapiens; identical to SEQ ID NO: 5309
  ref <308>: DATABASE ACCESSION NUMBER: EMBL / D26068
  ref <309>: DATABASE ENTRY DATE: 2002-09-02

SEQ ID NO: 5314 - protein, 248 aa, Homo sapiens; identical to SEQ ID NO: 5310
  ref <308>: DATABASE ACCESSION NUMBER: SWISS-Prot / Q15056
  ref <309>: DATABASE ENTRY DATE: 2002-06-15

SEQ ID NO: 5315 - DNA, 394 bp, Rattus norvegicus; identical to SEQ ID NO: 5307
  ref <308>: DATABASE ACCESSION NUMBER: EMBL / AA875327
  ref <309>: DATABASE ENTRY DATE: 2000-03-03

SEQ ID NO: 5316 - protein, 647 aa, Rattus norvegicus; identical to SEQ ID NO: 5308
  ref <308>: DATABASE ACCESSION NUMBER: SWISS-Prot / AAD34858
  ref <309>: DATABASE ENTRY DATE: 2002-06-15

SEQ ID NO: 5317 - DNA, 2477 bp, Homo sapiens; identical to SEQ ID NO: 5309
  ref <308>: DATABASE ACCESSION NUMBER: EMBL / D26068
  ref <309>: DATABASE ENTRY DATE: 2002-09-02

SEQ ID NO: 5318 - protein, 248 aa, Homo sapiens; identical to SEQ ID NO: 5310
  ref <308>: DATABASE ACCESSION NUMBER: SWISS-Prot / Q15056
  ref <309>: DATABASE ENTRY DATE: 2002-06-15

SEQ ID NO: 5319 - DNA, 394 bp, Rattus norvegicus; identical to SEQ ID NO: 5307
  ref <308>: DATABASE ACCESSION NUMBER: EMBL / AA875327
  ref <309>: DATABASE ENTRY DATE: 2000-03-03

SEQ ID NO: 5320 - protein, 647 aa, Rattus norvegicus; identical to SEQ ID NO: 5308
  ref <308>: DATABASE ACCESSION NUMBER: SWISS-Prot / AAD34858
  ref <309>: DATABASE ENTRY DATE: 2002-06-15

SEQ ID NO: 5321 - DNA, 2477 bp, Homo sapiens; identical to SEQ ID NO: 5309
  ref <308>: DATABASE ACCESSION NUMBER: EMBL / D26068
  ref <309>: DATABASE ENTRY DATE: 2002-09-02

SEQ ID NO: 5322 - protein, 248 aa, Homo sapiens; identical to SEQ ID NO: 5310
  ref <308>: DATABASE ACCESSION NUMBER: SWISS-Prot / Q15056
  ref <309>: DATABASE ENTRY DATE: 2002-06-15

SEQ ID NO: 5323 - DNA, 472 bp, Rattus norvegicus
  ref <308>: DATABASE ACCESSION NUMBER: EMBL / AA875348
  ref <309>: DATABASE ENTRY DATE: 2000-03-03
tttttttttttttttttcaatgcttccaacaactttattcataacaggcaaagcctggaaacaacccaaggaacaatgtcagattttataaaatggaatatactcagcaataaaaatgaatcaattatcaatgcatacaataacatgaaaaaagcagttaaagtacaagaatgggaacataaacgaacaaataatgtttagcccattaactactgtttgagaggagatagtagaaagacacaaagatacttttgaaatgaaatataatgaaaatgttttatatcatagtagtagagttcgttacattatatatacatttaacaaatcatagtgtatacttaaatttttagttttacttacataaaatgtacatcaaatttattaccaaaaactgatggttgttgtatggacaaaacagtgtgtgacacactgttgaccaactacaacttccacaacaagatttttttttttt

SEQ ID NO: 5324 - DNA, 419 bp, Rattus norvegicus
  ref <308>: DATABASE ACCESSION NUMBER: EMBL / AA875362
  ref <309>: DATABASE ENTRY DATE: 2000-03-03
tttttttttttttttttcatttagtattttaataatataaaaaagacaatacaaaatccaaacattcctttttacaagttcagatacatatttttcccccaagtgcaaaatactctgtgtaccacattgctgctgtctgttgttggctgagatgctcgctgtgtgggaggcggtagaaggcagatataaatacagtattttgagatctttttcttttgcattaaaaaaaaagccatccacgtgataattattctctgaaagttccaacttacatagaacaaagttttgagcttgtttgtctcaggaagctgatcgcagaactgggcttctagtccttctagctctcaaaggattcctagtcgaacgaaataatggcagaaagacagagtgtgccagctttgagacaggtccaatgtcaa

SEQ ID NO: 5325 - DNA, 549 bp, Homo sapiens
  ref <308>: DATABASE ACCESSION NUMBER: EMBL / AA908851
  ref <309>: DATABASE ENTRY DATE: 2000-03-03
aactttttttttttttttttttttcatttagtattttaataataataaaaaagacatacaaaatccaaacatttctttttacaattcagatacatatttttccccaagtgcaaaatactctatgaactgtatcatttgctgtttattgtcgattgtataggagatgcttactaaattggcagcagtggaaggcagatataaatacaatattttgaaatttcttctgcatttaacaaaaagcctcccacatggcgatgattattctgaaacttgagttcagctcacacagaagtataaagttttcagtttgttcaaactgctacaacctgtggtgtctaaaaaagctgatgacaactgggggttctattccttctaatcatatatttccttgtacaaataatggcacaaggatagggtgtgctacttttgagacgggtcaaatgtaaaaatatccttgtgttgttcgctcccacttttattgtgcttaagaaagaaacctggagggttaacattttctgcttatgctcagttatactttgtcttggtacc

SEQ ID NO: 5326 - DNA, 538 bp, Rattus norvegicus
  ref <308>: DATABASE ACCESSION NUMBER: EMBL / AA875425
  ref <309>: DATABASE ENTRY DATE: 2000-03-03
tatttttttttttttttcattcaacaagtatttattgagtgcctactatgtgccaggcactgtcatgaggcgatgggaatagatacagcagtgaagacagacaaagtacctgctctcgaggagcttccattctaacgtacacgctagcttacattgcaacagtgagtaacatcgtactatcaaaagtaataaaagcaccagaatgaaaacagacctttttacctaaactgttaaaaagaaactacataacattcaaaattgtataatgacttgtaacaggtaaaataactttttacatgctgttaaaacatattttagctatcatttaactcaactttcatagaatatgctacaaggtgggatagaagaacataacccacattcacatgcaaatacctttgatacttcaaatcagtatttcccagatgacccattaaccttttgttttaaagtactttcttaatggtaaattgccactagcattcaaattaaagtactttataattcctccttaatatacattttatacatgtcatgg

SEQ ID NO: 5327 - DNA, 494 bp, Rattus norvegicus
  ref <308>: DATABASE ACCESSION NUMBER: EMBL / AA875428
  ref <309>: DATABASE ENTRY DATE: 2000-03-03
attttttttttttttttgcacttctgtgtttaataagtcacatcttcagttgctcctggggtggaatgtgagaccttgactcttgtagtgatgtcagtgggtgggcatgaggctgtgaagaacatctttctgccacacagatgacatctctggagtaggtacatgtgcacgaggagctccatagtttcacccacagtacacctgctacaaagtccctgtaggcaatggctgccaagtggctatgtgacatctaacaaagacagtggacacctgaggtagctagtagcccagcagagacaggagtacaaccattagaggaggcagatccaagaccacaatgctcttaggaaccatagtgctctcaggatgtggtgttttcatggggacattggccacccacccccttgggggagggtccacaactatctggcttgcagctcactcttactgatagtcctaagggctaaaatgatgctggtggactctcagggcga

SEQ ID NO: 5328 - DNA, 2146 bp, Homo sapiens
  ref <308>: DATABASE ACCESSION NUMBER: Refseq / NM_022171
  ref <309>: DATABASE ENTRY DATE: 2001-03-14
tactcccggagtcactcatcccttaagcaagcagggtggggttaggtgcgcgtgcgcggttttaatactcctccccgaactgccaactcttcacgcacgcgaagtaggccccaccctggctgggtttacgcgtgcgcactaacgggcctggtcccggaagaccacacgcgtgcgtggtggggactacggtgacagtaccccgggtggggcgagggccagtcatggcggagtcctggtctgggcaggccttgcaggctctgccggccacggtgctgggcgcgctgggcagcgagttcttgcgggagtgggaggcgcaggacatgcgcgtgaccctcttcaagctgctgctgctgtggttggtgttaagtctcctgggcatccagctggcgtgggggttctacgggaatacagtgaccgggttgtatcaccgtccaggtctgggtggtcagaatggatccacgcctgatggctccacgcatttcccttcgtgggaaatggcagcaaacgaacctctcaaaacccacagagaataagggaaggcagcagagggtctccaagggcatcactgggtctgctggcttctacactgggttctgctactccccagacctcagggacaactgccgggggttcagggttggtagcagggagtacccagtgcctacagggctgggcctcttctgcctcttaagcctgctccctcacccaggcactgggcaagtgaagagtttgcctgtactcttatctgggtgccttaaggagagagattgtgttcttcctctctcaggggtgataactcaggaagcctctgggttgggaagaccatcagttcttttgtcttaggtttcttttcctgtccctcttccatccccaagatgtgaccccataaaaatttttcctgagttggccaggcatggtggctcacgcctgtaatcccaacactttgggaggctgaggcaggcagatcacgaggtcaggagttcgagaccagcctgaccaacatggtgaaaaccccatctctactaaaaatacaaaaattagccgggtgtggtggcacacaccagtaatcccagctactcgggaggctgaagcaggagatttgcttgaacctgggaggcagaggttgcagtgagccaagattgcgccgttgtactccagcctgggcaacagagcaagacccatctcaaaaaaaaaatttttttcctgagaggaagcctgaggttgaccagctctggggtttgtaaggcaggtctgttttctcctaggccctgagttttctgaatctctggttttgctttgttggcaaggagccagggaatcctgacctgagccagaccttaagctctatggttatttagctggccattcaggtataaggcagggtggtgtacctgctggcactatccagatggaggcaccaaacacccacatacctggcccaaccagacttctcccgtgagccaggcaaaggaaattgtcatctgccaactgtcctactcatattcctctcagtccttcttgggggtaagctgattacctgaaggacagctgaacccctggggtagcctcctatccaccactgcttaagtgcctatgggaatgtgggtctgcaccttgtcccctcataggatggtaccaagcatttagtgcacagtggccccatcatagcctgcagcctcatcatttcccatctggacctggtacaaatgcacgtcacaggctcagctcctccccactagcatcttctctaccttcaagaaccaggcagccctgccatgtcacaataggccaggggagtttccaaagatgtgggtggcaaatgcccctatagaaacaccagtacctgaaagcactgtagccctggacctgcctccttccctcggggccatacttctgtttccatctgctgggccaccagccactttagtgacccctgcctacttccttcctgttggatatcatacttccatctggctgcctttgcttaagccatctttgtggtagaggggccctggaattgcagctgtactgaggatgatgttattcacagcccctggcccacccactaatactactgcacagagtcaggatctcacatttcaccccaggctcaactgaggatgtggcttattaaacacggaagtgc

SEQ ID NO: 5329 - DNA, 392 bp, Rattus norvegicus
  ref <308>: DATABASE ACCESSION NUMBER: EMBL / AA875444
  ref <309>: DATABASE ENTRY DATE: 2000-03-03
tttttttttggaacattcctttgaaattttgagaaacttgcaactcttcagtaatcactcccgatgtttcttgtacggggccgcgggcctcttggttgttttcgagcattttcttaaaaaaaaagaaacaagagggacacaacagttttaaaccggaagatttccgcagtccgtgtaagcatgtttacctgttggtttgctttctgtgtctgtgaaatgaatgtcatgtgtaaatgccaacctaaggcaacagcgtctcataactgagtgactgcagtgacttgatgctctacatcattgtagaatttactgctatatggttttaatccttgaacctgtgattgtgacccacgatgggggacctttcagtgctaaagctgatcatgtgtgta

SEQ ID NO: 5330 - protein, 572 aa, Rattus norvegicus
  ref <308>: DATABASE ACCESSION NUMBER: SWISS-Prot / Q62950
  ref <309>: DATABASE ENTRY DATE: 2001-10-16
MSHQGKKSIPHITSDRLLIRGGRIINDDQSFYADVYLEDGLIKQIGENLIVPGGVKTIEANGRMVIPGGIDVNTYLQKPSQGMTSADDFFQGTRAALAGGTTMIIDHVVPEPGSSLLTSFEKWHEAADTKSCCDYSLHVDITSWYDGVREELEVLVQDKGVNSFQVYMAYKDLYQMSDSQLYEAFTFLKGLGAVILVHAENGDLIAQEQKRILEMGITGPEGHALSRPEELEAEAVFRAIAIAGRINCPVYITKVMSKSAADIIALARKKGPLVFGEPIAASLGTDGTHYWSKNWAKAAAFVTSPPLSPDPTTPDYLTSLLACGDLQVTGSGHCPYSTAQKAVGKDNFTLIPEGVNGIEERMTVVWDKAVATGKMDENQFVAVTSTNAAKIFNLYPRKGRIAVGSDADVVIWDPDKMKTLTAKSHKSTVEYNIFEGMECHGSPLVVISQGKIVFEDGNISVSKGMGRFIPRKPFPEHLYQRVRIRSKVFGLHSVSRGMYDGPVYEVPATPKHAAPAPSAKSSPSKHQPPPIRNLHQSNFSLSGAQIDDNNPRRTGHRIVAPPGGRSNITSLG

SEQ ID NO: 5331 - DNA, 392 bp, Rattus norvegicus; identical to SEQ ID NO: 5329
  ref <308>: DATABASE ACCESSION NUMBER: EMBL / AA875444
  ref <309>: DATABASE ENTRY DATE: 2000-03-03

SEQ ID NO: 5332 - protein, 572 aa, Rattus norvegicus; identical to SEQ ID NO: 5330
  ref <308>: DATABASE ACCESSION NUMBER: SWISS-Prot / Q62950
  ref <309>: DATABASE ENTRY DATE: 2001-10-16

SEQ ID NO: 5333 - DNA, 512 bp, Rattus norvegicus
  ref <308>: DATABASE ACCESSION NUMBER: EMBL / AA875495
  ref <309>: DATABASE ENTRY DATE: 2000-03-03
tttttttttttttttttgtataaaaaagatttattgaaatttatcaatgacaaacagacataaaactcaaagtttggctcttctcaggggcgggagaaaaatgagttacagctgatctgtacaaatgagacacagggtaggaaacagcacgtcacttctaaagcaatctggaaggggggcgctgaaggcacacgcactctctaggagaaatctgcggccacttcagagtcccaccaggtaagaaaatacgagcttgcattccttttccgtgctcctatgtatttgagaaggaaaacaaacagaacaaaaacccagaggacacacagggcgcttccagagcttagatttgttaaaaggttctaagctggagcgcccgaggagtcctcctgccatttctgtaaaacaaattgctctaatattttacagaacaagatagaacaggttggcttttctgaagaagctgaaacacgaaggttcacttctttcccattttacgtgtctcctaaacctgc

SEQ ID NO: 5334 - DNA, 414 bp, Homo sapiens
  ref <308>: DATABASE ACCESSION NUMBER: EMBL / BI495246
  ref <309>: DATABASE ENTRY DATE: 2001-08-30
gcacgagtagaacgctttgttttacaaaaaatgatgagagaattcttccacatgtacttctgtgcttagaacatttttacggacctaagcgctggagacgttgctgcatgtcggctgggttttttttttcatacacccgagcacggaaaaactaacgcaaaattgtattttcttacctagtggaaatctgaaatgactgcaaattcctagtgaatgtacaggtttgctttcgtgtccctcttctggttgctttagaagtgacgtgtaatttctgaacccatgtttcatctgtataaaagaacatctgcaccagtttttctcctgcccctcagaagagccaaactttgagttttatgtctgtttgtcattgataaatttcaataaatctttttatacaaaaaaaaaaaaaaaaaa

SEQ ID NO: 5335 - DNA, 512 bp, Rattus norvegicus; identical to SEQ ID NO: 5333
  ref <308>: DATABASE ACCESSION NUMBER: EMBL / AA875495
  ref <309>: DATABASE ENTRY DATE: 2000-03-03

SEQ ID NO: 5336 - DNA, 414 bp, Homo sapiens; identical to SEQ ID NO: 5334
  ref <308>: DATABASE ACCESSION NUMBER: EMBL / BI495246
  ref <309>: DATABASE ENTRY DATE: 2001-08-30

SEQ ID NO: 5337 - DNA, 473 bp, Rattus norvegicus
  ref <308>: DATABASE ACCESSION NUMBER: EMBL / AA875496
  ref <309>: DATABASE ENTRY DATE: 2000-03-03
tttttttttttttttttaagcttatgaatagtttattacatttcaacaactgtattgtgaatcaataaaacaaaagctaaggacaatgagctcaagttatcgattcttaagtttcaaaatagaacagtaggaaagctatgaaagtgggggggtggactttggggtgtatgagcaataggaatctaaagcatcaaaacacaggctaagaaagtctaggacacaaggaagactccagcagctccctcagatgtctaattccggtcatttacttttcactctaaaaagtatcttaaatttttaatatttattagttttttgttttttcaagacagggtctcacatatagctctgcctaccccagaactcacaatgaagtccaggctgaccttgaactcacagagaccctctagcctctgcctctgtcgtgctggaattaaaggcacatgcaccactatgcccagcataaatattta

SEQ ID NO: 5338 - DNA, 338 bp, Homo sapiens
  ref <308>: DATABASE ACCESSION NUMBER: EMBL / AA521144
  ref <309>: DATABASE ENTRY DATE: 2000-03-03
ttttttttttttttttttttttttgcaagtttatgaatagtttattacatttcagtaagtgtattgtgaatcaataaagcaaaagttaaggacaatgagctcattaccaagccagttattgattctctggttccaaaatagaacagtacaggaagggtatagagaaaataggatttttcatgataaaaattttaagcatcttaggaacacagacctaaagaaactataagacacaacggaaatttcagcagctacttaggatgtttatttatttacctttttttgccaattagaattagttatttggtttttactcttaaaaaaaaaagtattttcaa

SEQ ID NO: 5339 - DNA, 476 bp, Rattus norvegicus
  ref <308>: DATABASE ACCESSION NUMBER: EMBL / AA875500
  ref <309>: DATABASE ENTRY DATE: 2000-03-03
tttttttttttttttttgcaaaaccgttttgggctgatgtatgagcttttacctttgcactgagtgacgttctctccgtctgagcggcagcgtggggggcagctgctccagtgtaaatgtttactcaaggatgttcctaaaggcgtgcgctctctactacgcctcgtgttgcctaccttagtgtggtgtcgtggagttcaagatcaagttgagatactgacgtagggttcttaatgaaagtattgcaccagttttttcatgttgtaaaactaaagaatttcgctctacagtttgagaaactgtggccaccgctgtgacccgcagcccgcctgctgcccaggttgggccctgcactttgaacaggctttccatgttgttttgaaggttcccacggtgaaccttcttgtttacagattttttgtttgttttttgagaaaaaaaatgtttactcttccatcatttaaaaaaaaaaaatt

SEQ ID NO: 5340 - DNA, 5272 bp, Homo sapiens
  ref <308>: DATABASE ACCESSION NUMBER: Refseq / XM_047123
  ref <309>: DATABASE ENTRY DATE: 2002-08-01
agttaacacaaacaaaggaggtggtgtgtgggaatctggtgcagcaaactcccagagtacatcatggggaagtggaaatggcgcaaattctggaggaagtcgaagaggatggggaacccctgcacaaaacactggcactaatttacccagcgttgagtggaacaaactgcctagcaatcagcattccaatgatagtgcaaatggcaatggtaagacgtttacaaatggatggaaatctactgaggaagaggatcagggttctgccacatctcagacaaatgagcaaagcagtgtgtgggccaaaacaggaggtacagtggagagcgatggtagtacagaaagcactggacgccttgaggaaaaaggaactggggaaagtcagagtagagacagaagaaaaattgatcagcacacattactccaaagcattgtaaacagaactgacttagatccacgtgtcctgtccaactctggttggggacagactcctattaagcagaatactgcctgggatacagaaacatcacctagaggggaacgaaagactgacaatgggacagaggcctggggaagctctgcaacacagacttttaactcaggggcatgtatagataagactagccctaatggtaatgatacctcatctgtatcagggtggggcgatcccaaacctgctctgaggtggggagattccaaaggctcaaactgccagggggggtgggaagatgattctgctgctacaggaatggtcaagagcaatcagtgggggaattgcaaagaggagaaggctgcatggaatgactcgcaaaagaataaacagggatggggtgatggacaaaaatcaagccaagggtggtctgtttctgccagtgataactggggagaaacttcaaggaataaccattggggtgaggccaataagaaatccagctcaggaggtagtgacagtgacaggtccgtttccggttggaacgaacttggtaaaactagttctttcacttggggaaacaacataaatccaaataattcatcaggatgggatgaatcttctaaacctactccttcccagggatggggagaccctccaaagtctaatcagtctctaggttggggagattcgtcaaagccagtcagctctccagactggaacaagcaacaagacattgttggatcttggggaatcccaccagctacaggcaaacctcctggtacaggctggctggggggacctataccagccccagcaaaagaagaagaacccacaggctgggaggaaccatccccagaatctatacgtcgcaaaatggagattgatgatggaacttcagcttggggagatccaagcaaatacaactacaaaaatgtgaacatgtggaacaaaaacgtcccaaatggcaacagccgttcagaccagcaagcacaggtacatcagctgctaacgcctgcaagtgccatctcaaacaaagaggcaagcagtggctctggctggggtgagccctggggggagccttctactccagccacaactgtggataatggtacttcagcatggggtaagcccatagacagtggtcccagctggggggaacccattgctgcggcatccagcacatccacgtggggctccagctctgttggtccacaagcattaagcaaatctgggccaaaatctatgcaagatggctggtgtggtgatgatatgccattgcctggaaatcgccccactggctgggaagaggaagaggatgtggagattggaatgtggaatagtaattcatctcaagagcttaactcatctttaaattggccaccatatacaaagaaaatgtcatcgaagggtctgagtggcaaaaaaaggagaagggaaaggggaatgatgaaaggtggaaacaaacaagaagaagcgtggataaatccatttgttaaacagttttcaaacatcagtttttcgagagactcaccagaggaaaatgtacaaagcaataagatggacctttctggaggaatgttacaagacaaacgaatggagatagataaacatagcctaaatattggtgattacaatcgaacggtcgggaaaggccctggttctcggcctcagatttccaaagagtcttccatggagcgcaatccttattttgataaggatggcattgtagcagatgaatcccaaaacatgcagtttatgtccagtcaaagcatgaagcttcccccttcaaatagtgcactacctaaccaggcccttggctccatagcagggctgggtatgcaaaacttgaattctgttagacagaatggcaatcccagtatgtttggtgttggaaacacagcagcacaaccccggggcatgcagcagcctccagcacaacctcttagttcatctcagcctaatctccgtgctcaagtgcctcctccattactctcccctcaggttccagtttcattgctgaagtatgcaccaaacaacggtggcctgaatccactctttggccctcaacaggtagccatgctgaaccagctatcccagctaaaccagctttctcagatctcccagttacagcgattgttagcgcagcagcaaagggcgcagagtcagagaagcgtgccttctgggaaccggccgcagcaagaccagcagggtcgacctcttagtgtgcagcagcaaatgatgcaacaatctcgtcaacttgatccaaacctgttggtgaagcagcagactccaccatctcagcagcagccactccatcagccagccatgaagtctttccttgacaatgtcatgccccacactacacctgagctgcaaaaagggccatcaccaataaatgctttcagcaacttccctataggcttgaactcaaacttgaatgtaaatatggatatgaacagtattaaagagccacagtcaagactaaggaagtggacgacagtggacagcatttctgtgaacacatctttggatcaaaactccagcaaacatggtgctatttcaagtggtttcaggctggaagagtctccatttgttccctatgactttatgaacagcagtacttcaccagccagtcctccaggttcaataggagatggctggccacgtgccaaatcgcctaacggctctagcagtgttaattggccaccagaatttcgtcctggtgagccatggaaaggttatccaaacattgaccctgaaactgacccttacgtcactcctggcagtgtcataaacaatctttcaattaatactgtgcgggaagttgaccacctcagggacaggaacagtgggtcatcctcatccttgaacaccacgctgccttcaactagtgcctggtcatccattcgtgcctccaactacaacgttcccctcagcagtacagcacaaagcacttcagccagaaatagtgattccaaattgacatggtctcctggttcagttacaaacacctctctggctcatgagctgtggaaggtccctttgccacctaaaaacatcactgctccgtcccgcccacctccgggactgactggtcagaagccacccttgtctacgtgggataattctccccttcgtataggtggaggatggggaaattctgacgccagatataccccaggtaagagttccagctggggtgagagcagctcagggagaataacaaattggcttgttctaaaaaaccttacacctcagatcgatggctcaactctgcgcactctgtgcatgcagcacggcccgctgatcacattccacctgaacctccctcacggaaatgctctggtccgctacagttcaaaagaagaggtagtgaaggcacaaaagtctctgcacatgtgtgtactggggaacactactattcttgctgagtttgccagtgaagaggagatcagtcgtttctttgcacaaagccagtctctgaccccttctcccggctggcagtctctcgggtccagccagagccggctgggctccctcgactgttcccactcattctccagccggaccgatctcaatcactggaatggtgctgggctgtcgggaactaactgtggagaccttcacggcacttcactctgggggaccccgcattattccacaagcctgtggggtcccccaagcagcagcgacccccgaggaattagcagcccatctcccattaacgcttttctttctgttgaccacctgggtgggggtggagagtccatgtaacagtgtagatgcagactcaccgaccgggacctcagacgcgagggaaaggagcactaagtggggctcgccgcctgcagccaggggccgcctgtgggaacagctattctctgcacattttccactttgttttccccaaaacatatcagtttgaatacttgaatcatgcaggccaatattataatgtgaaaaggtatctactctatttacactcccaaatagcgccatacatgctaaaccgtagagaatgagctcgcttgtgtctattcatcatgtttagcctttggattctttttttttttttccttctattcctccccaacccccccccccgcccctttttttctctcttgcaaaaccattttttgggctgataacgtatgagcttttccctttgcactgaatgatgttctctccgtctcatcggcagtatggggggcagctgtcccagtgtcaatgtttactcaagggtgttcttaggaggcgtgcgctctctactatgccttgatgttgcctaccttattgtggtatcgtggagtttaaaagatcaagttaggatgctgacttaggattattaatgaaagtgttgcaccagttttttcatgttgtaaaactaaagaatttcgctctgcagtttgaaaaactgtggccacagctgtgacttgcagcccacctgccacccaggacgggccctgcactttgaataggctttccattttgttttggaggttctcactttgaaccttcttgtttacagatttttttgtttgttttttgagaaaaaaaaatgtttactcttccatcatttaaaaaaaatgtaaaagacaaaaaaaaaatggaggatgatttaaaagatgctttctatctctgggaaaaaggagcagcatttggccatgttcttttgtttttctattcctgtcccaaatcaaagagcatggttctcaggaaaaccagttccccagtttaaaaaaaaaaaaaaaaattccttgtagtttcttagaggaaaaaaagaaaaaccccaacttttagcactgatactacatattgctctgttaaagaattttctctgcc

SEQ ID NO: 5341 - protein, 1152 aa, Homo sapiens
  ref <308>: DATABASE ACCESSION NUMBER: Refseq / XP_047123
  ref <309>: DATABASE ENTRY DATE: 2002-08-01
MVKSNQWGNCKEEKAAWNDSQKNKQGWGDGQKSSQGWSVSASDNWGETSRNNHWGEANKKSSSGGSDSDRSVSGWNELGKTSSFTWGNNINPNNSSGWDESSKPTPSQGWGDPPKSNQSLGWGDSSKPVSSPDWNKQQDIVGSWGIPPATGKPPGTGWLGGPIPAPAKEEEPTGWEEPSPESIRRKMEIDDGTSAWGDPSKYNYKNVNMWNKNVPNGNSRSDQQAQVHQLLTPASAISNKEASSGSGWGEPWGEPSTPATTVDNGTSAWGKPIDSGPSWGEPIAAASSTSTWGSSSVGPQALSKSGPKSMQDGWCGDDMPLPGNRPTGWEEEEDVEIGMWNSNSSQELNSSLNWPPYTKKMSSKGLSGKKRRRERGMMKGGNKQEEAWINPFVKQFSNISFSRDSPEENVQSNKMDLSGGMLQDKRMEIDKHSLNIGDYNRTVGKGPGSRPQISKESSMERNPYFDKDGIVADESQNMQFMSSQSMKLPPSNSALPNQALGSIAGLGMQNLNSVRQNGNPSMFGVGNTAAQPRGMQQPPAQPLSSSQPNLRAQVPPPLLSPQVPVSLLKYAPNNGGLNPLFGPQQVAMLNQLSQLNQLSQISQLQRLLAQQQRAQSQRSVPSGNRPQQDQQGRPLSVQQQMMQQSRQLDPNLLVKQQTPPSQQQPLHQPAMKSFLDNVMPHTTPELQKGPSPINAFSNFPIGLNSNLNVNMDMNSIKEPQSRLRKWTTVDSISVNTSLDQNSSKHGAISSGFRLEESPFVPYDFMNSSTSPASPPGSIGDGWPRAKSPNGSSSVNWPPEFRPGEPWKGYPNIDPETDPYVTPGSVINNLSINTVREVDHLRDRNSGSSSSLNTTLPSTSAWSSIRASNYNVPLSSTAQSTSARNSDSKLTWSPGSVTNTSLAHELWKVPLPPKNITAPSRPPPGLTGQKPPLSTWDNSPLRIGGGWGNSDARYTPGKSSSWGESSSGRITNWLVLKNLTPQIDGSTLRTLCMQHGPLITFHLNLPHGNALVRYSSKEEVVKAQKSLHMCVLGNTTILAEFASEEEISRFFAQSQSLTPSPGWQSLGSSQSRLGSLDCSHSFSSRTDLNHWNGAGLSGTNCGDLHGTSLWGTPHYSTSLWGPPSSSDPRGISSPSPINAFLSVDHLGGGGESM

SEQ ID NO: 5342 - DNA, 529 bp, Rattus norvegicus
  ref <308>: DATABASE ACCESSION NUMBER: EMBL / AA875506
  ref <309>: DATABASE ENTRY DATE: 2000-03-03
ttttttttttttttttaaaaaaaaaaaaaaaaacttggacttttcataactcaggggattccctgaaaaaattacctgcaggtggaatatttcatggacaaaattttttctccccttccaaattcagtttatcaccactaaagaacaaagataaactggcctcggtcccagctgctgtgtttgggtggagattttgtccccttcccatgttgctctccccacattgtacactcttggggcttatatctcatgttcttctccagagaatataaattgtagttcatcacgggaggatgggaggggaaaggtagggagggcccagtccgttctgtacactgtcctgctggctggccacttcatctcttttctccaggactgcatccatggctcattccggctctggtggaggtgggtctgtcttagatacatcaaggtgttaaaagtctacccaacttgcagacagatccaaaagctttttttctgaacgaatcatgtcttactaacctaatcctaaaagactaattttagt

SEQ ID NO: 5343 - DNA, 393 bp, Rattus norvegicus
  ref <308>: DATABASE ACCESSION NUMBER: EMBL / AA875511
  ref <309>: DATABASE ENTRY DATE: 2000-03-03
tttttttttttttttttgcaattcacacttgattttattccatgacactgatttgctgaaaccccctgtttcctgggcagggaagggcagtgggtcgcctggtagaagcggggctgcctgcccaggaggactgggattctctcttctcagggaagcactggccaagcctcagcattccctgccctgacccctaaccttccagttcatttaaaaattgagcaaaagtaaaataaaatgaaaaaaaaataaaaacaaacccctgagttgttaaaaaccaaattaaaaatcccctttggtgtcagaaggtcctattcctaaaagccagcagggtagggcaggcacaagcctggcttgggctagcattcagtcctcaggctcctcatcagactcctt

SEQ ID NO: 5344 - DNA, 887 bp, Homo sapiens
  misc_feature (1)..(887): n=a, c, g or t
  ref <308>: DATABASE ACCESSION NUMBER: EMBL / BF980184
  ref <309>: DATABASE ENTRY DATE: 2001-01-25
tctgcgcaggaggtaggcagtagggcccagaaaaaaggggggccagcctcccaggaggactggggcctgctctgctggggtcactgctgaccaggcctcagccttccttccagccccaccctctcccctgcagtttgtttaaaagttgagctgcaaaaattaaataaaaataaaaacaaacccctgagctgttaaaaaccaaattaaaaacccccctccgtgtcaacaggtcctaaagccagtgtggcgggacaggcaggcggggcaggcggggcaggcggctggtggagctcagctggtgcttgagtcctcgggctcaccgtcagactcctcctcctccttctcagggcccaggtggccctgggtgcctggccgcttcaggatggcgctgtacttgagggctgtggactctgcctgcaggaccacctccaccaggctgaagatggtgatgacctgctgtgctggctcctgctccatgtcctcaggctcccagaccagcgtgagttccggcttcttgcccaccttctggaagtggtgggaccgcagggccagtgcgttgcagtagatgcgcttctgcacgccgtagcgcagcaccagcacgtcgaaggcttgcttcaggatgcccatcaccatggcttctgactccagggggccactctccttgaccagaacagcaaagaagagactggtactgagctcctgcacgcgcttggacgccatgcggcggtcgttacggtggtccgcctgtttctgcaggatatccggcgcctgtctagtcgctcctatgctaacgccgcagcaggnggctgtgcaccaggacttcggcaaaccgcggatgggcaggtgagtgtttgtccgcgccctgacgcgtatgccgaatggcggtc

SEQ ID NO: 5345 - DNA, 519 bp, Rattus norvegicus
  ref <308>: DATABASE ACCESSION NUMBER: EMBL / AA875552
  ref <309>: DATABASE ENTRY DATE: 2000-03-03
tttttttttttttttttaacgtgtgccaggtgccactttaattgagtcctcaccacagtgaggaagggtggaagacagtgattgcttccaggctaagccccatcggccctgaggtaaccaacctcgctccccacagtagaaacatgccttccttcccctgagaatcccatgcctgagccaacacagggaaggatgtgcacagaaaaataagagaagctcatcaagggagccaggggcatttctgaaatttttccagtgcaaagactagttgacctggaggtgtccctcctaatggcaatgataaaccccaatcattcccagctgaggccaagcccttccccagggagcctgagaccagggttcatgccccagggctcctccctgcagtgctcccaggaaagatcagcagcctgcccagccatggagagagcccgctgagcagatgcgtcttcctctttgctggcccctactacggcaggtgtacagccataaaggaccaggcagtacaggtgtggctgt

SEQ ID NO: 5346 - DNA, 471 bp, Rattus norvegicus
  ref <308>: DATABASE ACCESSION NUMBER: EMBL / AA875563
  ref <309>: DATABASE ENTRY DATE: 2000-03-03
cggccgcacgaggacaaccagagcttccagtacgatcatgaggccttcctaggcaaggaggattccaagaccttcgatcagctaagcccggacgagagcaaggagaggctggggaaaattgttgatcgaatcgacagtgatggagacggccttgttactactgaggagctgaaagtttggatcaaacgggtacagaaaagatacatctacgataatgtggctaaagtctggaaggattatgatagggacaaagacgaaaagatctcctgggaagaatacaagcaggccacctatggctactacctgggtaagacaccacagcagagatggcacagtggggagcaaggtcacaggaggctcatcatggctgcctccttcacccaaatgtcacaaccttcaagtgaaacctgttgtgtaacatcctcctccacctactaagaatgtaccaagttgcttcctttgactgacata

SEQ ID NO: 5347 - protein, 325 aa, Rattus norvegicus
  ref <308>: DATABASE ACCESSION NUMBER: Refseq / NP_033063
  ref <309>: DATABASE ENTRY DATE: 2002-01-07
MARGGRLGLALGLLLALVLALRAKPTVRKERVVRPDSELGERPPEDNQSFQYDHEAFLGKEDSKTFDQLSPDESKERLGKIVDRIDSDGDGLVTTEELKLWIKRVQKRYIYDNVAKVWKDYDRDKDEKISWEEYKQATYGYYLGNPAEFHDSSDHHTFKKMLPRDERRFKASDLDGDLTATREEFTAFLHPEEFEHMKEIVVLETLEDIDKNGDGFVDQDEYIADMFSHEDNGPEPDWVLSEREQFNDFRDLNKDGKLDKDEIRHWILPQDYDHAQAEARHLVYESDKNKDEMLTKEEILDNWNMFVGSQATNYGEDLTKNHDEL

SEQ ID NO: 5348 - DNA, 289 bp, Homo sapiens
  ref <308>: DATABASE ACCESSION NUMBER: EMBL / BI826212
  ref <309>: DATABASE ENTRY DATE: 2001-10-08
ctctccttgctctcgtccggggtgagctcgtcgaagttcttggagtcctccttgcccaggaaggcctcgtggtcgtactggaagctctggttgtcctcagggggccgctcgcccagctccgagtcgggccgcaccacgcgctctttgcgcaccgtgggcttggcccgcagaacccgcggcgccagcaccagcgccagcagcagccccagggctaaccccaggcggccaccgcgcgccatcgtcccgaggagagggcggccgggagggagacgctgagcgagcgacaaca

SEQ ID NO: 5349 - DNA, 426 bp, Rattus norvegicus
  ref <308>: DATABASE ACCESSION NUMBER: EMBL / AA875598
  ref <309>: DATABASE ENTRY DATE: 2000-03-03
ttattttttttttatttgacaagcagcaacatcatgtttgtcattttaatgtagatacaattattaggttatctgtcatattacaatatttaagtttttagtttatgtcctttaagatacattttaaaaaaaaaaaaaaacacatcaactgcaaacgtgaaggggagaaagcatggtacccagccgaattccacatctcagcaatacttcactcattcttttaataaagttttaagaaacgtcataatgacatgagcttgaatatctctaggcattttctctgacgctcatgacgtggcactggtgatgttgtaaacagcagaaaaacaggggctgccagacgaccaaagtatggaggcacaggcctgctttctcccacaggagctcaccaaatggggatggcaatgacctcacacccgcaccatg

SEQ ID NO: 5350 - DNA, 2406 bp, Homo sapiens
  ref <308>: DATABASE ACCESSION NUMBER: EMBL / U58088
  ref <309>: DATABASE ENTRY DATE: 2000-03-04
gaattcggcacgaggactatatggactgcttatataggtatctcaacacccagtttattaaaaagaataaattaacagaagcggaccttcagtatggctatggtggtgtagatatgaatgaaccacttatggaaataggagagctagcattggatatgtggaggaaattgatggttgaaccacttcaggccatccttatccgaatgctgctccgagaaatcaaaaatgatcgtggtggagaagacccaaaccagaaagtaatccatggggttattaactcctttgttcatgttgaacagtataagaaaaaattccccttaaagttttatcaggaaatttttgagtctccctttctgactgaaacaggagagtattacaaacaagaagcttcaaatttattacaagaatcaaactgctcacagtatatggaaaaggttctaggtagattaaaagatgaagaaattcgatgtcgaaaatacctacatccaagttcatatactaaggtgattcatgaatgtcaacaacgaatggtagcagaccacttacagtttttacatgcagaatgtcataatataattcgacaagagaaaaaaaatgacatggcaaatatgtacgtcttactccgtgctgtgtccactggtttacctcatatgattcaggagctgcaaaaccacatccatgatgagggccttcgagcaaccagcaaccttactcaggaaaacatgccaacactatttgtggagtcagttttggaagtgcatggtaaatttgttcagcttatcaacactgttttgaatggtgatcagcattttatgagtgcgttggataaggcccttacatcagttgtaaattacagagaacctaagtctgtttgcaaagcacctgaactgcttgctaagtactgtgacaacttactgaagaagtcagcgaaagggatgacagagaatgaagtggaagacaggctcacgagcttcatcacagtgttcaaatacattgatgacaaggacgtctttcaaaagttctacgcaagaatgctggcaaaacgtttaattcatgggttatccatgtctatggactctgaagaagccatgatcaacaaattaaagcaagcctgtggttatgagtttaccagcaagctacatcggatgtatacagatatgagtgtcagcgctgatctcaacaataagttcaacaattttatcaaaaaccaagacacagtaatagatttgggaattagttttcaaatatatgttctacaggctggtgcgtggcctcttactcaggctccttcatctacgtttgcaattccccaggaattagaaaaaagtgtacagatgtttgaattattttatagccaacatttcagtggaaggaaacttacatggttacattatctgtgtacaggtgaagttaaaatgaactatttgggcaaaccatatgtagccatggttacaacataccaaatggcagttcttcttgcctttaacaacagtgaaactgtcagttataaagagcttcaggacagcactcagatgaatgaaaaggaactgacaaaaacaatcaaatcattacttgatgtgaaaatgattaaccatgattcagaaaaggaagatattgatgcagaatcttcattttcattaaatatgaactttagcagtaaaagaacaaaatttaaaattactacatcaatgcagaaagacacaccacaagaaatggagcagactagaagtgcagttgatgaggaccggaaaatgtatctccatgctgctatagttcgtatcatgaaagcacgaaaagtgcttcggcacaatgcccttattcaagaggtgattagccagtcaagagctaggtttaatcccagtatcagcatgattaagaagtgtattgaagttctgatagacaaacaatacatagaacgcagccaggcgtcggcagatgaatacagctacgtcgcgtgatgtcgctctcctccagcgtggtgtgagaagatcattgccatcaccatttggtgtgttcctgtgggaaaaagcaggactgtgcctccataatttggtcatttggcagcccctgttttctgctgtttacaacatcaccagtgccacgtcatgagcgtcaaagaaaatgcctagagatatttcaagctcatgacattatgacatttcttaaaactttattaaaagaatgagtgaagtattgctgaaaagtggaaaatcggttgggtaccatgctttttctccccttcacgtttgcagttgatgtgtctttttttttttttttaatgtatcttaaaggacataaaatttaaaaacttaaatattgtaatatgacagataacctaataattgtatctacattaaaatgacaaacatgatactgctgcttgtcaaataaaaaaaaaaaaaaaaa

SEQ ID NO: 5351 - protein, 745 aa, Homo sapiens
  ref <308>: DATABASE ACCESSION NUMBER: SWISS-Prot / Q13617
  ref <309>: DATABASE ENTRY DATE: 2001-10-16
MSLKPRVVDFDETWNKLLTTIKAVVMLEYVERATWNDRFSDIYALCVAYPEPLGERLYTETKIFLENHVRHLHKRVLESEEQVLVMYHRYWEEYSKGADYMDCLYRYLNTQFIKKNKLTEADLQYGYGGVDMNEPLMEIGELALDMWRKLMVEPLQAILIRMLLREIKNDRGGEDPNQKVIHGVINSFVHVEQYKKKFPLKFYQEIFESPFLTETGEYYKQEASNLLQESNCSQYMEKVLGRLKDEEIRCRKYLHPSSYTKVIHECQQRMVADHLQFLHAECHNIIRQEKKNDMANMYVLLRAVSTGLPHMIQELQNHIHDEGLRATSNLTQENMPTLFVESVLEVHGKFVQLINTVLNGDQHFMSALDKALTSVVNYREPKSVCKAPELLAKYCDNLLKKSAKGMTENEVEDRLTSFITVFKYIDDKDVFQKFYARMLAKRLIHGLSMSMDSEEAMINKLKQACGYEFTSKLHRMYTDMSVSADLNNKFNNFIKNQDTVIDLGISFQIYVLQAGAWPLTQAPSSTFAIPQELEKSVQMFELFYSQHFSGRKLTWLHYLCTGEVKMNYLGKPYVAMVTTYQMAVLLAFNNSETVSYKELQDSTQMNEKELTKTIKSLLDVKMINHDSEKEDIDAESSFSLNMNFSSKRTKFKITTSMQKDTPQEMEQTRSAVDEDRKMYLQAAIVRIMKARKVLRHNALIQEVISQSRARFNPSISMIKKCIEVLIDKQYIERSQASADEYSYVA

SEQ ID NO: 5352 - DNA, 516 bp, Rattus norvegicus
  ref <308>: DATABASE ACCESSION NUMBER: EMBL / AA875615
  ref <309>: DATABASE ENTRY DATE: 2000-03-03
ttttttttttttgcctgtctccatggtcctggtattaaaagtatatgccaccacacctggctacgtgtaatttttaaaaattgttcaattaaaagtatcactagtatgccaaagcataccaccagttcacaaaaataagaacattcttttagaactagtattaatagttcctttaacttcaatcatttaatttaaatttagtttaatccccttcaaaaacaggaaatatccctatatatgatctataatccccatacccctctacatatttatctgtagtttaaatatctcaattgtagctgtctctgaacacattaaaagcattacctaccttggctcccaatatcagaaacttctcccgtgtccatctttgtatcatcaagaatgacagtttcatcaatgccaccttcctcctcctcttccttctcagaatcttcaaggtcaccccaggagttttctattccctctccaatctgggcagttccaggagtccacagcacaggtttagaaacactt

SEQ ID NO: 5353 - DNA, 1119 bp, Homo sapiens
  ref <308>: DATABASE ACCESSION NUMBER: EMBL / U09215
  ref <309>: DATABASE ENTRY DATE: 1999-06-30
atggccgctccagctttcgaacctggcaggcagtcagatctcttggtgaagttgaatcgactcatggaaagatgtctaagaaattcgaagtgtatagacactgagtctctctgtgttgttgctggtgaaaaggtttggcaaatacgtgtagacctacatttattaaatcatgatggaaatattattgatgctgccagcattgctgcaatcgtggccttatgtcatttccgaagacctgatgtctctgtccaaggagatgaagtaacactgtatacacctgaagagcgtgatcctgtaccattaagtatccaccacatgcccatttgtgtcagttttgcctttttccagcaaggaacatatttattggtggatcccaatgaacgagaagaacgtgtgatggatggcttgctggtgattgccatgaacaaacatcgagagatttgtactatccagtccagtggtgggataatgctactaaaagatcaagttctgagatgcagtaaaatcgctggtgtgaaagtagcagaaattacagagctaatattgaaagctttggagaatgaccaaaaagtaaggaaagaaggtggaaagtttggttttgcagagtctatagcaaatcaaaggatcacagcatttaaaatggaaaaggcccctattgatacctcggatgtagaagaaaaagcagaagaaatcattgctgaagcagaacctccttcagaagttgtttctacacctgtgctatggactcctggaactgcccaaattggagagggagtagaaaactcctggggtgatcttgaagactctgagaaggaagatgatgaaggcggtggtgatcaagctatcattcttgatggtataaaaatggacactggagtagaagtctctgatattggaagccaagagctggggtttcaccatgttggccagactggactcgagttcctgacctcagatgctcccataatactctcagatagtgaagaagaagaaatgatcattttggaaccagacaagaatccaaagaaaataagaacacagaccaccagtgcaaaacaagaaaaagcaccaagtaaaaagccagtgaaaagaagaaaaaagaagagagctgccaattaa

SEQ ID NO: 5354 - protein, 423 aa, Homo sapiens
  ref <308>: DATABASE ACCESSION NUMBER: SWISS-Prot / Q06265
  ref <309>: DATABASE ENTRY DATE: 2002-06-15
MNLCLQRLDGRQTYDYRNIRISFGTDYGCCIVELGKTRVLGQVSCELVSPKLNRATEGILFFNLELSQMAAPAFEPGRQSDLLVKLNRLMERCLRNSKCIDTESLCVVAGEKVWQIRVDLHLLNHDGNIIDAASIAAIVALCHFRRPDVSVQGDEVTLYTPEERDPVPLSIHHMPICVSFAFFQQGTYLLVDPNEREERVMDGLLVIAMNKHREICTIQSSGGIMLLKDQVLRCSKIAGVKVAEITELILKALENDQKVRKEGGKFGFAESIANQRITAFKMEKAPIDTSDVEEKAEEIIAEAEPPSEVVSTPVLWTPGTAQIGEGVENSWGDLEDSEKEDDEGGGDQAIILDGIKMDTGVEVSDIGSQDAPIILSDSEEEEMIILEPDKNPKKIRTQTTSAKQEKAPSKKPVKRRKKKRAAN

SEQ ID NO: 5355 - DNA, 413 bp, Rattus norvegicus
  ref <308>: DATABASE ACCESSION NUMBER: EMBL / AA875630
  ref <309>: DATABASE ENTRY DATE: 2000-03-03
tttttttttttttttttagcaacaagaacctgttttatttttccagatacagaagtttgcatgttttgcaaatattgcttgagagcaacactcatatgtacagtgccttctgtctagcatcgcgtaaacacaaatacgtatccacagtgcaatgttggctcagccaggatccaccttgcatatataccgaagaacgactgatcgaaccagaactttttttttttttttgttccttttttttcggagctgttttatcaaaggcgactttctataggtggagagttctttaacagacagaacgtaggtagtgcacatctttctaaatgataacattgtttgcaaataacagattccagtgctccaacataggggtgaattcactctgacccaaactgggagtggagcccctcaac

SEQ ID NO: 5356 - DNA, 441 bp, Rattus norvegicus
  misc_feature (1)..(441): n=a, c, g or t
  ref <308>: DATABASE ACCESSION NUMBER: EMBL / AA875659
  ref <309>: DATABASE ENTRY DATE: 2000-03-03
tttttttttttttttttaagcaacagcattacattttttggctggaactggtggtgatttcttctatagttgacttttcggttttcttcgtagataccaccgtttcctccagtgtttcttcgaaactttcccctaccttggatgttttcttagtgacttccttagaagccccttcttcctcttcctcctcctcctcctcctcctttttcagggacagcccagcggatgagactttggaggttgtagaactaaggattctangagggagcaaataactgggattgggaagtggattcagccctgagatgcttaacccgctggtgctaaatcgtgtctcttcgccttccagcagcttcctgtaagctgctatctcaatgtcaagagccattttgacattgagcaagtcctggtattcccgaaggtggcgggccatctcgctct

SEQ ID NO: 5357 - protein, 505 aa, Rattus norvegicus
  ref <308>: DATABASE ACCESSION NUMBER: Refseq / NP_062001
  ref <309>: DATABASE ENTRY DATE: 2002-11-14
MSFGSEHYLCSASSYRKVFGDGSRLSARLSGPGASGSFRSQSLSRSNVASTAACSSASSLGLGLAYRRLPASDGLDLSQAAARTNEYKIIRTNEKEQLQGLNDRFAVFIEKVHQLETQNRALEAELAALRQRHAEPSRVGELFQRELRELRAQLEEASSARAQALLERDGLAEEVQRLRARCEEESRGREGAERALKAQQRDVDGATLARLDLEKKVESLLDELAFVRQVHDEEVAELLATLQASSQAAAEVDVAVAKPDLTSALREIRAQYESLAAKNLQSAEEWYKSKFANLNEQAARSTEAIRASREEIHEYRRQLQARTIEIEGLRGANESLERQILELEERHSAEVAGYQDSIGQLESDLRNTKSEMARHLREYQDLLNVKMALDIEIAAYRKLLEGEETRFSTSGLSISGLNPLPNPSYLLPPRILSSTTSKVSSAGLSLKKEEEEEEEEEEGASKEVTKKTSKVGESFEETLEETVVSTKKTEKSTIEEITTSSSQKM

SEQ ID NO: 5358 - DNA, 3252 bp, Homo sapiens
  ref <308>: DATABASE ACCESSION NUMBER: Refseq / NM_032727
  ref <309>: DATABASE ENTRY DATE: 2002-11-04
ggcacgaggcttctgtagctcgcgttgaagccgcacgtccggccccgatcccggcaccatgagcttcggctcggagcactacctgtgctcctcctcctcctaccgcaaggtgttcggggatggctctcgcctgtccgcccgcctctctggggccggcggcgcgggcggcttccgctcgcagtcgctgtcccgcagcaatgtggcctcctcggccgcctgctcctcggcctcgtcgctcggcctcggcctggcctatcgccggccgccggcgtccgacgggctggacctgagccaggcggcggcgcgcaccaacgagtacaagatcatccgcaccaacgagaaggagcagctgcagggcctcaacgaccgcttcgccgtgttcatcgagaaggtgcatcagctggagacgcagaaccgcgcgttggaggccgagctggccgcgctgcgacagcgccacgctgagccgtcgcgcgtcggcgagctcttccagcgcgagctgcgcgacctgcgcgcgcagctggaggaggccagctcggctcgctcgcaggccctgctggagcgcgacgggctggcggaggaggtgcagcggctgcgggcgcgctgcgaggaggagagccgcggacgcgaaggcgccgagcgcgccctgaaggcgcagcagcgcgacgtggacggcgccacgctggcccgcctggacctggagaagaaggtggagtcgctgctggacgagctggccttcgtacgccaggtgcacgacgaggaggtagccgagctgctggccacgctgcaggcgtcgtcgcaggccgcggccgaggtggacgtgactgtggctaaaccagacctgacctcggctctgagggagatccgcgcccagtatgagtccctggccgctaagaacctgcagtccgcggaagaatggtacaagtccaagtttgccaacctgaacgagcaggcggcgcgcagcaccgaggccatccgggccagccgcgaggagatccacgagtatcggcgccagctgcaggcgcgcaccatcgagatcgagggcctgcgcggggccaacgagtccttggagaggcagatcctggagctggaggagcggcacagtgccgaggtagctggctaccaggatagcattgggcagctggagaatgatctgaggaacaccaagagtgagatggcacgccaccttcgggaataccaggacttgctcaatgtcaaaatggctcttgacattgagatagcagcttacaggaaactgctggaaggcgaggagacacgttttagcaccagtgggttaagcatttcggggctgaatccacttcccaatccaagttacctgctcccacctagaatcctcagtgctacaacctccaaagtctcatccactgggctatcacttaagaaagaggaggaggaggaggaggcatctaaggtagcctctaagaaaacctcccagataggggaaagttttgaagaaatattagaggagacagtaatatctactaagaaaaccgagaaatcaaatatagaagaaaccaccatttcaagccaaaaaatataattccattgctttgaaaaagttaatgcttaagagggaatgatatgcatttgacttgttaaacagcctattcctgaactataacacctgccaccactataaaatgtcttcaaggcttcagtctcatatttagtattgaatacttacattctctaataagaaaaccaccccttagattgaagtaaactgcagtcctggagcaatcacagatgagttatctaagaatacagctttctgaccttcagctcacgcttcacagtgatcgatgattcaggtgcagaggaagtacaaactaaggtgctaaatctgcgatcatcgtcatttgctgtgaactgaaattaaaactattcatgctacccagccattacccagctaaataatcttactctagatacctaaaacataagatcactgccagagataaactaatggtccacacccaattccactctgatagaattatttcacaaataataggtgtttgtttaatggacacttttcacctccttcaattccatatatccttttcttctatgtaggaaaaaaatagtctagtgtagtattcttcccttttaaacacattttggttcttctcaaaagaacttacccccattcgcgctctgctcagtgggtaaaattagatgcatgttgaccatgtctatgattcgtgtaattacttatccctgcccatttcatattctttcaattctgtaggttaaaaaaatggcagtgatgaattttaagggtttcccccaacatataaaataatgcaaagaatccctagactttaggctttcagcttacacaaatctatttaattaggaaaaaaaactattaaggatgtagcttttcacctttactttagaagcacagtaaatatcccaaactgtgatgaagccgaccttagatttagtagtgtaagctagaagaagtgagtgtttctatgagtggaaaaagccaaggtgtcatttatgtgtcagttcatttgtggtgatatagaattagctttttcatccccttacccttagaatccacgtattccccttcccactagcctaggtcataaagaggcgttgctttcactctcctatgccttttacgagtgctaagtgtaggatattttgtcaccagaacacaatgctaccgccccaaagtaaaagaaaccacttctggtcaatcaacactaccagcgtatatataagaaagacatctttctcttttctaaaagacttccctaacacttaccccatggctgcacagttggtggggtcctgccggagaggaagagacactcagaccagagaaggggtgtgcatgcgcctactcgcttgctagaagtagattctggacagtcagctcttcatctgcccaactgtgtagcatctgcattgcccagtctttcatgtgtgccaaggctgatgcaggatttgttctctgtccagcagtcacttcggccagagctgaagagttgccccgtctctgttccatgtctcctttaagagctctggtgataaggacatgatgcttttactgaactttcttatcctagcacatgcttcaatagttcaaggaacttgaaaaatacttttccttacctttaccccatccctgtctttactcctcacacttactgtaagacattagtaacataataaattaaaagtcacacgaatctcaccaaaaaaaaaaaaaaaaaa

SEQ ID NO: 5359 - protein, 499 aa, Homo sapiens
  ref <308>: DATABASE ACCESSION NUMBER: SWISS-Prot / Q16352
  ref <309>: DATABASE ENTRY DATE: 2002-06-15
MSFGSEHYLCSSSSYRKVFGDGSRLSARLSGAGGAGGFRSQSLSRSNVASSAACSSASSLGLGLAYRRPPASDGLDLSQAAARTNEYKIIRTNEKEQLQGLNDRFAVFIEKVHQLETQNRALEAELAALRQRHAEPSRVGELFQRELRDLRAQLEEASSARSQALLERDGLAEEVQRLRARCEEESRGREGAERALKAQQRDVDGATLARLDLEKKVESLLDELAFVRQVHDEEVAELLATLQASSQAAAEVDVTVAKPDLTSALREIRAQYESLAAKNLQSAEEWYKSKFANLNEQAARSTEAIRASREEIHEYRRQLQARTIEIEGLRGANESLERQILELEERHSAEVAGYQDSIGQLENDLRNTKSEMARHLREYQDLLNVKMALDIEIAAYRKLLEGEETRFSTSGLSISGLNPLPNPSYLLPPRILSATTSKVSSTGLSLKKEEEEEEASKVASKKTSQIGESFEEILEETVISTKKTEKSNIEETTISSQKI

SEQ ID NO: 5360 - DNA, 401 bp, Rattus norvegicus
  ref <308>: DATABASE ACCESSION NUMBER: EMBL / AA891037
  ref <309>: DATABASE ENTRY DATE: 2000-03-03
actccatcccaggtgtgctccattccaggcatcttagacgtttcccgaggtctccggcttctctttctccagatgtttcttttgggggcccatgaaggccctcttctcctgcgctgtctggaagcatccgtggccaaacttagaagtggtgtcaatgaacttgagctcaatattctccagggccctgcggctgtggtgcactagtagatgcgttgtttctgaccatcttcccgtcttccatgtgcagcccccggccaatgcggtagatcttcttgttcagctctgtacggtggtggtaacccttctgcccagcccgggcgatggagcagcctactcgggcagggtgccaggcaccaatacaggccaccttgcgcaggcctttgtgggtcgtcctaggaagc

SEQ ID NO: 5361 - protein, 402 aa, Rattus norvegicus
  ref <308>: DATABASE ACCESSION NUMBER: SWISS-Prot / R5RT3L
  ref <309>: DATABASE ENTRY DATE: 1994-06-01
SHRKFSAPRHGSLGFLPRKRSSRHRGKVKSFPKDDPSKPVHLTAFLGYKAGMTHIVREVDRPGSKVNKKEVVEAVTIVETPPMVVVGIVGYVETPRGLRTFKTVFAEHISDECKRRFYKNWHKSKKKAFTKYCKKWQDDTGKKQLEKDFNSMKKYCQVIRIIAHTQMRLLPLRQKKAHLMEIQVNGGTVAEKLDWARERLEQQVPVNQVFGQDEMIDVIGVTKGKGYKGVTSRWHTKKLPRKTHRGLRKVACIGAWHPARVAFSVARAGQKGYHHRTEINKKIYKIGQGYLIKDGKLIKNNASTDYDLSDKSINPLGGFVHYGEVTNDFIMLKGCVVGTKKRVLTLRKSLLVQTKRRALEKIDLKFIDTTSKFGHGRFQTMEEKKAFMGPLKKDRIAKEEGA

SEQ ID NO: 5362 - DNA, 1548 bp, Homo sapiens
  ref <308>: DATABASE ACCESSION NUMBER: EMBL / U65581
  ref <309>: DATABASE ENTRY DATE: 2000-11-24
ggcggctagcggcgaggccccttcctgtaccttcagggatcggccaccatgtcccaccggaagttttccgcccctcggcacggacacctgggcttcctgccccataagaggagccaccggcaccggggcaaggtgaagacgtggccgcgggatgaccccagccagcccgtgcacctcacggccttcctgggctacaaggcgggcatgacccacaccctgcgggaggtgcaccggccggggctcaaaatttccaaacgggaggaggtggaggcggtgacaattgtagaaacgccgcccctagtggtggtgggcgtggtgggctacgtggccacccctcgaggtctccggagcttcaagaccatctttgcagaacacctcagtgatgagtgccggcgccgattctacaaggactggcacaagagcaagaagaaagccttcaccaaggcctgcaagaggtggcgggacacagacgggaaaaagcagctacagaaggacttcgccgccatgaagaagtactgcaaggtcattcgggtcattgtccacactcagatgaaactgctgcccttccggcagaagaaggcccacatcatggagatccagctgaacggtggcacggtggccgagaaggtggcctgggcccaggcccggctggagaagcaggtgcccgtgcacagcgtgttcagccagagtgaggtcattgatgtcattgctgtcaccaagggtcgaggcgtcaaaggggtcacaagccgctggcataccaagaagctgccgcggaagacccataagggcctgcgcaaggtggcctgcattggcgcctggcaccccgcccgcgtgggctgctccattgctcgggccgggcagaagggctatcaccaccgcacggagctcaacaagaagatcttccgcatcggcaggggcccgcacatggaggacgggaagctggtgaagaacaatgcatccaccagctacgacgtgactgccaagtccatcacaccgctgggtggcttcccccactacggggaagtgaacaacgacttcgtcatgctgaagggttgtattgctggtaccaagaagcgggtcattacgctgagaaagtccctcctggtgcatcacagtcgccaagccgtggagaatattgagctcaagttcattgacaccacctccaagttcggccatggccgcttccagacagcccaagagaagagggccttcatgggcccccaaaagaagcatctggagaaggaaacgccggagacctcgggagacttgtaggctgtgtggggtggatgaaccctgaagcgcaccgcactgtctgccccaatgtctaacaaaggccggaggcgactcttcctgcgaggtctcagagcgctgtgtaaccgcccaaggggttcaccttgcctgctgcctagacaaagccgattcattaagacaggggaattgcaatagagaaagagtaattcacacagagctggctgtgcgggagaccggagttttatgttttattattactcaaatcgatctctttgagcaaaaaaaaaaaaaaaaaaa

SEQ ID NO: 5363 - protein, 406 aa, Homo sapiens
  ref <308>: DATABASE ACCESSION NUMBER: SWISS-Prot / Q92901
  ref <309>: DATABASE ENTRY DATE: 2002-06-15
SHRKFSAPRHGHLGFLPHKRSHRHRGKVKTWPRDDPSQPVHLTAFLGYKAGMTHTLREVHRPGLKISKREEVEAVTIVETPPLVVVGVVGYVATPRGLRSFKTIFAEHLSDECRRRFYKDWHKSKKKAFTKACKRWRDTDGKKQLQKDFAAMKKYCKVIRVIVHTQMKLLPFRQKKAHIMEIQLNGGTVAEKVAWAQARLEKQVPVHSVFSQSEVIDVIAVTKGRGVKGVTSRWHTKKLPRKTHKGLRKVACIGAWHPARVGCSIARAGQKGYHHRTELNKKIFRIGRGPHMEDGKLVKNNASTSYDVTAKSITPLGGFPHYGEVNNDFVMLKGCIAGTKKRVITLRKSLLVHHSRQAVENIELKFIDTTSKFGHGRFQTAQEKRAFMGPQKKHLEKETPETSGDL

SEQ ID NO: 5364 - DNA, 455 bp, Rattus norvegicus
  ref <308>: DATABASE ACCESSION NUMBER: EMBL / AA891049
  ref <309>: DATABASE ENTRY DATE: 2000-03-03
gaccaaaacatttaattaacaacaacaaacaaaattacaatagcagaaaaataataataacaataacaaagaaattagaagtgggaatcagggtaaaatagaatgcagaggccttagtccctaagagaccagcacccctgctgagctggacttagccccagctccttctgagttttccttggctgctggcttctcatcttctcccataagacgaatgttgtgcttttcccggaattcattgagttcttttccctttgcctgaagctgctgtgacagtgtctcaatgatcttttgtatctgctccttgttaccctccaaggcaggcagcacctccttgaccgtccgctctaccagcacaccgccaaccatgcggtagcacttgcgggtctcatccacttccttcagcgtatcgatcaccagctatgctcattcagttccatctccagctcagctgc

SEQ ID NO: 5365 - protein, 154 aa, Rattus norvegicus
  ref <308>: DATABASE ACCESSION NUMBER: Refseq / NP_035200
  ref <309>: DATABASE ENTRY DATE: 2002-09-19
MADSSGRVGKSGGTARWKGAVSAEQVIAGFNRLRQEQRGLASKAAELEMELNEHSLVIDTLKEVDETRKCYRMVGGVLVERTVKEVLPALEGNKEQIQKIIETLSQQLQAKGKELNEFREKHNIRLMGEDEKPAAKENSEGAGAKASSAGVLVS

SEQ ID NO: 5366 - DNA, 644 bp, Homo sapiens
  ref <308>: DATABASE ACCESSION NUMBER: Refseq / NM_012394
  ref <309>: DATABASE ENTRY DATE: 2002-05-16
gctccctggggaacccagcaggcggcgaagatggcggagaacagcggtcgcgccggcaagagcagcgggagcggcgcggggaagggggcggtgtccgcagagcaggtgattgctggcttcaaccgccttcggcaggaacagcgaggcctggcatccaaagcagctgagttggagatggagttgaatgagcacagcctagtgatcgatacactgaaggaggtagatgaaactcgtaagtgctaccgcatggttggaggagtgctggtggagcgaactgtcaaagaggtgctgcccgctttggagaacaacaaggagcagatacagaagatcattgagacactgacacagcagcttcaggcaaagggaaaagaactaaatgaattccgggaaaagcacaacattcgtctcatgggagaagatgagaagccagcagccaaggaaaactcagaaggggctggggctaaggccagctcagctggagtgttggtctcctagggaccaaggcctttgcatttttttctaccctgactcccacttctaatttctctttattgttattattattattttctctgctattgtaatatttttttgttaattaaatgttttggtcagaatcttaaaaaaaaaaaaaaaaaaaaaaa

SEQ ID NO: 5367 - protein, 154 aa, Homo sapiens
  ref <308>: DATABASE ACCESSION NUMBER: SWISS-Prot / Q9UHV9
  ref <309>: DATABASE ENTRY DATE: 2002-06-15
MAENSGRAGKSSGSGAGKGAVSAEQVIAGFNRLRQEQRGLASKAAELEMELNEHSLVIDTLKEVDETRKCYRMVGGVLVERTVKEVLPALENNKEQIQKIIETLTQQLQAKGKELNEFREKHNIRLMGEDEKPAAKENSEGAGAKASSAGVLVS

SEQ ID NO: 5368 - DNA, 455 bp, Rattus norvegicus; identical to SEQ ID NO: 5364
  ref <308>: DATABASE ACCESSION NUMBER: EMBL / AA891049
  ref <309>: DATABASE ENTRY DATE: 2000-03-03

SEQ ID NO: 5369 - protein, 154 aa, Rattus norvegicus; identical to SEQ ID NO: 5365
  ref <308>: DATABASE ACCESSION NUMBER: Refseq / NP_035200
  ref <309>: DATABASE ENTRY DATE: 2002-09-19

SEQ ID NO: 5370 - DNA, 644 bp, Homo sapiens; identical to SEQ ID NO: 5366
  ref <308>: DATABASE ACCESSION NUMBER: Refseq / NM_012394
  ref <309>: DATABASE ENTRY DATE: 2002-05-16

SEQ ID NO: 5371 - protein, 154 aa, Homo sapiens; identical to SEQ ID NO: 5367
  ref <308>: DATABASE ACCESSION NUMBER: SWISS-Prot / Q9UHV9
  ref <309>: DATABASE ENTRY DATE: 2002-06-15

SEQ ID NO: 5372 - DNA, 508 bp, Rattus norvegicus
  ref <308>: DATABASE ACCESSION NUMBER: EMBL / AA891054
  ref <309>: DATABASE ENTRY DATE: 2000-03-03
ctcttgtttcaaagtcttgtcgttcaggtaatctggataatcacctctcctctgtcccaaacactcccaagagagtgattgatgaactcttctttcctagcggtgtggtgtctcttggcggtgcacaccgacaggcacctgtggccacgggcctagatcccaagatgcaggaatcggagcccaaccttgaagggatgtcctctcggagcatgaacttgtcccaggcctacttttgttgctactacgagtctgtgcttttaaggcccgaggggagctcactggactccttctctcaactctgcgtctcttgctgtttgttgttctatgaggaaggggcacgttccggtctcgatccggactttttagactttctgtcaactagcctaacttcccccacattctttaaatccaggtaacttcctaaaaccgcatagatcacatcacgaatggcctcagatcatgaattcatctcaacagcatcgtctcaagaacggtcctcttcctgttg

SEQ ID NO: 5373 - DNA, 457 bp, Homo sapiens
  ref <308>: DATABASE ACCESSION NUMBER: EMBL / AW969541
  ref <309>: DATABASE ENTRY DATE: 2000-06-08
gccattgcactccagcctgggcaacaagagcgaaactccatctcaaaaaaaaaaaagtgtcttgttcactgcagcatgcccagtgccacgcacaggtgctgacctatagtaagtgcttaacatttgttgaataggggaaagaaatttccggaagtaaatacagcaattaataatgtttataagctgggcatggtcgctcaggccagtaatcccagtgacttaggaggctgaggtgggaggattacttgaaacccacagtttgagaccagcctgggcaacatagtgagaccctgtctctaaaaaaataaaaatagaaataaagtagtgcttattgtttgcaaaaaaaaaaaaaaaaaaaaaaaaaaaaaaaaaaaaaaaaaaaaaaaaaaaaaaaaaaaattgaaggcggccgaaagcttatccccttaagggggggttaatttaacctgggcactgg

SEQ ID NO: 5374 - protein, 501 aa, Homo sapiens
  ref <308>: DATABASE ACCESSION NUMBER: SWISS-Prot / P11230
  ref <309>: DATABASE ENTRY DATE: 2002-06-15
MTPGALLMLLGALGAPLAPGVRGSEAEGRLREKLFSGYDSSVRPAREVGDRVRVSVGLILAQLISLNEKDEEMSTKVYLDLEWTDYRLSWDPAEHDGIDSLRITAESVWLPDVVLLNNNDGNFDVALDISVVVSSDGSVRWQPPGIYRSSCSIQVTYFPFDWQNCTMVFSSYSYDSSEVSLQTGLGPDGQGHQEIHIHEGTFIENGQWEIIHKPSRLIQPPGDPRGGREGQRQEVIFYLIIRRKPLFYLVNVIAPCILITLLAIFVFYLPPDAGEKMGLSIFALLTLTVFLLLLADKVPETSLSVPIIIKYLMFTMVLVTFSVILSVVVLNLHHRSPHTHQMPLWVRQIFIHKLPLYLRLKRPKPERDLMPEPPHCSSPGSGWGRGTDEYFIRKPPSDFLFPKPNRFQPELSAPDLRRFIDGPNRAVALLPELREVVSSISYIARQLQEQEDHDALKEDWQFVAMVVDRLFLWTFIIFTSVGTLVIFLDATYHLPPPDPFP

SEQ ID NO: 5375 - DNA, 397 bp, Rattus norvegicus
  ref <308>: DATABASE ACCESSION NUMBER: EMBL / AA891069
  ref <309>: DATABASE ENTRY DATE: 2000-03-03
gctgtggagccgtactcactgcagacccagaaggaggaggagcacctgctttctgccactccgtagcctcggccgccattctccgcacgtacgcgccgtccacacacatcaggatgttctccggcttgatatcagtgtggatagtctaagccctgaaggacctgtcgaatgatactcttcacacagcggactgggaggccttgatagttggacttgatgatccatttgaggagatggtgaccaagtacttcgaagaccatgcagacatgtatcccattcatgcctgagatcttgaagtcatcgattagctggactaccatgtctttgtttgggtcactggggtcactttctcgaacacatttgagcaatttaatttcaatccaagctgtctctgtat

SEQ ID NO: 5376 - protein, 681 aa, Rattus norvegicus
  ref <308>: DATABASE ACCESSION NUMBER: Refseq / NP_033300
  ref <309>: DATABASE ENTRY DATE: 2002-01-07
MSVNSEKSSSSERPEPQQKAPLVPPPPPPPPPPPLPDPAPPEPEEEILGSDDEEQEDPADYCKGGYHPVKIGDLFNGRYHVIRKLGWGHFSTVWLCWDMQGKRFVAMKVVKSAQHYTETALDEIKLLKCVRESDPSDPNKDMVVQLIDDFKISGMNGIHVCMVFEVLGHHLLKWIIKSNYQGLPVRCVKSIIRQVLQGLDYLHSKCKIIHTDIKPENILMCVDDAYVRRMAAEATEWQKAGAPPPSGSAVSTAPQQKPIGKISKNKKKKLKKKQKRQAELLEKRLQEIEELEREAERKILEENITSAEASGEQDGEYQPEVTLKAADLEDTTEEETAKDNGEVEDQEEKEDAEKENAEKDEDDVEQEPANLDPTWVESPKANGHIENGPFSLEQQLEDEEDDEDDCANPEEYNLDEPNAESDYTYSSSYEQFNGELPNGQHKTSEFPTPLFSGPLEPVACGSVISEGSPLTEQEESSPSHDRSRTVSASSTGDLPKTKTRAADLLVNPLDPRNADKIRVKIADLGNACWVHKHFTEDIQTRQYRSIEVLIGAGYSTPADIWSTACMAFELATGDYLFEPHSGEDYSRDEDHIAHIIELLGSIPRHFALSGKYSREFFNRRGELRHITKLKPWSLFDVLVEKYGWPHEDAAQFTDFLIPMLEMVPEKRASAGECLRHPWLNS

SEQ ID NO: 5377 - DNA, 348 bp, Rattus norvegicus
  ref <308>: DATABASE ACCESSION NUMBER: EMBL / AA891107
  ref <309>: DATABASE ENTRY DATE: 2000-03-03
aaaagagttgaaagcatctgaaatacatgcaaattatttgaaacccctgcatggcaaatctagagtctgccagcagcagtcagatgtgttagaagtaaaaaagcctctctccctctgacatgtgccatgacacggtgggggaggggccccagctctctatcttatactggatggcaccccagagggtggtgcggtagtcacaaacaaggcattgttatctgggagggaagggaccgtggaattcccgttggtcggagaacaccccagcttcagcctttgcaggtactctgcgtggacaggcatgttgcactgaagaaccttgattgcgtcttccactttgaagcattc

SEQ ID NO: 5378 - protein, 179 aa, Rattus norvegicus
  ref <308>: DATABASE ACCESSION NUMBER: SWISS-Prot / AAK29279
  ref <309>: DATABASE ENTRY DATE: 2003-02-01
MKFKPNQTRTYDREGFKKRAACLCFRSEQEDEVLLVSSSRYPDQWIVPGGGVEPEEEPGGAAAREVYEEAGVKGKLGRLLGIFENQDRKHRTYVYVLTVTEILEDWEDSVNIGRKREWFKVEDAIKVLQCHKPVHAEYLERLKLGCSPTNGNSTVPSLPDNNALFVTAAPPSGVPSSIR

SEQ ID NO: 5379 - DNA, 476 bp, Homo sapiens
  ref <308>: DATABASE ACCESSION NUMBER: EMBL / AA287829
  ref <309>: DATABASE ENTRY DATE: 2000-03-03
gtacagaggttacatattctgggtgttcttttataaaggaaacattttaaatcccacaaattgacactttctatcttcaatggactaagatttttttggtcagtaatctctgaaatttccttaaattatatacttaacatagcagagaaactggattgtttttgtatataagactgcttccacctgaaatgctgtcataagtactgggggggtgggggagtgcccatcttgtacatgatattcttagaggtaataaggtaatgatgcatgaatttattttataaactcttggactatgtatttgacatgtaaaatatgtacagtattaacgtcaaccatctctttaaagttagcctataaatattgttgtataattttctttggtcagaaacacttggactgaatagtgacactcggtaaggattttcagtgccatttagcaaaacgtctttagtctatgcaactagcaaaaatct

SEQ ID NO: 5380 - protein, 180 aa, Homo sapiens
  ref <308>: DATABASE ACCESSION NUMBER: Refseq / NP_061967
  ref <309>: DATABASE ENTRY DATE: 2002-10-31
MMKFKPNQTRTYDREGFKKRAACLCFRSEQEDEVLLVSSSRYPDQWIVPGGGMEPEEEPGGAAVREVYEEAGVKGKLGRLLGIFENQDRKHRTYVYVLTVTEILEDWEDSVNIGRKREWFKVEDAIKVLQCHKPVHAEYLEKLKLGCSPANGNSTVPSLPDNNALFVTAAQTSGLPSSVR

SEQ ID NO: 5381 - DNA, 457 bp, Rattus norvegicus
  ref <308>: DATABASE ACCESSION NUMBER: EMBL / AA891132
  ref <309>: DATABASE ENTRY DATE: 2000-03-03
aaaaaaggaaaaaatatatttcaatagtaaaaccggcacaagaaacatctttttgttgttagagaggcaagttagcacgctgcttcctccttaacagtgttccgacctttacaaagtgactcccagtcgaggagcctcgtcacataacgagatgttaacttacgcccagaactacgttagtggttagtcaaatctggcatgtatgtaatgacattaggaacattatgccgggacacaacaacaaacattcatataaaaaagtaaactccacgggagtgaactgtggttttcccccttggattggatgacaaatattttatacattaaagtcatggtagtgtttgcatttacatgtgctgtgtcacacagaaaactcagagtgctgtctccaatctacagaggttatcctcaccatggtggtgtgacttgacagtgtgcaggaacatgcccctaatgg

SEQ ID NO: 5382 - protein, 497 aa, Rattus norvegicus
  ref <308>: DATABASE ACCESSION NUMBER: SWISS-Prot / Q62698
  ref <309>: DATABASE ENTRY DATE: 2001-10-16
MAPVGVEKKLLLGPNGPAVAAAGDLTSEEEEGQSLWSSILSEVSTRARSKLPSGKNILVFGEDGSGKTTLMTKLQGAEHGKKGRGLEYLYLSVHDEDRDDHTRCNVWILDGDLYHKGLLKFAVSAESLRETLVIFVADMSRPWTIMESLQKWASVLREHIDKMKIPPEEMRDLERKFMKDFQDYIEPEEGCQGSPQRRGPLTSGSDEDNVALPLGDNVLTHNLGIPVLVVCTKCDAVSILEKEHDYRDEHLDFIQAHLRGFCLQYGAALIYTSVKEEKNLDLLYKYIVHKTYGFHFTIPALVVEKDAVFIPAGWDNEKKIAILHENFTTVKPEDAYEDFIVKPPVRKLVHDKELAAEDEQVFLMKQQESPARGPSGSPRTQGRGGPASVPSASPGTSVKKPDPNIKNNAASEGVLASFFNSLLSKKTGSPGSPSAGGVQSTAKKSGTEGEPQSFRSLTEQCCQTGQKTVLSNVQEELDRMTRKPDSMVTNSSTENEA

SEQ ID NO: 5383 - DNA, 1622 bp, Homo sapiens
  ref <308>: DATABASE ACCESSION NUMBER: EMBL / AF035812
  ref <309>: DATABASE ENTRY DATE: 2000-03-03
ggcaagatggcgccggtgggggtggagaagaagctgctgctaggtcccaacgggcccgcggtggcggccgccggcgacctgaccagtgaggaggaggaaggccagagcctatggtcctccattctgagcgaagtgtccacccgcgccaggtccaagctgccgtccggcaagaacatcctggtcttcggtgaagatggttctggtaaaacaaccctcatgactaaactacaaggagctgagcatggcaaaaaaggaagaggcctagaatatctctacctcagtgtccatgatgaggaccgagatgatcacacgcgctgcaacgtgtggattctggatggagacttgtaccacaaaggcctgctgaaatttgcagtttctgctgaatccttgccagagaccctcgtcatttttgttgcagacatgtctagaccttggactgtgatggaatctctgcagaaatgggctagtgttttacgtgagcacattgataaaatgaaaattccaccagaaaaaatgagggagctggaacggaagtttgtgaaagattttcaagactatatggaacctgaagaaggttgtcaaggttccccacagagaagaggccctctgacctcaggctccgatgaagaaaatgttgccctgcctctgggtgacaatgtgctgactcataacctggggatcccggtgttggtggtgtgcacaaagtgtgatgcggtgagtgtcctggagaaggagcacgattacagggatgagcatttggactttatccagtcacacctgcggaggttctgccttcagtatggagctgccttgatttacacatcagtgaaagaagagaaaaacctcgacttgttgtataagtatattgttcataaaacatacggtttccacttcaccacacctgccttagttgtggaaaaggatgccgtttttatacctgcaggctgggacaatgaaaagaaaatagctattttacatgaaaattttacaaccgtgaagccggaagatgcatatgaagactttattgtgaaacctcccgtgagaaagctggtccacgacaaagagttggcagcagaagatgagcaggtgttcctaatgaagcaacagtcactccttgccaagcaaccagccactcccacgagagcttctgaatctcctgcaagaggaccctctggctctccaaggacccagggtcggggagggccagccagtgtgcctagctcctccccaggcacgtcagtaaaaaagccggacccaaacatcaaaaataatgcagcaagtgaaggggtgttggccagcttcttcaacagtctgttgagtaaaaagacaggctctcctggaagtcctggtgctggtggggtgcagagcacagccaagaagtcaggacaaaagactgtgttgtcaaatgttcaggaagaactggatagaatgactcgaaagccagactctatggtaacaaactcttcaacagaaaatgaagcctgaacctccttaaaaagtgcatatgtcgaatgaccaaataactatgtatattgatctgctaagaccaggatttttctgatatggcacatgctatcagttttttggggcaggggagatgaactttaaaaaaaaaaaaaaaa

SEQ ID NO: 5384 - protein, 492 aa, Homo sapiens
  ref <308>: DATABASE ACCESSION NUMBER: SWISS-Prot / O43237
  ref <309>: DATABASE ENTRY DATE: 2001-10-16
MAPVGVEKKLLLGPNGPAVAAAGDLTSEEEEGQSLWSSILSEVSTRARSKLPSGKNILVFGEDGSGKTTLMTKLQGAEHGKKGRGLEYLYLSVHDEDRDDHTRCNVWILDGDLYHKGLLKFAVSAESLPETLVIFVADMSRPWTVMESLQKWASVLREHIDKMKIPPEKMRELERKFVKDFQDYMEPEEGCQGSPQRRGPLTSGSDEENVALPLGDNVLTHNLGIPVLVVCTKCDAVSVLEKEHDYRDEHLDFIQSHLRRFCLQYGAALIYTSVKEEKNLDLLYKYIVHKTYGFHFTTPALVVEKDAVFIPAGWDNEKKIAILHENFTTVKPEDAYEDFIVKPPVRKLVHDKELAAEDEQVFLMKQQSLLAKQPATPTRASESPARGPSGSPRTQGRGGPASVPSSSPGTSVKKPDPNIKNNAASEGVLASFFNSLLSKKTGSPGSPGAGGVQSTAKKSGQKTVLSNVQEELDRMTRKPDSMVTNSSTENEA

SEQ ID NO: 5385 - DNA, 474 bp, Rattus norvegicus
  misc_feature (1)..(474): n=a, c, g or t
  ref <308>: DATABASE ACCESSION NUMBER: EMBL / AA891161
  ref <309>: DATABASE ENTRY DATE: 2000-03-03
gcagaaacatgtgttttaattcatggtttagattctggtgggtacaacagcaaattatttggaattctgctcagaaaactcaaagctgcacctgtagatgttatttcaaataaaggacacgtgaatttatgtacttggtttgtagcaaggaatttccatgatggtgtgtacctggtctgcgcacaccttttggtgactagctatggcttctgcaggaacttcagtctgcacactgctgagaagcctactgtgaactgttctcaggtgtccagctgagggcaatgctgaggaagaccagcacagttgtctttccttatacaccatggcacctangcagggtcaagaaacacggcacagcatttcatacacaaaatacagggagccaacatttgacttgtcaagtttcagatttgatatcatgttgtttggttgatcctccacataattcacaacaggaagagtactgcacattga

SEQ ID NO: 5386 - DNA, 2533 bp, Homo sapiens
  ref <308>: DATABASE ACCESSION NUMBER: EMBL / AK001865
  ref <309>: DATABASE ENTRY DATE: 2002-08-06
ttatcaatgctttttaatgtgtttttacccttgcctcactgtgtgtgtgtcactttctataatataaagaaatactataatatttctagagtctggaactgtcaccatgatgaatggccctttcaatgcatagttacagaaattcctgaagattccccaggacttcaatttcattggtttttatttgcagtttttagttgctgtaattgttgctgtttccagtctaaaggacctcctttggtaaaggtgaacaagacctctcccctatgctacccagccagattttgtgtgtgtaatgggctggcccaagagtgttcttttacttagaactccttttgattttgcttttctctgcccctagaaattttagggacaaagacattttggaaattgtcagttacttttagaaagaaaacactgcagaaatatttaacagattacttcttgataaaatttaaatgggattatatgaatttataatgccaattgaaaatattatatacacaaaatttgctattttcacttaaagtaagcatttttaaaggatttattttagaatacaatctatgcaatcctcgaactcagtgtgcttttccctgacaggatatataaaaaggtagattaggtcaaccctcctttaagcttactctcccctcaccttttcttttcactgtatataaacggtactttctgtgattcataccaacagaggactttctgtgattcataccaacagtcctaaactgtcattttctaaatctgggatttaaaatctttagacaatatttaaaatcttgattttttttaaatgtcagcagatacaatttggaagattgcatctgtgtagaagtaatgcaggtacaagatctagagtttttccttagactctttagtcttttctgaattaaagaataagtgctcttaaatccatattttatcctgtcaaagtctgaaatgtgttcattgatgatttggtgacatctaaaaaattgtatttagttggcttggctcacccctcttaaaaatacttagccatctcttggtgggatgtggtgggggtattaaggtctcagagttatttattttctcacctaatttcaaacctttataaacttggggttttgttgttgatggtggtagtattttttgttaagttgtttaaaaggctgacttgattggagcctcctctactttttcttgagggttgcaagtattgtatggtgggggaggggggccttaaggcaaactgtctaaaaagtgactatccaattaatttaactagtaaattagtaagaattattcttagtattcattcagagtttaagatgtgaaaaatctgcactttgtttatcactctaaatgtaaagaactttttgatagtgttatttcaccactccctcagttaaaggctattatttaaactgtttactggagaaaatcctcgctcatgtccatttattgtttttttctgtactgtgatttgtttcaagcttaggaaaactagtatattagagtatgttctaggaaattaaaagatctggttagagtaaaaagttctttttaaggttcttaactaattttttcacaactaagaaaataaatgaagtattcttaggctgaaattcatcttattttatcataaattagattgtaggggcagcctacatttttgtgtatgtgtttttatttcttaaatgattgtgtgagcctggtgactttttatggttcttgtgatctaaactgtttttccaattcacatcttttgtcgtgaagtgatattatactagagtactgtttgcattgtaaaaatgctttgctggtgctctggcattttgtctttatctcatcacctaatttaaaaacccagcacttgataatataactgacagaaatgattgtacccactgatgaagtaatgaaaatgaagaaaaggaaaatattccttccttcaatggcgtaagtttattttttacttaagtggcatctatgtaagttagacaaactatatattaaaattggtaaactttgaatgtttctcctgttttgattcttagattatgaggaggatcagacagaataagactccacacttttgaaatttgataagtcaaaacgttttattttgacatttttaacattgtgaattattcgatatttgtaatctctgtatgtatatgaaactctgccatgtttttcaactttgcctatgtgccactgtatataagaaaggacagctattttgatcttcatcagcattgccttcagctgaaaatttgggaacagttcacagtaaacctctcagtagtttgcaaactgaggtacctgcagaaaccatagctactcaccaaaatacacagattaggtgcatggtatcgtggaaattatttggtaaaaaaacacacacacaaatctatgtgtactgtattttaaggaatatctacaggtgcagctttgattttgaacagaattccaaataatttactgttgtacccaccagaatctagaaaatgtgaattaaagtacatgtttctgc

SEQ ID NO: 5387 - DNA, 474 bp, Rattus norvegicus; identical to SEQ ID NO: 5385
  misc_feature (1)..(474): n=a, c, g or t
  ref <308>: DATABASE ACCESSION NUMBER: EMBL / AA891161
  ref <309>: DATABASE ENTRY DATE: 2000-03-03

SEQ ID NO: 5388 - DNA, 2533 bp, Homo sapiens; identical to SEQ ID NO: 5386
  ref <308>: DATABASE ACCESSION NUMBER: EMBL / AK001865
  ref <309>: DATABASE ENTRY DATE: 2002-08-06

SEQ ID NO: 5389 - DNA, 592 bp, Rattus norvegicus
  ref <308>: DATABASE ACCESSION NUMBER: EMBL / AA891171
  ref <309>: DATABASE ENTRY DATE: 2000-03-03
acaggtgttaacatattaacctaaacttcactgtcacagaaagacatcccataaaattcagaaaatattcaggttgtggtgaggaagatcaagccttttgaagacttcaacgcactggatggaatggctcaagaatttcagcataagttttcttctctttctcaggaaaatcttctggatgtaattttatatacccgaacatgtcatggtccctcacagcatacagatagttttgacgttttaaataaaaatatccagcaaagaaaaaggaagtaacatacagaagctggcgatgcaaaccttagtagacaaccctgtagctcctcctccgggtaggacggcctcgcagccctcacctgctttcatcacaggtctcattcgcatcatgttgtccatcaggcccgtgcagtagcccaggaagccgatgtagacaagccgcgggtcgttcagcttgggcgggggcagtctccgggcctcatccggcaagaatcttaagggctcatggcccggccggccgttcatcatattgatgcggggttcacgtgaggtctgacctcgactccaactataagaaaaaccacgactacaaacc

SEQ ID NO: 5390 - protein, 120 aa, Rattus norvegicus
  ref <308>: DATABASE ACCESSION NUMBER: SWISS-Prot / AAH02097
  ref <309>: DATABASE ENTRY DATE: 2001-06-01
MMNGRPGHEPLKFLPDEARSLPPPKLNDPRLVYMGLLGYCTGLMDNMLRMRPVMRAGLHRQLLFVTSFVFAGYFYLKRQNYLYAVKDHDMFGYIKLHPEDFPEKEKKTYAEILEPFHPVR

SEQ ID NO: 5391 - DNA, 656 bp, Homo sapiens
  ref <308>: DATABASE ACCESSION NUMBER: EMBL / BG723290
  ref <309>: DATABASE ENTRY DATE: 2001-05-09
agcgggagtccggcgcgcagaggaggaggagaaagctgaccgcttaggcccgggtagtggtcgtcgtggttttccttgtagttcgtggtctgagaccaggcctcaagtggaaacggcgtcaccatgatcgcacggcggaacccagaacccttacggtttctgccggatgaggcccggagcctgcccccgcccaagctgaccgacccgcggctcctctacatcggcttcttgggctactgctccggcctgattgataacctgatccggcggaggccgatcgcgacggctggtttgcatcgccagcttctatatattacggcctttttttttgctggatattatcttgtaaaacgtgaagactacctgtatgctgtgagggaccgtgaaatgtttggatatatgaaattacatccagaggattttcctgaagaagatgtctactgttgtggagctgaacgtcgggggtgagttccacaccaccaccctgggtaccctgaggaagtttccgggctcaaagctggcagagatgttctctagcttagccaaggcctccacggacgcggagggccgcttcttcatcgaccgcccagcacctatttcagacccatcctggactacctgcgcactgggcaagtgcccacacagacatccctgaa

SEQ ID NO: 5392 - protein, 119 aa, Homo sapiens
  ref <308>: DATABASE ACCESSION NUMBER: SWISS-Prot / O95298
  ref <309>: DATABASE ENTRY DATE: 2002-06-15
MIARRNPEPLRFLPDEARSLPPPKLTDPRLLYIGFLGYCSGLIDNLIRRRPIATAGLHRQLLYITAFFFAGYYLVKREDYLYAVRDREMFGYMKLHPEDFPEEDKKTYGEIFEKFHPIR

SEQ ID NO: 5393 - DNA, 635 bp, Rattus norvegicus
  ref <308>: DATABASE ACCESSION NUMBER: EMBL / AA891220
  ref <309>: DATABASE ENTRY DATE: 2000-03-03
aacatttcactaacagaactaaactttatttccatgtttgttacatgtttgtcttggatgctgagtacatattagaattgacataacatacaacctgggagaaagtctgatattctccactgaatgagttaaaaaggaatgtaaaactacaaaatactactttacgtgtgagttctaaggtatgattaatacaacaacaaacatcttgctatttttctctaattttccgaggtggatttcactataaaagcttttttttctcatttcaagaaaggaagggctactcataaaaaatctttaagtatagggtacaaattagtctcaacacaaaattctactgcctacctaaaagttatgaattgaggggactaatgtcaactgcaaatctagtgtctgaaaggttagtctaatctaaggatgacacgcaaatacaactccatttgtcatttatgttaaccacttggtactcagaacggggtggccaaacactgcttagtgacagagatccaacatgaatctgttccaaggggaccagagccaagagggatgactcattctatctccggacccacactgtacacaaacggaaactactagtttacactacatgtttcaagacaaaattggcatgtgta

SEQ ID NO: 5394 - DNA, 627 bp, Rattus norvegicus
  ref <308>: DATABASE ACCESSION NUMBER: EMBL / AA891221
  ref <309>: DATABASE ENTRY DATE: 2000-03-03
ggcatttcaaatgctactgctgtgagtaggatttattttaagaaatgaacgacagctgatacaaaatgtttgcctccaagaagtatgtcatacttacaagggaaaaggtaattaatattgaacattttccttgttcaacggttctaatttttataagggttttataagtctcatagtcactaagcaggttctttttgaaaggtaggcttcatgacccatttgacttcgtgcctttacatgacatgacaaattattttattcaaattatgttttccaaaagagagggttctgtgctagtcgtctttgaaagttttcataccatttcagaaccacatttgctgggatgaacatttccgatggatttggtgtcatctgggcctgagagagagcaaatgatgaagcaaaattgtagaagttgtccaacatcttctgtgtgaactgtgtgaaggagtcaaccgaggacacagcggcactgcctacgggagtctgctgagccaaactgtccaacaactccaccgagattccaatctgggcaacagatggggttcgcacaatattcatggctccaaatgggtgctggcttccttctccagatttaagacctgatattttgaagatggcacttgg

SEQ ID NO: 5395 - protein, 197 aa, Rattus norvegicus
  ref <308>: DATABASE ACCESSION NUMBER: Refseq / NP_080580
  ref <309>: DATABASE ENTRY DATE: 2002-01-08
MFGCLVAGRLVQTAAQQVAEDKFVFDLPDYENINHVVVFMLGTIPFPEGMGGSVYFSYPDSNGVPVWQLLGFVTNGKPSAIFKISGLKSGEGSQHPFGAMNIVRTPSVAQIGISVELLDSLAQQTPVGSAAVSSVDSFTQFTQKMLDNFYNFASSFALSQAQMTPNPSEMFIPANVVLKWYENFQRRLAQNPLFWKT

SEQ ID NO: 5396 - DNA, 827 bp, Homo sapiens
  ref <308>: DATABASE ACCESSION NUMBER: EMBL / AK001447
  ref <309>: DATABASE ENTRY DATE: 2002-08-06
gttgcctgagcagtgggctgcttaggaagagaaggtcagagttcgcgggggcagaggcattcttgccgctggcccagtcactatgtagtggaggggcagacaccctcccgcaaattctggaaggttcttagtctcgactagggcagtagccccaggactcctagtcgccggcttcaggtcactgccggctgaacggagctgccgtcgccatgtttggctgcttggtggcggggaggctggtgcaaacagctgcacagcaagtggcagaggataaatttgtttttgacttacctgattatgaaagtatcaaccatgttgtggtttttatgctgggaacaatcccatttcctgagggaatgggaggatctgtctacttttcttatcctgattcaaatggaatgccagtatggcaactcctaggatttgtcacgaatgggaagccaagtgccatcttcaaaatttcaggtcttaaatctggagaaggaagccaacatccttttggagccatgaatattgtccgaactccatctgttgctcagattggaatttcagtggaattattagacagtatggctcagcagactcctgtaggtaatgctgctgtatcctcagttgactcattcactcagttcacacaaaagatgttggacaatttctacaattttgcttcatcatttgctgtctctcaggcccagatgacaccaagcccatctgaaatgttcattccggcaaatgtggttctgaaatggtatgaaaactttcaaagacgactagcacagaaccctctcttttggaaaacataatttgaataaaataatttttaatgg

SEQ ID NO: 5397 - protein, 198 aa, Homo sapiens
  misc_feature (1)..(198): Xaa=Unknown amino acid
MFGCLVAGRLVQTAAQQVAEDKFVFDLPDYESINHVVVFMLGTIPFPEGMGGSVYFSYPDSNGMPVWQLLGFVTNGKPSAIFKISGLKSGEGSQHPFGAMNIVRTPSVAQIGISVELLDSMAQQTPVGNAAVSSVDSFTQFTQKMLDNFYNFASSFAVSQAQMTPSPSEMFIPANVVLKWYENFQRRLAQNPLFWKTX

SEQ ID NO: 5398 - DNA, 474 bp, Rattus norvegicus
  ref <308>: DATABASE ACCESSION NUMBER: EMBL / AA891286
  ref <309>: DATABASE ENTRY DATE: 2000-03-03
gatcaacaccttttattggttcacattttttttccagaaaaactgtaataaaaatacatggaattggaatttgggttacagtacattgtgcgattacagaacataaacgacgaagtgtactccttccatgggggcggaacatttcatcccaccaatagaatcacaacatgattaggcggctaccctacactgtcgttctgatctcagagactggcagacttaggagaaaaaaaaacaaaaaataaataaataaaactcaacagtccactcctttggttccctggtcttttctcctcttcaacacacggatgtggggcggatctgagggagcctcgtggggcaaggtgggtgccgctggctgaataccaggcaaacccgttccctgaggtggccccacaaggtactgggaaacgccactcagtactgcaggtggagatgggcagaagggaagacaagaaaactcgtgccgaattc

SEQ ID NO: 5399 - protein, 496 aa, Rattus norvegicus
  ref <308>: DATABASE ACCESSION NUMBER: SWISS-Prot / AAD43039
  ref <309>: DATABASE ENTRY DATE: 2003-02-01
MNDSKDAPKSYDFDLIIIGGGSGGLAAAKEAAKFDKKVMVLDFVTPTPLGTNGGLGGTCVNVGCIPKKLMHQAALLGQALKDSRNYGWKLEDTVKHDWEKMTESVQNHIGSLNWGYRVALREKKVVYENAYGKFIGPHKIMATNNKGKEKVYSAERFLIATGERPRYLGIPGDKEYCISSDDLFSLPYCPGKTLVVGASYVALECAGFLAGIGLDVTVMVRSILLRGFDQDMANKIGEHMEEHGIKFIRQFVPTKIEQIEAGTPGRLKVTAKSTNSEETIEDEFNTVLLAVGRDSCTRTIGLETVGVKINEKTGKIPVTDEEQTNVPYIYAIGDILEGKLELTPVAIQAGRLLAQRLYGGSTVKCDYDNVPTTVFTPLEYGCCGLSEEKAVEKFGEENIEVYHSFFWPLEWTVPSRDNNKCYAKVICNLKDNERVVGFHVLGPNAGEVTQALQPLKCGLTKQQLDSTIGIHPVCAEIFTTLSVTKRSGGDILQSGC

SEQ ID NO: 5400 - DNA, 3390 bp, Homo sapiens
  ref <308>: DATABASE ACCESSION NUMBER: EMBL / AJ001050
  ref <309>: DATABASE ENTRY DATE: 1998-02-03
ggcttatcaggagggcagacttcaaaagctactaaaaatgaacggccctgaagatcttcccaagtcctatgactatgaccttatcatcattggaggtggctcaggaggtctggcagctgctaaggaggcagcccaatatggcaagaaggtgatggtcctggactttgtcactcccacccctcttggaactagatggggtcttggaggaacatgtgtgaatgtgggttgcatacctaaaaaactgatgcatcaagcagctttgttaggacaagccctgcaagactctcgaaattatggatggaaagtcgaggagacagttaagcatgattgggacagaatgatagaagctgtacagaatcacattggctctttgaattggggctaccgagtagctctgcgggagaaaaaagtcgtctatgagaatgcttatgggcaatttattggtcctcacaggattaaggcaacaaataataaaggcaaagaaaaaatttattcagcagagagatttctcattgccactggtgaaagaccacgttacttgggcatccctggtgacaaggaatactgcatcagcagtgatgatcttttctccttgccttactgcccgggtaagaccctggttgttggagcatcctatgtcgctttggagtgcgctggatttcttgctggtattggtttagacgtcactgttatggttaggtccattcttcttagaggatttgaccaggacatggccaacaaaattggtgaacacatggaagaacatggcatcaagtttataagacagttcgtaccaattaaagttgaacaaattgaagcagggacaccaggccgactcagagtagtagctcagtccaccaatagtgaggaaatcattgaaggagaatataatacggtgatgctggcaataggaagagatgcttgcacaagaaaaattggcttagaaaccgtaggggtgaagataaatgaaaagactggaaaaatacctgtcacagatgaagaacagaccaatgtgccttacatctatgccattggcgatatattggaggataaggtggagctcaccccagttgcaatccaggcaggaagattgctggctcagaggctctatgcaggttccactgtcaagtgtgactatgaaaatgttccaaccactgtatttactcctttggaatatggtgcttgtggcctttctgaggagaaagctgtggagaagtttggggaagaaaatattgaggtttaccatagttacttttggccattggaatggacgattccgtcaagagataacaacaaatgttatgcaaaaataatctgtaatactaaagacaatgaacgtgttgtgggctttcacgtactgggtccaaatgctggagaagttacacaaggctttgcagctgcgctcaaatgtggactgaccaaaaagcagctggacagcacaattggaatccaccctgtctgtgcagaggtattcacaacattgtctgtgaccaagcgctctggggcaagcatcctccaggctggctgctgaggttaagccccagtgtggatgctgttgccaagactgcaaaccactggctcgtttccgtgcccaaatccaaggcgaagttttctagagggttcttgggctcttggcacctgcgtgtcctgtgcttaccaccgcccaaggcccccttggatctcttggataggagttggtgaatagaaggcaggcagcatcacactggggtcactgacagacttgaagctgacatttggcagggcatcgaagggatgcatccatgaagtcaccagtctcaagcccatgtggtaggcggtgatggaacaactgtcaaatcagttttagcatgacctttccttgtggattttcttattctcgttgtcaagttttctagggttgaatttttttcttttttctccatggtgttaatgatattagagatgaaaaacgttagcagttgatttttgtccaaaagcaagtcatggctagagtatccatgcaaggtgtcttgttgcatggaagggatagtttggctcccttggaggctatgtaggcttgtcccgggaaagagaactgtcctgcagctgaaatggactgttctttactgacctgctcagcagtttcttctctcatatattcccaaaacaagtacatctgcgatcaactctagccaaatttgcccctgtgtgctacatgatggatgattattattttaaggtctgtttaggaagggaaatggctacttggccagccattgcctggcatttggtagtatagtatgattctcaccattatttgtcatggaggcagacatacaccagaaatgggggagaaacagtacatatctttctgtctttagtttattgtgtgctggtctaagcaagctgagatcatttgcaatggaaaacacgtaacttgtttaaaagtttttctggtagctttagctttatgctaaaaaaaataatgacattgggtatctatttctttctaagactacattagtaggaaaataagtcttttcatgcttatgatttagctgttttgtggtaattgctttttaaaggaagttattaatatcataagttattattaatattttgaacacaggtggatgtgaaggattttcatttaaaaaccaagtggttttgactttttctgttgaatgaacaactgtgccttgtggaatttttgcagaagtgtttaggctttgttagcatttcaacttgcattattataaagaggtattaatgcctcagttatgtgtttgtcaatgtactggctgaggattctctctcagctgtcttttctaactgtgtaggttgagttttgaacacgtgcttgtggacatcagcctcctgccagcagttcttgaagcttctttttcattcctgctactctacctgtatttctcagttgcagcactgagtggtcaaaatacatttctgggccacctcagggaacccatgcatctgcctggcatttaggcagcagagcccctgaccgtcccccacaggctctgcctcacgtcctcatctcatttggctgtgtaaagaaatgggaaaagggagaaggagagagcaattgaggcagttgaccatattcagttttatttatttatttttaatttgtttttttctccaagtccaccagtctctgaaattagaacagtaggcacggtatgagataatcaggcctaatcatgttgtgattctcttttcttagtggagtggaatgttctatccccacaagaaggattatatcttatagacttgtcttgttcagattctgtatttacccattttattgaaacatatactaagttccatgtatttttgttacaaatcttctgaaaaaaaacaaaacaatgtgaaacattaaaattaaaaggc

SEQ ID NO: 5401 - protein, 497 aa, Homo sapiens [sequence omitted]

SEQ ID NO: 5402 - DNA, 465 bp, Rattus norvegicus
  ref <308>: DATABASE ACCESSION NUMBER: EMBL / AA891308
  ref <309>: DATABASE ENTRY DATE: 2000-03-03
agaaattttggtacagtgtacattgaaaacatgtaaaatattgaagtgtctaacaaatggcattacagtgtctttaataaaggttcatttataaatactaagtgtgtgctgcggtcattgttcttgtaagtgcagttccataattaataatgtttccccaagcggagaatacttagacaaagcacagactacacactgctgccccaggaagacagtggcactacattcctcagatagctcacttttttttgccacatggagctggttagtcaagccttatgctccccaaatatgctgaccctcccacgtcctgctggcatatacctcgaggacaaaggagcagctctggctggtctccaaggaggacacagtggtcacggacacactgcttccctcagccatgctcctaactaaagtcacttgggcccacccactcataagcactgcagctgcctgctgtctgtc

SEQ ID NO: 5403 - protein, 1091 aa, Rattus norvegicus
  ref <308>: DATABASE ACCESSION NUMBER: Refseq / NP_032403
  ref <309>: DATABASE ENTRY DATE: 2002-10-04
MARPGPGVLGAPRLAPRLLLWLLLLLLQWPESAGAQARPRAPCAAACTCAGNSLDCSGRGLATLPRDLPSWTRSLNLSYNRLSEIDSAAFEDLTNLQEVYLNSNELTAIPSLGTASIGVVSLFLQHNKILSVDGSQLKSYLSLEVLDLSSNNITEIRSSCFPNGLRIRELNLASNRISILESGAFDGLSRSLLTLRLSKNRITQLPVKAFKLPRLTQLDLNRNRIRLIEGLTFQGLDSLEVLRLQRNNISRLTDGAFWGLSKMHVLHLEYNSLVEVNSGSLYGLTALHQLHLSNNSISRIQRDGWSFCQKLHELILSFNNLTRLDEESLAELSSLSILRLSHNAISHIAEGAFKGLKSLRVLDLDHNEISGTIEDTSGAFTGLDNLSKLTLFGNKIKSVAKRAFSGLESLEHLNLGENAIRSVQFDAFAKMKNLKELYISSESFLCDCQLKWLPPWLMGRMLQAFVTATCAHPESLKGQSIFSVLPDSFVCDDFPKPQIITQPETTMAVVGKDIRFTCSAASSSSSPMTFAWKKDNEVLANADMENFAHVRAQDGEVMEYTTILHLRHVTFGHEGRYQCIITNHFGSTYSHKARLTVNVLPSFTKIPHDIAIRTGTTARLECAATGHPNPQIAWQKDGGTDFPAARERRMHVMPDDDVFFITDVKIDDMGVYSCTAQNSAGSVSANATLTVLETPSLAVPLEDRVVTVGETVAFQCKATGSPTPRITWLKGGRPLSLTERHHFTPGNQLLVVQNVMIDDAGRYTCEMSNPLGTERAHSQLSILPTPGCRKDGTTVGIFTIAVVCSIVLTSLVWVCIIYQTRKKSEEYSVTNTDETIVPPDVPSYLSSQGTLSDRQETVVRTEGGHQANGHIESNGVCLRDPSLFPEVDIHSTTCRQPKLCVGYTREPWKVTEKADRTAAPHTTAHSGSAVCSDCSTDTAYHPQPVPRDSGQPGTASSQELRQHDREYSPHHPYSGTADGSHTLSGGSLYPSNHDRILPSLKNKAASADGNGDSSWTLAKLHEADCIDLKPSPTLASGSPELMEDAISTEAQHLLVSNGHLPKACDSSPESVPLKGQITGKRRGPLLLAPRS

SEQ ID NO: 5404 - DNA, 2958 bp, Homo sapiens
  ref <308>: DATABASE ACCESSION NUMBER: EMBL / AL117666
  ref <309>: DATABASE ENTRY DATE: 2000-02-18
acgcgtccgcaccgtggcccgcctcgaatgtgctgccacaggtcacccaaaccctcagattgcctggcagaaggatggaggcacggatttccccgctgcccgtgagcgacgcatgcatgtcatgccggatgacgacgtgtttttcatcactgatgtgaaaatagatgacgcaggggtttacagctgtactgctcagaactcagccggttctatttcagctaatgccaccctgactgtcctagagaccccatccttggtggtccccttggaagaccgtgtggtatctgtgggagaaacagtggccctccaatgcaaagccacggggaaccctccgccccgcatcacctggttcaagggggaccgcccgctgagcctcactgagcggcaccacctgacccctgacaaccagctcctggtggttcagaacgtggtggcagaggatgcgggccgatatacctgtgagatgtccaacaccctgggcacggagcgagctcacagccagctgagcgtcctgcccgcagcaggctgcaggaaggatgggaccacggtaggcatcttcaccattgctgtcgtgagcagcatcgtcctgacgtcactggtctgggtgtgcatcatctaccagaccaggaagaagagtgaagagtacagtgtcaccaacacagatgaaaccgtcgtgccaccagatgttccaagctacctctcttctcaggggaccctttctgaccgacaagaaaccgtggtcaggaccgagggtggccctcaggccaatgggcacattgagagcaatggtgtgtgtccaagagatgcaagccactttccagagcccgacactcacagcgttgcctgcaggcagccaaagctctgtgctgggtctgcgtatcacaaagagccgtggaaagcgatggagaaagctgaagggacacctgggccacataagatggaacacggtggccgggtcgtatgcagtgactgcaacaccgaagtggactgttactccaggggacaagccttccacccccagcctgtgtccagagacagcgcacagccaagtgcgccaaatggcccggagccgggtgggagtgaccaagagcattctccacatcaccagtgcagcaggactgccgctgggtcctgccccgagtgccaagggtcgctctaccccagtaaccacgatagaatgctgacggctgtgaagaaaaagccaatggcatctctagatgggaaaggggattcttcctggactttagcaaggttgtatcacccggactccacagagctacagcctgcatcttcattaacttcaggcagtccagagcgcgcggaagcccagtacttgcttgtttccaatggccacctccccaaagcatgtgacgccagtcccgagtccacgccactgacaggacagctccccgggaaacagagggtgccactgctgttggcaccaaaaagctaggttttgtctacctcagttcttgtcataccaatctctacgggaaagagaggtaggagaggctgcgaggaagcttgggttcaagcgtcactcatctgtacatagttgtaactcccatgtggagtatcagtcgctcacaggacttggatctgaagcacagtaaacgcaagaggggatttgtgtacaaaaggcaaaaaaaagtatttgatatcattgtacataagagttttcagagatttcatatatatcttttacagaggctattttaatctttagtgcatggttaacagaaaaaaattatacaattttgacaatattatttttcgtatcaggttgctgtttaattttggagggggtggggaaatagttctggtgccttaacgcatggctggaatttatagaggctacaaccacatttgttcacaggagtttttggtgcggggtgggaaggatggaaggccttggatttatattgcacttcatagacccctaggctgctgtgcggtgggactccacatgcgccggaaggagcttcaggtgagcactgctcatgtgtggatgcccctgcaacaggcttccctgtctgtagagccaggggtgcaagtgccatccacacttgcagtgaatggcttttccttttaggtttaagtcctgtctgtctgtaaggcgtagaatctgtccgtctgtaaggcgtagaatgagggttgttaatccatcacaagcaaaaggtcagaacagttaaacactgcctttcctcctcctcttattttatgataaaagcaaatgtggccttctcagtatcattcgattgctatttgagacttttaaattaaggtaaaggctgctggtgttggtacctgtggatttttctatactgatgttttcgttttgccaatataatgagtattacattggccttgggggacagaaaggaggaagttctgacttttcagggctaccttatttctactaaggacccagagcaggcctgtccatgccattccttcgcacagatgaaactgagctgggactggaaaggacagcccttgacctgggttctgggtataatttgcacttttgagactggtagctaaccatcttatgagtgccaatgtgtcatttagtaaaacttaaatagaaacaaggtccttcaaatgttcctttggccaaaagctgaagggagttactgagaaaatagttaacaattactgtcaggtgtcatcactgttcaaaaggtaagcacatttagaattttgttcttgacagttaactgactaatcttacttccacaaaatatgtgaatttgctgcttctgagaggcaatgtgaaagagggagtattacttttatgtacaaagttatttatttatagaaattttggtacagtgtacattgaaaaccatgtaaaatattgaagtgtctaacaaatggcattgaagtgtctttaataaaggttcatttataaatgtcaaaaaaaaattttttaaaaattaaaaaaaaaaaaaaaaa

SEQ ID NO: 5405 - protein, 420 aa, Homo sapiens
ARGSAGSISANATLTVLETPSLVVPLEDRVVSVGETVALQCKATGNPPPRITWFKGDRPLSLTERHHLTPDNQLLVVQNVVAEDAGRYTCEMSNTLGTERAHSQLSVLPAAGCRKDGTTVGIFTIAVVSSIVLTSLVWVCIIYQTRKKSEEYSVTNTDETVVPPDVPSYLSSQGTLSDRQETVVRTEGGPQANGHIESNGVCPRDASHFPEPDTHSVACRQPKLCAGSAYHKEPWKAMEKAEGTPGPHKMEHGGRVVCSDCNTEVDCYSRGQAFHPQPVSRDSAQPSAPNGPEPGGSDQEHSPHHQCSRTAAGSCPECQGSLYPSNHDRMLTAVKKKPMASLDGKGDSSWTLARLYHPDSTELQPASSLTSGSPERAEAQYLLVSNGHLPKACDASPESTPLTGQLPGKQRVPLLLAPKS

SEQ ID NO: 5406 - DNA, 485 bp, Rattus norvegicus
  misc_feature (1)..(485): n=a, c, g or t
  ref <308>: DATABASE ACCESSION NUMBER: EMBL / AA891314
  ref <309>: DATABASE ENTRY DATE: 2000-03-03
ctggtcgctgagaatatttattcaaaaacggggattgaaaaaaactgtacagagtgtctgctgctgagaactgggcccctgccccccaggccacaccccctgctataggcagagccctctctttgggttgccccccggacaagcccatccagtctattccagtcaaaagggtatcagtggaagcagcaggatctgcaggggatgaagagaagcttggccccagccacccctcactctcctccaattcccactggggcagcaggaagaagcccaaagggatggagaggacacgagtagcccctcccacggcagggcactggggaggccccagctactccctgcatccaagcataggtctgaaggggtggagcccctgctctggggctgccaaactcctagaaccctgggccaggaactgtcccctctctgaggaggatctccaaagatggggcaaggtanggggtgcatccatgcgtctggcatta

SEQ ID NO: 5407 - DNA, 1964 bp, Homo sapiens
  ref <308>: DATABASE ACCESSION NUMBER: EMBL / AF176330
  ref <309>: DATABASE ENTRY DATE: 2000-10-28
cctctggagtccctgtggcagaactcaaatggaaggaggagcagctgcacccaggggagcagggtgtcacctccgttggatagagccggccaggttgcagcgcggacacactcgcaggtcgctgtggccccagcctcgcctgacagaatgagcggctcggacgggggactggaggaggagccagagctcagcatcaccctcacgctgcggatgctgatgcacgggaaggaagtgggcagcatcatcgggaagaagggcgagactgtaaagcgaatccgggagcagagcagtgcccggatcaccatctccgagggctcctgccctgaacgcatcaccaccatcaccgggtctacagcagctgtcttccatgcagtctccatgattgctttcaaactggatgaggacctttgtgctgctcctgcaaatggtggaaatgtctccaggcctccagtgaccctgcgccttgtcatccctgccagtcagtgtggctcactgattgggaaggctggcaccaagatcaaggagatccgagagactacgggtgcccaggtacaggtggcaggggacctgctccccaactccacagagcgagctgttacggtatctggggtgcctgatgccatcatcctgtgtgtgcgccagatctgcgctgttatcctggagtccccacccaaaggagccactatcccctaccatccgagcctctccctaggtactgttcttctctctgccaaccagggcttctctgtccagggtcagtatggggctgtgaccccagctgaggtcaccaagctccagcagctctcaagccatgcggtcccctttgccacacccagcgtggtgccaggactggatcccggcacacagaccagctcacaggagttcttggttcccaacgatttgattggctgtgtgatcgggcgccagggcagcaagatcagcgagatccggcagatgtcaggggcacatatcaagatcgggaaccaagcagagggcgctggggagcggcatgtcaccatcactggctctccggtctccatcgccctggcccagtacctcatcactgcctgtctagagacggccaagtctacctctggggggacgcccagctcggcccccgcagacctgcctgcccccttctcgccacccctgacggccctgcccacagctccccctggcctgctgggcacaccctatgccatctccctctccaacttcatcggcctcaagcccatgcccttcttggctttaccacctgcttccccagggccgccgccgggcttggcggcctacactgccaagatggcagcagctaatgggagcaagaaggctgagcggcagaaattctccccctactgaggccagctgaggtacaggcaggggcaggcaggaccaccagcagggggctgcctctgcaccctacccgcccaaggagactccaccctggggtcccaaacgccgctaacgcccagacgcatggatgcaccccctaccctgcctccatctatgggagttctttctctcagagtgggggcagtttctggcccaggggtctgagctgcggcagccccagggcagggggccctacctcctcagctctgtgcttggatacagggagcagccaggagactccctagtgcccccaccatggcgggtgtcactcacgcactccccatcccttagggcttcctggcctactgcatccttgtgggagtcagggaggagggcccgttgggtagctggggccaggcttctctccccaccacctgcagatttcttgctgcttccactgatacccttttgactggaatgaactggctgggcttgtcagggggcaccccaaagagggggcactgccaggtagctgggggagtggcatggggcaggggcccagttctcagcagcagacactctgtacagttttttcaatccctgtttttgaataaatattctcagcgaccagg

SEQ ID NO: 5408 - protein, 403 aa, Homo sapiens
  ref <308>: DATABASE ACCESSION NUMBER: SWISS-Prot / P57723
  ref <309>: DATABASE ENTRY DATE: 2002-06-15
MSGSDGGLEEEPELSITLTLRMLMHGKEVGSIIGKKGETVKRIREQSSARITISEGSCPERITTITGSTAAVFHAVSMIAFKLDEDLCAAPANGGNVSRPPVTLRLVIPASQCGSLIGKAGTKIKEIRETTGAQVQVAGDLLPNSTERAVTVSGVPDAIILCVRQICAVILESPPKGATIPYHPSLSLGTVLLSANQGFSVQGQYGAVTPAEVTKLQQLSSHAVPFATPSVVPGLDPGTQTSSQEFLVPNDLIGCVIGRQGSKISEIRQMSGAHIKIGNQAEGAGERHVTITGSPVSIALAQYLITACLETAKSTSGGTPSSAPADLPAPFSPPLTALPTAPPGLLGTPYAISLSNFIGLKPMPFLALPPASPGPPPGLAAYTAKMAAANGSKKAERQKFSPY

SEQ ID NO: 5409 - DNA, 438 bp, Rattus norvegicus
  misc_feature (1)..(438): n=a, c, g or t
  ref <308>: DATABASE ACCESSION NUMBER: EMBL / AA891322
  ref <309>: DATABASE ENTRY DATE: 2000-03-03
aacaggaaattaattttattcttaaatccaagggatcagaacaaaaaacctctgccctcaaagggcaagccaaggtggaaaggctaggaaggcagacagcaaggcaggagcatgtccacaacagaggcctcttcattcaggcgctgcctccatcagaaagaatttctctggggccatgtacccatccccaccctcggcctccatgtacatgtctcgaccatcactacctagcccttccagcccattgtcctgaccgctcccacccccaccccgggccttccctgccccgctcactgccccgctccccacgcttgtgctctctatcccggtcacggtctcggtctcgacggcgttccctctcacttcggtgacttcgacgcctctcccggtctcgatcccgacccttctcctcagggncatcanggccttcaaggccaa

SEQ ID NO: 5410 - protein, 121 aa, Rattus norvegicus
  ref <308>: DATABASE ACCESSION NUMBER: SWISS-Prot / AAH02169
  ref <309>: DATABASE ENTRY DATE: 2002-10-01
MAEPSEAGDGAPDDGPPGELGPEGPDGPEEKGRDRDRERRRSHRSERERRRDRDRDRDREHKRGERGSERGRDEARGGGGSGQDNGLEGLGSDGRDMYMEAEGGDGYMAPENGYLMEAAPE

SEQ ID NO: 5411 - DNA, 1672 bp, Homo sapiens
  ref <308>: DATABASE ACCESSION NUMBER: EMBL / X06815
  ref <309>: DATABASE ENTRY DATE: 1995-07-13
gcgctcgcttagcgggcgacggaatcagacggacgtggacgcccccggagtggaagccgaagcaggagttgttgttgctgaggggctgccgcagccgccgcgagcctccggacagacgccagagcgaggaggcgctacgcgacttggcaagatgacccagttcctgccgcccaaccttctggccctctttgccccccgtgaccctattccatacctgccacccctggagaaactgccacatgaaaaacaccacaatcaaccttattgtggcattgcgccgtacattcgagagtttgaggaccctcgagatgcccctcctccaactcgtgctgaaacccgagaggagcgcatggagaggaaaagacgggaaaagattgagcggcgacagcaagaagtggagacagagcttaaaatgtgggaccctcacaatgatcccaatgctcagggggatgccttcaagactctcttcgtggcgagagtgaattatgacacaacagaatccaagctccggagagagtttgaggtgtacggacctatcaaaagaatacacatggtctacagtaagcggtcaggaaagccccgtggctatgccttcatcgagtacgaacacgagcgagacatgcactccaccacgcagctggcttgcagctgatgcttacgctccccttacaacacctcagtgtatggttggtataaggccgcttacaaacacgcagatggcaagaagattgatggcaggagggtccttgtggacgtggagaggggccgaaccgtgaagggctggaggccccggcggctaggaggaggcctcggtggtaccagaagaggaggggctgatgtgaacatccggcattcaggccgcgatgacacctcccgctacgatgagagggaccgggaccgggaccgtgagcgggagcgcagagagcggagccgggagcgagacaaggagcgagaacggcgacgctcccgctcccgggaccggcggaggcgctcacggagtcgcgacaaggaggagcggaggcgctccagggagcggagcaaggacaaggaccgggaccggaagcggcgaagcagccggagtcgggagcgggcccggcgggagcgggagcgcaaggaggagctgcgtggcggcggtggcgacatggcggagccctccgaggcgggtgacgcgccccctgatgatgggcctccaggggagctcgggcctgacggccctgacggtccagaggaaaagggccgggatcgtgaccgggagcgacggcggagccaccggagcgagcgcgagcggcgccgggaccgggatcgtgaccgtgaccgtgaccgcgagcacaaacggggggagcggggcagtgagcggggcagggatgaggcccgaggtgggggcggtggccaggacaacgggctggagggtctgggcaacgacagccgagacatgtacatggagtctgagggcggcgacggctacctggctccggagaatgggtatttgatggaggctgcgccggagtgaagaggtcgtcctctccatctgctgtgtttggacgcgttcctgcccagccccttgctgtcatcccctcccccaaccttggccacttgagtttgtcctccaagggtaggtgtctcatttgttctggccccttggatttaaaaataaaattaatttcctgttgat

SEQ ID NO: 5412 - protein, 437 aa, Homo sapiens
  ref <308>: DATABASE ACCESSION NUMBER: SWISS-Prot / Q9UE46
  ref <309>: DATABASE ENTRY DATE: 2001-10-16
MTQFLPPNLLALFAPRDPIPYLPPLEKLPHEKHHNQPYCGIAPYIREFEDPRDAPPPTRAETREERMERKRREKIERRQQEVETELKMWDPHNDPNAQGDAFKTLFVARVNYDTTESKLRREFEVYGPIKRIHMVYSKRSGKPRGYAFIEYEHERDMHSAYKHADGKKIDGRRVLVDVERGRTVKGWRPRRLGGGLGGTRRGGADVNIRHSGRDDTSRYDERPGPSPLPHRDRDRDRERERRERSRERDKERERRRSRSRDRRRRSRSRDKEERRRSRERSKDKDRDRKRRSSRSRERARRERERKEELRGGGGDMAEPSEAGDAPPDDGPPGELGPDGPDGPEEKGRDRDRERRRSHRSERERRRDRDRDRDRDREHKRGERGSERGRDEARGGGGGQDNGLEGLGNDSRDMYMESEGGDGYLAPENGYLMEAAPE

SEQ ID NO: 5413 - DNA, 438 bp, Rattus norvegicus; identical to SEQ ID NO: 5409
  misc_feature (1)..(438): n=a, c, g or t
  ref <308>: DATABASE ACCESSION NUMBER: EMBL / AA891322
  ref <309>: DATABASE ENTRY DATE: 2000-03-03

SEQ ID NO: 5414 - DNA, 1672 bp, Homo sapiens; identical to SEQ ID NO: 5411
  ref <308>: DATABASE ACCESSION NUMBER: EMBL / X06815
  ref <309>: DATABASE ENTRY DATE: 1995-07-13

SEQ ID NO: 5415 - protein, 437 aa, Homo sapiens; identical to SEQ ID NO: 5412
  ref <308>: DATABASE ACCESSION NUMBER: SWISS-Prot / Q9UE46
  ref <309>: DATABASE ENTRY DATE: 2001-10-16

SEQ ID NO: 5416 - DNA, 438 bp, Rattus norvegicus; identical to SEQ ID NO: 5409
  misc_feature (1)..(438): n=a, c, g or t
  ref <308>: DATABASE ACCESSION NUMBER: EMBL / AA891322
  ref <309>: DATABASE ENTRY DATE: 2000-03-03

SEQ ID NO: 5417 - protein, 121 aa, Rattus norvegicus; identical to SEQ ID NO: 5410
  ref <308>: DATABASE ACCESSION NUMBER: SWISS-Prot / AAH02169
  ref <309>: DATABASE ENTRY DATE: 2002-10-01

SEQ ID NO: 5418 - DNA, 1672 bp, Homo sapiens; identical to SEQ ID NO: 5411
  ref <308>: DATABASE ACCESSION NUMBER: EMBL / X06815
  ref <309>: DATABASE ENTRY DATE: 1995-07-13

SEQ ID NO: 5419 - protein, 437 aa, Homo sapiens; identical to SEQ ID NO: 5412
  ref <308>: DATABASE ACCESSION NUMBER: SWISS-Prot / Q9UE46
  ref <309>: DATABASE ENTRY DATE: 2001-10-16

SEQ ID NO: 5420 - DNA, 438 bp, Rattus norvegicus; identical to SEQ ID NO: 5409
  misc_feature (1)..(438): n=a, c, g or t
  ref <308>: DATABASE ACCESSION NUMBER: EMBL / AA891322
  ref <309>: DATABASE ENTRY DATE: 2000-03-03

SEQ ID NO: 5421 - DNA, 1672 bp, Homo sapiens; identical to SEQ ID NO: 5411
  ref <308>: DATABASE ACCESSION NUMBER: EMBL / X06815
  ref <309>: DATABASE ENTRY DATE: 1995-07-13

SEQ ID NO: 5422 - protein, 437 aa, Homo sapiens; identical to SEQ ID NO: 5412
  ref <308>: DATABASE ACCESSION NUMBER: SWISS-Prot / Q9UE46
  ref <309>: DATABASE ENTRY DATE: 2001-10-16

SEQ ID NO: 5423 - DNA, 484 bp, Rattus norvegicus
  misc_feature (1)..(484): n=a, c, g or t
  ref <308>: DATABASE ACCESSION NUMBER: EMBL / AA891423
  ref <309>: DATABASE ENTRY DATE: 2000-03-03
actgtggctaaacagccacaattagcaactttaatataaagtttttaatacaaagttcaccacaaagaaagcagatgccatgcgtggaggcacgtggactgcagctgcctcatcctcaagtcccgggcttctggtgttttgtcctcggatccagcagttcccatgtggaggctgcatggcctctgtccttaacattgatgccgtgggtcatgaggtcctggcggagtgcgtcacatgcctccagcaagggctgcctctcctggagctgctgtttccgggcctccccggtggccccaggcgtggccagtgcatactggcggaccttaagcctgaagcgcactagttcatctaccacacagtgcanggctactgtgctgctgtctcctgaaacacactgtcgcttggccagagaaatccaacagtctcgaaaaactgctcaacgtaggcaacgatggccccaaacacagtgggacttctcgggcca

SEQ ID NO: 5424 - protein, 552 aa, Rattus norvegicus
  ref <308>: DATABASE ACCESSION NUMBER: SWISS-Prot / BAB26596
  ref <309>: DATABASE ENTRY DATE: 2002-06-01
MLRARGPGPGALLLRAALGLGRRGRSWQRPQGQDTGVQVHNSLTGRKEPLIVARSDAVSWYSCGPTVYDHAHLGHACSYVRFDIIRRILTRVFGCNVVMAMSITDVDDKIIKRANEMNVTPASLASLFEEEFKQDMAALKVLPPTVYLRVTENIPQIIAFIEGIIAHGHAYSTATGSVYFDLHARGDKYGKLVNTVPSATAEPAGDSDKRHSSDFALWKAAKPQEVFWASPWGDGRPGWHIECSTMASEVFGSHLDIHTGGIDLAFPHHENEIAQSEVFHQCQQWGNYFLHSGHLHVKGTEEKMSKSLKNYITIKDFLKTFSPDVFRLFCLRTNYRSAIEYSDSTLVEAKHLLLGLASFVEDARAYVKGQLTCGPVEEDVLWERLTSTKKAVKAALANDFDTPRAVNTILDLVHHANRQLRAVSKEASGPRSPTVFGAITSYVEQFFETVGISLANRQCVSGDSSTVTLRCVVDELVRFRLKVRQYALDTPGAAGEARKRQLQERQPLLEACDTLRQDLVTHGINVKDRGSAASTWELLDPRTRHQKPGDRG

SEQ ID NO: 5425 - DNA, 1850 bp, Homo sapiens
  ref <308>: DATABASE ACCESSION NUMBER: EMBL / BC007220
  ref <309>: DATABASE ENTRY DATE: 2001-07-13
ggccgctgacatgttgaggactacgcgcggcccaggcctgggccccccgctgctccaggccgcgctgggccttgggcgggctgggtggcactggcctgcgggccgggcggcgagcggggggcgcgggcgggcctggctgcagcccacgggccgggagacgggtgtgcaggtgtacaacagcctcaccgggaggaaggaacccctaatcgtggcgcacgccgaagccgcctcctggtatagctgtggaccaactgtatatgatcatgcgcaccttggccatgcttgctcatatgttagatttgatatcattcgaaggatcctaaccaaggtttttggatgcagcatagtcatggtgatgggtattacagatgtagatgataaaatcatcaaaagagccaatgagatgaatatttcccccgcttccctcgccagtctttatgaggaagacttcaagcaggacatggcagccctgaaggttctcccacccacggtgtacctgagggtaaccgaaaatattcctcagataatttctttcattgaaggaatcattgctcgtgggaacgcttattcaacggcaaaaggcaatgtctacttcgatctgaagtctagaggagacaagtatggcaaattggtcggcgtggtccctggtccagtcggagagccagcggactctgacaagcgtcatgccagtgacttcgccctgtggaaggcggccaaaccccaggaggtgttctgggcctctccctggggacccgggaggccgggctggcacatcgagtgctctgccatcgctagtatggtatttggaagtcaactggatatccattcaggtgggatagatttagcttttccacatcatgagaacgaaattgcacagtgcgaagtctttcatcagtgcgagcagtggggaaattattttctgcattctgggcatttgcacgccaaaggcaaagaagaaaaaatgtccaaatcattaaagaactacattactattaaggactttctgaagaccttttcccccgatgtcttccggttcttctgcctgcggagcagctaccgctcagccatcgactacagtgacagcgccatgctccaagctcagcagctgctcctggggctgggctctttcctggaggacgcacgtgcctacatgaaggggcagctggcctgcggctccgtcagggaagcgatgctgtgggagaggctctccagcaccaagagggccgtgaaggcggccttggcagatgattttgacacacccagggtggttgatgccatcctgggccttgcacaccacgggaatggacagctcagggcgtccctgaaggaacctgaagggccgagaagtcctgctgtgtttggtgccatcatctcttactttgaacagttttttgaaactgttggaatttctctggcaaatcaacagtacgtttcaggagacggcagcgaggctaccttgcatggtgtggtggacgagctggtgcggttccggcagaaggtccggcagtttgcgctggccatgcccgaggccacgggggacgcccggcggcagcagctcctagaaaggcagcccctgctggaagcatgcgacaccctgcgccggggcctgactgcccacggcatcaacatcaaggacagaagcagtacaacatccacgtgggaactgctggatccaaggacaaaagaccaaaaatcagcgggctgaggatggagcacagccatgaacctgctcacgacaagatgcacccatgcttctcagggtcaaggctttatgttaaagcttcctgtcggggctgctaggtcagcattaaagtaaggcaaccaaaaaaaaaaaaaaaaaaaaaaaaaaa

SEQ ID NO: 5426 - protein, 564 aa, Homo sapiens [sequence omitted]

SEQ ID NO: 5427 - DNA, 481 bp, Rattus norvegicus
  ref <308>: DATABASE ACCESSION NUMBER: EMBL / AA891445
  ref <309>: DATABASE ENTRY DATE: 2000-03-03
gccatgccacagcaaggggcctttattagatgttcagggcacagacaggcaggtggatgctagatggtgtagcacaccttctcggggtggagtggtgcctggatgtccagtttgtgggtcttgctgtccttatcaatgatctccagtcgcagtgtaggcggacgcttttcagcctggggcgagggcagctcagggctcttgaggagctgcttgtctgagtcctccacagtgatacgcagggtgcagccccctggtagcaggtcctgctcataggctgccgccagctggtttaccacacggcgctctacctcatgcttaatggagcgggcaccatagtggacgttgtagccatcaaccaacacgtctgccacctcgcggtcccacagtagtgtgatgttgtgtctctgcttggctctcttggcccagaagttcagttccttgttgaccagctggatgagctccgagtggcacaaagggagga

SEQ ID NO: 5428 - protein, 677 aa, Rattus norvegicus
  ref <308>: DATABASE ACCESSION NUMBER: Refseq / NP_075236
  ref <309>: DATABASE ENTRY DATE: 2002-11-05
MMLSAVLRRTAPAPRLFLGLIKSPSLQSRGGAYNRSVITGDRGEPQRLRTAAWVRPGASSVLFPGRGAATGGRRGERTEIPYLTAASSGRGPSPEETLPGQDSWNGVPNKAGLGMWALAMALVVQCYNKNPSNKDAALMEAARANNVQEVRRLLSEGADVNARHKLGWTALMVAAISHNESVVQVLLAAGADPNLGDDFSSVYKTANEQGVHSLEVLVTREDDFNNRLNHRASFKGCTALHYAVLADDYSIVKELLGGGANPLQRNEMGHTPLDYAREGEVMKLLKTSETKYMEKQRKREAEERRRFPLEQRLEQHIIGQESAIATVGAAIRRKENGWYDEEHPLVFLFLGSSGIGKTELAKQTAKYMHKDAKKGFIRLDMSEFQERHEVAKFIGSPPGYIGHEEGGQLTKKLKQCPNAVVLFDEVDKAHPDVLTIMLQLFDEGRLTDGKGKTIDCKDAIFIMTSNVASDEIAQHALQLRQEALEMSRNRIAENLGDVQISDKITISKNFKENMIRPILKAHFRRDEFLGRINEIVYFLPFCHSELIQLVNKELNFWAKRAKQRHNITLLWDREVADVLVDGYNVQYGARSIKHEVERRVVNQLAAAYEQDLLPGGCTLRITVEDSDKQLLKSPELPSPQAEKRPPTLRLEIIDKDSKTHKLDIQAPLHPEKVCYTI

SEQ ID NO: 5429 - DNA, 2307 bp, Homo sapiens
  ref <308>: DATABASE ACCESSION NUMBER: EMBL / AL136909
  ref <309>: DATABASE ENTRY DATE: 2002-07-12
gtgcgcaactccaccctgttcgcggcgtcttcgaacgcgccgcggcagccatgttggacgtggtcagcacaggggccggcaccacggggttatcgaagcagctgtcaagatgctggggtccctggtgttgaggagaaaagcactggcgccacggctactcctccggctgctcaggtccccaacgctccggggccatggaggtgcttccggccggaatgtgactactgggagtctcggggagccgcagtggctgagggtagccaccggggggcgccctggaacatcgccggccttgttctccggacgtggggcagccaccggggggcgccagggaggacgcttcgataccaaatgcctcgcggctgccacttggggacgccttcctggtcccgaagaaacactcccaggacaggacagctggaacggggtccccagcagggccggactgggcatgtgcgccctggccgcagcgctggtggttcattgctacagcaagagtccgtccaacaaggatgcagccctgttggaagctgcccgtgccaacaatatgcaagaagtcagcaggctgttgtcagaaggtgcagatgtcaatgcaaagcacagacttggctggacagcactcatggtggcagccatcaaccgaaacaacagtgtggtacaggtcctgcttgctgctggggctgatccaaaccttggagatgatttcagcagtgtttacaagactgccaaggaacagggaatccattctttggaagatgggggacaggacggtgcaagccggcacatcacaaaccagtggacaagtgccctggagttcaggagatggctaggactccccgctggcgtcctgatcacccgagaggatgacttcaacaacaggctgaacaaccgcgccagtttcaagggctgcacggccttgcactatgctgttcttgctgatgactaccgcactgtcaaggagctgcttgatggaggagccaaccccctgcagaggaatgaaatgggacacacacccttggattatgcccgagaaggggaggtgatgaagcttctgaggacttctgaagccaagtaccaagagaagcagcggaagcgtgaggctgaggagcggcgccgcttccccctggagcagcgactaaaggagcacatcattggccaggagagcgccatcgccacagtgggtgctgcgatccggaggaaggagaatggctggtacgatgaagaacaccctctggtcttcctcttcttgggatcatctggaataggaaaaacagagctggccaagcagacagccaaatatatgcacaaagatgctaaaaagggcttcatcaggctggacatgtccgagttccaggagcgacacgaggtggccaagtttattgggtctccaccaggctacgttggccatgaggagggtggccagctgaccaagaagttgaagcagtgccccaatgctgtggtgctctttgatgaagtagacaaggcccatccagatgtgctcaccatcatgctgcagctgtttgatgagggccggctgacagatggaaaagggaagaccattgattgcaaggacgccatcttcatcatgacctccaatgtggccagcgacgagatcgcacagcacgcgctgcagctgaggcaggaagctttggagatgagccgtaaccgtattgccgaaaacctgggggatgtccagataagtgacaagatcaccatctcaaagaacttcaaggagaatgtgattcgccctatcctgaaagctcacttccggagggatgagtttctgggacggatcaatgagatcgtctacttcctccccttctgccactcggagctcatccaactcgtcaacaaggaactaaacttctgggccaagagagccaagcaaaggcacaacatcacgctgctctgggaccgcgaggtggcagatgtgctggtcgacggctacaatgtgcactatggcgcccgctccatcaaacatgaggtagaacgccgtgtggtgaaccagctggcagcagcctatgagcaggacctgctgccagggggctgtactttgcgcatcacggtggaggactcagacaagcagctactcaaaagcccagaactgccctcaccccaggctgagaagcgcctccccaagctgcgtctggagatcatcgacaaggacagcaagactcgcagactggacatccgggcaccactgcaccctgagaaggtgtgcaacaccatctagcagccacctgcctgctcctatgtgccctcaccatccaataaaggccccttggctgtggcatggcaaaaaaaaaa

SEQ ID NO: 5430 - protein, 708 aa, Homo sapiens
  misc_feature (1)..(708): Xaa=Unknown amino acid
MLGSLVLRRKALAPRLLLRLLRSPTLRGHGGASGRNVTTGSLGEPQWLRVATGGRPGTSPALFSGRGAATGGRQGGRFDTKCLAAATWGRLPGPEETLPGQDSWNGVPSRAGLGMCALAAALVVHCYSKSPSNKDAALLEAARANNMQEVSRLLSEGADVNAKHRLGWTALMVAAINRNNSVVQVLLAAGADPNLGDDFSSVYKTAKEQGIHSLEDGGQDGASRHITNQWTSALEFRRWLGLPAGVLITREDDFNNRLNNRASFKGCTALHYAVLADDYRTVKELLDGGANPLQRNEMGHTPLDYAREGEVMKLLRTSEAKYQEKQRKREAEERRRFPLEQRLKEHIIGQESAIATVGAAIRRKENGWYDEEHPLVFLFLGSSGIGKTELAKQTAKYMHKDAKKGFIRLDMSEFQERHEVAKFIGSPPGYVGHEEGGQLTKKLKQCPNAVVLFDEVDKAHPDVLTIMLQLFDEGRLTDGKGKTIDCKDAIFIMTSNVASDEIAQHALQLRQEALEMSRNRIAENLGDVQISDKITISKNFKENVIRPILKAHFRRDEFLGRINEIVYFLPFCHSELIQLVNKELNFWAKRAKQRHNITLLWDREVADVLVDGYNVHYGARSIKHEVERRVVNQLAAAYEQDLLPGGCTLRITVEDSDKQLLKSPELPSPQAEKRLPKLRLEIIDKDSKTRRLDIRAPLHPEKVCNTIX

SEQ ID NO: 5431 - DNA, 969 bp, Rattus norvegicus
  ref <308>: DATABASE ACCESSION NUMBER: EMBL / AJ400847
  ref <309>: DATABASE ENTRY DATE: 2000-12-19
ctctggactcctgagcaccccagtgtccctagacagagcatccttgccttcctgatggctttgctgatctcgcttcctggagggactccagccatggctcaggtcctgcttctgctctcatcaggctgtctgcatgctggaaattcagaaagatacaacagaaaaaatggctttggggtcaaccaacctgaacgctgctctggagtccagggtggctccatcgacatccccttctccttctatttcccctggaagttggccaaggatccacagatgagcatagcctggaaatggaaggatttccatggggaagtcatctacaactcctccctgcctttcatacatgagcacttcaagggccggctcatcctgaactggacacagggtcagacatctggagtcctcagaatcctgaacttgaaggagtctgaccaagcccagtactttagtcgagttaatctgcagtcgacagaaggcatgaagttgtggcagtcaattcctggaacccaactcaacgtgacccaagcactcaacaccaccatgaggagccccttcatcgtcacctctgaattcaccacagctggcctggagcacacaagcgaccagaggaatccttcactgatgaacctgggagccatggtcacgatgctcctggctaaagttttggtcatagtcctagtctatggatggatgatcttcctgaggtggaagcaaaggccagcacactaaagcctaaaccccagcaagaatcagagctcatggctgcaggattgtgctgtgaaacatcaccattcttggatagacatagaagataacccccacttctgccagactctgatactctctgggttctgatattctctcctcagaagccaggtcatactgtgtgtctctgattctcaaagcctgactgtgctgttctctgtctgctcatggagttattaacactttcaataaatgtcttactcc

SEQ ID NO: 5432 - protein, 212 aa, Rattus norvegicus
  misc_feature (1)..(212): Xaa=Unknown amino acid
MAQVLLLLSSGCLHAGNSERYNRKNGFGVNQPERCSGVQGGSIDIPFSFYFPWKLAKDPQMSIAWKWKDFHGEVIYNSSLPFIHEHFKGRLILNWTQGQTSGVLRILNLKESDQAQYFSRVNLQSTEGMKLWQSIPGTQLNVTQALNTTMRSPFIVTSEFTTAGLEHTSDQRNPSLMNLGAMVTMLLAKVLVIVLVYGWMIFLRWKQRPAHX

SEQ ID NO: 5433 - DNA, 460 bp, Rattus norvegicus
  ref <308>: DATABASE ACCESSION NUMBER: EMBL / AA891499
  ref <309>: DATABASE ENTRY DATE: 2000-03-03
cagcggacagccccagctccttgcaacgggtggcaggagaagaggccgaggaggcagcggctgcggcggccgacgacagcaggaagcggcgggcagcggcggcacagtcctcggccgccagggccgcgtagcgcggctctaggtgctgcaagggggaggcggcgtaggccgtgtcccgcggcagcggcggcgacagcggcggctcctcctctgggccggcgggggcgggcccgccggggctgtgcacgatgaagcagagcatgcagggcccgcggaagaagcagtcccggttgcgggccgccgccgcgggctgtggggacgacttggtcggcgtccggcccggcagtcggatgagagggcgccggcggcgacaccagctgcagcaacgaggcttcttctggctcgcacggttccgaggctccttcgaaagaagtggcccataaagacggctttgggcccg

SEQ ID NO: 5434 - DNA, 31737 bp, Homo sapiens
  ref <308>: DATABASE ACCESSION NUMBER: EMBL / AC008462
  ref <309>: DATABASE ENTRY DATE: 2000-11-30
aagctttacctctaataacagaaacaagacatgatgcccatttatgccacttctacttaacatagtactgaaagttataaccagagaaattagaggggaaaaaaagaaaggaaagacatctaaattagaaaggaagagacaaaattatctctgttcacagatgacatgatattgtaaatagaagaccctaaaggttccacatacaaaagaactattataataaatgacttcagcaaagttgtagaataaaaaaaaaacataaaaaatcaggtgcatttctaaacacttataaggaacaatctgaaaaagaaattaagagaactattcaatttacagtagcatcaaaaggggtaaaattcttaggaataaacttaaaggaggcaaaagacttatacactgaaaattacaaaatatcactgaaagaaattaaagacacaaatagatggaaagaaatcccgttttaatgaattggaatacttaatattgttaaaatgtctatactactcattgcaatatacaggttcaatacaatccctatcaaaatctgaagggcattttttgcagaaaaagaaaaactcatcctaaaactcatatggaatctaaggaccacaaatagccaaaacaatcttgaaaaagaagaatccactgggagtcccacacttcctgattccaaaacttatcacaaagctacagtaatacaaaaagcgtagtgctggcaaaaagacagacatagaccaaatgaaacaatctagaaacaaattcttgcataaaaagtcaaattatttcctacaagggtgccggcactattcagtggggaaagggcagccttttcaacaaatggtgctgggaaactggatatctacatgcaaatgaatgaagttggacctttaccttgatccatatgttaaaaattacctaaaaatgaacggaagacctaaaacatatgaattaaaactataaaactcttagaaggaaaggtaggataaaagctttacaacgttgaatttggcaatatttctaagttttgacaccaaaagcacaggcaacaaaagtaaaaatgtatgttaaaatacataaaaattttaataatttctgtgcagtataggacacaacagaaagacaaggaaacctatggaatgggataaaatatttgcaaatcattatttgataaggagttaatatctgaaacatacacaaagaactcctacaactcaacaatgaaataacccaattttaaaatgagtaatgtattagaagagacatttatccaaagatacgtaaatggccaagaaaagcacatgaaaacatgcttagcgacatgaatcattagggagatgcaaatcaaaacaaagaaatataacctcacatccattaagatgtctactataaaaataaataaataaacaaacagaaaataacaagtgtcagcaaggatgtggagaaattagaatccttgggcactgttgggtgaaatgtaaaatggtgcgaccactatgtaaaacagtatggcagctcctaaaaatattaaaaatagaattatattaagatccagtaattttacttctggatatataccccaaagaactgaaagaagggtctcaaagacatttttgtatacctatgttcatagcgttacttataatagccaagaagtggaagcaacccaactgtctatcaatagatgaatggataaacaaaaggtggtgtgtatatgtatatatatgtgtgtgtgtgtgtgcatgcacatgtacacacatacacaatgtaatattactcagcctatagaaggaggaaaattctaacacatgctacaacatagatgaatcttgagggcattaagctaaatgaagtaagccagtcatgaaaaggcaatgctgtgtgattataatgaataatctgaaaaagaaattaaggtacctagaagaggtacctagaggaatcaaagtcagaaaggcagaaaataggtacctagaggagtcaaagtcacaaagacacaaagtagaatggtggttttcaggagctggaggaaaagcagtgtattgttgtttaatgggtataaagttcagttttgcaagataacgagagttttggagactggttacacaacactgtgaatgtactcaccgtcactaaactgaatacttaaaaatgggtaagatggtaaattttatgttatatatattttaccacaattatttttttatttaagagataaaaaaactgatagaaaggcacaaacttgccacgtaccgccatcaaattcagtcaaggaagaaaagagtgatcaaccaagaagtattatctttgtattcaaaactttaccaagtaagtagaatgcatgaattcttatctcaaggaggaaacaattctaagggcacaaaaatatagtatctgtgaaatattcagctaggtaagttgggcaaaaatttgatcttaagaataaatggaaaacttgaaaaataagtgggatttattttagcaagagaaaaagggatactttttcaggaaaaagtataaacaaaggtagaaactgtgaaaaataagaagaaagggaaaaagaaatattaacatagcaggtcccacctcaccatctataatagagcttaaatcagttcttaagcaggaaagcaatgttattgaaaaacagtaaataccctatttgtctggaattggatcataggtacacctagaagtcgtggcatctgacaagcctaaggagatgctattgcagttcagaaaaacataaaagcgttaggattagagtcagaagtagaaacagaaaagcaaggaatcaacctaaggaaacaagacagtaataatgacaggtgaaatacaggggatagaagtgaacaagacataagcaatagctaacattttctagcctacaaaaccaaaagactctactcattcaaaaattacttttgagcaactaccatgtgcccaacactcttctagacagaggacatagaaaggaacaaggaagataatctccccatttccactgagtttacactttaagggtggaacatgataaacaaacaataacagagaaaaacaactgatactatcagaagattttagacaagacccaaaagcccttaccattaataaattgagcttcatcaaagtaaaaaccttgctctcttcaaaagactctattaaaacgaaaagatacacacgtagaaaaagtaatcacaatgcatacatctgacacaagaacttatatcaaaaatatagaactcttataacatgtaagaagacaaccaattaaaaaaaaataggcagaagatttggctgggcgcagtggctcacatctgtaatcacagcactttgtgaggccgaggcaggcagataacctgaggcaagaagttcaagaccagcctggccaatatggtgaaaccctgtctctactaaaaataaaaattaaaaaaaaaatgagctgggcatggtggtgcacgcctgtaatcccagctactcaggaggctgaggcaggagaatcgcttaaactcgggaggtggaggttgtagtgagccaagaacctgacactgcactccagcctgggtgacagagcgacagagcaagactctgtctccaaaaaaaagcaaaagatttgaaaagacactttacaaaagaagagataggaaagcctaatacatatgttaaaaggtactcaatatcattagacacagggctaaccaaataaggtaccaccatacactcactgagagtcaaaaccacaataaggtaccactacacacccactcagaatggctaaaatttaaaaatctaaaaataacaccacctgttggtagcgacatagtagtccaaatggagttctcaaacattgctagcaggagtaaaaaatggcacaaccacctgcaaaactcataatttctcacaaagttcaagttaaacatacacttcccaaacaactcagccaactcattccttaaaatttattcaagagaaatgaaagcttttgtccattcaaagactggttcatgtatgttcacagcagctttatatgaaatacttaaaaactggaaacaactgaaatgtccattaacaggtaaatggatgagcacattgttttatgtccttacaatggaatgctattcagcaataaaaaagcaataaactatgatatacatacaatactcacctaggaattgttgtcaacaatctttgatccagaagtaaatccagacttagactaaggttgacataagagaaagctaagccaaaagtcaaaaagaactagctccctaaatgtactgtggagacaatgaattaactcaaccctaaagcctgaactacaccccagcacatttcagttataagccagtaaccttcttattgtttaagcaaactgacttgagttttctgcaataagaaaattacagattatatgatgtagttcatatttaatgatttcaatatttgccatttaatagtaagatgatttaactgcaaagaatgaagattcatggcaaagaaaatgatagacaccaagacaaaaaaaatgaatggactggaacacccactgtggatatgttactaggagtaaaaaatataaaagatgtaacaagtgtaggcagagttttgaaaacaacaagcaaacactaagattaaatatgactcttccagaaattcccaagatgaaaggctaactgaacctcaaatacataaagcaaccattggttactttttccccttgctaagctctcagtaagaacagcattcactaccaacaaagctctggcaataattccaggtttcctttggtcatgaagaagagagaagaaaaacggcagttgggaagttaacaagagggaggctaacatttgtgaacaactatttcccaagatgctttgttggacagttcacatacacagagttcatttaatcttctcaacaaaatagattatatcgtctccaatctatacatttaaaaaatcaagatccaaggagcttaaatgcttaagaaggaacctgcaatttgtaaaatggttaatattggtgttggaatctatatctgtctgacacaaaaactatcttcccacaaaccacttgatgaggataaacaccaagaagtttgtcactgtgtgtccctttgtctggcctggccttaaggaaagcattagttacttcccaaaagaaaaatatgctcactaatgatatgaccaagtatatagtattgaacattatttaaagtatcttaagcctgtttattcttatctctgactccaggtattaaactatttggtggtctcagagaatgacagcaggagacatgggcattatttaaaaaaaataaacaaaaacactaggaatggagatgaagagaagtatgtagaaagacgtgcctcttggtttcatcaaaattatcaacaagataacataaaaagggcaggagaatatgaaaatatattcttctgatagaaaaccatcaaaatttatggctattgtttgtgatgggaaaaaatgaaaagagccatagtacccatcaataatgaagtcttgtagaagagaaaatgcaatataatttttgaaaatagggacagatacacgcatgttggtatgtgtattaaaagttttctgaaaataatcaccagaggaattagcaggaggctttcagtttttattttctacttttctatactattagaattttataatatgcacttttttttatgagaacaaggattatttgggcctctttcttatatatctcaatatattgtaaaatcaacccaagtatatacttttaaattatgaatagctttcaatatttatcaagagttttgacaggtaactgactgaagagatactctaactaatcatttaacatgtgactaacacttttacatatacctgacttaatcctaaagtaataatgttattcttatgccataaatgagaaaaccacctcagagtcacttgctaagggtcactcaactaagagacagaggtaattatctatcctttgatcttcccaattcaagctccaaggtgcttttcattataccacaattgcctatgcaaacaagaaggtattttaaagttaaaatatacttatgtaagaacttctgtttatatttaggtatatcttgtctctttccaaaaagaaattgaggcagctctttctggaaataaaccctacaggagaaacacaagtagaaataaaaattaaggaaaaaggaaaaagaagcattttccaaaaagttattctataataaagatggaagtcctgaatactttgccttagatggactaccatttgtttcttggtttcttagatgtcaaagcaaagaggaaaaggacaactatacttctttaataaaattcacagcattatcttaataaaagaaaacaactgcttaaagtctagctttccctagtattaagaccagggggaatacttaactgcaggttctcgtaagggaggactcataggatacagtggacaatgtccttaacaataaataaacatcaactcaatagaataatgccaaaactcaattcactttatttaattcttcaagtactggtacctatgcattacccaagtactaccatagctcaatgaaataagtctttaacagcaaaatacctttataaaaaattatcagaacaagtcattgtaatgagtacaccacattatatactataaaatagcttctttaactttaatcttcaaaatatttcacttgaagatgaaataacttagaagttatcattagtaaaataagtattacataagtgacatccctttcaaattcttactcttaaaacacagtatacaatatatgagaggttaacagtccaggctcgggaacagtggctttgataccaggtgttactgtcttccccagcaagcacttagataggtaaatacaacataataggaaattactcctattagttaaaagttactataaaatcagtagaccagcatggcctatggaaaagggtctggaatcatactgcttcatatgtggttagtattcaataaatacttaatgcatgagagaacaataggctatggggttacaaaaaaataactgaaccatatagctaataaccatgaagtagccaaagactactttatggatccagaatcatactacctgtaacaacagaatcatgtatgccctagctttcaatatagttttctagggtataaaataatgtcacaccactatcaaatctgtttcttctcccaaataccataaagaaatgactgctatgaaccacgtgataacttttttccattaaattattcaaatgactgatctacatcgagaaaagccaatcagctataccattttatctttaaaaaattatttgatattgttttaaaaagtatgcaagggattactgtttaggtccttcatatgtttaaaacaacactgaataaacttcaatgcaattaattatgtgaaacttctcaaactacaacccaaaaccttctaggccaactgttttattaataattcataagcaatctcaccaagatatattttaaagaacacacacaaatcaacaaatatagatttcctagaacacttcgtaaagcaaagaagtatagtcgcaatataaagtaccaagggaacaaaaaaaactccccttctaataaactcacactatcaccttatattgttttatacatacacacatacacatcatcatcacaggtacacacacatcatcacacgtgcacacacatcatcacacatgcacacacatcattgcacgtgcacacacatacatatgcccacatgagctttccacttagatgacaatctcctaaagattgagactggtacaaacatgtattctatatcctgatgaaacctcgtctctactaaaaatacaaaaaaaattagctgggcatggtggcgggcacctgtagtcccagctactcaggaggctgaggcaggactgtcgcttgaacccaggaggcggaggctgcaatgagccgagactgcgccactgcactacagcctgggcgacagagcaagactccatctcaaaaaaaaatgtattctatatcctacaaccttataaatacaattgatcataacttgttcaaaaggaaaaaatctattgttgtcaatgttaaaaagtgctaatttgatctccaacaaaattttatcaattagttcactcaatatcaagaaatcattaaccattctaagtaccgactattcttagttacaaccaaccacatttccaaaggactgcattagtatgaaggcagatatgagcacacattttttattttacacagacttcatgttaaaaatggaaactggagaaaactccatctgtagtgaaagcaaatattctgtttggtttgatttcaccaaaactgtgtacgagataaatactaagctactgaccaattaactaagctgttacagaaaaagaaagactaatgtttcttacaaattggtagttttgaaatccaagtcttaaaatcaacatgaatatttaatgtggtttttccatttttctcctttaaagctgttattaaatcaatagcacttctagcaatcaaagaaatttagtgcaatcattttatccttatgaaaaattacaatggctgaacttattaatgacactacacattgataagtaaaacataaaagtcatttggtaagcaaaaaattcacttatttccattccaaactgggaaatggctagacattcctgaccaactacacccgtcacctaacagagtaactcttctaacccgtatatcaagtcacaggaattgctaaaattgcaacaaatcaaaactgaaaaaaaagacctcgttatccatatttatgaatataacttataaatgaaaaatgcaaattcaagggaccaacatatagataccacatattcaatctaaagatctgaaataatttgatgtgaaaatatagtagagaatatcttaaaagttagaatcgaatagtatcaaccagttcatcaaaatgacctccttagaaacttatttgattaaaaactagtaaaaactaaataatgtactgatcagacatatatacaaatgtaacaaaatggaaagaatgataaacataaaattcaggatagcagttacctttgaaggggagtcaagatgagagaagggaggaatgcataggtagatgaaagttattgataatattctaattaatagtatggatggagcgttcctgagtaaatgttcaaaagctttttgataaattaacttttataatgaaataagattatgcctggaccaattaccacagtatatcatgaaccaacgattgtaactagtaaaattctatgttgccaaggtccgttttgaaaaaaataatttatatttacttacagaaattcactttttataaatgcttcctcctaacattaatattaaaacatcaacaactccaatctttttaaacaaatattcagattaaaagaaggattataggaattacctgagaaaaccaaaacaaaaatcattcttctccctaaatcagagtaatactatcatattggtttcaagttactgtccgtcagaggtagttcaggacaaactttttgttttttgttgttgttgggtttttctgagacagagtctcgctctgtcaaccaggctggagtgcagcggcttgatctcagctcactgcaacctccacttcctgggttcaagcaatcttcctgcctcagcctcccaagtagctgggattatggttgtgcaccatcatgtccagctaattcttgtatttttagtagagatggagtttcgccatgtttgaccaggctagtttcgaactcctgacctcaagtgatccaccgcctcggcctcccaaagtgctgggattacaggcgtgagccaagtggccagggcaaacatgttaacaatgaaaagcaaaagcaaaagcaaaaaaaaaaaaaaaaaaaaaaaagagtctatagttaaagattatgaaatgaatctgtattaagatcttgtaattttcaaaaagcttcaaaaatagatataaaatcttatataagaagttctaagtcaaactaccttaaaatgaaagccgaagcaaaacatacaataatttataagcaaattttgcttaagtcaaaccagaaataccagtatatatatatatatatatatatacatattcaacatattattctgaaatttcccaagcataaaatatatttatagctaacagtagtctataagacaaatattaatgtgaagacaatgcaacataatatatattgttttatatttacatttccaaatatataaaggaagaagatgtaaggttacctgagagtatcaaaaccaaacatgagacttcatgcaaagatggacagacaaattactacgttaaaaaatcacttttaaaatgctaaagtgctaagattctttattcctctgactacaaaacaagtaatttcaaaaaaactcttacatccagagttttgaggacaaaatgactgttaactatttatgaacctgaataaaatgtggcagtatttaaaatatcaaaggttgagacactgaaatctagtagtggtcaaatctttgctcttaatgtaaagaaaaacaatataactgaaatttttagaaactgtcaattctcaatttatcaacacaggaagctaacaaaagacaaaaatatcatccttctggacttcagtcacatactctaaagatgaaagggcagggaaaaagaaccatacatacaaaaaccccaatgagattgtctctttaaattttctttcaattgacttgattagaaagggttatcttaaaagaaaacatagtaataagtatttatgtgcaaagagttaattcaaatttattcaaaattacttagtgaggtaacttcccaaattttaccatgaggagacctgctacgtgccaagctcagtactatgcactttatatccatcattatattttacaaatgatctaattgaagttacaattagaagcttgagaaatgtagagtttgatgacttgtaaagcctgacctacagtgctattggaaattgcttattagtagcatttccaaatatatagtgataacaaagtcagaatgagtacattttaatattttattcaacagaatttctaggtaattaaggttaaaaaataaataaacacctaaattgcccaagaactaggaaatgaaaatctctgtgctccagttaagcttccactctgacttctaattcactgtacatcaaagaaaatcaacttgccctgacacataaggactattcccttcagtgatcaggcaggtgttgaggccagaaagagagcctattttccacagccctttaccttgtttgatcactggttacttttgatctgacactgccctctgtctagtaatgacttccccctcatagaccctacctcacatctgtcagaaagaataaagggcatcaaactgagacctgacaacgcctatgggccatgcgatgtgctgccaacagaatgttccccagctcccacaattttcaattcagtttcttttgttctggtaggtagagggttagggtaccaatgacagcagaaaggattatgaccaactgtgaaaccaagccttcttgaatgtgtatcttttattttcgcttcttcatcttcttaaatgctgcaaacttcatggtggttactataaaatacatattcaacaagtgcaatagaaagtttgtttaaaatccttttccaggagaaaacaaaggacacaatacattgtaattcaactataaagctttaaggaaaaaatttcaaacccatggtgtgagattagtaaaggcccgctgtcaaagagcacgttaatagtaaatgaaaccaccgaagtcttacgcggaccacgacttagtgggtactgccattcactgtctgaaaatggaaaagtcccctaaaacaacgtacatatttacaagaagtaatcatttcaattgttaaattacaaattctacactattggtgtgagaataaggtaaaatcaaaaataaattccactagtcttgtttaaataatgtggtgaatatatacaacctttttcttaaggcattgatagtactagtttttagatgttagaaattagaaaaatcagatcaaatattttggtatcattttactcataatttttcaactatcattaaaacattttgagttcttgaatataaatattttcactctcccactcccccacccccccccaacacacaacaatatatggctcattatcaggcatgcaataaggagatttgccaaaaagcaggcttagaggatagtatgacttttaaggttaagacagtatctttaaaaaaaaaaaatacgttttttttttaaattttgaaaagtaggaccagaagaggaaactgcatgattataagttacaagcaaatttaatgtaaatatagcattataatgcatacaaacaaataaccttagacatgtactaatatagaagctcagagatggagggtaagcactaaggtgattacaagttgactccaataactggaagttcatttctacaacagctgagaaaggtatgccttaacagaaagggggaaggtacccatgtctaaagaattaacctgtgacactaggcaaatgcacacactagactgaaaatgatttaccactattgaagatcagatgtgaaattcctcctattattatactgatcagcaattagcataattatattcttaaaaaaaccctgtttttgactgtaatctaaaaacatgataacataaagtatattagaaaaatgtgattgttttaaatatattttaatgtatgaaaaaagattattcttatatacttggactaactttatagcagaaagccatatgggtatactagaaaaagatattacttctagaggggaaaaaaaaacacaatttaatccaaggataaacaatagtttggcagaaccaacacttgtccaattttttcccctctcaaattgtccaaatgtcacttaatcctccaagaaaatgaaaaaacaaactgcattactgtaacaaaatatctatccttattcttggacattcttttcccatttttgattctacaaaattgttagaacatattaaagaaaaaaatatacgggaagaatttatgaaactagaaactaaaaactaaaaattttatatagagtattttttaaaaaacacttgccagtgtaacctctgcgtggtatattactctcaaagcatgcaatgccggtgttctgaactaaatttaatgccagatctgcctgatgcattttattggtaccaagaagcaaatatttatcaaatattatatttaatatctacctctaattgcaacaataaagtcaagctcttctgaacaaactcaaccacagaagcaactagttaactttcatcttttcaagaatcaagtagttaaagtatgacaaaagaaaagagactacacttcttagcagtcctgagagattgcctgaaacagaaggatgaaatactgaaacaaaccaaatatcttcaatgagatgtacaaccatgtgaatgaaaatatataacaggtaatctgtaataaaatatataagtaatttgtaataaaataataaaaataactcagtaaataaaaatgtttaaagacattaagtttcaaaatccacttttaagaaatcattttctaaaatctacctaattcttaaaaagaacacacttatttgggactttacttcttcaaactatcattgccattcttcttgtatgaatgttaatgaaaaatcacttgatattgctatagaataaagtatatttcaccaattcagtaaataaaaattgaattttacgtcctaaaagctatacttttatgtacatattaaagtataaatggttatgtttaaagttactgacttgtctcatttaaaatgtgattttaagagaaactctttcttccttatctcaaagagaatttttggccaggcaaggtggctcacgcctcccagaactctgggaggccgaggcaggtggatcacaaggtcaagagatcgagaccatcctggccaacatggtgaaaccctgtctctactaaaaatacaaaaattagctgggcgtggtggtgcacgcctgtagtcccagctacttgggaggctgaggcaggacaattgcttgaacctgggaggcaaaggttgccatgagccaagatcgtgccactgcactccagcctgggtgacagagtgagactccatctcaaaaaaaaaaaaaaaagaattttcccagaactaaagcaaaaggacttaagtatatcaatggttcatcttcactggcagttcctttcagaaaatttacaattcatacactgaaaaaaattttatttttaagaagttctaacaactatccatttaatcaaaacactgaagaatatacaggtttctttaacgtgtatgcaaacgatctcattcttattccaaggagttacactgggagacattaccgaactaaaactctcaaacctacaacaaattatcaatggattagtaagaactaactaaatacaggaagctgacagaatacaggaaagtaaaaaatgtgaggtaattctcaaagagtatttgcgaaaaataatattcagctgagcttgaaggtagtaatgaacacattctggaagaaagaagaagagtgataaaaggacaagtacaaaaagtaaaaaaaaaaaaaaagtaataagacagagactagtaactgaagaaatctttgaaatgagccactacatatttcttaaatgataaaaatagtattttggaaagagcactcctggactgtagatatgaccaacaaaagtcaacctttagaaacatcttagtttatgagtgaattcagaggaatatatacaatgtatctttaacctttcacacttttttccattaaattcttcgcacaaaaaagcttaaaacaatgaaaaactatagaatgtatactagatctgatgaaactgcctacaattatatatgataaacagagatttatcagtatattaatagaatgagtatatgtgtatatattagtgtcctgcaacaatttaaaatgtatgaaatagcaagctacaaaattatcttcaaatacttagaataaatattaacctactaaaaagatatagaagttttatcatgttctcagaggagttacaatgaaaagctagaacatgatgcaaataattttataacctctcggcgttcacttggacatttaaacagtaatgaatataaatatatgccttcttctttatattctcaaagatatacagtaaaaatgaaaataaaagaaaatcacccaactatagttcagtaagaaggactcggatttacaaccacttttctttgtattacagagtctcaatatatttatttatatgttttattaaagtgaatgataaccatctagattttatgctccaatcaaaaatagccaataaagatctggtaacagacactacaaattttttatccccaaactctcctgaagtaacttgagtacttctaccatcatactttagaaaccaaaaataatgaaatatggcagccactaaagaaaaatactatactgatatagtctgcaacctagatgtggctacaactaagatgcaagagaagaagggttgggaaaaaaaagtatcgaaacagtatggacttatctggcttttaaatttcttggctattaaaatctggatgatatagtcaacaacaacaacaacaaaaagaatccaccccaaaactcacatgatgaatacatccttctactgcctgtcaggtaactttatgttcaaacctttgtaaataatttaaagaaagacagcaaaagaagacaacctacctaatatgagtaagcaaaatctgcagcactaataggaacagtactcagcacacaggtttagataggaacatcacctgtatatctttgcctgaagacagggttacctgacaaaggcccaagtgccataggacatttacaataatgtatctttgtgataatgactacaataaaatgatggaaaaagtgcatcctattacccagaagccagattcaactacagtttgtaaactatatttagaaaggcaaatctttatttaaaaaagaaagaaagaaaaaaagctaattctccaattctccttcctttaagtttagtcactgaaataactgggaataagtcttggatatcctaaaaccctagaacctcattactgtggataaaaacataagccaaaacttcttcctagatccaaataatacatttcacttgttgactggctagaaaggtagttcaggaaaatatcctcatagatgacaggcttaatgtactactagcatgccactgccatctaaccttataaaatttctatttgctaagcctaatgactcaagtctttatctcaacccactatctcccgttgccaacacttgagcacaaagcccaagactgcacttccacacttgtatcttagagataatttgttttgcttcaaatatctgattttaacaggtagtcaaaaaagaaagcaaataaaaattagatttttattaaaaaaaaaaaaggacttaaactacagactatgtatgtggggaaaaaagcactagccaaggaattacactaaaaataatctactaaccataaattttaaatccaaaagaagcattctaaaatttgatccagaaaaaaatatatttttaaagaatacttaaatactatttggaatttcctatttttaaccataacaaattctgcattatccacactgggatatccttatcggagtttttaatactaagctagcttcctcctgagatcccgtttgcatttggccatctcctatcatcagctgatgaatccccagagttagtgaactaattttaatattgctaaactaatataattaagcaggtaaatctgctgggtaaaaaataatgcattccaaagaaaaattgtctggatatcatccaagacactgcctgtcttccatacgacactggcacacagggaaagaaaaaatacacattcattctttattgctttcaatgccttcaaatgatagaatataatccacttatgttcctgccaagctatgtgattaaaaaaaaaaaaaaccttaagagaaagataccaatagactaaaaagagaataagaggatacgatctagcaaagaatttagaatgagtaaaaatgtatttattcttcagattgaaattatactgtcaaaaaaacgtgttttaggccaggcatggtggctgatgcctacaatcccagcaattcgggaggccaaggcaggagaatcgcttgagcccgggagttcgagaccagcctgggcaatatagtgagaccctgtctctactttaaaaaaaaaaaaaaaaaactcgttttaaattaaattggatctttcaaataccacttaaacaaaataaaaccgattttattaacagtaagaatgtacaagtcaacataattctgacaagaattacattctagttgatcagaactgcatgttgttaatgacaattatgccaaaaaataccccttgagtacattagtgactttggctggataaatttgatacataaagaatggcatcattaatgtgctaactaggtcaaaacaatttacttactttaaaagtgaaaaaacatttgactctttaagctattttaagcttttatttaataaaatatgtcaccaaaatatttgaagtgatacattttttaaagcatgcacaatgcagtagtaacccatctgtccctaacccaacatttattgaatgtctattatattccaacactaggagggatgaataaaaagatgagcacatattcctggccctcaaaagagttgacactccatcagcaagatacatctctaaaacatgatttcaattaccagtagagagtgatttgacatgatatagaaaaatttgaaaatgtacatatcttagtaccatattgtatatacttctcatatatgccgtagagaactcttgaagatgagcacaagagatttatacaataattttattgcaatactgcctctgatagtaaaacagtagaagcaatgtaagtgtccttcaataggaaatgaataacccagagatttatacatataatagaatactaacaatgaaaaagaatgaattatacccattatggctagatctcaaaaataaaagtaaacatgcaaattgtagactcatatatactttgtgagaccagatatttaaccatatgtcactagatataaattacatgtgaccacaaactaaataataccacatcatgggtatccacatacatattaaaatattttttaaagcattttagatcatcatagcagttgctctggaagggaacaatgggacaacagtacgaatgtaagacaacagagacttgaagtttatttgctttattaattcaagcagcagcagcaaatttaataaaatgttaacaactgtcaatttatgggtgacaggcatacagctgttattactcctttttgtattctatatttttcttaatttctcaaaatagataaataaaacaagaattaaaatctgatcacatttcacacttgctaaaatctcatgctatagttcttattacctagagactttcaaatttcacagcatgacactgaaaaaaatttaacaacctggtcctttctttcttttccagaccaaatatgaatacttccctactacctagcctatcaacctagtggcactgtaacactcaccacttattaagcattccccatatttttctgatgttttatctttgttaacgctcttttccattagtgcaattaccttaccctaaaatatgtctgcttgcatattcatcacatcactacatgtaattcaaaacttagttcaaatgtcacttactatttataggattttcagattcctttcttatccctcacataagaataactatttttgcaattggtgtttctatagcactatcatgagaccaggatcttctctctttggcagtataactcttgtttaattcttcgacacctctcacagtgcctggcacatagtaactgttcaaatgttaatggaactgaatgaacatctgaaacaagtgttaaggaacagagtacagagttatcagttcatgaattcattaaaattgccattaaatcttctggacaaaaatcaaatggtactagcttctgaatcaaaatatcacaaaaatgtaaaacactatgtctgtaatacagagaaattttgtataaaatactgcaattctattattaattatattcatattcaaataggattaagattaacactaaatactagctttcctctttgataatttcaggaattttcctagaaaaatttttaaatacacttctgctggtacttgcagcttctcctgaaatcaattatcatcctaaaaaatgattttctactcatgctaataattaacttcttcctttgatgtctcacagcactggtccataagtgttttcaagggagataatgtcttttggaagttgctacttggttcaaacgtgtgtggattagcattacaggtaatgtatccatgcaatccaaagggctagagaagagaagtttgggaatcttaacagatctgggttagaattttgactttgacacccacctgttgttaacttctttatgcctcaattacctcactggtaaaattggataaaaatagctacctcatgtggtagttatgaggattaattatataaaacagcatagtacctggtatattaaaaatactcaataaaagataacttgtatcaaacattttctattaccagcaaatgatagcaaaatcctgagatgtagttgctatggtctaaaggtttgtgtacccccaaaacccatatgttgaaatcctaacctccaagatgatagtattaggaagtgggatctttggggagtgattaaatcatgagggcagagccctaatatatgggattagtacctttataaaatagaacacagggagcttgtttgcctttctaccatgtgaggatacagggagaaggtgtctataaactagaaagcaagccctcaccaaacaccaaacctgccagtgccttaatcttggacttgtcagcctccagatctgtgacaaacacatgtctgttgtttgtaagttatccagtttatagtattttggtacagcaacccaagtggacaaagacaacaataagatgatgttcaatatctttagatcacctctttagaatgccacattcaaatattactgttcactggaaactaccattctgggtttaagtaaatgccccatccattaagaggggaaagaacactgaaggcgagtatatactctggatgatttgggaggctcaagtgagtacttaaccctttgtacaaaatccctcaaaaatgtaaattatttatgtctggtattacaattaaactcacttcacaaggagtatttgagaaataagacatcaagattataggaggggaactaagggtgcggacaaccaatctccttaatatattaactcatatataaacccattaatttattaactctatggtgaacagtaagagtcaggaaatggaagctttcacataatgctgaattaactactgctatttaaactgtgacacaaatgtttatcttatatactactctagttgattatcaacatggctaccaattttttcacctaactgctacaacagcctcaaatcacagcaaagagaaaaaaaaattaaactgtcagtggctaacaggtaaaaacagactaggtgatattagacattgatacagcccaattcaaattagtaaactgcagaaagcaaataataggcttcactatcctctcctgataggagaggaaaaaaacctttattgaagctttcttgtgttttgtggcaatgaaactcatttggcgctttacctcttaatctcatttagtctgatcctcaatagaacatgtatgaagtagtattgtatcctttctgcaaggaaggaaaacaaagtgcaaaaattaagataactaaagcaagtcacatgagtaagaaacagcaggatcaaggttttaactgagttcagtgcaactcaaaaatggcgtttgcctccatctccccttaaaatgctttcagcctagggggtcgggggggaaagcctggagaggtgaatttgatcctacatcattcatgtaagcctccaaaggatgaaatttaaaacaagattgttacagcagcagtcaaaggactctaagagaagtcacagaattataaaactagtaaaatatcaactaagagactgaaaagtaaacagtcacaattaactttcaggaaatcaactttccatttccctataatcatttccctataactttctgaaatctattcatagtattactattttcttgagaattgagtaatctataatagtttacagcctaattattcagagtagaaaatgtaaaaaataggccaaacacacacataacgcatacagatctacatcaaaaatactctgacatagggcatagcacagaagctatttttagaataactcataaaattccagtagtttaaaacactggcctatataacaaatggcaggtaatctatccgacctcatcgttttacaatggaataaaaagccacccaaagaggttctctgtccaaaaagtagagaagcagaatctggtacagggaaattaaagaagcacaggaaatatacttaactgaggtttctagataatgactatatgctcaaactaaatatgacttaaaaatagctttgtggcatgcactatacaaaagtgatataaaacctatcactagaagaaacagacacatacaatatgctagaccctcactacagctatactcctcaaatctatgtgtatagtcgacacaagagttttacagcaaatgcaaactatacctatgtaggtacatgacacctgtctcactcaaaaataactgaaacagaactcaaagaattctcttttgggaaaattctacatctaaggccgggcacggtggctcacacctgtaatcccagcactttgggaggccgaggtgggcggatcatgaggtcaggagttcgagaccagcctgaccaacatggtgaaacgccatctctactaaaaatacaaaaaaaaattagctgggcatggtggcttgcacctgtaatcctagctactcaggaggctgaggcaggagaattgcttgaacctgggaagaggaagttgcagtgagctgagattgtgccattgcactccagcctgggttacagagcaaaactccatctcaaaaagaaaaaaaaaagaaaaaaaaattgtacatctaagtcctcagttctctgcttcaccataactcatttatggcaaatcattgtcctcactttccacatgaataaaacttctccctcataaacacaggaatccttccccttttctaaagtttatcttacttaaactagtgccacaaataaaaatgttctactatcttactactttgtgtaaaatggtaagttcatcctgtggcattctagatacaattattttaaataacttaagaagaaattttcccattaaggtcacataaagaacaaaaatgtaaaataaaccacaacatcagcagaaaccatcagcagaaacttatagaggcattacatccttatagttacatcaaggacataaaagctatgtcacagaaatatacaaagacaatgctgccatctaaaggccaagatataatatgaaaagatgtatgtatactcaaatactaccaaaatagcttgatattttaagtcagcaaagtttatatgaaaactatgctatgattatttttagactctgcaattaagctataatactctttttgagaatattcagtttattaagagaattagcaaaataatttgactgattatcagtatttgtcaaagcatagttgaaattcttttggcattctttctgacagtgttctctgtacgtacctgtattagttgctaacttaaaatatttgttgttacattactaagaataggtgtcaaagtaaaaacatcctaattacttaaagctatggcttcgcaagtatttaaatatttctctttatttcataaattttaaaaatacaaacttcctataggaggttagttatcaatatctcaattatccaataaagagttcaaattattctaaatttccttttgtaataaacttaaatgggaagaactgtagtgaattagcctttaagacttagcaaaattacctcaaatttccaatgaaatgaaaatgttaaataaaaaaaaatacaaaactgatgcccttagcatttacgtatataacatatttttaatgtaccaaaatactagaaaaaaactaatgtgaacataacaaaaaccttaaaaacataaacagttgctttctttgggaaaccattggctaaaaattgtttgattgccaataaaactatttctttatgtttactcaacaagaaaaataaaagtcaacaaatatcctactgcttgagaaacagaaaacttctaaattgagatcaccatcctttaatttaccttggatgtaaagtgaaaaccaaaagttaggtaacaaatacagttgtgatgccataaaaactactatgttttacatatctcctgtaagtcagacttcgtactagacaacttaaagatacagtgtcatttaatcgtcaaaactataactagcaaatagacagatatcaataacttcatttacaaatgaggtgtaaagaactcaagtaactttcccagggtcactatgcaagtgagtggataccaatattcaaaaattcagtctaacacagacctaacttctctttacaaaatcctactgtctcaagaatgactattacataaaaattattaaatgttatgaactccaaggggcaataaaaagatctcttcatttttgaaatacaactaaaaaagcaagtcttctttgtagtatactacacattcaggactaccctgacaacattttcaaatacagacatgcattgcttaatgacaggaaaatgttatgagaaatgtgtcattaggtaattttgtcattgtgtgaacatcacagaatgtacttacacaaacctagagcatacagaaagccctgggccatatggtatagcttttattgcccctaagctgcaaagctgaacagcatgtcactgtaatgaatactgcaggcaactgtaatacaatggtatttctgtatctaaacatagaaaaggcaaaaatacagtataataatcttacaggaccactactgtatatgctatccactgttaacccaaacattgttatatggcccatgactgtatgtacgctatttttcaattttaagaactcctactggtgcatcctagtgacaactttttcttttaactgatatgatgtacctatcatataaaaacataaatgctttggaatattattcagccataaaacataataaagctctgatacatgataaacacgaatgagccttgaaaacatcatgctgagacaccagaaacaagaccacgtatcacgtgattccatttatacaaaatatctagactaggaaaacccatagagatagaaagtagattagcagttgccagggactagaagaagggtaaaatggggagggatagctaatgggcacaggatttttttaggggtaatgaaaatattcaaaaattagacattggtaatgactgcacaacatggtaaatatactaaaaaccgatgagttgtacactttaaaagggtgaaatgtattttatgtgaattatctctcaaaaaaaattgtaagatttttaagcacaatatattaaatgtgtctgcattacccatgtatgtgcttaaaatataaaatctatgtaattgccctattatatgctctaacttattgaatcccattttttatgatactaagtaaaagactctattttacaagagtacatttttctggacaataaaaaaaattctaactgtctagaattattataatccctagagatatcagaaagaactacacaaccacagacttatgtttggcaaacaaatttgatttttccaatttaccagtattagttcactgtccacatttagaaaagatgcattggcacatgctaatgagggatttttaacatgcaagtaccacacacaaacaccatctattcagttaaaagatcaatttataaaatcatcactttaaaaggatttttgcttttgattaagtagtatttgaaccatcacaagaaaataagcagaaaaaattataaataaacttgaaagaattcgaaggttaggaacaaaatgaacaatacaaggatgataacaagtacttactaatttgttttcctgcatgtatatcctttgtaatttcagacagcccttagctatgacgatcatgccttcatctgagatcttgtaacactggccgaaatgaatatctttgagttctctgcattttgagcccagctgtaaacaaacagatttagctgaatgctcaaaaaataacaaaggcaacatatttcaagtgagattttcatataattttttgaaaataaccacgtcagagttaaatatttatgttacttgtaaaataagatagaatgtaagcaatccataacttaaaacagtactgtataaacatttttaaccttctaatttacccccgtttcaaccaactcacattacaagccctccaaggtatgtatattccttaacagttcaaaattacatatctattactccagtatatatatttttaaagacagggtctcactgtgtcgcccaggctagagtgcagtggctcaatcatggctcactgcagcctcaacctcctgggctaaagagatcctcttacctcagcctcctgagtagctgggagtacaggtgtgtgccaccacacctggctactttttaaattttgttgtagagctagggtctcgctatgttacccagactagtctcaaactcctggcctcgagcaatcctcccacctcagcctcccaaagtcctgggattacaggtgtgagccactgcacccagcctctcttgagtcttaatagtgaggaaaaaaatataatgcttaaaggaataaattatggtgtattcataaaactgaatattatacaaccactacaattggaagaaacatttgacaaaaatgtatgtaagtttttatagtataatccaattttataaagaaattatgcatatttaaatacatacatgtgtatttgtgcacagaaaagggactgaaatacataccaaggtgttcacagtggttaattctgattagcgcatgagtgagtttttattcccttctgcctatgaatcttctctaatttttttaataaacattgcttttgtaagaaaaaaaaacttccaagttctgtctcaagtaatgacatcagaaatatatgtgagttcagttacttttccaggggtggtgatagatataaactatattattataatctaggctgcactacaaccaataacatattcctacagaaatgtaaactccatgaagacagcagtttgtctattttgttaaataaggtaactctggtgcccgatatcttacacttagttgatacttaataaatatttgttaaataaatgaaaaggctgatcaggattatgcactataaagcagctctcattttaaatgcgcaaatacaagaaaccatgattttggcctcatatactactaaattccagttaattcagtggttctaactggcccatggagagaattcaggggttccaggaaagcagattttttaaaagtgcatgttcattttttatgttatcctccaaatgaactttagcctttccttaccatatgaaaaacagcacagtagcttagcaatacctaagactttgtaagcaatagaaatcaaagattatttcatatatcactgttgcagataccttgaaatatttttcattagtagtcatcatgctcattagctatcagatttttattgaattcattaaaagaggcatatatatttctataacaaatgttgaggaaactaaatccaaagccaacagtgggaaaagcaaagaagtctattgaagaactctcaacaggctcacatatatgtctggcagtgaggctgaggttggggctaaaaatactagaattcttgaaagtctgtttaaaaattagttaaatcctcagatcacctccccattactgcacagcctgaccttgccctttttcctacaatggcaaaaaaatgtatttctctggggagagcaaaacgtagggtttttggactggggtataccacagatagctgagaaccaaagcacaatgctgaaaatatggggatttgtgaacgtttatacagtgaaaacggaggaattcaaagaaacatttctatcccattttccagaatgaaaggatatcaacttccagactgaaaaggcttatccacttgtccagcataaatgacaaaaatagacacatggcaatgcaaatcatcaaaaagtttcagaaacaggagtttaaagagattctacagacttagataaacttcatagaaaggattaggatgaaaatgcatcaaacttcttaacaaaactaaaagaaagcaacagtccaatgccatcaaattctgaagataaattatttctaacccagaattctgtactcgggattcagattatgaattaagtgtgaaagcagaattagagatgttttcagacatacaagttatcaaaagatttacctcccatatacactttatcaggaaggtactggaatctgtgctctataaaacacgagaatacaccaagggaaagaaaacatgacatctgggtaacagaagatctaacccaacagcaagagaaagaaaatcttaaggataacggtcgtaagatactaaggtgaccactaatgccatcacacttgtatatgagaagtccagactagactatcccaggcaaatctgctgtagggcagtaaatgtaattaagtattcacatatagacatactaatgcaactggaggaaagctttggtcttcattagtgttaagagtataaaaactaggtaaagaaataaaaagacatttattaattccaatgaaaacaaaatgctttagagaaaaaagataggtacataattatagaatgtaaatactgaatacttatttaacaaaaattataatagaattatgttggaaggatgagaggataagacacagggaaggaagtataagtgagctaaatccttatctttgatacaaggaatcagcaataaacagtcaaaagtgggtaagttttttaaaaaatacaaacaaacatgccaggggaaaatgttttctcattctgtaggaagcccaactagtctgattcccggtctctccactgattattctgtatttaataaactggatattttcagctcatatgtatacttcttccccttgtgaataaactgcatacagggagcaagcaatctttatttctctatttggggccactctgctggtcagcctagtcaatgactagtcagttagccaaactccagagtcaggttaacaatcccatttagcattgtttgtaagcaaccttctccaccttagattttctgagtgctaaagctgacatcttgctccttcatcactatttcttcgtcatacttatcaatttgataacatcctgagcagtgaataggaggccccatgagacctcaacagttagtacacaagctagaaaaacggagaaataaaagaagagaatctacatatcaacagaaggaataagtgtggtttttggtgaagtcttagacatcaatgtgcatggacaagttggtagaacctcaggttaagacacgtaaatcacagcgccgcaggctgggaaaataatttaaactgactacatggtgttttgacattgaaaagtagctttggtggctttatctataaagaaatgacttttcatacaggccacgtggataaccacacaaagatgagaaccatgtggatggcatatgcagaaattaccagcatgtgaggtaaagtcagatgtggggaacagtgcctcacaggagaagctattatgatttactactactgagtaaaaccatcatttaatctcactgcagaaactgatattctgttttagacatcactggatataaccggcaagaccagacccaaatcagtgcctatctgcactactcaccattacgccatccacaaatgtcctaagttccagactatccaagcactgtaaagtcaatcattataactgatatatttacaatttggctgacagtctttaaatttctcaatgttgtattcatctatgacccacagaaaaacattcagagggcatcaaccaaatcttacaaaatcatcaccattaggatgccttaaatctagcacaattagtactctatctaaaaaccatagaaatagaatacaattcttttttgttgttgttttgttttttgagacggagtttcgctctttcgcccaggctggagtgcagtggtgtgatctcggctcactgcaaactccaccttctggtttcaagcgattctcctgcctcagcctcccgagtagctgggactacaggcacccgccatgactcccagctaatttttgtatttttagtagacacggagtttcactatgttggccaggctggtctcgaactcctgacctcatgatccgcccgcctcagcctcccaaagtgctgggattacaggcgtgagccactgcgcctggacgaatataattcttctaaataaaaaattatctgtccaggaagacagtgctagagacactggagctctactctgtcaaaagggagaaatcctgtgaagtgccctggcatccagctgagacaccaaaaagatggtaccttgggagcaagaactatgccctagaataaggcctattctagatgatccaagttagagggatttgggaaacaccttgggctttccacataataaagcataaaactgaacacaaacaagacaaggatgatcattcagtaactgtaatgcttgctttaaaagaaaagatttctggttttcagtctggcatgtaaggagtttagaagttgccaatctgttctaaaaaataaaaagctgatcacactgaaaaattaacaattctttttagatccatcagagaaatgaagacacagaccaaaccactgccacaaaactgcagagacagacagatgcagagaagcacaactcaccagaagagaaactactaccagaaacctcagcgggaaccagggctagagtaggaaaacctgaactctgcatttgacaaaatactggaggcacagcgtggataagtctgataattaaaaattccagggggaccaggttataagacaacactcatgcttttgtgagttttatctacaggagctctaccaggtcttcacggagaatactggagagaaatcacctcatgcatacagcaatgagaggagaaaagtaaccattttgaaatatgccagagcattctattatttttaacaaggcctgtcctcaggaggaactgttttaccagagcctaacctgtgggagttttgtcagagcctaaccttcctaggggaagggaaatattgaactccagccagttctagccttccatgtaaggaaagggatataccaaactccagccctctctagccatcccagcccacctaagggtaaggggaaaaaaagaagcactggtaaaggtagcccagtggcacagacttgccaaaatattaaaacctaatcctaaaactatagatcattcctcctctccccacacctaaccactacattactaaaggcccatttatgaaagttgcatttcccagtataggttgcgtatcccttatccaaaatgtttgggaccagaagcgttttaattgttggatttttttcagatttttgaatatttgcattacatttatcagttgagcatgcttaatctgaaaatccaaaatccaaaatgttctaatgcataattcctttgagtatcctgtcagcactcaaaaagtttccaatcttggaacatactggattttggaactttgaattagggacattcaacctgtgcatcgtgtccacctttcaatgaaaaattaaaaggcataccaacaaggaaaagacaatttcaggagactgaaaaaagcatcagaaccacagtcagatacagcaggaatgttggaattaccaggccggaaattttttaaaactacaattaatatgttaagagctttaatgggaaaagtaggcaacacgcaagcaccaataggcactataaaaagatacattagtagatgggacatggttaaggaaaaagtctgagtttgagaatataatagaaagttccaaaactgaaaatcaggagaaaaaagactgaaaaaaaatgaacagaatatctaagaaccacagaacaactacaaaaggtataacataagtgaaaagtgaataccaagaaaagagagagagacaggaacagagaaacatttgaagcactcctgactaataatttacccaaattaagatcagataccaaactacagacccaagaagttcagagaataccatgaaggaaaactgcaaacaaacaaacaaagaaaaaactacacctaggcatatcattttcaaactgcaaaaaatcaaaggttaaaaaaaaaaagaaaaaaaaa

SEQ ID NO: 5435 - DNA, 446 bp, Rattus norvegicus
  ref <308>: DATABASE ACCESSION NUMBER: EMBL / AA891521
  ref <309>: DATABASE ENTRY DATE: 2000-03-03
agcgttaagtacactaagggtcaatgatttaataaatgtctacacaatattccatacaacagtagcaaaacacacattcttttaatcaacacacaaaacactatttttcaaaacattttaagccattactacaaggtttacaaatctgaaaaacgagaaaggaagaaaagggaagaaaaaaattataggccaatataatctttgataatacttgatcatctttgaaactaattaggtgaataaatccttaataaggtacttgcaaattgaactcagaaatatatgttaaaacatcatcataattgtcagtttcatctcagggatgctaggatagatctatatttgtaaaccaatatttaattcagtattaaatagaattaagacaaaaatatcatcatctagatcaatgcaaaggaaacctatgaaatgaaattataacatttggg

SEQ ID NO: 5436 - DNA, 1595 bp, Homo sapiens
  ref <308>: DATABASE ACCESSION NUMBER: EMBL / AY027526
  ref <309>: DATABASE ENTRY DATE: 2001-03-17
gggaagtggaaggctaccctcatctttcactaatggcagactaggacaagcattacccaggcctgcaagcttgttaaggactaggaacccaagcaagaactcaccatgccaatcaaacctgttgggtggatatgtgggcaggtgttgaagaacttttctggaagaatcgaggggatccagaaagcaatcatggaccttgtagatgagtttaaagatgaatttcccaccatcctaagattatcacagtctaatcagaaaagagaacctgcgcagaaaacatccaaaatcaggatggctattgctttagctaagattaatcgagcaacattaattcgtggattaaacagcatatccagatcctccaaatcagtggccaaacttctgcatcctcagcttacatgcagacttttagagctaagggacatatctggtcgtctgctgagggaagttaatgcgccgaggcaacccctatataacattcaggtcagaaagggttctttgtttgaaatcatctcctttccagcaaagactgctttaactagcataatatatgcttcatatgcagcactaatttatttggcagtctgtgttaatgctgtgctgaagaaggtaaagaacatcttccaggaagaagaatccataaggcaaaacagagaggagagtgaaaattgtagaaaagccttttctgagcctgtgctttcggagcctatgtttgctgaaggtgaaatcaaagcaaaaccttataggtcattgccggagaagccagacatttcagattaccccaagcttcttgctaataagcagagtaataacatccaagttttacattctgtgtttgaccaatcagctgaaatgaatgagcaaatctgaatacaggcattcaaagaacattggctcactgaataggagactttacatctctcatggctgggcagcagctgtgtctggcttccttacttcaagatctgccttgatcacagatcacttaacagtggttaagtttcttattttcaagttcagcaggggcaaactatacacggtcgtccatcaaaatcctggggaagagaataactcatttaatattctgacatgtcaaatgttcttgatagactctgaagagtctgctgcagaagaaccaggttaaaaaaacagtaggtctaaggggttggggtgacaagattctgcatgtctaagaagctcccatgtgacaccaaagttgctggtctatggacaacagtttgaggagcaaggtcttcaagctctcattatggactgaaactggagaaaattctatggaactattatcagctcacacatataaaaactggtcactgagatgacagctgagctgaaatgcccaaaatgcaaatgaactagacatgccaacagcttggggaagagaattccatactgaaagaagagcaaatacaaaagcctgaaggaaagaaaagtcttggtgaatgtgttccagaagactggaacataatatgcaagattggtaaacaggcaggagccaggttgtgcagtgctgtgtatggattttacttctaagagcaaaggaaagcccctgaagaagtaaaaaaaaaaaaaaaaaa

SEQ ID NO: 5437 - protein, 255 aa, Homo sapiens
  misc_feature (1)..(255): Xaa=Unknown amino acid
MPIKPVGWICGQVLKNFSGRIEGIQKAIMDLVDEFKDEFPTILRLSQSNQKREPAQKTSKIRMAIALAKINRATLIRGLNSISRSSKSVAKLLHPQLTCRLLELRDISGRLLREVNAPRQPLYNIQVRKGSLFEIISFPAKTALTSIIYASYAALIYLAVCVNAVLKKVKNIFQEEESIRQNREESENCRKAFSEPVLSEPMFAEGEIKAKPYRSLPEKPDISDYPKLLANKQSNNIQVLHSVFDQSAEMNEQIX

SEQ ID NO: 5438 - DNA, 446 bp, Rattus norvegicus; identical to SEQ ID NO: 5435
  ref <308>: DATABASE ACCESSION NUMBER: EMBL / AA891521
  ref <309>: DATABASE ENTRY DATE: 2000-03-03

SEQ ID NO: 5439 - DNA, 1595 bp, Homo sapiens; identical to SEQ ID NO: 5436
  ref <308>: DATABASE ACCESSION NUMBER: EMBL / AY027526
  ref <309>: DATABASE ENTRY DATE: 2001-03-17

SEQ ID NO: 5440 - protein, 255 aa, Homo sapiens; identical to SEQ ID NO: 5437
  misc_feature (1)..(255): Xaa=Unknown amino acid

SEQ ID NO: 5441 - DNA, 549 bp, Rattus norvegicus
  ref <308>: DATABASE ACCESSION NUMBER: EMBL / AA891537
  ref <309>: DATABASE ENTRY DATE: 2000-03-03
ggcaagtaaaattttaattgttctagctagaaacaagcatacattacagatataacacggaaatatattagacgaagaaggctattataaatttctcaataactaaaataacataccagcagctactagcactatcccatacatggttccaactcttcactgtcccctcaggctcaacatgtgggtattaggggatggctgaacttggtgtgggacacgagactgtcaggctggcatgagatgagccttgttcctgaatggacatggactgcatgcactcattcagtagatcctcttcctttgtctcatcgttcatgcatggctgataatccttagaagaaactggtagcaagaacagtctgcctggtcttctaaaaatcttcagggacttgcatcttgttttagatgcatatccaatttttaacccttctttgtgtctcaggggtctccaaagggcatgtatgatcatttcaggtgcttctgctgcaatgcccagagagtcttctctctccagatggtgtctccatgtagtgcagggggaatgctgtt

SEQ ID NO: 5442 - protein, 251 aa, Rattus norvegicus
  ref <308>: DATABASE ACCESSION NUMBER: SWISS-Prot / BAB23885
  ref <309>: DATABASE ENTRY DATE: 2002-03-01
MPSRWPGVAGPPALARTEGGEGSAGHSYPQNSKGTGEQHKADRIKEGHRVYAHIAKLQELWKTTQIQTIHIPKSMTDASFLKHPELTLGQKRYLCSVAKICNSSYLRTLMKRQYMHIFHHGSQKTGVLTHHRGHMSSRYSQKQHSPCTAWRHHLEREDSLSIAAGAPEMIIHSLWRPLRHKEGLKIGYASKTRCKSLKIFRRPGRLFLLPVPSNDSQSCPSEETQEEDLLNKCMQSMSIQEQGPAHASLTV

SEQ ID NO: 5443 - DNA, 1506 bp, Homo sapiens
  ref <308>: DATABASE ACCESSION NUMBER: EMBL / U79274
  ref <309>: DATABASE ENTRY DATE: 2000-12-01
aagcttggatacctgagtaataacggacaacagataaagctccgcatccttgcgccacgtgcttcggtccgtggtttgcgtgcagacgtttgacctgtatggtgaccctcgcgatttgcaaatgtgctgaggatctggaatactgaagtggaaggcacctcttgttttggggagcatgtatatttccctcctgtgacgcactgcttccacagagaggtgcaaacgtgcaaacgctcagcgaccgcagcgctcctgcccctcccccaccgtaactccggggtcgcggatctgcccgccccgctctcccgaagctgttcgggcagtgtccgaacggcttcggaggggcgagaagccagcatccgagccgcctctccggaataccagcagcctgacgcacgcgtgctgtcgggggagggatgctgggacagctgctcccgcacacggctcgcggtctcggcgccgcggagatgcccggccagggtccggggtccgactggacggagcgtagctcttctgcagagccgcccgctgtggccgggaccgagggtggcggcggcggatcagctggatactcttgttaccagaattccaaaggttctgatagaatcaaagatggatacaaagtgaactcacacatagctaagctgcaagagttatggaaaactccccaaaatcaaacaatccacctctctaaatcaatgatggaggcgtcctttttcaagcatccagacctcaccacaggccagaagcgttacctgtgcagcattgctaaaatctataatgcaaactatctgaagatgttaatgaagaggcagtacatgcacgtacttcagcacagctcacaaaagccaggtgtcctcactcatcacagaagccgccttagctcccgttactcacagaaacagcattacccttgcactacatggcgacatcaactggagagagaggactcggggtcttctgatatcgcagctgcatctgcacctgaaatgctcatacagcattccctttggtggccagtgagaaacaaagaagggataaaaactggatatgcatctaaaacaagatgtaagtcactgaagatttttagaagaccaaggaaactgttcatgcaaacagtttcttcagatgattctgaatcacacatgagtgaagaaaaaaaggaagaagatttactaaataattttatgcaatcaatgtcaattgaagaacagggagaacatctgatgttaacttgacagtcttgtctcgtgtattgaattcgtgccaaaggtgagggtaaggggttgtgagttgtgtcctgtatgtttaggatggtattgttatttattaaatcattaagtaattttggtttgttcagaaacttaaaacaatgtaattggtctgatgtagttccatgtaccaatgatagttatgtaagaaaatttacatgtaacatatacttgtacttctagctagatacaattaaaacttttcttgcattcaaaaaaaaaaaaaaaaaaaaaa

SEQ ID NO: 5444 - protein, 274 aa, Homo sapiens
  misc_feature (1)..(274): Xaa=Unknown amino acid
MLGQLLPHTARGLGAAEMPGQGPGSDWTERSSSAEPPAVAGTEGGGGGSAGYSCYQNSKGSDRIKDGYKVNSHIAKLQELWKTPQNQTIHLSKSMMEASFFKHPDLTTGQKRYLCSIAKIYNANYLKMLMKRQYMHVLQHSSQKPGVLTHHRSRLSSRYSQKQHYPCTTWRHQLEREDSGSSDIAAASAPEMLIQHSLWWPVRNKEGIKTGYASKTRCKSLKIFRRPRKLFMQTVSSDDSESHMSEEKKEEDLLNNFMQSMSIEEQGEHLMLTX

SEQ ID NO: 5445 - DNA, 598 bp, Rattus norvegicus
  ref <308>: DATABASE ACCESSION NUMBER: EMBL / AA891542
  ref <309>: DATABASE ENTRY DATE: 2000-03-03
cataatactgtcattacaaaaaaatacaaaaaactactataaaaacattcaggggcttgtcaaagtgagaaaacctaaagaccccaccccaggaccaactgaagcagttttctcccagctccttcactattcgacttttatacaactgtgggagtggggtggggtgagggtcacacaggcagagaggctggaaatttccgacacagcctccaagaaaagtaagaaataagtagcttcacatatcgcaaaagtggggcttggaagtttggggtggctaggccctgagttcagagatatgggaaggaacctgtgatcctgaatctcttggtggggaacagctgccacctgatcccaaagcccttttccttcctggtgatggctgggagatgggtcctgccccacctcttagctgtggtggatggttcaagccctcctttcttctctccacccctgaacactccccagagcagctgagggggacagatcctccaactctgtggggtgtaggcaaggcagctgttgggaaggctcctaagggttggctcaactccctgccccaaatgaaaagtgtctcgtgctcaaatgacagccttgttca

SEQ ID NO: 5446 - protein, 348 aa, Rattus norvegicus
  ref <308>: DATABASE ACCESSION NUMBER: SWISS-Prot / AAC64141
  ref <309>: DATABASE ENTRY DATE: 2001-10-16
MGKDYYKILGIPSGANEDEIKKAYRKMALKYHPDKNKEPNAEEKFKEIAEAYDVLSDPKKRSLYDQYGEEGLKTGGGSSGGSGGSFHYTFHGDPHATFASFFGGSNPFDIFFASSRSTRPFSGFDPDDMDVDEDEDPFGAFGRFGFNGLSRGPRRAPEPLYPRRKVQDPPVVHELRVSLEEIYHGSTKRMKITRRRLNPDGRTVRTEDKILHIVIKRGWKEGTKITFPKEGDATPDNIPADIVFVLKDKPHAHFRRDGTNVLYSALISLKEALCGCTVNIPTIDGRVIPLPCNDVIKPGTVKRLRGEGLPFPKVPTQRGDLIVEFKVRFPDRLTPQTRQILKQHLPCS

SEQ ID NO: 5447 - DNA, 2340 bp, Homo sapiens
  ref <308>: DATABASE ACCESSION NUMBER: EMBL / AK023253
  ref <309>: DATABASE ENTRY DATE: 2002-08-06
gtcccgggtggaggcggcggagccggagccgggggagggggcagcggctgtctcacggaccacggcggcgcccgcagctcctcaccgaaacaaggagaccagtgctggtccagtggctgtgatgggaaaagattattacaagattcttgggatcccatcgggggccaacgaggatgagatcaagaaagcctaccggaagatggccttgaagtaccacccagacaagaataaagaacccaacgctgaggagaagtttaaggagattgcagaggcctatgatgtgctaagtgaccccaagaaacggggcctgtatgaccagtatggggaggaaggcctgaagaccggcggtggcacatcaggtggctccagtggctcctttcactacacctttcatggggacccccatgccacctttgcctccttctttggtggctccaaccccttcgatatcttctttgccagcagccgctccactcggcccttcagtggctttgacccagatgacatggatgtggatgaagatgaggacccatttggcgctttcggccgttttggcttcaatgggctgagtaggggtccaaggcgagccccagaaccactgtaccctcggcgcaaggtgcaggaccccccagtggtgcacgagctgcgggtgtccctggaggagatctaccatggctccaccaagcgcatgaagatcacaaggcgtcgcctcaaccctgatgggcgaactgtgcgcaccgaggacaagatcctgcacatagtcatcaagcgtggctggaaggaaggcaccaagatcaccttccccaaagaaggcgacgccacacctgacaacatccctgctgacatcgtctttgtgctcaaagacaagccccatgcacacttccgccgagatggcaccaacgtgctctacagtgccctgatcagcctcaaggaggcgctgtgtggctgcactgtgaacattcccactatcgacggccgagtgatccctttgccctgcaatgatgtcatcaagccaggcaccgtgaagagactccgtggggagggccttcccttccccaaagtgccaactcagcgaggagacctcattgttgagttcaaagttcgcttcccagacagattaacaccacagacaagacagatccttaagcagcacctaccctgttcctaggctctgccccagccagtccagagcctaccacagcaatacccccaacactcactccactcaatgtgcacccagcttgatgtccactggacactggcaactttttctaaaatgcaaaaaaaagccactggttttcaggaaaatgttcctgtccctgaccccttttagagctgggctgcctggggggagtgggagggaggtggggagagctagcccaggccaggggtcaatgttcatgtcactagctttcaatccagtttccactgcagtggctggagagtgacctgagtgctacttgaagatatgtagagattccttatccatgcctgtacatagcatgtcctcctcccctcagctttgctaataccagtcccctcccttccctttggcttcctgctgttgggggtggaaaagactagaaaggacattgctttctcagccccacccccaggtccacagtgtccaaggtaatggcacacatattcatgcacaagaagcactcacctagagctgtctgtgcctctctgggagaaaggagagaggataagaagggaaagttcacaacctgtgaacagggacttgagcacgagacacttttcatctggagcaggggggtgagctcctcagcagcctccgtaacagctgccctgcctacacctgcagagctggaggttctgtcctccctgctgctctcaggagtgttcaagggtggagggcagggaatggggcctgaggtattaaggctaagaggtgggggacagggcccatctaccagccttcatcaggaagggaaagggctttggggtcaggtggcagctattccccaccaagagattcagggtcacaggtttttccccacacctctgaactcagggcctagccacccccaaacttccaaatcccacttttgtgatatgtgaagctactcatttcttacccttggaggctgtgtggggaatttccagcccttttatgcctgtgtgatcccaccccacccccatagttgtataaaggtcatagtgaagaagctgggggaagactgcttcagccagatcctggggtggggtctttaggttttctcactttgacaacccccgaatgtttttatagtagtttttttgtatttttttgtaatgacagtattatgtaaaaaataaagtattttaaaaatatgg

SEQ ID NO: 5448 - protein, 348 aa, Homo sapiens
  ref <308>: DATABASE ACCESSION NUMBER: SWISS-Prot / O75953
  ref <309>: DATABASE ENTRY DATE: 2001-10-16
MGKDYYKILGIPSGANEDEIKKAYRKMALKYHPDKNKEPNAEEKFKEIAEAYDVLSDPKKRGLYDQYGEEGLKTGGGTSGGSSGSFHYTFHGDPHATFASFFGGSNPFDIFFASSRSTRPFSGFDPDDMDVDEDEDPFGAFGRFGFNGLSRGPRRAPEPLYPRRKVQDPPVVHELRVSLEEIYHGSTKRMKITRRRLNPDGRTVRTEDKILHIVIKRGWKEGTKITFPKEGDATPDNIPADIVFVLKDKPHAHFRRDGTNVLYSALISLKEALCGCTVNIPTIDGRVIPLPCNDVIKPGTVKRLRGEGLPFPKVPTQRGDLIVEFKVRFPDRLTPQTRQILKQHLPCS

SEQ ID NO: 5449 - DNA, 614 bp, Rattus norvegicus
  ref <308>: DATABASE ACCESSION NUMBER: EMBL / AA891553
  ref <309>: DATABASE ENTRY DATE: 2000-03-03
aattttatttcttctgctagagaacaggagctggacacacgctgcccaggcacagctaggtgctaacacacgcaggcaccaggccaactcacttaagtttcttcctcttcttcttcttcctcctcttcctcctcatcctcttcgtcctcctcagagctgaaggtgccatcaggcaagctgtagactcggatgacctgcttgttggggtccttgaggatgaggtatttgccctcctccagcttcatgcagatatcaatgacacagcgcaggatgccccaggcattctccacactcaggttgatttggctggcaaactcattgggcttaaactgctgggtgcccaggatgacgtggcgcgaggagtcctttacatggtaccgggacacatacccgagcttcaagtactcagagccagccagcaaagcacagcacgtccatcgcgccaacttgtagctgttgttcttcaactcagtggcgatgacagccccacgctgagagtccagcttctgacgccagtcaacgccattacaatgcctggagtcccattcattgagtgtcttgatgttgatgaaggacacttccccgttggccccagtcatgacgccatcatgttc

SEQ ID NO: 5450 - protein, 547 aa, Rattus norvegicus
  ref <308>: DATABASE ACCESSION NUMBER: Refseq / NP_061219
  ref <309>: DATABASE ENTRY DATE: 2002-01-07
MAKFMTPVIQDNPSGWGPCAVPEQFRDMPYQPFSKGDRLGKVADWTGATYQDKRYTNKYSSQFGGGSQYAYFHEEDETSFQLVDTARTQKTAYQRNRMRFAQRNLRRDKDRRNMVQFNLQTLPKSAKQKERERIRLQKKFQKQFGVRQKWDQKSQKPRDSSVEVRSDWEVKEEMDFPQLMKMRYLEVSEPQDIECCGPWSTTTKPLTASPQGVRSPCDIKRIFHTVTTTDDPVIRKLAKTQGNVFATDAILATLMSCTRSVYSWDIVVQRVGSKLFFDKRDNSDFDLLTVSETANEPPQDEGNSFNSPRNLAMEATYINHNFSQQCLRMGRERYNFPNPNPFVEDDMDKNEIASVAYRYRRWKLGDDIDLIVRCEHDGVMTGANGEVSFINIKTLNEWDSRHCNGVDWRQKLDSQRGAVIATELKNNSYKLARWTCCALLAGSEYLKLGYVSRYHVKDSSRHVILGTQQFKPNEFASQINLSVENAWGILRCVIDICMKLEEGKYLILKDPNKQVIRVYSLPDGTFSSEEDEEDEEEEEEEEEEEET

SEQ ID NO: 5451 - DNA, 456 bp, Homo sapiens
  ref <308>: DATABASE ACCESSION NUMBER: EMBL / BE122841
  ref <309>: DATABASE ENTRY DATE: 2000-10-27
ttttttttcaacagacaaaaaaagtttattgaatacaaaactcaaaggcatcaacagtcctgggcccaagagatccatggcaggaagtcaagagttctgcttcagggtcggtctgggcagccctggaagaagtcattgcacatgacagtgatgagtgccaggaaaacagcatactcctggaagtccacctgctggtcactgttctcatccaggctgcccatcagcttcttcagcccctcctcatccactttctcccccacaaagctgggcagctccttgtgcagaagttccagcttctgacgccagtcaacgccattacagtgcctggaatcccactcattgagtgtcttgatgttgatgaaggacacttccccgttggctccagtcatgacgccatcgtgctcacaacggacaataaggtcaatatcatctccaagcttcacctgcggtaacggt

SEQ ID NO: 5452 - protein, 97 aa, Homo sapiens
  ref <308>: DATABASE ACCESSION NUMBER: SWISS-Prot / P29034
  ref <309>: DATABASE ENTRY DATE: 2002-06-15
MCSSLEQALAVLVTTFHKYSCQEGDKFKLSKGEMKELLHKELPSFVGEKVDEEGLKKLMGSLDENSDQQVDFQEYAVFLALITVMCNDFFQGCPDRP

SEQ ID NO: 5453 - DNA, 614 bp, Rattus norvegicus; identical to SEQ ID NO: 5449
  ref <308>: DATABASE ACCESSION NUMBER: EMBL / AA891553
  ref <309>: DATABASE ENTRY DATE: 2000-03-03

SEQ ID NO: 5454 - protein, 547 aa, Rattus norvegicus; identical to SEQ ID NO: 5450
  ref <308>: DATABASE ACCESSION NUMBER: Refseq / NP_061219
  ref <309>: DATABASE ENTRY DATE: 2002-01-07

SEQ ID NO: 5455 - DNA, 456 bp, Homo sapiens; identical to SEQ ID NO: 5451
  ref <308>: DATABASE ACCESSION NUMBER: EMBL / BE122841
  ref <309>: DATABASE ENTRY DATE: 2000-10-27

SEQ ID NO: 5456 - protein, 97 aa, Homo sapiens; identical to SEQ ID NO: 5452
  ref <308>: DATABASE ACCESSION NUMBER: SWISS-Prot / P29034
  ref <309>: DATABASE ENTRY DATE: 2002-06-15

SEQ ID NO: 5457 - DNA, 410 bp, Rattus norvegicus
  ref <308>: DATABASE ACCESSION NUMBER: EMBL / AA891578
  ref <309>: DATABASE ENTRY DATE: 2000-03-03
aatacatgtcagaataataatgtgcaataaaatcattcatgtgtacatgccactaaaatagaaacaaaactgtccaggcgaatgaaagggaccagcaggagggtgaagggagagaaagaggaaagtaaatgtgtgtaaatagtgcacatggcatacatgtgtgtaaatagtgtaatgtgatgtacatgtgtgcaattatagtcacaggacatgatgtacttgtatgtaaatgccttcatgaaacccaccactatggatcatgcatatgtcatatgcaaataatgtgcagaaacggatgagagattgttattcaggcaggtgagtgtgctctagtctagtctgtcctccatgtctattactttcttatcgaagaaatccaggaagagcagtctctggatccgaaaagccat

SEQ ID NO: 5458 - DNA, 471 bp, Rattus norvegicus
  ref <308>: DATABASE ACCESSION NUMBER: EMBL / AA891595
  ref <309>: DATABASE ENTRY DATE: 2000-03-03
gagcaagtacattaaaaaccgtcatacatcaaatagtctgacactgacataagtattacacgtaaaatagtgcacttctttccccataaagcaagctgcatcctatgagctggtaaacactgttctttctttagttaaatatagaaaagggctgagatttggagggagaaaaaattaaattaaggcattcaaaatgggtaaagttgcctatcttaagcattagaaaactggaataattaacttcaaatttcttgttacagttattgtttacacaaacatgcagctccttatcaggtacatgagtgaaggatataaactccaacatcatggctttatacaagtgcatagttgcaactgaaataatgatatctgattaacgtgtattaaaaaataaaacggtaagttaaaaaaatcttgcagtattacagtacaatgtgtttatgtgtatgtgtgtatgtgtatatatatatg

SEQ ID NO: 5459 - DNA, 6401 bp, Homo sapiens
  ref <308>: DATABASE ACCESSION NUMBER: Refseq / XM_038377
  ref <309>: DATABASE ENTRY DATE: 2002-08-01
caaggcggccggcggcgaccatggcagcgggccggcggcggccgtagtggcccaggcctgggcttcagcctcccggggccccagagggcggggcggtccgggccgcggcggtggcggcgccacttccctgctcccgcccgaggactcctgcgggcactcgctgaggaccagcggaccggcggcgcgaatctgactgaggggcggggacgccgtctgttccccgccgctcccggcagggccgggccgggctgggccgggctgggccgggcgggcccctgggagcagcccccaggcgggggaccgccttggagacccgaagccggagctagaggcaggcggtgggcccgggtggagtcccggccggagctggtggttcgggggcggtgctaggccccgaggctgcgggacctgagcgcgaggagcctgagtgcgggtccagcggtggcggcatgagccggcccccgccgacggggaaaatgcccggcgcccccgagaccgcgccgggggacggggcaggcgcgagccgccagaggaagctggaggcgctgatccgagaccctcgctcccccatcaacgtggagagcttgctggatggcttaaattccttggtccttgatttagattttcctgctttgaggaaaaacaagaacatagataatttcttaaatagatatgagaaaattgtgaaaaaaatcagaggtctacagatgaaggcagaagactatgatgttgtaaaagttattggaagaggtgcttttggtgaagtgcagttggttcgtcacaaggcatcgcagaaggtttatgctatgaagcttcttagtaagtttgaaatgataaaaagatcagattctgcctttttttgggaagaaagagatattatggcctttgccaatagcccctgggtggttcagcttttttatgcctttcaagatgataggtatctgtacatggtaatggagtacatgcctggtggagaccttgtaaaccttatgagtaattatgatgtgcctgaaaaatgggccaaattttacactgctgaagttgttcttgctctggatgcaatacactccatgggtttaatacacagagatgtgaagcctgacaacatgctcttggataaacatggacatctaaaattagcagattttggcacgtgtatgaagatggatgaaacaggcatggtacattgtgatacagcagttggaacaccggattatatatcacctgaggttctgaaatcacaagggggtgatggtttctatgggcgagaatgtgattggtggtctgtaggtgttttcctttatgagatgctagtgggggatactccattttatgcggattcacttgtaggaacatatagcaaaattatggatcataagaattcactgtgtttccctgaagatgcagaaatttccaaacatgcaaagaatctcatctgtgctttcttaacagatagggaggtacgacttgggagaaatggggtggaagaaatcagacagcatcctttctttaagaatgatcagtggcattgggataacataagagaaacggcagctcctgtagtacctgaactcagcagtgacatagacagcagcaatttcgatgacattgaagatgacaaaggagatgtagaaaccttcccaattcctaaagcttttgttggaaatcagctgcctttcatcggatttacctactatagagaaaatttattattaagtgactctccatcttgtagagaaactgattccatacaatcaaggaaaaatgaagaaagtcaagagattcagaaaaaactgtatacattagaagaacatcttagcaatgagatgcaagccaaagaggaactggaacagaagtgcaaatctgttaatactcgcctagaaaaaacagcaaaggagctagaagaggagattaccttacggaaaagtgtggaatcagcattaagacagttagaaagagaaaaggcgcttcttcagcacaaaaatgcagaatatcagaggaaagctgatcatgaagcagacaaaaaacgaaatttggaaaatgatgttaacagcttaaaagatcaacttgaagatttgaaaaaaagaaatcaaaactctcaaatatccactgagaaagtgaatcaactccagagacaactggatgaaaccaatgctttactgcgaacagagtctgatactgcagcccggttaaggaaaacccaggcagaaagttcaaaacagattcagcagctggaatctaacaatagagatctacaagataaaaactgcctgctggagactgccaagttaaaacttgaaaaggaatttatcaatcttcagtcagctctagaatctgaaaggagggatcgaacccatggatcagagataattaatgatttacaaggtagaatatgtggcctagaagaagatttaaagaacggcaaaatcttactagcgaaagtagaactggagaagagacaacttcaggagagatttactgatttggaaaaggaaaaaagcaacatggaaatagatatgacataccaactaaaagttatacagcagagcctagaacaagaagaagctgaacataaggccacaaaggcacgactagcagataaaaataagatctatgagtccatcgaagaagccaaatcagaagccatgaaagaaatggagaagaagctcttggaggaaagaactttaaaacagaaagtggagaacctattgctagaagctgagaaaagatgttctctattagactgtgacctcaaacagtcacagcagaaaataaatgagctccttaaacagaaagatgtgctaaatgaggatgttagaaacctgacattaaaaatagagcaagaaactcagaagcgctgccttacacaaaatgacctgaagatgcaaacacaacaggttaacacactaaaaatgtcagaaaagcagttaaagcaagaaaataaccatctcatggaaatgaaaatgaacttggaaaaacaaaatgctgaacttcgaaaagaacgtcaggatgcagatgggcaaatgaaagagctccaggatcagctcgaagcagaacagtatttctcaaccctttataaaacacaagttagggagcttaaagaagaatgtgaagaaaagaccaaacttggtaaagaattgcagcagaagaaacaggaattacaggatgaacgggactctttggctgcccaactggagatcaccttgaccaaagcagattctgagcaactggctcgttcaattgctgaagaacaatattctgatttggaaaaagagaagatcatgaaagagctggagatcaaagagatgatggctagacacaaacaggaacttacggaaaaagatgctacaattgcttctcttgaggaaactaataggacactaactagtgatgttgccaatcttgcaaatgagaaagaagaattaaataacaaattgaaagatgttcaagagcaactgtcaagattgaaagatgaagaaataagcgcagcagctattaaagcacagtttgagaagcagctattaacagaaagaacactcaaaactcaagctgtgaataagttggctgagatcatgaatcgaaaagaacctgtcaagcgtggtaatgacacagatgtgcggagaaaagagaaggagaatagaaagctacatatggagcttaaatctgaacgtgagaaattgacccagcagatgatcaagtatcagaaagaactgaatgaaatgcaggcacaaatagctgaagagagccagattcgaattgaactgcagatgacattggacagtaaagacagtgacattgagcagctgcggtcacaactccaagccttgcatattggtctggatagttccagtataggcagtggaccaggggatgctgaggcagatgatgggtttccagaatcaagattagaaggatggctttcattgcctgtacgaaacaacactaagaaatttggatgggttaaaaagtatgtgattgtaagcagtaagaagattcttttctatgacagtgaacaagataaagaacaatccaatccttacatggttttagatatagacaagttatttcatgtccgaccagttacacagacagatgtgtatagagcagatgctaaagaaattccaaggatattccagattctgtatgccaatgaaggagaaagtaagaaggaacaagaatttccagtggagccagttggagaaaaatctaattatatttgccacaagggacatgagtttattcctactctttatcatttcccaaccaactgtgaggcttgtatgaagcccctgtggcacatgtttaagcctcctcctgctttggagtgccgccgttgccatattaagtgtcataaagatcatatggacaaaaaggaggagattatagcaccttgcaaagtatattatgatatttcaacggcaaagaatctgttattactagcaaattctacagaagagcagcagaagtgggttagtcggttggtgaaaaagatacctaaaaagcccccagctccagacccttttgcccgatcatctcctagaacttcaatgaagatacagcaaaaccagtctattagacggccaagtcgacagcttgccccaaacaaacctagctaactgccttctatgaaagcagtcattattcaaggtgatcgtattcttccagtgaaaacaagactgaaatatgatggcccaaaatttattaaaaagctatattttcctgagagactgatacatacactcatacatatatgtgttccccttttccctgtaatataaattacaaatctgggctcctttgaagcaacaggttgaaccaacaatgattggttgatagactaaggatatatgcaactcttccagacttttccataaagctctctcggcagtcgctcacactacaatgcacacaaggattgagaagagttaaaggctaaagaaaacatcttttctagcttcaacagagaggtttcaccagcacatttaccagaagaatctgggaatggattccactacagtgatattgactgcatctttaagaagtgaccattatactgtgtatatatatataaacacacacacatatatatatatatatatagtactctaatactgcaagaaggttttttaaacttcccactttattttttatacacattaatcagatatcattacttgctgcagttgcaactatgcacttgtataaagccataatgttggagtttatatcactcattcctgtgtacctgatggaagttgcatgttcatgtttaagcagttactgtaacaagaagtttaaagttaattatatcagtttcctaatgcttcatgataggcaactttacccattttgaatgccttaatttaatttttttcaaagtctcagccctgtctgtattaaaaaacaaaaaaagcgtttaccagctcttaggatgtaaactagctttgtggaagataaatcgtgcactatttttacacataaatagttatatcaatgtcagcctattttgattaacaaatgtttttaaagtattattggttatagaaacaataatggatggtgttggaactaatatatccttgatgtctgtctattattcattcaactctttttacagacctcagtattagtctgtgactacaaaatattttatttgctttaaatttgctggctaccctagatgtgtttttattcctggtaaagacatttgtgattacattttcacacttaagattcaaaatttttcccaaatataaagaaaactaagacagactgtagatgcattttaaatatttaaatatgatcctcagacatgcagctgtgtgtggcagtattttagtaccgggttaagaaaactggcaactgggaagaagtggcctcaaaggcacttaatttgatttttattttttaaatgctgtcaaagttacagtttacgcaggacattcttgccgtattctcatgatcccagataagtgtgtgttttatactgcaacaatatgcagcaatggtaagcgtaaagttttttttttgtttttgtttttttttatattatgaagtcttttaacagtctctctttatataaatacacagagtttggtatgatatttaaatacatcatctggccaggcatggtggcttacgcctgtaatcctagcactttgggaggccaagacgggcggatcacctgaggtgaggagttcaagaccagcctgcccaacatagtgaaactccgtctctaccaatatacaaaaattagccgggcatgatggtggtggcctgtaatcccagctacttgggaggctgagacaggagaatcgcttgaacccaggagacggtggttgcagtgagcgaagatcgagccactgcactccagcctgggcagctgaacaagactccgtctc

SEQ ID NO: 5460 - protein, 1388 aa, Homo sapiens
  ref <308>: DATABASE ACCESSION NUMBER: Refseq / XP_038377
  ref <309>: DATABASE ENTRY DATE: 2002-08-01
MSRPPPTGKMPGAPETAPGDGAGASRQRKLEALIRDPRSPINVESLLDGLNSLVLDLDFPALRKNKNIDNFLNRYEKIVKKIRGLQMKAEDYDVVKVIGRGAFGEVQLVRHKASQKVYAMKLLSKFEMIKRSDSAFFWEERDIMAFANSPWVVQLFYAFQDDRYLYMVMEYMPGGDLVNLMSNYDVPEKWAKFYTAEVVLALDAIHSMGLIHRDVKPDNMLLDKHGHLKLADFGTCMKMDETGMVHCDTAVGTPDYISPEVLKSQGGDGFYGRECDWWSVGVFLYEMLVGDTPFYADSLVGTYSKIMDHKNSLCFPEDAEISKHAKNLICAFLTDREVRLGRNGVEEIRQHPFFKNDQWHWDNIRETAAPVVPELSSDIDSSNFDDIEDDKGDVETFPIPKAFVGNQLPFIGFTYYRENLLLSDSPSCRETDSIQSRKNEESQEIQKKLYTLEEHLSNEMQAKEELEQKCKSVNTRLEKTAKELEEEITLRKSVESALRQLEREKALLQHKNAEYQRKADHEADKKRNLENDVNSLKDQLEDLKKRNQNSQISTEKVNQLQRQLDETNALLRTESDTAARLRKTQAESSKQIQQLESNNRDLQDKNCLLETAKLKLEKEFINLQSALESERRDRTHGSEIINDLQGRICGLEEDLKNGKILLAKVELEKRQLQERFTDLEKEKSNMEIDMTYQLKVIQQSLEQEEAEHKATKARLADKNKIYESIEEAKSEAMKEMEKKLLEERTLKQKVENLLLEAEKRCSLLDCDLKQSQQKINELLKQKDVLNEDVRNLTLKIEQETQKRCLTQNDLKMQTQQVNTLKMSEKQLKQENNHLMEMKMNLEKQNAELRKERQDADGQMKELQDQLEAEQYFSTLYKTQVRELKEECEEKTKLGKELQQKKQELQDERDSLAAQLEITLTKADSEQLARSIAEEQYSDLEKEKIMKELEIKEMMARHKQELTEKDATIASLEETNRTLTSDVANLANEKEELNNKLKDVQEQLSRLKDEEISAAAIKAQFEKQLLTERTLKTQAVNKLAEIMNRKEPVKRGNDTDVRRKEKENRKLHMELKSEREKLTQQMIKYQKELNEMQAQIAEESQIRIELQMTLDSKDSDIEQLRSQLQALHIGLDSSSIGSGPGDAEADDGFPESRLEGWLSLPVRNNTKKFGWVKKYVIVSSKKILFYDSEQDKEQSNPYMVLDIDKLFHVRPVTQTDVYRADAKEIPRIFQILYANEGESKKEQEFPVEPVGEKSNYICHKGHEFIPTLYHFPTNCEACMKPLWHMFKPPPALECRRCHIKCHKDHMDKKEEIIAPCKVYYDISTAKNLLLLANSTEEQQKWVSRLVKKIPKKPPAPDPFARSSPRTSMKIQQNQSIRRPSRQLAPNKPS

SEQ ID NO: 5461 - DNA, 471 bp, Rattus norvegicus; identical to SEQ ID NO: 5458
  ref <308>: DATABASE ACCESSION NUMBER: EMBL / AA891595
  ref <309>: DATABASE ENTRY DATE: 2000-03-03

SEQ ID NO: 5462 - protein, 1369 aa, Rattus norvegicus
  ref <308>: DATABASE ACCESSION NUMBER: Refseq / NP_112360
  ref <309>: DATABASE ENTRY DATE: 2001-04-11
MSTGDSFETRFEKIDNLLRDPKSEVNSDCLLDGLDALVYDLDFPALRKNKNIDNFLSRYKDTINKIRDLRMKAEDYEVVKVIGRGAFGEVQLVRHKSTRKVYAMKLLSKFEMIKRSDSAFFWEERDIMAFANSPWVVQLFYAFQDDRYLYMVMEYMPGGDLVNLMSNYDVPEKWARFYTAEVVLALDAIHSMGFIHRDVKPDNMLLDKSGHLKLADFGTCMKMNKEGMVRCDTAVGTPDYISPEVLKSQGGDGYYGRECDWWSVGVFLYEMLVGDTPFYADSLVGTYSKIMNHKNSLTFPDDNDISKEAKNLICAFLTDREVRLGRNGVEEIKRHLFFKNDQWAWETLRDTVAPVVPDLSSDIDTSNFDDLEEDKGDEETFPIPKAFVGNQLPFVGFTYYSNRRYLPSANPSENRSSSNVDKNVQESLQKTIYKLEEQLHNEMQLKDEMEQKCRTSNIKLDKIMKELDEEGNQRRNLESAVSQIEKEKMLLQHRINEYQRKVEQENEKRRNVENEVSTLKDQLEDLRKASQSSQLANEKLTQLQKQLEEANDLLRTESDTAVRLRKSHTEMSKSVSQLESLNRELQERNRMLENSKSQADKDYYQLQAVLEAERRDRGHDSEMIGDLQARITSLQEEVKHLKHNLERVEGERKEAQDMLNHSEKEKNNLEIDLNYKLKSIQQRLEQEVNEHKVTKARLTDKHQSIEEAKSVAMCEMEKKLKEEREAREKAENRVVETEKQCSMLDVDLKQSQQKLEHLTENKERLEDAVKSLTLQLEQESNKRILLQSELKTQAFEADNLKGLEKQMKQEINTLLEAKRLLEFELAQLTKQYRGNEGQMRELQDQLEAEQYFSTLYKTQVKELKEEIEEKNRENLRKIQELQSEKETLSTQLDLAETKAESEQLARGILEEQYFELTQESKKAASRNRQEITDKDHTVSRLEEANNALTKDIELLRKENEELNERMRTAEEEYKLKKEEEISNLKAAFEKNISTERTLKTQAVNKLAEIMNRKDFKIDRKKANTQDLRKKEKENRKLQLELNQEREKFNQMVVKHQKELNDMQAQLVEECTHRNELQMQLASKESDIEQLRAKLLDLSDSTSVASFPSADETDGNLPVGSACIPYLFIFYSSSSRIEGWLSVPNRGNIKRYGWKKQYVVVSSKKMLFYNDEQDKEQSSPSMVLDIDKLFHVRPVTQGDVYRAETEEIPKIFQILYANEGECRKDIEVEPVQQGEKTNFQNHKGHEFIPTLYHFPANCEACAKPLWHVFKPPPALECRRCHVKSHRDHLDKKEDLIPPCKVSYDVTSARDMLLLACPQDEQKKWVTHLVKKIPKKAPSGFVRASPRTLSTRSTANQSFRKVVKNTSGKTS

SEQ ID NO: 5463 - DNA, 6401 bp, Homo sapiens; identical to SEQ ID NO: 5459
  ref <308>: DATABASE ACCESSION NUMBER: Refseq / XM_038377
  ref <309>: DATABASE ENTRY DATE: 2002-08-01

SEQ ID NO: 5464 - protein, 1388 aa, Homo sapiens; identical to SEQ ID NO: 5460
  ref <308>: DATABASE ACCESSION NUMBER: Refseq / XP_038377
  ref <309>: DATABASE ENTRY DATE: 2002-08-01

SEQ ID NO: 5465 - DNA, 327 bp, Rattus norvegicus
  ref <308>: DATABASE ACCESSION NUMBER: EMBL / AA891631
  ref <309>: DATABASE ENTRY DATE: 2000-03-03
gccagagcagagactcaagccaggtttaatggtcattgtctagttccagagcccgtgggctccgaggtttgccagcctggtgtacacagtgggaggaagagtcctagacacagaaagagagaattacaaggcaaagacacatacacacccggaaatcggctttgttctccccagacaggtctacccttcctggcctcctccaggggccccatagatacagcaaagaaaaagatcacagataattacacagactgtagagtcctgtcacatcctgtctccagaggaacctgcttctccttcctgggagatagtttatgagtatagatg

SEQ ID NO: 5466 - DNA, 4568 bp, Homo sapiens
  ref <308>: DATABASE ACCESSION NUMBER: EMBL / AB032989
  ref <309>: DATABASE ENTRY DATE: 1999-11-11
cccattccttgcccagttacacagcactactggacctcagtcacaacaacctgagccgcctgcgggccgagtggacccccacgcgcctgacccaactgcactccctgctgctgagccacaaccacctgaacttcatctcctctgaggccttttccccggtacccaacctgcgctacctggacctctcctccaaccagctgcgtacactggatgagttcctgttcagtgacctgcaagtactggaggtgctgctgctctacaataaccacatcatggcggtggaccggtgcgccttcgatgacatggcccagctgcagaaactctacttgagccagaaccagatctctcgcttccctctggaactggtcaaggaaggagccaagctacccaaactaacgctcctggatctctcttctaacaagctgaagaacttgccattgcctgacctgcagaagctgccggcctggatcaagaatgggctgtacctacataacaaccccctgaactgcgactgtgagctctaccagctgttttcacactggcagtatcggcagctgagctccgtgatggactttcaagaggatctgtactgcatgaactccaagaagctgcacaatgtcttcaacctgagtttcctcaactgtggcgagtacaaggagcgtgcctgggaggcccacctgggtgacaccttgatcatcaagtgtgacaccaagcagcaagggatgaccaaggtgtgggtgacaccaagtaatgaacgggtgctagatgaggtgaccaatggcacagtgagtgtgtctaaggatggcagtcttcttttccagcaggtgcaggtcgaggacggtggtgtgtatacctgctatgccatgggagagactttcaatgagacactgtctgtggaattgaaagtgcacaatttcaccttgcacggacaccatgacaccctcaacacagcctataccaccctagtgggctgtatccttagtgtggtcctggtcctcatatacctatacctcaccccttgccgctgctggtgccggggtgtagagaagccttccagccatcaaggagacagcctcagctcttccatgcttagtaccacacccaaccatgatcctatggctggtggggacaaagatgatggttttgaccggcgggtggctttcctggaacctgctggacctgggcagggtcaaaacggcaagctcaagccaggcaacaccctgccagtgcctgaggccacaggcaagggccaacggaggatgtcggatccagaatcagtcagctcggtcttctctgatacgcccattgtggtgtgagcaggatgggttggtggggagattctgccccaggagaggtaatgcacccctgaaggatatgaggggatggaagagagggctggctgcccaagggaatggattcctcctgacctcaagggaattggtcccaggtacaacagagagcaagaccccaaacagggcgtggctgccacgattttcaaatgggggtatattaatcctcaggcaaatgctacacccgtacccaaagccctgccaattctcagtgtggtagaggaagagaagcatgtctgagttggatgggaatgaggaaggagtgaggggaagaacagattccctaaactttcatgaggtcatccctagctccttaagagaaaaacatttagaaaaaaaaattttttctatctctgcccacccacacctgtgatgttgtgtgtgttgggggagcttccacaggagccacactggggaaaagctgtagtatcttctttgtttagcaagtcaaacttcacagctggggaagttgaaaacctttggaaaatgagtcaggaaaaggctgagacctcaatcggtaacaattccccaaagctgttgtaagactttgcattaaagcctttctttttcctgatgtgccctgggtggatggatctttgcaggagcctggcctgctgccttttagttacaacagcaatgtgggatgtggtatctgtgccttgtcctgggaccaatggcacagagggttatagcatgaactgaagggtccatgtcacagcataggtgccagcacgaaacttgtagatggggggtgaattccagataggctaattccctggttggtgaaacccttggttagtatttgattcccagcatctgtgtgtcaggccagagtgggggctgctgaaggcagagcttttatggatgcctgccacagacgtggtacatgggcccacttcacgatagaaggatgaaggtaaatcagcctctattatgtagcatccagctggacctagctgattctcaatgtatgccatctcttcatccagtctccttatcaagctcaggtgggattctgaattttccctaatatgctgctctgtaaagggaggagtccaagaaagcctggccccagctggcttagagtaggcttggcgatagtgaaaatccagtatatatctcctctgtgtggacaaggttgccttgctcctctcagagataccacctctgctgcaaagtcaaagcatggggttttgacatcagaagggttggaattgggtggtctctaccccagaatggcaatttggagtgcagcttcaagttctgccctctccacagattccaggcaatcctgaagcagagataatcagtagtactaaactttcagaaggggagttctgccaccccattcctccatcgagaggtctttgcagttgtggttgtgaggccagaggaacttaagaagaatgagctcaacattccattccatccaaggttgcagaatactttgagtatggagatgaccgatccctttaacctttccctttgactatactgcatgccctgtgagtggctgctctgagctttggcgggggatgagcagggtgaaggtgaaaatgttctctgatgttggtttttcttagtgtctcttctctcccacgtttctagtccattggaagttctccagatcctctagatttctgacctctttttacattctaagaggtgtcatttacctgtgggtgaggggcttggagggcctgactattaagcttcctattatgattggggaaggggactcaacatcttccccttgtctggtcctgggaactcaagactgctgtccatcctttattagtaacctagttttgttgagagagaggtgcagcatttccctcaagtacctgcatgctcataggtatgcatgcttataggtatgcatgcacaccagcaccttgacttccaccaggacagtgaatctgtagtccccattaatgatactctcagaatggtctccaccaatgtgcacaacttcatgcacacaattgtattcctctttaggagagacagtgaccatgccaggctcttcaaatacacactcctgtattttcatttctgaactccctgaagcttcacccacatctccatggcactgaatcacttttctgcccaggctggagttagaagaaccatgggttgaaggccttgggagaagaggtggtaaggagctacctggttctttggactcctcagaaacctcccgtgaagactatatatatgagcaatatatgagcaattaagatagaactaggtcattgaaggactcagaaggaaactggcaaggggctaagtagctgtgagctgctcttcctgttaactgtcctcaggagagaaaagttgtcttgatttattccagagactcctgagaattttgttactggagctataggaactaggactccctcctcagactcatcaggaaatctgggaaaatctcatctccatgctgcagtctccccgcttggcaccatctagggctctgaagatctttaaagtgagcgttaaatgaagcaggccttctggggcatcgtgatggagctcctgaggactgggagggccgttttcttcataattcctacccagtttagggaatgagaaaaggccctgtggctcttaagtctcctgactatatccactagtttggccttgagtttgagacacctggtagatgtacctggctgccctaccaagagatttgatttgtttcttcccgtggtttcaggtgatagaacccaaaggtagctttttaattggagaattgaataatcagcatatgtaagcgcactagaaccctgtgttgaaaactgccaggtgtgggtataagaaaaggccgagagatcaccacctcctcttaccctaccccacacccataaaccagacatgtctcccaggaagcaggtgtccctggacacagaggatgacagggctctacaatctgtgtaattattattattattattattttgtatttatggggcccaagaaaggggccaggagagggtacaccccagctggggagagcaaagcagatggatccagttttctgtgtgttcttacctctgtacttcctcgtagctctgctgacaaagcaagcaggcctcccgtgtccaagaccccattcctcccacttgtgtacacctaggctggcaaatcttggagcctctgggctctgaaaactagacaatgatcattaaacctggcttgagtctctgttctggc

SEQ ID NO: 5467 - DNA, 327 bp, Rattus norvegicus; identical to SEQ ID NO: 5465
  ref <308>: DATABASE ACCESSION NUMBER: EMBL / AA891631
  ref <309>: DATABASE ENTRY DATE: 2000-03-03

SEQ ID NO: 5468 - DNA, 4568 bp, Homo sapiens; identical to SEQ ID NO: 5466
  ref <308>: DATABASE ACCESSION NUMBER: EMBL / AB032989
  ref <309>: DATABASE ENTRY DATE: 1999-11-11

SEQ ID NO: 5469 - DNA, 384 bp, Rattus norvegicus
  ref <308>: DATABASE ACCESSION NUMBER: EMBL / AA891634
  ref <309>: DATABASE ENTRY DATE: 2000-03-03
aagagttgagagtttgagatcactcttttattcaccagaatacatcaatagtatccagatgcaggtagtcaatatatacagtttgtatccttatcaaaatagcaagtcaaatgaatgaacaaaacaacaatgaataaatagcaaaacttcaaatgaatataaggaaaaccaaataaccaaagtaatcaggagtcaaaccaaaatgtaaacagaggaattgtcctaagcattcttttgatgctcgtttgcagaattgacttatagccaatgacttgccttggaaacacagtagacaagcagttactgatggtaataatcttttcaaggggaatgtaagtaggtctgccttgttggagtgagggtatgaaggacaaagccatccaa

SEQ ID NO: 5470 - DNA, 499 bp, Rattus norvegicus
  ref <308>: DATABASE ACCESSION NUMBER: EMBL / AA891651
  ref <309>: DATABASE ENTRY DATE: 2000-03-03
aaagggcaaaacactcagacaatttaaatacaagtcgaacagaaccgctgtcagttggccacgatgccatcatgtgtcctctggagtcctcacagtgaggaagaaggctctggcaatgacaagagaagtgggtttcttggtgtgcagtcactgattctaagtgccatcttcaaggtgcccaatgctctgaaactaagtatctcaagcactaaaacacaagagctgaaccagcaatgattgtcagctaaagcttaacagtgggcagcactgaccatctgtgagccaatttgaccttcacagagtcatgatagggccaacgtcattcccactttatgtgggctcagattcaacagctcatcaaagatgaccaggctcacagcatacctgacaatgaagccaacttgggcctgtctctaaagcccatcctcttagttgtgagcaatcctgggtcacctgagcaggtgaggcttacgctgggtgggtgcctacgactgaggtt

SEQ ID NO: 5471 - DNA, 663 bp, Homo sapiens; identical to SEQ ID NO: 31
  ref <308>: DATABASE ACCESSION NUMBER: Refseq / NM_005003
  ref <309>: DATABASE ENTRY DATE: 2002-11-05

SEQ ID NO: 5472 - protein, 156 aa, Homo sapiens; identical to SEQ ID NO: 32
  ref <308>: DATABASE ACCESSION NUMBER: SWISS-Prot / O14561
  ref <309>: DATABASE ENTRY DATE: 2002-06-15

SEQ ID NO: 5473 - DNA, 518 bp, Rattus norvegicus
  ref <308>: DATABASE ACCESSION NUMBER: EMBL / AA891664
  ref <309>: DATABASE ENTRY DATE: 2000-03-03
cggccgccaaacttttttttttttttttttttttttttttgccttaaataaaagtttaatttcttacagatcaggtgttagggagagcagctttagattgtctcggcctttctttcatggtgccaaagtagcttccccagatccagccatcacacccacgttcacagtaggaaggcagggtcttgggctgggagtgtactccagaaacccctctattgactttgctcagttctgctgggccatatggccgctcctcacagcaaaagaggctgggacactgaaccaaaggcccattgcgattggcacctgagcctgctggggttccgaagtctaggtccattggccagctgtgcagaaccaggagcggctgaggccagccccatagctgcagatcacagacctggttttatcccaatgactctagtccctaaagaatgactgaggccagagccagaggccagactccaggcagggcacatgtcaccctcaggagggtgaggaccccaaccccctcctac

SEQ ID NO: 5474 - protein, 321 aa, Rattus norvegicus
  ref <308>: DATABASE ACCESSION NUMBER: Refseq / NP_032621
  ref <309>: DATABASE ENTRY DATE: 2002-01-07
MHCRLFRGMAGALFTLLCVGLLSLRYHSSLSQRMIQGALRLNQRNPGPLELQLGDIFIAVKTTWAFHRSRLDLLLDTWVSRIRQQTFIFTDSPDERLQERLGPHLVVTNCSAEHSHPALSCKMAAEFDAFLVSGLRWFCHVDDDNYVNPKALLQLLKTFPQDRDVYVGKPSLNRPIHASELQSKNRTKLVRFWFATGGAGFCINRQLALKMVPWASGSHFVDTSALIRLPDDCTVGYIIECKLGGRLQPSPLFHSHLETLQLLGAAQLPEQVTLSYGVFEGKLNVIKLPGPFSHEEDPSRFRSLHCLLYPDTPWCPLLAAP

SEQ ID NO: 5475 - DNA, 31737 bp, Homo sapiens
  ref <308>: DATABASE ACCESSION NUMBER: EMBL / Z93096
  ref <309>: DATABASE ENTRY DATE: 1999-12-12
aagctttgaagtccagatagaactcagcctagtggagggaatgtgggtgaggctggtggaatatgggagagcatcccggaggaaacctgtgagcaaaagctgggggctgggtgaagcaggacaccaaagtaatgggtgttgaatgggccgagctgacagctctctgggggagtggacggtgctggaggacactcccttccaccgggcacggagggtttgttgtgacttcctcccaccgcagcagctggcagagccggggctgccctttctgctggtgcctcctttcagccgcctctgtctggggttcccttcgtctggccccgcccctcgggctaagcggggcggggccaggcggtcccggaggctgcggcaggccggacagcgggagcaggtggaggactggcggcggtcgagatcgtgctgccatggctcagcctctgggtccagagcctcagctcctacctcttccctccttgccagcccctgatgcctgccagacttttgcctctgctggagcccctgcctgaccagcttcccctccctgtctggttgggatttgggggctgagctgtctggggtcccagggccaaccaatgcagtgccggctcccgcggggcctggctggagccctcctcaccctcctgtgcatggggctcctgtgtctgcggtaccacttgaacctgtccccgcagcgggtacaagggacccccgagctgagccagccgaacccggggccccctaagctacagctacacgatgtcttcattgcagtgaagacgacccgggctttccaccgcttgcgcctggagctgctgcttgacacgtgggtttccaggaccagggaacaggtgacaagtgggtgacattgggccctgggggtggcccctggcctaaggggttctcagaggcctttctactgggctggggtccctgactgcctcatgggagaagctgctcaatacctgcctaatcagggatcctcttcctctctccttcttccgggctttaggggctgcctgcggccctgcccgtgccctgtactggtcctgactccaggtgcacccaggtcctaccgctccaccacttttgggggccaggctgggcccctgctccaggctcccgggtccctcctgggggttcttctattcctagccgctcccgtgggggcttcgctcctagccacccaggcccagcctggcatcaggggtaatggtgggtgttgggcagctggggtggaggcctccaagaggtcctgacccagacccgtgcccaggccaggctgtcccacccaggccctaggtgctgtcctgcccgggctctgagggtggaggacgggaggagaatggtggggtctgttcttgggggaggcatcccttcggccttcccgatagcccctgccgctgtgtctctgctgccccgggtgtgccgaggccgccatgtctggcctcctgtgttggcttcctgcggactgcttccgagggagggaaggagagcgcatgccacgagggtggcggctgaggcagtggtgggccggaggttggggaggcctgcctggcacgtgggattgtgtgtgtgtgtgtgtgtgtgctcacacgcacggagctggagtgtgctagatgtgtgtgacaagaggcatgtctgtcacatggctgtgcggctccggcgagccaagtcccttccagccctttccctcctcgcatccagtatcttccttaagcaaagttagtgatgtcggtgttagggaccgttgatgggggaggtggagaatgggtacacacacacacacacacacacacacatcggtcccctctttggcggctggctcagtgggaggaagtgactgagtctttggagatagtcgagacctcctggaagaccaaaaggagggggagaggatggctggcagaggccaggccctcctggggaggggcaccctgccctgatttctgccctcgtacttgggattaactcttccccagctggcccccagcacctcagctcttctctgggccccacacggcttctcatcttggggagatcctggttcttcctgcggaagcagccaaggcgggccctcccgcaggccttcctgtttatgcgtctgtgtacccgggagcgtggcctcacgtggcccacggccctttcctgtcttatctccatcaccgcggtggtgcccttgccccggatgaggaaactgaggccagagagaggaagtgctggctggcgtggtgtcacgcagaaggcctgaggggacagagcccagtgggacctagaaccttgctcctggttgggtgcttttctcccctgctgagacttgggaaccctgtgaggactgggtcactgggctacaggagtcgctaccccacgtctctcaccctttggctcacttctctctgtgacctcagccaaggccctcccctttcggcccgcagtttccccatctgcacggggcaggagtgtctggaccgggcctgagctggttaactgcagcgctgggcgcccgcctggctggttaagggcggtcgggtggcaggtgggccttgcggcaggggccgggactcgtgtgccggcctttgtcctgggctgagggggtgggctgggggaggcgggttttgtgctcaaggcgagcctttctcctccctatggtccccttgttggggggagaggtggcagcagccccaccactcccctcctctgcagcagatggtccccggccacccctcccctgccccagcaggctgcgtgtccctttgtttcccgcggctgcctgtgaagttttcaccattgtcaggtcccctccttaaacaagtcaaatgcagcccttggctccaaagaaactctgcccatcgctctgtgccaaccttaggattcccagggactgaaagcgccagcctcactgccctctcctgtgcccccgccccctctggacctggactccccttcccggctctctccctcactctgttcatggctgctggtgttttgttttgtttattttgagacagagtctcactctgttttccaggctggagtgcagtggcacgatcctggctcactgcaacctccgcctcctggtttcaagtgatcctcagcttcctgagtagcttggactacaggcatgcgcaccacgcccggctaatttttctatttttagtagagatggggttttgccatgttggccaggctggtcttgaactcctggcctcaaatgatccacctgccttggcctcccaaagtgcctattctcctgctttattcaggcttactagatcttcaccgggaaacagtcctcagcccatttggcccatgctccaagcttgagagtgtttcactatcgggtggctgtttggtggcaaaagtttgtcgagggcagggtaggaaaggcctggtttctttgataggatcccttgaggctgtgttgaaaaccgacttggggtggaggcagggagcagggaggccagggaggagggcctgcagcaaagcaggcagcaggtgacgacagtggcggggactaggtggccgggtgggccggagggaagagcagcgtcccagacgatttggaggctggtgagcagaattgatgacaggctcgggaagaggtgtgagaggaagagaggaggagcggggagtctgaggttttgggtcccaaccagtgagagggaggagcaggtcttggggagaacgggggctcagtcttgatgtgttaagcccccaggagacgtcatggtttcaggggatttgacagtttggagctcagggagaggctagggctggtggtgtccacgagtctccagctccctgatggtgtttaaagctgagaggctgcatggcgtcactgacggagtgggcttcatggagaagcggaccagggtctaggcttggaccaccaccatttccccctgcggaaatccagagacctccagcattcgctaaatctgacggtgggagacagaccccagggagagaggctcagagggtggatgctgcacaggccttcctgaggagagccaggtgccggagcaaggagacaaattggacccagcctgtggtctccaggatgccatcgtctggtggaagagacggggagagaaatttctgtaaccagggagttttgctaactgctgttagtgacaggagaaacagagggctgaggaacacatagcaggggcctctaaagtagctggaggggtgtcagggaaggcttcctggggaaggtgatgcctgagctgggagctagagggtggaaagagggcatagcatgcgcagaggctcagaggcgtgcgcacgtgcgtgtgtgtgtgtgtgtgtgtatgcgtgcgtgtgtgtgcgtgtgtgtgtgtgagagagagagacagagagagaagccccaggggtggacaggaagtaatgagatcagactacatcaggcagggtggccaggtggcccctcactggccacacttagggaggctggcctttatcccaagagtagtagggagccatggaaggtgttagtggctggtgggtggagttgggtgttactcgattctggtcctggcagggaaacatatctgagggaatgaggcagagtcttgcagtagtccagtgagaggtgatagtggctcagaagcagggctgtggccatgggccttaggagatagcctggctccctcctgccccttcctgtgtcaaacctggctcccggcctcctggcctcctatgcctcagtttcccctgaaatacaagtagttgagcctgacttcactgtcaactcttccttgctcttttacacacaatcttgttttattctcacagccactactatcccccttttgtagatgggtaaactgaggatcaaggcggggactcttctgatctgaagggctaattcctggaaaggagggaggggattttaggtaagcagaggggagcattgcagttggaggcgctgagcttcaagggaggacagggttaagccacgagtgtggccccagtgggggctgagagagtcggagggctttaaagaggtgggacacttggaaggggtccggaattgtcctgagtcctgggccgggcagtcccagggccggggaggccctcaaaggcccctgatgctcaatgggtgagaggacccacttgggcagctgagaagctctgccatgttgggccgggcatggaatgggaagaacaccagtccccagcctggcttgtctttgtccccagcctggcttgtctttgtcgcatccatgtacttcctctacctctcattcagagtctgagcttggattatgtaggggctgagcagctttagctgcctgggaggcggtggggagaggtccggggcctatgggtttgaatctcagcctggcacttgccaatcctggtccatcactcagcctcctttttgtcatctggaaagggaacagatgacaacgcctgcctcgtgaggtttgagggtcgttgcgggcaagtgcatgtccaatctgggagagccggactgggttgtgaggcagcatttccgagatggcttgcacagggggtttgtgtggctgtgaaggtgtgacgtctccctagtggcgtggtgtcccatggtgtggccgtgggtctgttcacatagagtttgtgtcctgaaaatgggtttaagattgtgttctgtgattgtggaggagccgagtgcagctgtgattgtgtgtgtgtgtgtgattgtgtgtgtgtgtgatagaagagggtgagatgctgcccaggtgtgtggctgtggttgggtccctgtggtgctgctctggaaagggggtgagtgtatgtgtttagactgtgggctgtgtacaccctgaagttgtgtgtctacaaaagctgggttgtgtgtgttgtatgttgtcctaaaggagcgtgtgaccatgagaggggtgtgtctgtcactggaggagtacagagtccatctggggcctggtggtggtgggctgtggattggtctggggtgtcccttgggccgatgtgagtcctgaccccttcttctccttcctagacatttgtcttcaccgacagcccagacaaaggcctccaggagagactgggtaactctgcccggcctgggtgtggtgggggactttagctgttgcctgggaaagctggggcggctgtgccctggcctgagggttcccaggaaatgggccgcccacccttggcatgtggagattcccctttgcccaggagggaagtgggcctcttccctggaaactggtgtgggcgtgggtatggggaagagcggtgctggacaaggccctggacacctgagtcccagcccagcctgctgtccactaggtctgtggtcctgggcaggtctgccttccccgggtctcagtcctaccatgtgtaaaatgggagtgggtgggctgctccagactccctgttgcccagccttgctctgtattctgtgttcagggctctgaaggggggacctgggcagggtcccctgactcctcctcacttctccagggtcccaccttgtggtcaccaactgctccgcggaacacagccacccagctctgtcctgcaagatggctgctgagttcgacaccttcttggccagtgggcttaggcgagtgttcctgggtctctggggataagtgtggtctgggcccagtgaaaataacccctgggactcctggggtctgacttcagcccccactcctctagcaggcagtgggcagatggctgggaagtccagctgggttccagtcctgacattcaggattgggtatgtgaccttgggaaaatggcttttttttttgagacagagtatcgttcttcttgcccaggctggagtgcaaatggtgcagtctcggctcattgcaacctccgctcctggattcaagcgattctcctgcctcagcctcccaagtagctgggatgacagatgcccaccatcatgcctggctaacttttgtaattttagtagagacggggtttcaccatgttggccaggctggtctcgaactcctgacctcaggtgattcacctgcctcggcctcctaaagtgctgggcttacaggcgtgagccaccacacctggccagggcgagtgtcttaacctctcagtcttggtcctcaactgtgaagtgggtaccctcctcatgagcttacacaatatgcaacttggcacaaaacagatgccttaaatgtcagcctctcccacccctacccccattccgtcactgttgaccgactgtgggggtgcttggggaccctggcttggaacccccccaacaagttcactgtccccgtttcatccctacaggtggttctgccatgtggacgatgacaactatgtgaacccaagggcgctgctgcagcttctgagagccttcccgctggcccgcgacgtctatgtgggaaggcccagcctgaaccggcccatccatgcctcagagccacagccccacaaccgcacggtgggtccctctcctcctcctttgccccttggcccgctgatcccaagggccgggccggtcctgggggtgggggtgtgctagagaggtgagaggggttctgggtttcaggtttggccctatgtgggtttgggctggtagcttcccctcttcaaccctcagtctcttcctctgtgaaatggggagactgagatcatgcagtcgtggcacagacacagtacatagtgaggcctccatcccccaggaaccacggcttgtcctggtcactcagggagcatccaggtgagctgaggctgtgtgacaccacagcagggctcccagtcacctggtgtccccatgtaggtgtgcaggttgttaaaatgctggaatggctgggggcagtggctcatgcctgtaatcccagcactttgggaggctgaggtgggtgggtgacctgaggtcaagagttcgagaccagcctgaccaatatggtgaaaccccgtctctactaaaaatacaaaaattagctgggcatggtggcgggcacctgtagtcccagctactcgggaggctgagagaggagaatcgcttgaacccaggaggcggaggttgcagtgagctgagattgtgccactgcactccagcctgggcggcagagcgagactccgtccctccgtcaaaaaaaaaaaaaaaaattgctgaatactgtggggctgggtgattgctgccacctgagccccagaacccttccccaccttcccctcctggggcaccctctccctccagacacctccactagcctgtgactgaagagtcgacacctggcaaaacagggggctctgtacccgcctcagttcctgacctggatggacactgatttgggttgccagattcattaaacaaataaatgaaaaaccactacatccagttaaacttgactttctcataaataatgaggaaatttttagtataagtatgtcccaaatattgcatggttctctccctgtccccaggaccccctgggcatcaggtgttagagtggtcctggccctagggctcccttggctccaggaagaaggcagatcgggaggtccctctctagaggcagtgcctggtgcaggagctgggcacacagcggggctcaacctcccttcccaggtccccatctgcttcattaggaaaaccaagagcagaaaacacagagccttaattatcagtagctaatcagcctctgagccttaattaaattcttctgggccctagggctctgtgtatgagtgattccaggggagccagggggtcccccaggctctcacaccacttcactgctggcgactcacctctgcctaagcagtttgcctctggggtggagaactgcacgctggagcctgactccctgggtttacacggcagccctgccacctcctggctttgtgaccttgactgaggtcacctcacctctctgtgcctcagtttcctaatctgtgaaatgggtgataacagcccctactcaaagagtggtcgtgaacacagaagaaagaatgaaatgaggtcatctctccaagtccttggaatgagacctggcacgaagtcaacactagaaagtgttagtgatctgaggccgggcgcggtggctcatatctgtaatcccagcactttgggaggccgaggcaggtgaatcacctgaggtcaggagtttgagaccagcctggccaacaaatagttaaaccctgtctctactaaaaaatacaaaaattagttgggcgtggtggcgcacgtctgtagttccagctatttgggaagctgaggctggagaatcgcttgaacctgggaggcggaggttgcagtgagcagagatggtgccactgcacttgagcctgggcaacagagcaagactctgtctcttaaaaaaaaaaaagtgttagtgatttgtattggacacagcctgacctttgtttcccagccacatctttcctatgcacactcaggccccgtcaacctaggcccacctctgtggcccaggagagcaggtgccatgttcggcagcccctcccaagccacatggagtgaggtagagacctttctcaggggaaaggggcatggtggctgggtgggtaaaacaacacctgtcccctttaactggaattcagctggacttgagtctgatcagtgacctcaccactcataattaactatgtgacttcgggcctctgttttcttatctatagaatgggtgcaataatgccaggttgtagcaagactctagtgagattcaaaataaagggcttttgagccatgctggttgggggtgaagggtggcctggctgtcccttttccccacaactgccaccaggctcactctgccccttggccttcctctctctcagaggctggtacagttctggtttgccactgggggtgctggcttctgcatcaatcgcaaactggctttgaagatggctccgtgggccaggtaagcagagacccaggggtgggcaggaaggcggggagggggtggcagctggggtacaggaggggcctttgcagcaggaagggctttgagagtgagctcaggagaagctgctcctcatttgcgtgtgtcacagagcggcagttggtggtgaacaagccacctgccacctgccctcaggggctgcacggctgagcgcatgacgtgccactcacaggcaagtcatgtcatctccaagagccccagtccccccgtcggcacatggacctgataatgcagtggccaatggtgtagtaagggttaaatgagaaaatgtctgggctggccctggtaggtgctatttaccgcccttttctgactggtcaatgccgtaggggaggtgaaggccaaatctaagggtcttcagaggagggagaagggccttctgggtgagggaagaagggaaggcttccaggaagaggtggtatttgagctgggacagtccactatacactgggccatctaagggagatgatattactcctaatagcacagtgggtgtacatcctgtgatattattcataatatcatctaagggagatgatattactcctaatattatgaggggatctcaggggtagtggaggccgcagtgtgggtgggggtgggacacaggtgttctagaagtggcgaggcctggcttctggaggtctttccgggctattattattattaacagcaccatcagcagccactcccttgtattgaggactgactctgagccagctctgtgctccatcaagaggatcacaacacctgggggagaaggtggcattagtcttgtttctagatctcaggcaactgaggcactgagattaagccagtctgaggtcagccaggttcaaggtcactcagctgctgggtttggctccaaggtctgcaagccttgctactacccaagcctgccctgccttgccctggctgggaggggcgccccaggcaattcatactggacaagagcgggctcattgtcctggggcatgtccacagaactgtgtgtgtacacatgaccagggtcatccgtgtgcctggggtgcccccacccaggcttctgcccacctctaaattacctttgtgtgaattagaaaaagccctctccctccaactcctgcaggtgcagcttgagggcatgcaggctggggaggggagtgcaggctggggaggggagtgcaggctggggaggggagtacaggctggatttccacacccacttgccccttggacaagcatccagggcagcggcattaatggggtatacgcggccagttgaagtccatgcctgggactctgttcctgtctcccctcagcactggctgactccagcccatcctgcaagactctgtttaggtggctcatgcctgtaatcccagcactttgggaggctgaggtgggtgactcacttgaggttaggagttcaagaccagcctggccaacgtggtgaaactctgtctctactaaaaatacaaagattagccgggcatggcagcgggtgcctgtagtcccagctattcaggaggctgagacaggagaattgcttaaacccaggaggcggagattgcagtgagccgagattgcaccactgcactccagcctgggcaatgaagggagactctgtctcaaaaacaaacaaacaaacaaacaaacaaatgaacacacaaaaaagctgccacctcctctggaaagcccgcctgattctccctgtacccccaggcagcatgcttccctctgacttagcaccactctttgaaagacctgctccctgctctgtctcccgccagaataggggctgctgttgggggcaggaagcgtttctttctcatctctgtatcctcagccctagcatggtatctggcaccagcaatgaataaatgagtgaatgaatgaatgacaagacagagagagaaggaaaggctacatttataaagggcatcaccttcccattccctgtttaatcctcacgacagctccacgaagacacggccattagcatccccatttcacagaacaggagactgaggctgaggctccccaaggttcctgacttgctcaaggtcatacagtatgcaggaggcaggtgctctgttctgccagcttgtcccagtggagggccttcatggggtggcccacggctctgggtgtggagggcctgggccagcgtctgcagtctggctctgtccctcagtggctcccgtttcatggacacatctgctctcatccggctgcctgatgactgcaccatgggctatatcattgagtgcaagctgggcggccgcctgcagcccagccccctctttcactcccacctggagaccctgcagctgctgaggactgcacagctcccagaacaggtgagctggccttgggggcaggtggcaaatgggaaggggaaccaaaggaacatggggtccccccaaccctccctcctggcgtttgaaagaaacctggaactccagattatgggtcttgggtattccctattgatggggaaactgaggcctagggtggcaaaggacaccctaagggtacacagggactcaaccccttcacctctaaccctcaaggattagcatttgtgaagctgaaattctttgatctggtcctcaaatgccgggaaggacctgaacaaatgagatgaggttgtcttcaggttcccaccaccctgctctccacccatacctctactcagtcttccatcctccccacattcctcccggggagcccagctggctcttctaattttacctgttaggagccccttccttcatcaaaactcccctatccattgctcagtgctgttcctgccaaccctgaggttaccgggatggaatgggtctttggggggacgctcagcattatgttaggctgggggaggagggggaccccatcccaccacctggcaggtgatacaggtccaactggctctgcctcggagaggctgccctctgacactgtagatggtcctggctgggagcgtccccgggatctcctgcccaacagtgtgacagaaactcaacgtgaactggctaacctgaaaaggaaattgttggctcacataactgagaagctctcccccaagttggcccatcctcaggtgggctcagccctcatgttggcaagatggcagccccagctttccccccactatcggaggagagcgcctccttccttcagatccccgggctggcgttcattgatttgatgactgggcttgggtcaggtgacccatctcctaccagcacctggagttagtgttgattggccaggcctggaactggggtgtgaggttggtcccattaggatggcagggcctgaagccaggaaagagaggcagatttgaggcagcccaaaccagggcatcctaatggttagggtatcctgagtacccacaatgccaggcaccacactggggtccttcccttctttttttttttgagatagagtctcgctctgttgcccaggttggagtacaatggcacgattttggctctctgcaacctccacctcccgggttcaagtgattctcctgcctcagcctcctgagtagctgggactacaggcacccaccaccatgcctggctatttttagtagagacagggtttcaccatgttggccaggctggtctcgaactcctgacctcaagtaatccacctgcctcagccttccaaagtgctgggattacaggcatgagccaccgcacccagccacccttctttaactctctggttcctcacagtagtcacatgaggtcagtactaacattatccccattctatagatggggaaaatgagacccagcgagctgaactgaccacggcacacagctaatatggggcagaggggcactggaaccctagctgggtggtccctatgcccacagtctttaaccactgtgctctacagcctctgagctgaaatcatgatccatgtcgtcactgcctggtggagtaggggctccgggtgaagagggatgtgccaaggccctccagtgagtctcagaaaacctccattctagtccaggcttgcagcttactggaaagctgccttttcctgttgagcctcagtttccaaatctgtagatgggggtattgttccagcttctcaggggagctcaactcttgagggagcaaatgggattaagggcatggcagtgctcttccagctgtgaagtgccttggggcgtggggtgggctcccaccaccagcggggaatttcaggttcccgggcagctttccctgcagcttaaaacccctcctccacctgtgccaggatgctgcccccttgtggggatccccagtgtgatgccccaacactcttctatctccctgcccaggtcaccctcagctacggtgtctttgaggggaaactcaacgtcattaagctacagggccccttctccccggaggaggacccctccaggtgggtctgggggctggaaccttggatgggaggagtgggggctgagtccaggcatccaaacatgggggagctgggagggagtggagtgggacaggctttggtggctgacagcacagagctaggagtggagggagtggatttcagtttctgaccctgccactggcttgctgtgtgaccttgggcaagtgtcttgccctctctgggattcggtctcccattagtaacacctggaggctggccatgatggatctgaagagctctcccagccccaatcctctggggttctttgggagtccctggaaggctgaaatgccttccctgagcacaggcaacgctctcatggtggaacttcaggctctggtgggggatttttattttatctcttttggactccttgtttctttgatactcttaaatgcttcttttaggcaggtaaagggttggaataacaccttccagttctgcccagaactggccacggggagatgggccacccaaatccgctcctgactggtctagagcagtcttggagcatagcctgtgatatgcagcttcctttccacacaccagcacctgccagctgtggctttttttttttttttttttttttttgagatggagcctcgctctgttgcccaggctggagtgcagtggtgcgatctcgactcactgcaacctccgccccccgggttcaaacaattcttctgcctcagcctcccgaatagctgggattacaggcgcctgccaccatgcctggctaatttttgtgtttttagtggaggcggggtttcaccatgttggccaggctggtttcgaactcctgacctcaagtgatccgcctgccttgacctcccaaagtgctaggattacaggcatgagccgctgcccccggcccagctatggcttgtgattctggccaggggtggcgggatgggggtggagaggagttgggggaggggacacatggactctgggcccatcagtccaaccccagaactgatgcttgaccccttcccagcatctctgccaactgatgggctggcttcaccttgcatgcctacagccatggggagttcctccctcctgtggcagtctgttccatctctgggcagctggactagccccaacccttctatttgcatttctgctccttgtagtgacatgcaatgggtctgggaactggggaaggagccctgattctgcctttggagacttagcagggactcagggaggtaacgagtagaggagggcatgaggtgaactctgggcccacttgagtgacagagacttgtccagagggagtcctgggggacggggagtctgggacactgtgtgtgtaggggatgagggtgagtatgccagtataggttgttatgggagagtaagtcagagccctgatgttgactggggagtaggggctggccggggaaggcttctgtgaggaggtaacgtgaaggacctgaagggctagcaggagttcgctaggagaagagcaggtggcagatcactcccgcagaggggacagcatatgcaaaggcctgatagcaggagacaggccttgacctgctcaaggtaggaacgggagactgtgtgactggaatgtggagaagaggagggaatggtgtcaaatttggttggggacgtggcaggggcctctccaaggcctttgtaggctctgtctggacgcttgtgatgcttggaggaaccagggcccctggccctgacgttctgcagtgctgcctgtcctggggcagagggctcccatgatgctgagggcccttgcggccaaggctgcgttgaacaagttggatattacaaggagatagaatttggctcgatataggaacaaaaattcaaaattccaagacgaacgaagctgccttctagtaggatgagctccccgtcagcagtgtgtaagccgtagctatactgacaagaggtttaagaattgctgttaaatttcctcaaagcttgaagattctagaagtcatagattactgccaaatgggtctggagccacctagagattcagatgcatgtgatcagatgattggcctcagctgaggtctctttatggcttctctggcttttgaagtttctccaaactagcggttctcaagtgggggtgatttgtctcttaggggacgtctggcaatgtcggagacatttttgattcttatgattcaggaagatgctactggaatcttgtgggtagagcccaggaatgctgttaaatatctcgcaaggcacaggacagctccacaacaaagaattctctggccctaagtgttagtggtgttgaggtagagaaaccctgctccaaaccgcctctgtggcatgtgtgcacctaggagagtgggctgagagcagaagtggggggtgaccatcctgtccttttctggtctctctgcagatttcgctccctccattgtctgctctatccagatacaccctggtgtccccagctgggtgcccgatgaatcctgaactgctgggcaaaggttgggcagagacttctgggtgtgccttggctcccaaggtggcactgtgggtccctggcaagtgtcttgtgataggcagtccctggcagggccttcgggtggttggcaagcccaggatctgagtggcaattggcactgaaggcaccccaggcccctgggaggtgagttagacagcccaggggaccaggtggaccaggtggtggccagagaggctccaggggctagactccctcaggaggctgaattgaaaaagggcagggggcacttgagctgggctggggctcaggggtcctaaccctttaggcagtgacatggcctctgggtggggtctggccgttggccctggctaatgtctctcagtcattcccctggggctcaagcgctgggccgcccactcctgcctccctcatctgtgtcccgagttcctgaagggacatgggtggaatgatggcagaatccagggtctgcagcacctgctgttgttgccaaccagtctcccaaagctccttgctccccaccccttgcgaacaggaccagattttgtttggagcctcagcatgccggggcccagatgatggagcataacgggtcccagccaattgtgatgatcctttttgctcatttcccagcctttcttgctgttaggggctaccatgggaccagctctggccagagggaactaagcaaatccaatagagatgtttctggggaaggttttgcagcccactccccatcttcctgctataaatgtgggtgtgatggctggatctggggcagccaccttgctaccatgaaggaaaggccaagacaatcatccacagctattccctccagcatctggttctgtacaaaaattaaatgcttatttgtttaagtctctcttggtccagttttctgttacatgcagccaaattgttcctgacggggtatggtctttatctgtctatcacagtggagatggtgatcacttttggtggtgtgatatgatgtgtgcaaagaccatgttacagagcctggcacagagaaaggaagggcagagtggctggtgactgttactagtgtgtttgtgagtcctggtgtgtgaggcggtacacaggtgtatgtgtgtgtgtggcatgtaccttctacatgtgtctgtgcataaacatgtccatgtgtttttttttttttttttttttttttttgagacagagtctcactctgttaccaggctggagtgcagtggcgcaatcttggctcactgcaacctccgcctgcagggttcaagcagttctcccaattctcctgcctcagccccctgagtagctgggattacaggtgtgcaccaccgcgcccagttaatttctgtattttcagtagagacagggttttaccatgttggccaggatggtctcgatctcctgaccttgagatccgcctgcctcggcctcccaatgtactgggattacaggcgtgagccaccgcgcccggcctgtggtgtgtgtttttgtggctgtgtcgcacatgtgtacatgatgtatacatgtgagcctgtgtgctgtgaggtgtggagtggttcctccttttctctgcccccagggcctgggttgggggaggtcagagaatcagggaaggcggaatggagactcagggctgagggacttagcctcaggtatcagataatggtgccaaagggcgatttgacagccaagggcaggaactgaataaatgcaagtgcccttggaatttccgatcccaaggaggtggatggatgaatgaaagtgatcatggtgaaatttcaggcatggtggcacataggcaggggagggttagagaggggaggtctgtgtcatgcccagtgatgcttggagttggggtcacagtggggctctcagatggggaaggaggaggagagatcccgagggccagaggggccctgatccagggagccagggctaggggctccacccttgaagaatcagaaactgtcttctggctacatctgtgctggggacatctggaaccactgagcacctgaagccagcccctttgttttccagggaggagaggtccagagagggactgccacatgctgtggtcacacagtgagttgggtgcaactggccacttgtgcttctccaaagccccgcttctttctgggctggcccagggctgggtttatgggatgccagtcgagtgagggcagcccccggccctgcagccccgtggggctggaatggtgccatccacagtcgccgtcctccccaccccacccagggaaggctgctcatcggcccgcatttagacgcggcagcagattttcgtgttgctcccagatcctgagggtcgggtggagggaacaggactcgggccatctgctgcctccattgtcccagaatagctgggggtagggagggggagcagagtcagcaaggatcagaattgggatgaaggaaggagggagtctgagtttaaccctttgcgtgtctgcctgggaagttaggaagctccctgtgccctgtgctgaagtgacccatctggaccccagaggcaggggctgagtgtggggtggggtagcaaggttagaccacctagtcttggccttgccatgccccttgggcacatagctgccgctgagcttcctcccgtttagcctgagctctgcctgcccattttagggtgcatgtggatgagatactttgaggaccatgagtggtcactgatccttcggctaggtggctgagggtaggcccccatgataacagggacagagagtgactccagaacaggagccctggcctggggcagacaccagaaggagcctggagatctcctataggggtctatggctccctcaaccagcccctatccccagcaaggagtgtgcaggggcccaaggtaggtctcctctcctcccagcaacctttttcttttttgagacagtctcactctgccaccgaggctggagtgcagtggcatgatcttggctcactgcgacttccgcctcctgggttcaagtgattcttgtgcttcagcctcctgagtagctgggattacaggcatgtgccaccacgcctggctaatttttgtatttttagtagagacagggttttgccaagttggccaggctggtttcaaactcctgacctcaagtgatccgcccgcctcggcctcccaaagtgctgggattatagatgtgcgccaccgcgcccagccctggcaatcttttaattgatgcacctgctcctgctgtgagtgaggtggactccaccccgggaggctggtgacctatcatctcagctttgcccttctgtaagtattgatgccagcagaactataaacatacatatctaccatcaaatgcatgttgggggtcaggcactgttctaagtacttgacataaattaattcatttcattcccacctatttgaagtaggtacaatcgttattcccgttttacagattgggaaactgaggcacagaaggggagaaggtccttgtgccaggtcataggtcttctcggtgccagagccaaggttggaggcagcctggctctgcagtggtcatctcgctgcgggacaactgaagagttggagaacctcctcaggcctgggctccaccctgctgcccacctgtggctctatgcccttaggcaggtggcttcactgttcactggcctctcatctgtaaaatgggcacagtggctcctatgcagcaggctgcgaggctttgagatgctgcatagaaagctcctgatgcggggtagttgctcagtaagtagcacctctctgtccttgctgagctcacgttatcagcagtaagaggttggggtactgggctggccataacctccactccccaccttggctgttatcacagcagcctcctcgctgctcctgtagtcctctctccactgctcactggctcctggcacaatggcctccttgcttgctgtggcaggtgtcatgttctctgccagcaccagttcttgcctctccttgtattgcaaccctcactcctgcacagctggcttgttcttgtcaagctcccatgtcccacctcttagggaggctccccactcccatcacacagcagccacctggtggtcatcaatcacctcctgttatagtcactcataacctgtcacccttgcagacctgccttccaggtatttgtttgttgtctactcccacctggctgtgagctccacggtcagggatccccttggttctgttccctgcagctcatgacctggcatagtagatcctcaacaaatatctgaggaacgaacagaaacataagtgaacggacttctcagatctcttccagctctgtcagtgttttaagatgctatggaagatactgaaataactgaggcaatgcagtggggcttcctaatggagggatcaggctggcaataccagaacgcaccaagccttcttagtatcacccagaaagcgttcttagtatgctccagatgtgatcccataggaaggacacagcacttcccaggaagtccgcttgctagaatgattgaccctacatcacctcaaccctctggacctaaacaccagtctacaggaagcaggaggacagtgcaacatgttaaatgacaccacgagggttcggtctgccacatcaacaatgaggacagtctcacatgacgaagggcctggtttcctcaacaagtaaaagggcataaaaaggaagagagtaaagactgttagagaggaaaatagatttaagggataaagtaccaaaatgcaatgtatgggtcgggtgccatggctcacgcctgtaatcccagcactttgggaggccaaggtgggcggatcacctgaggtcaggagttccagaccagcctggccaacatggagaaaccctgtctctactgaaaatacagaaattagccaggcgtggtggcgggcacctgtaatcccagctacttgggaggctgaggcgggagaattgcttgaaccctgaggcgaaggttgcagtgagccgagatcgcgctgctgcattccagcctgggcaacgagactttgtttagatctttattcaagcagacgaaccctaaaaaggcatttttcaggaaaatgagaaaatttgaagatggactgcatattagaggatcttaaggaatggttcattttattaggtatggtgatgatgttgggcttatttttagaaatgtgctagtgtgtgagagatacattctgaaatattaatgggtgaaatgatctgatgtctgacatttttgttaaaaaggggcttgagggaggaatggaatgagaatggcaaagtgggtatggcagttagagctgggtgatgggtgcgtgggagtgcctcataccagtccctctacttctgtaggggtttgagactttccataataaaagtaaaatggaataaataaaagtcggtctgtgcatatttcatttctctggctgtggccctctccttccagctcccccctcctccacgccccacattcaggcccagagaacatctgtttttaccaggcacagctgtcctggccccacttcctgttagccccaaacacccggagaaaggaaagccaggccttgactcaactctggctcctgcctgatttgcatttggcctgttgcctggtttcccagaggcccaccctgatttctttgggttctgagcacttgtctcagctgctgtgtaacccaggagcacttcccctgggcacattcctctccctactcatcctccaataattgctcgcctcctctagcaggggtcagggaggtggaagtggggatgggatgggtccctgtgtcagatgctacatgggacaatcaggtgcaagccctgccctcaatagggagtcccaatcccagttgggacatgattgaaaacatagcggccgcgcagtggctcacacctgtaatcccagcactttgggaggccgaagcgggcagatcacaaggtcaggagttcgagaccagcctggccaatatggtgacaccccatctcttctaaaaatacaaaaattagctgggcgtggtggcacatgcctgtaatccaagctactcagggagctgaggcagaagaatcgcttgaacccgggaggtggagattgcagtgagcagagatcacgccactgcactccagcccaggaaacagagtgagactccatctcaaaaaaaaaaaaaaaaaagaaaaaagaaaacatagcacatcatgtaaacaacgataatcagcaaccatatggtgcagggagggaggactacattctggggggttcagggcgggaggaatcaggcacattgatgtgtgaagtggcgttgtgtctgggtcctaggccacgagatctgaaggagcagaatgtgtcatactgtgccttgcagatagggccgtggagactccaaggaaagatacagatgctggttatggttatgataactaccgttctcacatgcctatgtatctcatcttgcaggataaaggccaggtatgtgcctggtgctgtgtctacacaaagcagaaggggctgcctctctccctccctccccacgtctaccctgcctgatgcagctctgtgccttacagtatctggcacagtgctgggtacatagcaggcactccatgaagaccagctgattattgaggtcagtgttcaaactcagtccagtaccaaaatggctggatagaatcacaagcagttaggatagttggttaaaacagatcccagggctccatattagaccctcagaacccaaatctttaaagaaagggccagggaatctgtatttttacctgccccccacccaggaggtcgtaagttgctgggttacagaaggaggtgagggagttagaggatagttcagcaccgcggacagagccacactgccgcttccatcgactctctttcctgggactgactagctgggggcaaggaaggtcagtctctgtatgtgaaagggatccacagtctaatcctgatgggggccaggtgacacctgtggtcttgacccccacatgacgcagccccggtccctgcttcgggagcaagtttcagggaggacaatggtctcgctgcagagacagcttcgactgcacagggaggggccgtataataaatatcccctcgatctcttttataagttgtaagtgacccccatactgtgcaagcagcaaagcatgaagcctgagcctgtgtgaacagattaatcccccaaacatggtttgagcacctactgtgttcaagggctgtgctggtagccacagggcatgtagggatgagagagagatacagccgccgcctcaagccacctgcagcttgtcaaacatggttcattggttgttagaaaggagagcagccttgaagataaccagaccctgagtccagtcagtgtgcgtgttagagaggcagccaggggagtggagagaacagacatttggtggcagaggcttcctgcatttgagaactggcactgacaagctgcgtggccttgtgcatgtggcttcactctcagagcctcggtttcctgatctgagaactgggagtgactgcatccctccctctatccctgccccgccccccagcatgtactaggaaagtgcccacctggcctggttcccaggacccagcctgagcaccattcatttactcatagactctgcatttgctgaagacccattatatgccagttacagtgccagacacggacaataaggtggatgagagctagcaccctgggatctgatactgggagagtaggcagacatggctcctcctctttttctcctgagcccccagctgggcgacgtttctagcttcccttgcagtaagggtggccatgtgactgagttctgcctgatggatgtgccccacttgcagggctggcccataaagccctcccccatgaggtgatctcttttcgtctccttccctggctggtgagagaagcctctgggtgcaagaagggcagagcctggaggcgggaggggcccaggacccgaaacagcaggaggaagtctgttcaccaaatagtggcactgaactgttgcaagcagcagaaacatactagtgttgagttgaggccctaaattttggggtgtttgttgcagcacttagcctgtcctgacaaacacagagagacagacatcaagcaggtgcaaacaagcaggaatttcagagacgatggggtgatgaaggaaataaacaggaaggggacagtggagaatccttggggaggatacattatggatttctttgcttttcttttttatgagacagagtcttgctctgtcacccaggctggagtgcagtggcacgatcttggctcactgcaacctctgtcacccgggttcaagcgattctcctgtctcagcctcctgagtagctgggattacaggcgcccaccaccatgcctggctaatttttgtatttttagtagagaaagggtttcaccatcttggccaggctggtcttgaactcctgacctcaggtgatccacccgccttggcttcccaaagtactgggattacaggtgtgagccactgcacccggccctagacttccacgctttaaaaaatgacattattaatttttaaaaattgcattaaaatatatataacaaaatttaccattttaaccattttaaccattttttttttttttaaagagacgaggtctcactctgttgcccaagctggagtgcagtggcataatcagagctcactgctgccttgaattcctgggttcaagtcattctctcacctcagcctcctgagtagctggaactataggggcatgccaccacaccctggctaatttaaatctacatttttttttttttttttttgtagagacagggtcttgccattttgcccaggctcgtcttgaactcctgggctcaagcgatcctcctgccaaagcaatcctcctgtgcttggcctttaaccacttttaagtgtacaattcagtggcattgattttattcacaatgttgtgtgaccatcaccacaacttttttgtaatgtttaatcataatgttttcaagggtcatccatgtttgtagcatatatcagcacctcattcctttttatggcagcatactattccatagaatggatatgtctcagtttgctcctgcattcatgtcaatggatatttggcttgcttccatcttttggctattgcgaataatgctggtatgaacgtgggtatacagatatctgtctaagtccccactttcaagtttttcagggcatatagccagaattgctagatcatatgggaattctatgtttaatttttttgaggacctgctgtactgttttccataggagagcatcatgttatattcttaccagcaatgcacaagtgttctaatttctccacatcatggccaacaattattttcttttcttttttttttttttcctgagactgagtctcactctttcacccaggctagagtgcagtgccatgatctcagctcactgcaacctctacctcctgtgttcaagtgattctcctgcctcagcctcccgagtagctgggactacaggtgagtgccaccgcacctggctaatttttgcaattttagtagagacagggtctcactatgttggccaggctggtctcgaactcctggcctcaggtgatccgcctgcctcagcctcccaaagtgctgggattacaggcgtgagccaccacacttgcctgtttttcttttttaaaatagccatcgtcttgggtatgaagtggcacctcattgtggttttgattggcattcccctaatgattagggatgttgaacatctttgcaggtgttattggccacccattgtataatttctttggagaaatgtctattcaactcttttgcccagtttttattcaggtggttttgttgttgttgttgagtcctcattcttttttttgacagcctcatggtattccacgtaatagatgtacagttttctattgaccagtcagtcctctatggatgggcatttggatggttttcccaatcatgtgcttttcaaacaatgctacagtgaattttctcatacacgtgttattaagtgcagatgtgagtatattggaggattggtggattaaagagaaggtgcatctgtggccgggcgcagtggctcacgcctgtaatctcagcactttgggaagccgaggcgggtggatcacgaggtcaggagttcaagaccagcctgaccaacatggtgaaaccgtgtccctattaaaaatacaaaaaaaattagccaggcgtggtggtgtgcacctgtaatcccagctattcaggagactgaggcaggagaatcacttcaacccgggaggcggaggttgcagtaagccaagatcgcaccattgcactccagcctaggtgacagagtgagactccatctccaaaaaaaaaaaaaaaaaaaaaaagaaggtgtatttatcatttcggtagacgctgtccaattgtccttgagagtgaatgtgttcctttttattcccaccagtcatgtaagagagcatggcgcggctataaaacaaacacgtatgttttcggcatcgtgccaaagatttcgtcttccctggggaagctaatctgacatttcctcatactgatgaaaacattggcctaacattgcactctgtcaagggatttgcaacttaattgcattttgttcataaaacaattaatattgcataacttgccatcaacagaactaattttgaccctgcactatgacaaatctattcatgctttatgttttaaaaatccgctcaaagctaaaaaaaaaaagctactattcgaataccattaagctgatatcaaaactcagactcgattgcaacgtgtctcccaacctttccaaatagcacaacatttatttttctcaattcctttccagaggtatatccatgaaaattcatgagtgggaattcttttatcaagagtatctaacaagataagggaacaactcacatatcaaatattaactcagcctgaacatatgatactatacgtggatttagagaagcagacagcagctctttaccaagcccacaccaaaccacatgctcctccaactgtaatcaagaaagtaactgaaattgtttgggcaaatcagggcctaattaaaagagataaacagatgataaccccattaactccattatacgaatatatgtttataatgaaccagtcacagttttcaagaagaaggcggatgttctcaaggggtaaaaagtctcataaatgaggtactaacttgtaaataaactcaggacagcaaattctatatgttctgtaagcagctaatgtgatatttatattaactataataaagatacatgccaagtaaaacatgaggtgcaggtgaataaatgagacattcttaatcagtatagattaaagccatagtaaatacacattagctttgtacttagtgtcaatctagaagctggtctacataaatatcagctaacttctctttccttgcatgaaaccttcaagttcacctagttcaacctctctcccagcggaggaatcccaggtcgcctaaccacagttcgcctttctccaatgacggtagtttcactatttcaaaaggcagtgaatccatgctgcttctgattcgctgcccaaattgggagccggtgattttctcctcctctgagggttgtccagggtgcaccatcttcctccccagccccctgagattcagagacacagagtcacccagagataatctttaaagctccccaggtgatggcaaggtacagctaagtgtgggacctactgccctataatgatcatccatgatctgccttgtcagctgtacatgcatttgtttattcttcattcattactagcatttattgaatacccacgctaggagctgagagtacatacatgttatttacctaatgtctttctttacatggacccttttgtatctaaagacattcgttttaaatattaatgaatctgatggatcagatacaatcaaactagatacataactcttaaagaagttcatcgctattatctaaaaattaccctgatagtttactagtgttattcacatgaccttttaggaaataatgagttcattcattccttcattcactcattcctttcttcctccctcccacatatgctaagtctctctgacagtccatacgcaatgacaggcaccctcccttgccccctgctggaaaatgctcagtgtctacctgccacccacagtcacaccccctgctgctggaacaggaatggagctgttcccagcttctttgggcctttatgaagcacattcttagggctctgtgctcctcccacaggtgcccaccctttccttcacccagccaggcagtcctggaggtgtgtgtggggaatgctgctacctggctggatccggggtaggagtcccagtggacagtgcagaacatcaccagcagggggcactcatgcatcaccactggcttctcacctggcccagggcaaggcaggcctggctggaaggttaagatgactggggtgccactgaggggaccaggctaggcttgggaggggccctatgggataaaagggcacgaaagtgggccccttgcactcagattctaagaaaatcctccccagccagggggaagaaaagcacacagcacgtctccttaccagatttaacaaacatgaccatctgggggacagcagccatcagttaaataatcctgccatttggtgaggggcaaggttgcctctcaggcacatgctggttctttgtagggagaggagtgggacagagagcagaccttcaggccaatggggctctcctggggactggccctcatatccccacctccagcccagccaggagaagaccagtctgggtggcccgggccttctgcaactgtcctttaccagtcccttgggcctcatgttcccctcctgcaatcattcccaccctacctgcttttcctgggagcatgaaggtggaagtgtgttgccaacagaggaaagccatctaaacaaaaacaagggaatctaaaatggagctcgcctgcccccatcctgccacccccttcctacttcggaatttgtgtgcatttgtaatctgtgagtctgtctcattgtgcattgctggagctgacgattaggtgcagtggtggctctcgccttgccctctgatgacttttccctaattggtttaatctgtattttcacgcactcactggaaaatgagaagagccgccagcttctccgaggagctgggatgaggcgtgaaccctacgagaagggtcgcgggggtttgcggctcctgccatgggggctggggaggtcacaggaaaatggcagactgtccttgttcttgggtactcacagtccccgggcgaggaggggcacgaatggaggaggtacagaaggcgaaaacgtactgggggcctgcgtacctgggaaaggagaggtggggagaggaaaccctgactggggttggctccccccgggcagaatgtctgtccgttcaggggcaggaacgggggcacccaggcagagagatcccaggggcagagtgtgagtatctcagtgccagctacttgtgtttctgtggctttctctgggataggacaattctgtggacctctctctggatttgtcatgactttgggaagacagctcggtgggtgtctgagtctagtgtgttgtctgtgtgtatgagtgcatgagtgagtgtgtatgtgtgtgagttgggtgtgaccactggtggctgctaactctctattgcattcggcttccagccctgcagggtttccttgttgaacctctggggatcctgccttgggacagaggtggctaatgcagcagggggcgggggtggggctagcctagatagaggcttaagcccctactgctggggtaaagcgattaccagcgtgtgtgtgtgtgtgtgtgtgtgtgcgcgcgcgcgcacgcgtatgtgtgtgtgcgcctttagtggctgcagaatcctcaaccaccctgagagggtccaaatacttgcccctggccttccctccctttccttgccatgattcgcagccccccagctgacctcgatatgttcatttactctaagacgctgtgctctgaaattgcttctcctcctcggagttctctggctctgatagtgaaatttccactagtgtcagaggggagacagtttgggatgtggggagcttcttgatgctgccttagagacatgtacaaattgggacccttgaccttgcgtttgacaagtgaatcacttataatcaccacttatttttacttgcatcaacctcaccaagacgaagagctttgggttgctccttctggcgccaggagcccctacgcagggttaatgatgataagagaagtgagtgtgactcagcagatggaatgttccaatgctggtgagtaaattcagtttcctataacaaacagacaataaggaaattaggttctcaccgtgaacctgagaatggtgctgatccttaatagcccctcctgtgtagcaggcaccgctgtaagctcttcccagatcagccgccctctgttgcccatttcacagatgaagaaactaaggcacaaagaagtgaagtaatttgccctgagattaaccagttcacggagcagggatgtgagcccaggcagtctagggtccttgccaagtacccagccactgtgccctgcattgcagggcagccccgcacgtggtcacagtgtggaattcatggtgtttcctgcagcagagccgcaaaccttagtcttaccggagagcttcttgccagcgacttgatttcacatggcaaagaaagagtaggacaggtttaaaagaggcttttactatacccaactggtattcacttcgtgtgtctgttctctgtggtttgtaaatattctccggcttccccttgat

SEQ ID NO: 5476 - protein, 321 aa, Homo sapiens
  ref <308>: DATABASE ACCESSION NUMBER: SWISS-Prot / CAB07511
  ref <309>: DATABASE ENTRY DATE: 2002-06-15
MQCRLPRGLAGALLTLLCMGLLCLRYHLNLSPQRVQGTPELSQPNPGPPKLQLHDVFIAVKTTRAFHRLRLELLLDTWVSRTREQTFVFTDSPDKGLQERLGSHLVVTNCSAEHSHPALSCKMAAEFDTFLASGLRWFCHVDDDNYVNPRALLQLLRAFPLARDVYVGRPSLNRPIHASEPQPHNRTRLVQFWFATGGAGFCINRKLALKMAPWASGSRFMDTSALIRLPDDCTMGYIIECKLGGRLQPSPLFHSHLETLQLLRTAQLPEQVTLSYGVFEGKLNVIKLQGPFSPEEDPSRFRSLHCLLYPDTPWCPQLGAR

SEQ ID NO: 5477 - DNA, 381 bp, Rattus norvegicus
  ref <308>: DATABASE ACCESSION NUMBER: EMBL / AA891666
  ref <309>: DATABASE ENTRY DATE: 2000-03-03
aaacagaattgtccaggtttattcacaggcaggacgtcttcgggcctgctgctgtatatccctccacactcagtcaaggaaagacttctttggcctcctcagctgatatctcctgggagtagagatctgtgaagagagctggcagccagtagtgggcctcccctggtgcctgcagatccagccaggccagtccttccttcagcaggtgttccagcacttgccgtgctcgctccgtctcccatttaagactggctttgatttcactgacagtcacataaccgtttttctcggccagctgcagcacaacagtgtgatccatattgagctcagctggaacagactgaatgaggtaagttccctccacagggatgatgccaaatc

SEQ ID NO: 5478 - protein, 775 aa, Rattus norvegicus
  ref <308>: DATABASE ACCESSION NUMBER: SWISS-Prot / Q9ES73
  ref <309>: DATABASE ENTRY DATE: 2002-06-15
MAQKPDGGAGLRGFQAEASVEDSALLVQTLMEAIQISEAPPTSQATAAASGPNASPQSSQPPTANEKADTEVSAAAARPKTGFKAQNTTTKGPNDYSQARNAKEMPKNQPKVAFKSQNATSKGPHAASDFSHAASTGKSAAKKSEMAFKGQNTTTKAGPSATYNFTQSPSANEMTNNQPKTAKAWNDTTKIPGADAQTQNVNQAKMADVGTSAGISETDGAAAQTSADGSQAQNVESRTIIRGKRTRKINNLNVEENSNGDQRRASLASGNWRSAPVPVTTQNPPGAPPNVLWQTPLAWQNPSGWQNQTARQTPPARQSPPARQTPSAWQNPVAWQNPVIWPNPVIWQNPVIWPNPIVWPGPIVWPNPMAWQSTPGWQSPPSWQAPPSWQSPQDWQGPPDWQLPPDWSMPPDWSFPSDWPFPPDCILADWPIPPDWQNLRPSPNLRSSPNSRASQNQGPPQPRDVALLQERANKLVKYLMLKDYTKVPIKRSEMLRDIIREYTDVYPEIIERACFVLEKKFGIQLKEIDKEEHLYILISTPESLAGILGTTKDTPKLGLLLVILGIIFMNGNRATEAVLWEALRKMGLRPGVRHPLLGDLRKLLTYEFVKQKYLDYRRVPNSNPPEYEFLWGLRSYHETSKMKVLRFIAEVQKRDPRDWTAQFMEAADEALDALDAAAAEAEARAEARNRMGLETELCLGPWSWDDIEFELLTWDEEGDFGDPWSRIPFTFWARYHQNARSRFPQAFTGPIIGPSGTATANFAANFGAIGFFWVE

SEQ ID NO: 5479 - DNA, 5441 bp, Homo sapiens
  ref <308>: DATABASE ACCESSION NUMBER: EMBL / AK074092
  ref <309>: DATABASE ENTRY DATE: 2002-02-15
ggacaaggagagagtgcggctgctgagagccgagcccagcaatcccgatcctctgagtcgtgaagaagggaggcagcgagggggttggggttggggcctgaggcaagcccccaggctccgctcttgccagagggacaggagccatggctcagaaaatggactgtggtgcgggcctcctcggcttccaggctgaggcctccgtagaagacagcgccttgcttatgcagaccttgatggaggccatccagatctcagaggctccacctactaaccaggccaccgcagctgctagtccccagagttcacagcccccaactgccaatgagatggctgacattcaggtttcagcagctgccgctaggcctaagtcagcctttaaagtccagaatgccaccacaaaaggcccaaatggtgtctatgatttctctcaggctcataatgccaaggatgtgcccaacacgcagcccaaggcagcctttaagtcccaaaatgctaccccaaagggtccaaatgctgcctatgatttttcccaggcagcaaccactggtgagttagctgctaacaagtctgagatggccttcaaggcccagaatgccactactaaagtgggcccaaatgccacctacaatttctctcagtctctcaatgccaatgacctggccaacagcaggcctaagacccctttcaaggcttggaatgataccactaaggccccaacagctgatacccagacccagaatgtaaatcaggccaaaatggccacttcccaggctgacatagagaccgacccaggtatctctgaacctgacggtgcaactgcacagacatcagcagatggttcccaggctcagaatctggagtcccggacaataattcggggcaagaggacccgcaagattaataacttgaatgttgaagagaacagcagtggggatcagaggcgggccccactggctgcagggacctggaggtctgcaccagttccagtgaccactcagaacccacctggcgcaccccccaatgtgtctggcagacgccattggcttggcagaacccctcagggctggcaaaaccagacagccaggcagacccaacagcatgtcagagccctccagctaggcagaacccaaccagcctggcagaacccagtcgcttggcagaacccagtgatttggccaaacccagtaatctggcagaacccagtgatctggccaaaccccattgtctggcccggccctgttgtctggccgaatccactggcctggcagaatccacctggatggcagactccacctggatggcagaccccaccgggctggcagggtcctccagactggcaaggtcctcctgactggccgctaccacccgactggccactgccacctgattggccacttcccactgactggccactaccacctgactggatccccgctgattggccaattccacctgactggcagaacctgcgcccctcgcctaacctgcgcccttctcccaactcgcgtgcctcacagaacccaggtgctgcacagccccgagatgtggcccttcttcaggaaagagtaagagctgtaactccccagtcacttttcccctctcttgctcttttctttgtcatcctctcatctgtaattcaaccaagtttttttgtaaatattttataagtttaatgatttcctttttccctcccaggcaaataagttggtcaagtacttgatgcttaaggactacacaaaggtgcccatcaagcgctcaggtatgcatccagtgtcccctccccaagctctgcccttcccttcactccatgctctgtcagcattcttctgcttgtagctctgcccttcccttcactccatgctctgtcggcattcttctgcttgtatgacccttccccttctatcccctcctttccatggttggctctttccacccttgaggaccttgactgtgctacccccagcagggctggcaaagggactgctgctctgtggcccccgctcggctcagatggctccctcctctctcctacagaaatgctgagagatatcatccgtgaatacactgatgtttatccagaaatcattgaacgtgcatgctttgtcctagagaagaaatttgggattcaactgaaagaaattgacaaagaagaacacctgtatattctcatcagtacccccgagtccctggctggcatactgggaacgtaagatgggaaagaaggtggaacatggcctttctcagtggtgctttttttctaggagtttcacgtagatcagggtccagggttcagggtcacatagcaggtcatgggcagagctggggtataattctcccctagctgaggaatattggggaggctagatgggcaagctggttggggtctctcatgcaaatggctactgaaaatatattctttctatattcccttaggaccaaagacacacccaagctcggtctcctcttggtgattctgggtgtcatcttcatgaatggcaaccgtgccagtgagggtgagtggctggacctgcagctgggggttggccacagcctgatttccatgcttattttccgtcccttgtctccccttgcctcccattgcagctgtcctctgggaggcactacgcaagatgggactgcgtcctgggtatgattgggctctctcatctcttgcctgtttgtgccatcctttggcaacagtggatggtcccaggattgcattaacctgggggtctggagggtttggtttggggatgttcagagcccaaagatgtgacctgggtggatggggaaacagttctgaactctctgcctcttttctcatctctgacctctgttctggaaagctctttgggcatggtaatagcctctgattgtgggtttcctttttttaccttcagggtgagacatcccctccttggagatctaaggaaacttctcacctatgagtttgtaaagcagaagtaagtgatgcctaaggggcttttcctgcttcttatgattctgcctgtgtgctggtcagctttagaaagcccttcctggctggatacaatggctcatgcctgtaatcccagtactttgggaggctcaggtgggcggatcgcttgagcccgggagttcgagaccagcctgggcaacatgacgaaaccccgtctctacaaaaaaatacaaaaattagccaggcgtggtgacatgcacctgtggtcccagctacttgggaggctgaggtaggggagaatcatctgagcccaggaagttgaggctgcggtgggctgtgatcatgccactgcactccaacctgggcaacagagtgagaccctgtctcaaaaaaaataaaagaaagcccttctcaagctcgtttcttacactatacttgtgcatatgtgtttctgtgcatacagaaacacttatgtcctcaggagtatttattgcatatactcctcatggttaaattctttattttttatttttttattttttgagacggagtttcgctcttgttgcccaggctggagtgcagtggcgtgatctcggctcaccgcaacctctgcctcctgggttcaagctattctcctgcctcagcctcttgagtagctgggattacaggcatgtgccaccacgcccacctaattttgtcttcttagtagagacggtgtttctccatgttaggctggtctcgaactcccgacttcaggtgatctgcctgccttggcctccagaagtgctgagattacaggcgtgagcgaccgtaccgggcgaattcttttgtttgtttttttcgagactgagtctcactctgttgcccatgctggagtgcagtggtgcaatcttggctcgcttgaacttccacctcccaggttcaagcaattcttgtgcctcagcctcccgagtaactggaacttcaggtgcgtgccaccgtgcccggctgtttttgtatttttagtagagatggggcttcaccacgttggccaggctggtctcaaactcctgacctgaagcaatccacccacctctgcctcccaaagtgctgggattacaggtgtgagccaccacacccggccagaatttttctaatttttctacttttctaagcagttgtcttgcaagtgaagcccatccaccatccccacagtagacattcccaaggctgggccaggctgacacttttgcactgcattgtactcatttcaatggacctctgtggctcactgacaagattacaagaatctggagctagagctgaggcagaaggagtgaaaggaaatgttgtcctttctgtgaccctatacaagcctcgcctgcatctctagtgagtgcttagcgttctagtgcaggaatttaaggcttgatgattaaggggtaaataccctgatggtgttcaggaatgagcccaagggggagttgctatctgaaatctgttaaaaaatgtaagattatttttcattagtggactaccattctgcctgggtaggtagacacaaagactgttttgctctttcagatacctggactacagacgagtgcccaacagcaaccccccggagtatgagttcctctggggcctccgttcctaccatgagactagcaagatgaaagtgctgagattcattgcagaggttcagaaaagagaccctcgtgactggactgcacagttcatggaggctgcagatgaggccttggatgctctggatgctgctgcagctgaggccgaagcccgggctgaagcaagaacccgcatgggaattggagatgaggctgtgtctgggccctggagctgggatgacattgagtttgagctgctgacctgggatgaggaaggagattttggagatccctggtccagaattccatttaccttctgggccagataccaccagaatgcccgctccagattccctcagacctttgccggtcccattattggtcctggtggtacagccagtgccaacttcgctgccaactttggtgccattggtttcttctgggttgagtgagatgttgggtaggtacatcactttggattgggcagttagggtctctgggggatatagggtccatggggttgtatttatgtgcatgagctagaagtattaggaaactcattgtagggagatgaggaaagtatggggcagcactctttggtatgtatattccttattatttgatatatatcattgatttttttacttcttctttcttatgttcacagatattgctatcaatcgcagtagtctttcccctgtgtgaggctgaagcctcagattccttctaaacacagctatctagagagccacatcctgttgactgaaagtggcatgcaagataaatttatttgctgttccttgtctactgctttttttccccttgtgtgctgtcaagttttggtatcagaaataaacattgaaattgcaaagtgaaaaaaaaaaaaaaaaaaaaaaagg

SEQ ID NO: 5480 - protein, 778 aa, Homo sapiens
  ref <308>: DATABASE ACCESSION NUMBER: SWISS-Prot / Q9Y5V3
  ref <309>: DATABASE ENTRY DATE: 2002-06-15
MAQKMDCGAGLLGFQAEASVEDSALLMQTLMEAIQISEAPPTNQATAAASPQSSQPPTANEMADIQVSAAAARPKSAFKVQNATTKGPNGVYDFSQAHNAKDVPNTQPKAAFKSQNATSKGPNAAYDFSQAATTGELAANKSEMAFKAQNATTKVGPNATYNFSQSLNANDLANSRPKTPFKAWNDTTKAPTADTQTQNVNQAKMATSQADIETDPGISEPDGATAQTSADGSQAQNLESRTIIRGKRTRKINNLNVEENSSGDQRRAPLAAGTWRSAPVPVTTQNPPGAPPNVLWQTPLAWQNPSGWQNQTARQTPPARQSPPARQTPPAWQNPVAWQNPVIWPNPVIWQNPVIWPNPIVWPGPVVWPNPLAWQNPPGWQTPPGWQTPPGWQGPPDWQGPPDWPLPPDWPLPPDWPLPTDWPLPPDWIPADWPIPPDWQNLRPSPNLRPSPNSRASQNPGAAQPRDVALLQERANKLVKYLMLKDYTKVPIKRSEMLRDIIREYTDVYPEIIERACFVLEKKFGIQLKEIDKEEHLYILISTPESLAGILGTTKDTPKLGLLLVILGVIFMNGNRASEAVLWEALRKMGLRPGVRHPLLGDLRKLLTYEFVKQKYLDYRRVPNSNPPEYEFLWGLRSYHETSKMKVLRFIAEVQKRDPRDWTAQFMEAADEALDALDAAAAEAEARAEARTRMGIGDEAVSGPWSWDDIEFELLTWDEEGDFGDPWSRIPFTFWARYHQNARSRFPQTFAGPIIGPGGTASANFAANFGAIGFFWVE

SEQ ID NO: 5481 - DNA, 381 bp, Rattus norvegicus; identical to SEQ ID NO: 5477
  ref <308>: DATABASE ACCESSION NUMBER: EMBL / AA891666
  ref <309>: DATABASE ENTRY DATE: 2000-03-03

SEQ ID NO: 5482 - protein, 775 aa, Rattus norvegicus; identical to SEQ ID NO: 5478
  ref <308>: DATABASE ACCESSION NUMBER: SWISS-Prot / Q9ES73
  ref <309>: DATABASE ENTRY DATE: 2002-06-15

SEQ ID NO: 5483 - DNA, 5441 bp, Homo sapiens; identical to SEQ ID NO: 5479
  ref <308>: DATABASE ACCESSION NUMBER: EMBL / AK074092
  ref <309>: DATABASE ENTRY DATE: 2002-02-15

SEQ ID NO: 5484 - protein, 778 aa, Homo sapiens; identical to SEQ ID NO: 5480
  ref <308>: DATABASE ACCESSION NUMBER: SWISS-Prot / Q9Y5V3
  ref <309>: DATABASE ENTRY DATE: 2002-06-15

SEQ ID NO: 5485 - DNA, 482 bp, Rattus norvegicus
  ref <308>: DATABASE ACCESSION NUMBER: EMBL / AA891677
  ref <309>: DATABASE ENTRY DATE: 2000-03-03
aaataaaaattataatttatacaagactttgtatctaaacaagggtttctttttaaaaaaaagtgacagaggaattttttcctatcttcagttctttatagaatatgatccttttgtagaacaaaagttacaccagtgacaattatttacagatcccaaacagactcaagctttacacacacagaattgaacattctaggtcagtgattagtcagcaattaaacacctgcccagatcacacagttcagtacaaaccccagtgtctctgtaactatgactagaggcggcctaggcccctggcccagccctgtccccctgagctccacccaaagacctgctggtggccaatggtggaactaacagttgaacttggggctgccaccgtcacctccctgacccactgccctggcctaaggtcagtcttcatctctctttcccagagaaagagactcaaactaaaccacttactccaccccgaaagc

SEQ ID NO: 5486 - DNA, 421 bp, Rattus norvegicus
  ref <308>: DATABASE ACCESSION NUMBER: EMBL / AA891689
  ref <309>: DATABASE ENTRY DATE: 2000-03-03
caggaaaaaagcattttattcacatataaccgaagcccctgggtctgctgggggggggggggggctgcagggagtctcagttggcttccgatggtctctcctgagatgtgagcttccagctgtgccctctcaccctctgcgatgaatactcagtagattccataggtgggctcatgactgtccctgtatcggtccagatagcgtaggggctgctggtgggggaagcgcttctgcttggggtggtaagggggtggccgtacaaattcaaacacaggttcccgcatgtctagaagctggtggaaggtgtgggtgaccgagtcatcccagcggcactggaagaaagccagaccagctggagtcatggcttcctggtgtttcttgtacaaatcaacggtgtggaaggtcctctgggccagctggt

SEQ ID NO: 5487 - DNA, 469 bp, Homo sapiens
  ref <308>: DATABASE ACCESSION NUMBER: EMBL / BM714938
  ref <309>: DATABASE ENTRY DATE: 2002-03-06
cgaggacacccgtccctcaccctgctaccagctggcccagaggaccttccacacccttgatttctacaagaaacaccaggaagccatgactccagctggtctggctttcttccagtgccgctgggatgactcggtcacccacaccttccaccagcttctagacatgcgggaacctgtgtttgaatttgtacggccacccccttaccaccccaaacagaagcgcttcccccaccagcagcccctacgctatctggaccgatacagggacagtcatgagcccacctatggaatctactgagtattcatcgaagagggtgagagggcacagctggaagctcacatctcaggagagaccatcggaagccaactgagactccctgcagccccccccccccccagcagacccaggggcttcggttatatgtgaataaaatgcttttttcctgaaaaaaaaaaaaaaaaaaaagac

SEQ ID NO: 5488 - protein, 174 aa, Homo sapiens
  ref <308>: DATABASE ACCESSION NUMBER: SWISS-Prot / AAF28940
  ref <309>: DATABASE ENTRY DATE: 2002-06-01
EAEEGSLWTLLLTSLDGHLLEPDAEYLHWLLTNIPGNRVAEGQVTCPYLPPFPARGSGIHRLAFLLFKQDQPIDFSEDARPSPCYQLAQRTFRTFDFYKKHQETMTPAGLSFFQCRWDDSVTYIFHQLLDMREPVFEFVRPPPYHPKQKRFPHRQPLRYLDRYRDSHEPTYGIY

SEQ ID NO: 5489 - DNA, 493 bp, Rattus norvegicus
  ref <308>: DATABASE ACCESSION NUMBER: EMBL / AA891694
  ref <309>: DATABASE ENTRY DATE: 2000-03-03
gcaaatgtgaaaccacttttacttggtttttcaagtagtcgaataggatgagaccatttacacctgagatgaggcacttttatgattccccccaaaaaggataagtataaactacaacttttcttgttaatcgtattctccatttcaggtgtgattaacttcaagatggtttacaggtactataaacttttattttgttgtcttccatttgttccgagtcaacaaactctgtgaaatacataaaatacagccgcaacacagaccagttactgtactcacatacaaatgatctgaacatcacgtaaggacacaagtttcagaaaaggagtacttcaacactacttcaacaacgacgatagttttttcataattatgtataaatacattagtatccaaagggcgaatctctgtactatttctagataagaatgtcctcaaatgtgtaactgaattacaaattatagtcttacatatgcttttaaagtaatcaagt

SEQ ID NO: 5490 - DNA, 470 bp, Rattus norvegicus
  ref <308>: DATABASE ACCESSION NUMBER: EMBL / AA891700
  ref <309>: DATABASE ENTRY DATE: 2000-03-03
aaaaacaaacacacatttattttgtccttgattttttggtgcaacttatacacaaacattacatcagttagtctgtactcttaaaaataataaatcaacaatatgtacaatcaaatttacaaccaaaagtaaatgaacccgtcggtgcggtatgactgcaacccagtggcccagctgaggtcctccaggccctgagccgggcacaagagaggcccctgtcatcttcactgcagacagaacatcttcagttccgagacttaaggtgcaaagatgtcgattatgcagctacaacacaagcagactttagagggcgagaacacattctccccccacatccaacaattataataaatagagatttaattccaagtgcatatgctattcaatcaacattagagggagtcaggcgtccaggacctttagcctaagccgtctccataccacacttccctccgctctggtcgtgtctg

SEQ ID NO: 5491 - DNA, 5107 bp, Homo sapiens
  ref <308>: DATABASE ACCESSION NUMBER: EMBL / U19252
  ref <309>: DATABASE ENTRY DATE: 1999-06-30
gcggcgcaaccggctccggagctgcctggcgcggccgggcgggcggcgccgctcaggctcgggctccggctgggcccggcgcggcctcggggctgcccatggggcgcggggggccgggccggtgacgccggacgcccatggacgcctctgaggagccgctgccgccggtgatctacaccatggagaacaagcccatcgtcacctgtgctggagatcagaatttatttacctctgtttatccaacgctctctcagcagcttccaagagaaccaatggaatggagaaggtcctatggccgggctccgaagatgattcacctagagtctaactttgttcaattcaaagaggagctgctgcccaaagaaggaaacaaagctctgctcacgtttcccttcctccatatttactggacagagtgctgtgataccgaagtgtataaagctacagtaaaagatgacctcaccaagtggcagaatgttctgaaggctcatagctctgtggactggttaatagtgatagttgaaaatgatgccaagaaaaaaaacaaaaccaacatccttccccgaacctctattgtggacaaaataagaaatgatttttgtaataaacagagtgacaggtgtgttgtgctctccgaccccttgaaggactcttctcgaactcaggaatcctggaatgccttcctgaccaaactcaggacattgcttcttatgtcttttaccaaaaacctaggcaagtttgaggatgacatgagaaccttgagggagaagaggactgagccaggctggagcttttgtgaatatttcatggttcaggaggagcttgcctttgttttcgagatgctgcagcagttcgaggacgccctggtgcagtacgacgaactggacgccctcttctctcagtatgtggtcaacttcggggccggggatggtgccaactggctgacttttttctgccagccagtgaagagctggaacggattgatcctccgaaaacccatagatatggagaagcgggaatcgatccagaggcgagaagccaccctgttagatctgcgcagttacctgttctctcgccagtgcaccttgctgctcttcctgcagaggccgtgggaggtggcccagcgcgccctagagctgctgcacaactgcgtgcaggaactgaagctcttagaagtctctgtcccacctggtgctctggactgctgggtgtttctgagctgtctggaggtgttgcagaggatagaaggctgctgtgaccgggcacagatcgactcaaacattgcccacactgtggggctatggagctatgccacagaaaagttaaagtccttgggctatctatgtggacttgtgtcagagaaaggacctaactcagaagatctcaacaggacagttgaccttttggcaggtttgggagctgagcgaccagaaacagccaacacagctcagagtccttataagaaactgaaagaagcattatcgtcagtggaagcttttgaaaaacactacttagatttgtcccatgccaccattgaaatgtatacaagcattgggaggattcgatctgctaagtttgttggaaaagatctggcagagttttacatgaggaaaaaggctccacaaaaggcagaaatctatcttcaaggagcactgaaaaactacctggctgagggctgggcactccccatcacacacacaaggaagcagctggccgaatgtcaaaagcaccttggacaaattgaaaactacctgcagaccagcagcctcttagccagtgaccaccacctcactgaagaggagcgcaagcacttctgccaggagatacttgactttgccagccagccgtcagacagcccaggtcataagatagtgctacccatgcattcctttgcacaactgcgagatctccattttgatccctccaatgccgtggtccacgtgggcggcgttttgtgcgttgagataaccatgtacagccagatgcctgtgcctgttcacgtggagcagattgtggtcaatgtccacttcagcattgagaaaaacagctaccggaagactgcggagtggcttaccaagcacaagacgtccaatgggatcattaactttccacccgagaccgcacctttccctgtatcccaaaacagtttgcccgcgctggagttgtatgaaatgtttgagagaagcccatctgataactccttgaacacgactgggattatctgcagaaacgtccacatgctcctgagaaggcaggagagcagctcctctctagagatgccctcaggggtggctctggaggagggtgcccacgtgctgaggtgcagccacgtgaccctggaaccaggggccaaccagataacattcaggactcaggccaaggaacctggaacgtatacactcaggcagctgtgcgcctcggtgggctccgtgtggttcgtcctccctcacatctaccccattgtgcagtacgacgtgtactcacaggagccccagctgcacgtggagccgctggctgatagccttctggcaggcattcctcagagagtcaagttcactgtcactaccggccatgatacgataaagaatggagacagcctgcagcttagcaatgccgaagccatgctcatcctgtgccaggcggagagcagggctgtggtctactccaacacgagagaacagtcttctgaggccgcgctccggattcagtcctccgacaaggtcacgagcatcagtctgcctgttgcgcctgcgtaccacgtgatcgaatttgaactggaagttctctctttaccttcagccccagcactcggaggggagagtgacatgctggggatggcagagccccacaggaagcataaggacaaacagagaactggccgctgcatggttaccacagaccacaaagtgtcgattgactgcccgtggtccatctactccacagtcatcgcactgaccttcagcgtacccttcaggaccacacacagcctcctgtcctcaggaacacggaaatatgttcaagtttgtgtccagaatttgtcagaacttgactttcagctgtcagatagttatcttgtagataccggtgatagtaccgacctgcaactagtaccactgaacacgcagtcccagcagcccatctacagcaagcagtcggtgttcttcgtctgggaactcaagtggacagaagagcctcccccttctctgcattgccggttctctgttggattttccccagcttctgaggaacagctgtctatctccttaaagccgtatacttatgaatttaaagtggaaaatttttttacattatacaacgtgaaggctgagatctttcccccttcgggaatggagtattgcagaacaggctccctctgctccctggaggttttgatcacgaggctctcagacctcttggaggtggataaagatgaagcactgactgaatctgatgagcatttttcgacaaagcttatgtatgaagttgtcgacaacagtagcaactgggcagtgtgtgggaaaagctgcggtgtcatctccatgccagtggctgctcgggccactcacagggtccacatggaagtgatgccgctcttcgccgggtatctccccctgcccgacgtcaggctgttcaagtacctcccccatcattctgcacactcctcccaactggacgctgacagctggatagaaaacgcagcctgtcagtagacaagcacggggacgaccagccggacagcagcagcctcaagagcaggggcagcgtgcattcggcctgcagcagcgagcacaaaggcctacccatgccccggctgcaggcactgccggccggccaggtcttcaactccagctcgggcacacaagtcctggtcatccccagccaagatgaccacgtcctggaagtcagtgtaacatgacaacgccagggtgaacacacgccacttcccagctaggagtgcactttatgggactgtgactggactcttccgttctggctccagccagaccttcagtggtcctgcctggccgtggggacatcagagagtgtcatcacgcagctggccagctgagttctgttgttgttttcatgccgcctgtgatctcagattcctgcttttctcaccccgtccccatgctggtgtccgacgccgcttactcagagccctggcctccctccccctacctcacacgctgctcatgaaagtttccacccacgctgtctccacggaacagcctccgtctgctggctcttcgtggaaggccatttgtctttcaggtagacactcagcagccctcacggtcttagtgacgtgtgtgcctttctggtcacacagctgcccagtttcctgatcggggtggatttgtgtcccctaaggggtaaaacagccgtttaccgcagatcctctcatacacccttctaggggaggcgggtgggggagggagggatcataaccccttctgtgccttgggatgccggagctgggggacctggaggcccatcagccggagccacgtgaaaggtactgaagaaagctgagacccggctgtgaggagcgcctcagcggtgaggtggtttagggataaatgtttctggaaccctgtggtcccccataatgttgatagatatcatatgcactgggagttaaatatatttaatttaatgatcattatatatgtgggggttaatatgttgtttttctgtccctttaaagtctttacatgtaattgtagctgtataatcgttatttttcttttgcatcttaagtcttagaaattaagatattccatcgtgaggatgagagaggtcctcagtgtgtttttggtctggttgtagggaaggactcaagtcctggaatgtcctccactggtctactgagttgcagtcacactgttccaatggattatttgctttcggttgtaaatttaattgtacatatggttgatttattatttttaaaaatacagactaactgatgtaatgtttatgtataagttgcaccaaaaatcaaggacaaaaataagtgtgtttgtttttacaggtgtgaaagtcacagcttgtaaataagtgttgtatgtattaaaccttttccagttctccaaagcgatgt

SEQ ID NO: 5492 - protein, 1259 aa, Homo sapiens
  ref <308>: DATABASE ACCESSION NUMBER: SWISS-Prot / P48553
  ref <309>: DATABASE ENTRY DATE: 2002-06-15
MDASEEPLPPVIYTMENKPIVTCAGDQNLFTSVYPTLSQQLPREPMEWRRSYGRAPKMIHLESNFVQFKEELLPKEGNKALLTFPFLHIYWTECCDTEVYKATVKDDLTKWQNVLKAHSSVDWLIVIVENDAKKKNKTNILPRTSIVDKIRNDFCNKQSDRCVVLSDPLKDSSRTQESWNAFLTKLRTLLLMSFTKNLGKFEDDMRTLREKRTEPGWSFCEYFMVQEELAFVFEMLQQFEDALVQYDELDALFSQYVVNFGAGDGANWLTFFCQPVKSWNGLILRKPIDMEKRESIQRREATLLDLRSYLFSRQCTLLLFLQRPWEVAQRALELLHNCVQELKLLEVSVPPGALDCWVFLSCLEVLQRIEGCCDRAQIDSNIAHTVGLWSYATEKLKSLGYLCGLVSEKGPNSEDLNRTVDLLAGLGAERPETANTAQSPYKKLKEALSSVEAFEKHYLDLSHATIEMYTSIGRIRSAKFVGKDLAEFYMRKKAPQKAEIYLQGALKNYLAEGWALPITHTRKQLAECQKHLGQIENYLQTSSLLASDHHLTEEERKHFCQEILDFASQPSDSPGHKIVLPMHSFAQLRDLHFDPSNAVVHVGGVLCVEITMYSQMPVPVHVEQIVVNVHFSIEKNSYRKTAEWLTKHKTSNGIINFPPETAPFPVSQNSLPALELYEMFERSPSDNSLNTTGIICRNVHMLLRRQESSSSLEMPSGVALEEGAHVLRCSHVTLEPGANQITFRTQAKEPGTYTLRQLCASVGSVWFVLPHIYPIVQYDVYSQEPQLHVEPLADSLLAGIPQRVKFTVTTGHYTIKNGDSLQLSNAEAMLILCQAESRAVVYSNTREQSSEAALRIQSSDKVTSISLPVAPAYHVIEFELEVLSLPSAPALGGESDMLGMAEPHRKHKDKQRTGRCMVTTDHKVSIDCPWSIYSTVIALTFSVPFRTTHSLLSSGTRKYVQVCVQNLSELDFQLSDSYLVDTGDSTDLQLVPLNTQSQQPIYSKQSVFFVWELKWTEEPPPSLHCRFSVGFSPASEEQLSISLKPYTYEFKVENFFTLYNVKAEIFPPSGMEYCRTGSLCSLEVLITRLSDLLEVDKDEALTESDEHFSTKLMYEVVDNSSNWAVCGKSCGVISMPVAARATHRVHMEVMPLFAGYLPLPDVRLFKYLPHHSAHSSQLDADSWIENDSLSVDKHGDDQPDSSSLKSRGSVHSACSSEHKGLPMPRLQALPAGQVFNSSSGTQVLVIPSQDDHVLEVSVT

SEQ ID NO: 5493 - DNA, 470 bp, Rattus norvegicus; identical to SEQ ID NO: 5490
  ref <308>: DATABASE ACCESSION NUMBER: EMBL / AA891700
  ref <309>: DATABASE ENTRY DATE: 2000-03-03

SEQ ID NO: 5494 - DNA, 5107 bp, Homo sapiens; identical to SEQ ID NO: 5491
  ref <308>: DATABASE ACCESSION NUMBER: EMBL / U19252
  ref <309>: DATABASE ENTRY DATE: 1999-06-30

SEQ ID NO: 5495 - protein, 1259 aa, Homo sapiens; identical to SEQ ID NO: 5492
  ref <308>: DATABASE ACCESSION NUMBER: SWISS-Prot / P48553
  ref <309>: DATABASE ENTRY DATE: 2002-06-15

SEQ ID NO: 5496 - DNA, 523 bp, Rattus norvegicus
  ref <308>: DATABASE ACCESSION NUMBER: EMBL / AA891724
  ref <309>: DATABASE ENTRY DATE: 2000-03-03
ggtcctaccaatgtgactctttacccaggcccacttttcctatgtgtgctggctgtggagacggtccgccatcaaccgccacctaagtctcggttagtctcaccttcctatgccttctcctcacttggcctcattgtctcagaaaccgaaggcatctgttcgttactgtttcgggtctgtgtaaaggtaccttggcaggagaacatgcatatgacttttaaaataaagaccaacattctgacactaaggtaacacacagaaaaaatacagtacttagacatcgttgcaaataaataccccgtacagatgatgttatcttaaatgtaacaatgttttatgtgaatcaacactgtaacagaaggcaaagagtcccaacaagtaggaataagaaatgctcattccaggaaacagaattcttcaatttctaacaatttatattattgtaatttgtccctttttaggccggaggacaacttcttttcctccactagtaccaatttgaccacaccctggaactcactta

SEQ ID NO: 5497 - DNA, 6408 bp, Homo sapiens
  ref <308>: DATABASE ACCESSION NUMBER: Refseq / XM_046863
  ref <309>: DATABASE ENTRY DATE: 2002-08-01
tgaggagggcccggcctgcgagagcctcagtgggagccggctcagccctcggccaccatgtcggcgccgtcggaggaggaggagtacgcgcggctggtgatggaggcgcagccggagtggctgcgcgccgaggtgaagcggctgtcccacgagctggccgagaccacgcgtgagaagatccaggcggccgagtacgggctggcggtgctcgaggagaagcaccagctcaagctgcagttcgaggagctcgaggtggactatgaggctatccgcagcgagatggagcagctcaaggaggcctttggacaagcacacacaaaccacaagaaggtggctgctgacggagagagccgggaggagagcctgatccaggagtcggcctccaaggagcagtactacgtgcggaaggtgctagagctgcagacggagctgaagcagttgcgcaatgtcctcaccaacacgcagtcggagaatgagcgcctggcctctgtggcccaggagctgaaggagatcaaccagaatgtggagatccagcgtggccgcctgcgggatgacatcaaggagtacaaattccgggaagctcgtctgctgcaggactactcggaactggaggaggagaacatcagcctgcagaagcaagtgtctgtgctcagacagaaccaggtggagtttgagggcctcaagcatgagatcaagcgtctggaggaggagaccgagtacctcaacagccagctggaggatgccatccgcctcaaggagatctcagagcggcagctggaggaggcgctggagaccctgaagacggagcgcgaacagaagaacagcctgcgcaaggagctgtcacactacatgagcatcaatgactccttctacaccagccacctgcatgtctcgctggatggcctcaagttcagtgacgatgctgccgagcccaacaacgatgccgaggccctggtcaatggctttgagcacggcggcctggccaagctgccactggacaacaagacctccacgcccaagaaggagggcctcgcaccgccctcccccagcctcgtctccgacctactcagtgagctcaacatctctgagatccagaagctgaagcagcagctgatgcagatggagcgggaaaaggcgggcctgctggcaacgctgcaggacacacagaagcagctggagcacacgcggggctccctgtcagaacagcaggagaaggtgacccgcctcacagagaatctgagtgccctgcggcgcctgcaggccagcaaggagcggcagacagccctggacaacgagaaggaccgtgacagccatgaggatggggactactacgaggtggacatcaacgggcctgagatcttggcctgcaagtaccatgtggctgtggctgaggctggcgagctccgcgagcagctcaaggcactgcgcagcacgcacgaggctcgtgaggcccagcacgccgaggagaagggccgctatgaggctgagggccaggcactcacggagaaggtctccctgctagagaaggccagccgccaggaccgcgagctgctggcccggctggagaaggagctaaagaaggtgagcgacgtcgccggcgagacacagggcagcctgagtgtggcccaggatgagctggtgaccttcagtgaggagctggccaatctctaccaccacgtgtgcatgtgcaacaatgagacacccaaccgtgtcatgctggactactaccgcgagggccagggcggggccggccgcaccagtcccgggggccgcaccagccccgaggcgcgtggccggcgctcacccatcctcctacccaaggggctgctggctcctgaggcgggccgagcagatggtgggacgggggacagcagcccctcgcctggctcctcactgccatcacccctgagtgacccacgccgggagcccatgaacatctacaacctgatcgctatcatccgtgaccagatcaagcacctgcaggcagccgtggaccgcaccacggagctgtcacgccagcgcattgcctctcaggagctgggccccgccgtggacaaggacaaggaagcgcttatggaggagatcctcaagctgaagtcgctgctcagcaccaagcgggagcagatcaccacgctgcgcactgtgctcaaggccaacaagcagacggccgaggtggcccttgccaacctgaagagcaagtatgagaatgagaaggccatggttaccgagaccatgatgaagctgcgcaatgagctcaaggccctcaaggaggacgcagccaccttctcctcgctgcgtgctatgtttgccaccaggtgtgacgagtacattacacagctggatgagatgcagcggcagctggcggctgctgaggacgagaagaagacgctgaactcgctgctgcgcatggccatccagcagaagctggcgctgacccagcggctggagctgctcgagctggaccatgagcagacccggcgtggccgtgccaaagccgccccgaagaccaagccagccacaccgagcgtaagtcacacctgtgcctgtgccagcgacagggccgagggcaccgggctggccaaccaggtgttctgcagcgagaagcacagcatttactgtgattaggggctgtggggcgccgcacgctgcagctaacatctgcttcacctcaactaacccagcagcagcgggacggcggtgctaggtcaatcttaacgtgactaatgcacagagggtaggagtctagccgaggcgccatggggcgttgcatcagcaggacacttgtgagagctttgtgtcgcttctcactcctcaaagccccctcaggagcacccagtcctcagctgctctcttaggtgggggtcagaggtggggatagagctgcacattcttgcagcagatgtgtgatgaaagcatcttctaagccctgcgcacccgtggggaaacccaagggaggagtcctggtcctgctccctcagcacccaaaaggggcagaacctgagttgagacttgcatgttcctcgcatgtgtctaatgtcagcactagaaagcagttttaggaggttccagcctgcagcataggtacgacctcagaggatggctttgcacttggcatagtttcatggaaaggagtacgttgtagtttatgcagtatctgactgcaaatcatattcaggaaagaagtgcagaatttcttccccaagcccagagaagagcagccctgagcccctgtattctgctggccagacacacatggcacagacacagctgaccataacccaggaatccagagctcggtttctcatttctgagatcaggatgcttgtatagtggcctgtgaggtgacagattggcagggcccaaggccccaggttttcatttttcatgagaaaagctttccaagtgcctggccagaccttggtccttagtgcagagcccgtccttttgtacttggggtgaccccagcagccaattatccggccttccatagggggttcagtcccaaagacatggggctttgaaaaccctagcctgaagtctgagccaccaagggcttggctgggttggacacccacaggtgtatccagagcccagcccggtgctgggaaagctttgcatagggccagggccacttgtcaggattcacaggtaggagatgtttaggtctctttatttagtgcaatctgggggatggcaacagagaaagaggaaaggtagctgtagggttctcccatttccagaggctccatccacacctgccttcccacattctgagcagaacttttctcagtacttttttcccgatcaccctgtgggaccagctggacctgaggctgcagtcttctctcctgcaggctgcttgccttgtctctcatgcggaagaggcattcgagttacctggtgagagaccgtgttgccccctcccacagctctctgccctgcgcgttcttccctttggtgccgagtatgtttcggtcccctccagactccaggacacgcccatgtatgtcccctgcgtgttcatcctgggcccagatccccctgccccagcaagactcgcagtgggatggctgctggcatgcccaccctgcatgcgctttgccctctccttgcaagcctggcacatagcttctctccatactcctaagggactttgcagacacccaagccactgggacccctgctaacacatgcaggtcttctcttctgccaactaacgtgctcgcgccctcccagcacgtggagagcttcaattgtcagataaacaggaagcgacagatgaccgctttctaacgctctcttttctcccgttttcagctgtagagtagctgccaggaggacttggccacccggccctgtcacactgcagccccttccccttccctctcgtggcccacaaggaggaaggaagggcaacctaaaagcccacttagaaactttttggatatgccactgcaattcttttcaaaatagcattccccaggtttttaatgggaggaaaaaaagctttaatgttgagcatgctgcgagctgctgcgtggaaaggcctctgtatgggccgaagacccttcttccctggctgccaggctcgccaggagcccactggaaacgcccaccacgggggctccttgttacacatgttctttttttatccgatcaacctgtgcacttttgatattttgatattatatttgcttccttaattcctcgcgtagagacggtctcaggtgccgtggtctatgctcgtggtcctgtagctgtccgcctcagctcccaccgtgtttgtctggtgtcagcacgaggcagagctgtgtgctccatagcgtgtagctttagactcggagatgagtgctttgacccagcgaggagctcagctaagtgtatccacgctgtggttcagcagcctttagatcatacggcattgtggttcatgtttgaaattacagattttaaatgccatgttcattaagaaatccagggtattcagattctggggtttttcatattgtattattattattcttaggaatagttcaatgtaacaagaagaaaacttgacctttgctctggttaaaacagtaataggcacttgaaaaaaaaagataaattattgaatgagtagtattacctacaaattccagaattttctgggttttaggacgttgtgaagcatgactgattaacagaattttatacaactgtaccaataaaattccaaattggaattgttttgttactctggttgttgtgccaaattgtggtacacttagaaaattctacagtcgtcgatttttagggtgttctctttcaacacctttttgttagtaatcattgccagtagtgccttcatcagttaagggaggtgtcccagcacagatcattctcaaaagcgagcagggaagagctagtgggcatgctgaaggccagcgtggacagcaggtgaggcaggtgctcctcacacccagacctgggcatcttcattgagggaaagaaaacagtcattgtgcaaaattctgttagtcagtgattctttacttgcaaattcaggggcttagaaaatgaaagcaaacacaaaaccttgagtgtgctttgggaaccaaatggaccttctgggacaagctgagcaagctgtatgaacgccacgtttgtgaagagctgagggtatcaggagggccgacgctgtgttggcatgcgcagtaggggatgagggttagccatagtattctttgcaaatgtgaaagcgagacattatatcttctcttgcttggtgtaactaatcactgttaatttcaggaaacagaactcattaaaactccttagcaaaccaggtctacatcctgttttgtttgctgagtgaggttagtgggagtggtcaaattggtactcttggaggaagaaaaactgtccttccttctccaaaaaaggaaaaattataataatataaatgacaaaaataaaagaattctgtttcctggaataagcatttcttattcctagttgtagggactcctatttttaccttccgttacagtgttgattcataagaaatattgttacatttgagataacttcatctgtatggggtatttatttgcaatgatgtctgagtactgtattttttctgtgcattaccttagtgtcagaatgttggtctttattttaaagtcatatgcatgttctcctgccaaggaacctttacacagacccaaacaaaaaaataataatcaaatgccttcaatttctgagaaaatgaggcagagcatggaaaaggaataggaaggagaaattaattgagattttcaggacacagacatatgatgtgaatgcctacaaagccagtgcgcataggaacagtgggcctgggtaaagagtcacattggtaggaccaataaagaataataaaaagac

SEQ ID NO: 5498 - protein, 855 aa, Homo sapiens
  ref <308>: DATABASE ACCESSION NUMBER: Refseq / XP_046863
  ref <309>: DATABASE ENTRY DATE: 2002-08-01
MSAPSEEEEYARLVMEAQPEWLRAEVKRLSHELAETTREKIQAAEYGLAVLEEKHQLKLQFEELEVDYEAIRSEMEQLKEAFGQAHTNHKKVAADGESREESLIQESASKEQYYVRKVLELQTELKQLRNVLTNTQSENERLASVAQELKEINQNVEIQRGRLRDDIKEYKFREARLLQDYSELEEENISLQKQVSVLRQNQVEFEGLKHEIKRLEEETEYLNSQLEDAIRLKEISERQLEEALETLKTEREQKNSLRKELSHYMSINDSFYTSHLHVSLDGLKFSDDAAEPNNDAEALVNGFEHGGLAKLPLDNKTSTPKKEGLAPPSPSLVSDLLSELNISEIQKLKQQLMQMEREKAGLLATLQDTQKQLEHTRGSLSEQQEKVTRLTENLSALRRLQASKERQTALDNEKDRDSHEDGDYYEVDINGPEILACKYHVAVAEAGELREQLKALRSTHEAREAQHAEEKGRYEAEGQALTEKVSLLEKASRQDRELLARLEKELKKVSDVAGETQGSLSVAQDELVTFSEELANLYHHVCMCNNETPNRVMLDYYREGQGGAGRTSPGGRTSPEARGRRSPILLPKGLLAPEAGRADGGTGDSSPSPGSSLPSPLSDPRREPMNIYNLIAIIRDQIKHLQAAVDRTTELSRQRIASQELGPAVDKDKEALMEEILKLKSLLSTKREQITTLRTVLKANKQTAEVALANLKSKYENEKAMVTETMMKLRNELKALKEDAATFSSLRAMFATRCDEYITQLDEMQRQLAAAEDEKKTLNSLLRMAIQQKLALTQRLELLELDHEQTRRGRAKAAPKTKPATPSVSHTCACASDRAEGTGLANQVFCSEKHSIYCD

SEQ ID NO: 5499 - DNA, 642 bp, Rattus norvegicus
  ref <308>: DATABASE ACCESSION NUMBER: EMBL / AA891725
  ref <309>: DATABASE ENTRY DATE: 2000-03-03
gcagttacatgatttttttttattacataaacataatattttccaccgcagttggtctttagttcgcttctcactttgacggagtgtcaagtgtggcagagactaagaatggtttaagaaaacaaaagctttttcgcacctctgaaaacattttattgcctacgtctcccgattaccttcttaagaaaaaaaaaataacaggttttgtttatttttacattgtaatgttttgctccaaggtataaaaacaggacttctcaacaagtccccttttgtttacaaaggtctataaaaatacataaggaacttcatgtttgtcctttaacttaattattccagtttaccagatacccccagatctgcaaaccacattaatcttgcagcaatacaatgtcaacatcatcatgaacaccttgcaaaagcagctctcctgcgtacgtaacaatcttccttcgttttgcggctttcagagttcccaccaacgcttcaaagagattggcacatctgtcgtcttggaagaggaccccaaacttcacactcagtttcccatcggcatttttggaacccagacgatgaatttcctccaccaggaggttaacctcatgctccacgttcattgctgaccctccgattgcttccttc

SEQ ID NO: 5500 - DNA, 743 bp, Homo sapiens
  ref <308>: DATABASE ACCESSION NUMBER: EMBL / BC014953
  ref <309>: DATABASE ENTRY DATE: 2002-09-02
ctgaagaaggtaaccgggtccagacccacgcggcgccagttctccggcgggaaggaaaaccgcgcagagagcaatgaatgtggatcacgaggttaacctcttagtggaggaaattcatcgtttgggttcaaaaaatgctgatggaaagttaagcgtgaaatttggggtcctcttccgtgatgataaatgtgccaacctctttgaagcattggtaggaactcttaaagctgcaaaacgaaggaagattgtaacatatccaggagagctgcttctgcaaggtgttcatgatgatgttgacattatattactgcaagattaatgtggtttacatatctttatgtactgccattttttgtttctggtaaactggaatataaagtgaaagaacaaacatttgaacatacttaatgtatttttatagaactttgtaaacgaaaggagattcatgttttagaagtctgtccttttttatatcttgaaagaaaatctatgtatgatgctataaaataaatcctattatttttctcaggaatctggttaggaattgcaggcaatgagattttttgcggggcagggatgggaatgtttgttcataaataattagacattttctatagatatttgacattctgcgaaagcaacaagcaaactgaagaccaactcctatgagaaatattatgatgtttatgtaataaagacatgtaactgtcttaaaaaaaaaaaaaaaaaaaaaaaaaaaaaaa

SEQ ID NO: 5501 - protein, 82 aa, Homo sapiens
  misc_feature (1)..(82): Xaa=Unknown amino acid
MNVDHEVNLLVEEIHRLGSKNADGKLSVKFGVLFRDDKCANLFEALVGTLKAAKRRKIVTYPGELLLQGVHDDVDIILLQDX

SEQ ID NO: 5502 - DNA, 418 bp, Rattus norvegicus
  ref <308>: DATABASE ACCESSION NUMBER: EMBL / AA891727
  ref <309>: DATABASE ENTRY DATE: 2000-03-03
ggggaaactgggcagtttattgacaggcatcaggagactgcgcagtcaggtccgtgggcgggacagcacccgagtccaggctctgtgcttctcctcgggccttgtgggcgcaaacttctcctgcagtttcctccacacactcttattcatctcttgaaactcctccaaagtgtctgtggacaggatcagcttgtactcttccacggacaggccactgaagctggtgtctctggggcagggtacttgtgcttgtagtagtttgaatgcagtcgtgctaagctctcgtacatctgatcacaggcctcgggttctgcaacctgggtgttctctccctcccgaaaggcctgtgctacccgctgccgcaggtaagcgcccaagtcccggccccgtttggtctcgtccactggcccctcgtgcc

SEQ ID NO: 5503 - DNA, 536 bp, Homo sapiens
  ref <308>: DATABASE ACCESSION NUMBER: EMBL / BC006007
  ref <309>: DATABASE ENTRY DATE: 2001-07-13
gccgactcctcccgctaaggcgggaacacgcggggcccaagatggcggccagccggtaccggcgttttcttaagctctgtgaggaatggccagtggacgagaccaaacggggccgggacttgggcgcttacctgcgacagcgggtagcacaggcctttcgggagggagagaatacccaggttgcagagcctgaggcctgtgatcagatgtacgagagcttagcgcgactccattcaaactactacaaacacaagtaccctcgccccagagacaccagcttcagtggcctgtcgttggaagagtacaagctgatcctgtccacagacaccttggaagagcttaaggaaatagataaaggcatgtggaagaaactgcaggagaagtttgcccccaagggtcctgaggaggatcataaggcctgagctcaggccttacctcgtgcacatacctaggtgtggagtcttgtacattgccatcgtcaataaaactgccccagtttccccttgcaaaaaaaaaaaaaaaaaaaaaaaaaaaaa

SEQ ID NO: 5504 - protein, 127 aa, Homo sapiens
  misc_feature (1)..(127): Xaa=Unknown amino acid
MAASRYRRFLKLCEEWPVDETKRGRDLGAYLRQRVAQAFREGENTQVAEPEACDQMYESLARLHSNYYKHKYPRPRDTSFSGLSLEEYKLILSTDTLEELKEIDKGMWKKLQEKFAPKGPEEDHKAX

SEQ ID NO: 5505 - DNA, 664 bp, Rattus norvegicus
  ref <308>: DATABASE ACCESSION NUMBER: EMBL / AA891733
  ref <309>: DATABASE ENTRY DATE: 2000-03-03
aaagcaatctactaaaaaaatacaactgtatttgaaccttccgatctctgtgagctatgatgatcagaagtcgggagtcctttgtgtttaaacaaccacatgctcactctttaacataattcctgcttatatacgggaagcgattcacaaccgccatccacctgcaccttttgcccaggcggcaatgtggtttagacctcaggtctgtaattgcaatactttttgatgggagatgttgcacaagtgctatttgttagctatgaaatcaggttttctgcttgttcttaatgccatggtcaaatcatagcacaaaatcattaaaaataatcagtgataaatgatctgttccctggggttgtttgttcacttctcatagtcaacaaatagaagactgatgtatgtgtatgaccagtcttggaaaatacctgttgtttgtggtgctggagggagagctcttggctacacaccaacccaaaggatactgctgatccgtccctagttactgactttaaaatatttgtcatgtgtcacagctcatgtgtggtgaggacaacctgctcctgtcatgtctctctgactactacgtgagttccaagagcattcttggcagtgaatgcctttagtccctttcttactggtctgtcactgatttttttaaaaaaag

SEQ ID NO: 5506 - DNA, 8494 bp, Homo sapiens
  misc_feature (1)..(8494): n=a, c, g or t
  ref <308>: DATABASE ACCESSION NUMBER: EMBL / AF009424
  ref <309>: DATABASE ENTRY DATE: 1999-06-30
agcggttcaagctctacgttcgtgacatcaaacctcctgttgggccatttccgagaactcccatcagtttctgtatagtgtaaaagtttcagaggcggacacgagagagctgcggctgggacaaggagcacccgcgtgcaggtgcgaccctgcaggatgctggcagcggcgtggccaggggcgcccgtgttctgagggcctgagggccagcccctccacccgcgccatggcctccgcgccctggctggacggctgacgggagcagggaccgccgccgcccaggtgccacacccaggtaccgcccgcccgctgcgagagccgggcaggtgggccgcggatgctcccagaggccggcccagcagagcgatggacttggacaggctaagatggaagtgacctgagcctcgcccggcggcttcctcgacgggacagcgcaagagttggagcacaggcttgtccggggagcagtatgccggaagctggttttcaggccacaaatgctttcacagagtgcaaattcacctgcaccagtggtaaatgcttgtatcttggttcgctggtctgtaaccaacagaacgactgtggggacaacagtgacgaagagaactgtctcctggtgaccgagcacccgcctccgggcatcttcaactcggagctggagttcgcccaaatcatcatcatcgtcgtggtggtcacggtgatggtggtggtcatcgtctgcctgctgaaccactacaaagtctccacgcggtccttcatcaaccgcccgaaccagagccggaggcgggaggacgggctgccgcaggaagggtgcctgtggccttcagacagcgccgcaccgcggctgggcgcctcggagatcatgcatgccccgcggtccagggacaggttcacagcgccgtccttcatccagagggatcgcttcagccgcttccagcccacctacccctatgtgcagcacgagattgatcttcctcccaccatctccctgtccgacggtgaagagccacctccttaccaggggccctgcaccctgcagctccgggaccctgaacagcagatggaactcaaccgagagtccgtgagggccccacccaaccgaaccatatttgacagtgatttaatagacattgctatgtatagcgggggtccatgcccacccagcagcaactcgggcatcagtgcaagcacctgcagcagtaacgggaggatggaggggccaccccccacatacagcgaggtgatgggccaccacccaggcgcctctttcctccatcaccagcgcagcaacgcacacaggggcagcagactgcagtttcagcagaacaatgcagagagcacaatagtacccatcaaaggcaaagataggaagcctgggaacctggtctgattccttccaacgtgcacttcagctggagaaagaaaccaagaagggaagcggccgctgggcccctcctgcgcacagtgttgttcagtttcacatggtacaaataagtaaaaccaaatgagcaaacacggtctttgtttctgattccttttaggggaattgcatgcaaactagactgaaatgatacaaacttccatctggtctgaccgcaaacagtgtttatttggggacaggggttgggatgggggtgtgggcaggggaaaacagagaacgggatgctttgaagataccatgaaataaaacccacagaggtatttgatgtatttaattgtgaaaggagactttgcagataaatgaggccagaatggcatgttttataattaactgaataaagaaggaagcattattatatattattgtggggaagaaccagccagttcgctttttctcctaaggtgtggacttttattttgttttaaaaatatgaatcaaaattcctgtgttgtgtgccaaggtataaagtggagaagttagatgagtgcaaggagctcctttgtgttgtgatgatgtgttttaaaagttgcactatcttaatgttgaaaatatttacaagggaactgttttacgtgaagttctgtatgttgtcttttcacctgtggattgtaatcaggcccaaggaatatcctggagtggtccccagaagcatccaagaaaagatatttggggacgtagcctaacattttaccaacttacgtaaatcaaaaaagtcattattgttgcaggagtttgcatcaaatagcagtgcatcgctgaagcttttggagacttttggatggaagataagatagggaagattaagttccagcatttctgacttgttattttgagttactctgctactcttaggctgcatagtttatgagaaaatgaacacatgcatttatggatccagtatcatgcagtgctgccctcatcctccagcagtgcaatttcttcagtaatttagatttttttcactatagcatgaaatatattcaaatacataccttattttatgcaataaattgtttaaaatgcaaggtggttattctgcatactgttgaaatatgtgactcctcagtatattcccattgcctctccccctttcctcgacagcttagttcagttctgcagggctgctcagttcacaggaggctcccagcagccaccccacatccagcctacacagaactttcgtgtgggagtggtgtgggtggtggttttcttatgctttggaagcccctagaaataatgacggaagaatgccatgttgctgatcgtggtaataagccattgtgggttattgtatgtcactagtattagcatagcattcttaaaggaatgcagtgttcaaaacctacccaaattccccgcaggattttaccaaacccttccccaggccagttttgtactgaaggcaagaactggacagtcagagaacagtggagggggcaagtgactgaagagcaccgggtaaaaagcacaacatgcagttaaaatgcaaactagaaaactaattttaaatattgttagttttaatatttcctgatatttacaaatattcattcttatatacaatgaaaaaaataactttcttctgcagatgtaagcactggcttttataagagcagcagccaacacgtttagcagacactgcgcgtggagaagggcttatctgcagtacactctgccatgtggagggtgggcctctgtggcctcttcacataacaagatgagctggaatgatgattccatgactcccacctatgcagccttaaagccaaatccgcgtgtgtgtgtttgtgtctgtctgtgggtctcgaaggtgatccgtcggtgcggtggctctgtgctgtaactggagagactgttccaaaccccaagagttgtctgatcctagtctgttcccttctgcttcttacctctgtagataggtcactggtttttgtttgtttgttttgaggattggaatttccattacattcatcctttgcacacagtaacatccacagaactagtccaactcttaaaaggagagaggaaaaacacaggcaccagttgtcagctcatgcttacaacctgtgtggaagtatatacagttgagagtcacagtggaggttctgagactggattcagtcttgttccagtgacagttggaaggcctctgctggagagacaccagctctcagggcagagattggcttggggccagaaggaccctccccaaccctggagacaccctgaaggttcactggctctccagattagcctctcttcctctgtcaggcaaagatgaggagcccgtgttcccatcgggccctgctggcagggacttgcagtggattcttggtcaggtgtgcccacagatgcggaggcgaggtgagtgattccatcatttcagttctcacctgcagttttggtgaagcaggagatgcaccccacagctctagctctcaaatggcttcacagtccttacttctctacctgcctcaagaaggggctcagagcagagacttgtgaattccttagtaactgtgagtatatgaatgtgttgcacatgtccacagtattggcgagataattacataattcagatacctttaatcatctttcaagaaagaggctcctcccattcaaccaccctagagaactgcctttgttaaatagttatttaaagactcatacatatcaaaccatgactttgaaaggtcttcgaggctggggctctgtaatgaattagtttaaaagccaaggtcataacatgaattgatggtcaatttcccttcagcagaaggaaaaggtgatttagatcagtagctcttttgaaggttgtggctgacctgttcataccgtgtcgcctcatggctagtgtggcgttgaaagagtagcgactgggaagatacaacttacacagtggggcctattgttctttcaagaaccctttttttagcttatagaacccatgggtccagtttagtaacgagtgatttaggcaatcaatgataggtttataatcttagattattccagcaaagtgtggattgcattgttaggaagaacatttggtgggaatgaacactcctgggcataccgctgacttttgtcccttgttcccggtgtaggagacccaaggcatcttgaatcccatctataagaacacaatcttccagcatacgtttgctttttcagaaactctagcattctctttaaatactgacgcaatccttaatggaaaagagatttcatgaagcaaattatgtatttcaatagttcttctatttttagtgtccaaaatttactaatacagaagcttgacaagcatgtcctcaccctccccaccacataaacacatggacacacacccaagccacaagaaatcccaagagagcagaagcgaatttttaaaagatttatcgtgaggactgcatttccattcactaattttggctcaaacttatgaggcaggaaataggggccaacagtaaatgggggaggcctcctgacaccagcagaggaattttgtacccaggcgaggacttcttgaacttctgcgtatctccgtttgatctctttcacctttatttcatcttcataagaatgagaaaggctcaaaaggaagcacttttagaaatcttctctgacctagaagaatccatccaaatccctgccttcctctctgaaccaacagttcccttctctgacagggggccatcctctatcttccatccagcggctcttccttttaggaaggctctggtgcagagcacttcaaatatgtcctcaggccagatactgattgctagtagagagacacccggcacccagtccgaagccctccctcaaaggaccggcttatggcgttggtcactggcaggctcagagacattctactgtgggcgcagggagcccggccccccatgcagccatgactggatgcgcccccatctcgggggcttgctgcactgcttgtttattgaattttgctacttagaatggcaacattaactttgtgtaccattcattttttaaaaattttccaaagctcggcagtgtatgaaagaaaaaactgggaaagatacttggtttctgttaacttttgtgttgcttgcttaagtgattaaagccagtgcttggagccaagccttcatgccacgaacatgctccacagcctgccctttgctctcctgctcacactgaccaagaatgccgcgtgcttggcctactgaggtgaaaggacaattgaatgacaggtgggcaaagggagaacttccccttcttggtgcgaggaaagtcacaaatttaaaaatgttgcttccagcccagatcctaaatgctagttctcagcagctgcgtggcttaccgttcgccatttccaccaccgccagctgccagcaccgctacagatcacagagatgtgaacagacaatggaaagcactcttagccttgcagtggtctacattttttaggaaccaatatttcagcattctttattacccggcacgctgtgtcctttgcagagttcaagtttatgttactgccagggtcagacagtcatttgctgctgctgctgctgctgctgctgcttctcgaactggatgcattaggaagctgctgtctgagtgtaggaatgtcttgctaagaaagcaatgtcttccttcatccttttctttcttccctctgcgtgtccttgtttttgtgtaatgcgggagagggttagagctatagagattatatatacactatccgtgcacattatatatatgtagatatacccctatcatgtcagagatctgcatgtcagtttttcagcaactaaggtgcctcatgttctgagttcagcagatataggaaccaagccgccccctcctgcacttgatgctcccacctttgttgtgcctcacttaaaatggtgcttttttcagttgtctgtcttttcttatgtttttatttgtaaggtgctgtatataagttgaatatattatgcacatatcctacccaatgggtagaacaaaaagttgttaatactgtaatataatgtatagatgataccaattttaacagaaatggcatagaatttgtgaatgcctatgtgctttgtcctcttttgtaaggaaatttgcaaatggatgcatacagattaaagtctatgtagtttattttcctattaaatatcaatattataacacaagagaaagaagtgtgaacaaacaagcaacagtttatgaccagcgtatatatagcaatggaaagttgcatctttgctgtgaaaacactttaaagaaaatactttttaaaaaatcccacagctttttggttgccactagacgcttcttattttaatcattttagtaatgctcagctggaccagtgttagttatatttgagtcagaaaaatgttgtttttcaacttgctttataatctcctgcatctatctcctgctgtagcatcangaaggtgtcaggcaacagtgaaaagtgcacatttttgttgttgcagaaactgtgtcagaggaataagtaaatcagcctgcagcagaagactttgttcagctccagaggcatctgtgaccgtctgtgtccaagtctctctgtgcctttttcttttacaaactgaagctgtggagccaatgaagtaacagtagagattgtagggaaagaatacctcaggaaaaacaaatacacttacaagaagaccctgttcttagaaaatgtgtttagttatgggttagcactagaagagacttggctgtcagccagccaagtgaaggacctctcatccattcccattcatgtcccatcataatacggacncaaaaagcaaactcggttttgccatcagttagaaattacgttttggattgtatattgttacatctctcttccagcttagtttttagtgtctgattgtgacctctgcatttatcttcaaataccctaattttaaaacaaaagaacaagaaaagtttataacaccatgttcactaaaaccacggttgaatcttgggtgtgggcatcctttcgagtgttgtccataagagcagttcgtggaattttgcccatctgacccatattatcagcttattctgccaccagagtagagtctaataaattccaaagtttttatttgctccatggtgtatgttctgactttgaaaatgtcagattctataatcatacccctaacatccaggagacaaatgacagattatctttaaactgaaattgactctacaatgcaacccttaatgctgaatggattaaaaaagtcagcccttttagtatctgtttgaaagggccgtaaaaagttgacacttttgttgttgtggatcctgcgtgtctagacccacgtgttgtttccatcgtatactgtagggtgcaccccttgggattcatcattaagaactgaggctcactgttgtcagaaacaaagctcccaccccccaggttcaaccttgtgggagaactgttgagcatgagaatgttctagactcagaggtactaaaatttgttaccacatcattgcttcctttctacaggacgaattgaggcttaaactttactgttaatgatactggttcattttaatgtgcttgttggtatgttgctatttttcatttcatagctttcaaaaatcatgctaattgtatacttgtctagtttaaggctattttaaaatatgtacaatactattcacagcatttagttcgtttaatttttattataaagcaatctactaaaaaagtacaactgtatttgaacttttcaatagttgtttgtgagctatgataatcaaaagtcattaaagtcttttttaacaaacattcgtgcttacttttcaacataattcccagttatatacagaaaaagatttccacctgtcacgtatctgcctcttttacctgagcaatggtgtagttcttagacctaaggtctgtaattgcaatacttttaaagaaagatgttgctctaagtgctgtttgttagttatgaaatcagatttttctgcttgttcttaatgctgtggtcaaaccatagcacaaaatcattaaaaataatcagcggcatac

SEQ ID NO: 5507 - protein, 306 aa, Homo sapiens
  ref <308>: DATABASE ACCESSION NUMBER: SWISS-Prot / O15165
  ref <309>: DATABASE ENTRY DATE: 2002-06-15
MPEAGFQATNAFTECKFTCTSGKCLYLGSLVCNQQNDCGDNSDEENCLLVTEHPPPGIFNSELEFAQIIIIVVVVTVMVVVIVCLLNHYKVSTRSFINRPNQSRRREDGLPQEGCLWPSDSAAPRLGASEIMHAPRSRDRFTAPSFIQRDRFSRFQPTYPYVQHEIDLPPTISLSDGEEPPPYQGPCTLQLRDPEQQMELNRESVRAPPNRTIFDSDLIDIAMYSGGPCPPSSNSGISASTCSSNGRMEGPPPTYSEVMGHHPGASFLHHQRSNAHRGSRLQFQQNNAESTIVPIKGKDRKPGNLV

SEQ ID NO: 5508 - DNA, 616 bp, Rattus norvegicus
  ref <308>: DATABASE ACCESSION NUMBER: EMBL / AA891734
  ref <309>: DATABASE ENTRY DATE: 2000-03-03
actctgaataaggttgatatttaaagagcagaggaaatgcctatacaaaaggtttatggaacattcatttacatactggatatatattctttacaatatagaatagtgaaaactgcgctaatgggtaagacaggtacaacaacattacaacgtccttgacactgaggataaatgcagtgtggcttttaacgtgggaacagcccaacactggaaactatgagaccattaatgagaaggttaatgggaccctggttatatatggaaagtggagggacatcactgaatttactcaccgaacaatgcactaacttctgcccaactgatggccttgaagcaaaagcctgagcaacactcctcctcagtgtttctgagtatagtctatgacactggtctcgtcttgttctcttcaatacaaacgtcacacacagaagacagaagtttgccctaccagctgttgtagacagttgtagagctgtcttcctgtgtttcctcagagtgaatcccttgacacccttgactacttttaccttgagtgaagatcatacctggtcagccacttgaaaacgcattcccatggcttcttggatgccaacctctgtggcattcaattcactgg

SEQ ID NO: 5509 - DNA, 2622 bp, Homo sapiens
  ref <308>: DATABASE ACCESSION NUMBER: EMBL / AK001539
  ref <309>: DATABASE ENTRY DATE: 2002-08-06
gaaacagcacagaacacgaggtggtccccatgtccctggcacactagcattccgggggatgaggaatccccagcccttgaggcagaggtgccgagtgactgccatgcttcgcccgtccgcatgggcgcttctgtccagctgcacccgaggccgggggtttccctcacctcggtcttcccaagatggagatgctaacgaaactgagaagggggcgtatcttgacgaaggtttgtgcaagtcaggcccttctggaacacagcagggcctacaacgaggggcctttgcgatgggctgtgaggatgggggtggtgggaagaattggccacgttagagaccccatgccaccccaccatggtgagtgctctgtgcctcctgctcacctgtggtgagctgggcgagctgggcgagctgggcgagctgggctggggagagcctgtgaggaccgagaggagaaatgagaagaaggaacaaaaatattatttctatgtaatttatattttacttatgccaaattatttatgataatttgccattgctatactgtaccagtgtcaaatgctgcagcctgccaagctgtgattttgtgaggcttgtccctatgtaggatgcaccgcaggcccctggccactgaaagagtgtgcagtggactgtgggtctcccatatgcggtgccgcccaaaggtggctttgcctcaagcaacctaccctgatgttttactcattggaatgtttttccccgattgtggatgacttcttttctgatggagagagtccaggagggatggaaaacgcctggatttaagctcagcatcccccacatgggcttttcgatcatcttcaggcctgaagctgcacgacctgaagttcgcctgcatttatcagccctctttgtgctgctccttgccaccttggggttcctgctggggaccatgtgtggttgtggcgtgtgtgagcagaagggaggatgaggaaaaagagaagaaaccccggtactgacaagctgtttttgagtgccactgtttgccatcatctaagccactgaatcaagtgtatttcaggcttatttcaacattccaatgccctggttttcctgcttgaatctgttcgtggtcaaaggtttgggggaatttgtgaccctggaacatccccagagtgaaagatggagctgggccacttcagaataaggccttggccccatcctctcacagcctaggtgctctgcaggcatgctgactgtcctgattgcgatccagcccgaaattccctcctctgctttcaaaagtcaaatcccccattcttaggccacactggtgtcacaagctcctgtcagggagctggggtttgggaatgtgctttgtgaactctgctttaaagtgaggggccgaggaaaacttagaaacaggcagagttggaagcagccaaatcacagtgggtgttgtgtgtgtgtgcgtgtgtgcatgcgtgcgtgtatgcgtgtgtgaaagcaggtggaccattccactttttagctcctattgatgcaccaaaccaagtgcctcatttctgtgccaaatgtttgccttggtcgttgtggacctccttctctaacttgcggtggcatgactgtcaggaggtgctggcattttcagcagatcctcatgtgttgaccctgatgtctttagcagaggcctctagcatctcggtttttcatccactgcaggaatgtggccacagggagcagaggtttgtactttccccaagaggtcctcatcctgagacggtctctacccatgtttaacccaaagagtgcaggccaggttccttatccttctgatgaaggatgggagagctcatttagaagtcagagcaaactagggtctcagtattgagaaacgcagcctgccagggaatcacagagacatcggggtgcccgtgatggccctcatgaagccatgcctcgacggcattcaggaagccctgcaaacgtgctttttgaactcattggccaggtgtgatttttacacaaggtaaacgtggtcaagggcatcggggaatttgctccaagcagatagctccctctgaggaaccaaaggaagcaagtttccacgatttctgaagagctggtataggaagtttctttcttccttttgtgttacatgtgcattaaacagaacaagctgtgtgtcatcacagattgtactgtgggctcagaaaccgtgagagagcccccaccgtggacaccggctctagggccacaggaaaaggaacgtttccaggcattttgtctccagggctcccgctggacaggcacgtactgccctggggagtaaatgcggagagttcacgaactgtgcccaacgcatgttatagccagggtcctactaactactcagtaaaagaacgtattgttgtattcctccagtgttaagctatagccatgttaaaagtcactgtgcatttattctcagcatcaaataccttgtaacgtcttctctgccttgttagtgcatatttttacttttctgatactgtaaagaatatatccagtatgtaaatgaatgttctataaatcttttgtatagtcattttctctgctccttaaatatcatctctattcagagtataataaaattatgaacttggt

SEQ ID NO: 5510 - DNA, 516 bp, Rattus norvegicus
  ref <308>: DATABASE ACCESSION NUMBER: EMBL / AA891735
  ref <309>: DATABASE ENTRY DATE: 2000-03-03
aatacaagtaaaagggggcagggcaactccttccccctccaggtcaggaccaggagaatctgctgggctgtccccgggaccaaagaggaaaagagtgacatagaaactgaagcaaaggaagcttagtcacactcaggtgagggtgacagctcctcctggattttgtttccatttattaaaaaaaaaaagaaaagaaagaaagaaaaagccaccccctcactcccagcccattcctcacagccagggtcagaaagcagcatcagtgaggcgggttcctcacctctggttatctctggcccaggtcagcttgagccacctgccctcaccaggagagggtttcagttggcagttaggcttggggaagtctctacctggaccccccagaggcctgggagcacccccctcctcccaggaaagggaatgcagtgtctactgggctcagaggggtggcctcacccacctgacatgagtcctgattctcccatctcgaggacggcaggaagtttattgcaccag

SEQ ID NO: 5511 - DNA, 558 bp, Rattus norvegicus
  ref <308>: DATABASE ACCESSION NUMBER: EMBL / AA891737
  ref <309>: DATABASE ENTRY DATE: 2000-03-03
aaatggttcagaatcactgtgaggcttttagatgttcccattattcaaacaacccaaattaaaaacatacaactcacattttaagtaatataagcaaaataaaaattatctttaacaatgccttatattttgttttagtattctactatagacacataagaataattatttccattttctgcttccctcaaaactataaaatgctgttacatatttttgaaaaatcaaactccttcatatcctttcatcaattttatgttgaaaagagagttattttgaagcactggaattagtgttggaaaaataggtttagagtccaaagctggtgtgtttgcgaataagaacacaagctgacaagtgatttaaattccttagaaaccttcacagttctccatatgtacatgtggcagaaggatgaattgccagccaatatacatcagtgatcagttgcttacatttcaaagatcaaaacacttggtgggaagcctagaaggaaacacttaaagacatataattaagaactcttatctctgaaaagcaaagtccacattttagtta

SEQ ID NO: 5512 - DNA, 558 bp, Rattus norvegicus; identical to SEQ ID NO: 5511
  ref <308>: DATABASE ACCESSION NUMBER: EMBL / AA891737
  ref <309>: DATABASE ENTRY DATE: 2000-03-03

SEQ ID NO: 5513 - DNA, 593 bp, Rattus norvegicus
  ref <308>: DATABASE ACCESSION NUMBER: EMBL / AA891738
  ref <309>: DATABASE ENTRY DATE: 2000-03-03
ccagtcatagtcttaaacagacactttattggaatcgttttaaaagcactctaagagggaaatctccttgcatcccagaggcgattgaaagttgtagacgggcagtggcggcacatgcctttaatcccccgattctggagactaaggcaggcagtttggtctacaaagtgagttccaggacagccagggctacacagagaaaccctgtcttgaagggaaaaaaaacaagatgatgaagaagaaaaagaaataacgtacagtttttacacattccatacatcacacacatatctgaagaatctaagcaatgcaaaacaaggcctgaggggaggcatgagaagtaaaggtatggtagggtaagaaagtgatgtcttcagagctgctttctcccctcagtagaggaaggaaacgtttatctatggcaccgaggattaaggctgggttggtaaagaggtgtaggggtcctttgggtacaaactgctgttccatgctttcatggaaccacctgaacgtggacacggtgccaggcattgctgagcacgcctcgaaggttccagattggggccacagtgtctggctgcacattgtaactg

SEQ ID NO: 5514 - protein, 488 aa, Rattus norvegicus
  ref <308>: DATABASE ACCESSION NUMBER: SWISS-Prot / Q07116
  ref <309>: DATABASE ENTRY DATE: 2002-06-15
MGTLIGLGAVLAYHDHRCRASQESPRIYSKEDVRSHNNLQTGVWVTLGSEVFDVTKFVDLHPGGQSKLMLAAGGPLEPFWALYAVHNQPHVRELLAEYKIGELNPEDRMSPPLEASDPYSNDPMRHPALRINSQRPFNAEPPPELLTESYITPNPIFFTRNHLPVPNLDPDTYRLHVVGAPGGQSLSLSLDDLHKFPKHEVTVTLQCAGNRRSEMNKVKEVKGLEWRTGAISTARWAGARLCDVLAQAGHRLRETEAHVCFEGLDSDPTGTAYGASIPLARAMDPQAEVLLAYEMNGQPLPRDHGFPVRVVVPGVVGARHVKWLGRVSVESEESYSHWQRRDYKGFSPSVDWDTVDFDLAPSIQELPIQSAITQPQDGTTVESGEVIIKGYAWSGGGRAVIRVDVSMDGGLTWQEAELEGEEQHPRKAWAWRIWQLKAHVPAEQKELNIICKAVDDSYNVQPDTVAPIWNLRGVLSNAWHRVHVQVVP

SEQ ID NO: 5515 - DNA, 2408 bp, Homo sapiens
  ref <308>: DATABASE ACCESSION NUMBER: EMBL / L31573
  ref <309>: DATABASE ENTRY DATE: 1999-07-02
ggaattccgggtaatatagggtttggtgcaatctgtggtttcaaacatctactgggggtcgtagaacatatccccagtggataagggggtactactgtacttgttggctcttcatgttagctctgctaggcagatgtcatttcagagaagaggaagcaagttcagaacggcttggaatcttgctcaggaaatcgggctggttaatgaataacaagagatccagtttcacaaacccaaggcattttgcccccagaatctgggcttcttcacccatttaggctgtcactactttttttcacttttttatccctgtttaagtcagtctgacccacagttgtcctctgctgacttcagaaataataatctggccagtagacatttggtttcggtcctttaggcccttcgccccaggcatcgttctctatggtggacaaagttcagaatggaagatgggagaaaggtgattctgattctagaagcacccatccctcctaccccattccccacccgcattacctgccatcctgtcagcacagtcttctctgaagtgctccaagttttctctaagggcccatttggactcccactctcaagactcctcacttgcccagaaagctccttgctgaccttctctgtgtcttcctctcacccattcccttaggcctccctaatatcccctcccagggtctccctatcttgatcccagaatcttccttctacaggtctgctacaatgctgctgctgcacagagctgtggtcctcaggctccaacaggcctgcagactcaagtcaatcccctcaaggatctgcattcaggcctgctccacaaatgattcatttcagccccagcgccccagcctcaccttctctggtgataactccagcacccagggatggagagtcatggggaccctattaggtctcggtgcagtgttggcctatcaggaccatcggtgtagggctgctcaggagtcaacacacatatacactaaggaggaagtgagttcccacaccagccctgagactgggatctgggtgactctgggctctgaggtctttgatgtcacagaatttgtggacctacatccaggggggccttcaaagctgatgctagcagctgggggtcccctagagcccttctgggccctctatgctgttcacaaccagtcccatgtgcgtgagttactggctcagtacaagattggggagctgaatcctgaagacaaggtagcccccaccgtggagacctctgacccttatgctgatgatcctgtacgtcacccagccctgaaggtcaacagccagcggccctttaatgcagagcctccccctgagctgctgacagaaaactacatcacacccaaccctatcttcttcacccggaaccatctgcctgtacctaacctggatccagacacctatcgcttacacgtagtaggagcacctgggggtcagtcactgtctctttccctggatgacttgcacaactttcccaggtacgagatcacagtcactctgcagtgtgccggcaaccgacgctctgagatgactcaggtcaaagaagtaaaaggtctggagtggagaacaggagccatcagcactgcacgctgggctggggcacggctctgtgatgtgttagcccaggctggccaccaactctgtgaaactgaggcccacgtctgctttgagggactggactcagaccctactgggactgcctatggagcatccatccctctggctcgggccatggaccctgaagctgaggtcctgctggcatatgagatgaatgggcagcctctgccacgtgaccacggcttccctgtgcgtgtggtggttcctggagtggtgggtgcccgccatgtcaaatggctgggcagagtgagtgtgcagccagaggaaagttacagccactggcaacggcgggattacaaaggcttctctccatctgtggactgggagactgtagattttgactctgctccatccattcaggaacttcctgtccagtccgccatcacagagccccgggatggagagactgtagaatcaggggaggtgaccatcaagggctatgcatggagtggtggtggcagggctgtgatccgggtggatgtgtctctggatgggggcctaacctggcaggtggctaagctggatggagaggaacagcgccccaggaaggcctgggcatggcgtctgtggcagttgaaagcccctgtgccagctggacaaaaggaactgaacattgtttgtaaggctgtggatgatggttacaatgtgcagccagacaccgtggccccaatctggaacctgcgaggtgttctcagcaatgcctggcatcgtgtccatgtctatgtctccccatgagcatggaaaggagccacctccacccctttccggaattc

SEQ ID NO: 5516 - protein, 488 aa, Homo sapiens
  ref <308>: DATABASE ACCESSION NUMBER: SWISS-Prot / P51687
  ref <309>: DATABASE ENTRY DATE: 2002-06-15
MGTLLGLGAVLAYQDHRCRAAQESTHIYTKEEVSSHTSPETGIWVTLGSEVFDVTEFVDLHPGGPSKLMLAAGGPLEPFWALYAVHNQSHVRELLAQYKIGELNPEDKVAPTVETSDPYADDPVRHPALKVNSQRPFNAEPPPELLTENYITPNPIFFTRNHLPVPNLDPDTYRLHVVGAPGGQSLSLSLDDLHNFPRYEITVTLQCAGNRRSEMTQVKEVKGLEWRTGAISTARWAGARLCDVLAQAGHQLCETEAHVCFEGLDSDPTGTAYGASIPLARAMDPEAEVLLAYEMNGQPLPRDHGFPVRVVVPGVVGARHVKWLGRVSVQPEESYSHWQRRDYKGFSPSVDWETVDFDSAPSIQELPVQSAITEPRDGETVESGEVTIKGYAWSGGGRAVIRVDVSLDGGLTWQVAKLDGEEQRPRKAWAWRLWQLKAPVPAGQKELNIVCKAVDDGYNVQPDTVAPIWNLRGVLSNAWHRVHVYVSP

SEQ ID NO: 5517 - DNA, 511 bp, Rattus norvegicus
  misc_feature (1)..(511): n=a, c, g or t
  ref <308>: DATABASE ACCESSION NUMBER: EMBL / AA891740
  ref <309>: DATABASE ENTRY DATE: 2000-03-03
ccagattaacaaattcatatttatgcaaatgaagcggggcataagtgacagcaacgagggtccaggcaggggtcaacacagggttgtcacagggtggtgtagccgctgtctcccatcaggaacgaggccccgcccaccgacatcagggcccctcccccaaggcatggggaccccggggcaatgacatcatcatcctcctgagtttccacccccttggtctgaggccggatgacatcatcatctttgtcctgctctgggaccgtagggacagcagcctgagaatctgcgatccaagcctggaagttcccatgatgtttctcgaagaggccagggaaggagccgcgggggtcggggacaccaggcagcagggcttccttcaccctgcgcatccgcagcagggccaggagcagcaccagggtgagcagggccaccggaggccacaggccagggcgagaggtggggtgggggtcccgggggtcctcgggagggtggggccagtgcangagcctgt

SEQ ID NO: 5518 - protein, 359 aa, Rattus norvegicus
  ref <308>: DATABASE ACCESSION NUMBER: Refseq / NP_057924
  ref <309>: DATABASE ENTRY DATE: 2002-01-07
MAWALAVILLPRLLTAAAAAAAVTSRGDVTVVCHDLETVEVTWGSGPDHHGANLSLEFRYGTGALQPCPRYFLSGAGVTSGCILPAARAGLLELALRDGGGAMVFKARQRASAWLKPRPPWNVTLLWTPDGDVTVSWPAHSYLGLDYEVQHRESNDDEDAWQTTSGPCCDLTVGGLDPARCYDFRVRASPRAAHYGLEAQPSEWTAVTRLSGAASAASCTASPAPSPALAPPLLPLGCGLAALLTLSLLLAALRLRRVKDALLPCVPDPSGSFPGLFEKHHGNFQAWIADAQATAPPARTEEEDDLIHPKAKRVEPEDGTSLCTVPRPPSFEPRGPGGGAMVSVGGATFMVGDSGYMTL

SEQ ID NO: 5519 - DNA, 608 bp, Rattus norvegicus
  ref <308>: DATABASE ACCESSION NUMBER: EMBL / AA891746
  ref <309>: DATABASE ENTRY DATE: 2000-03-03
cactttccaaggttttgctttgtttgacagcagttatgggttgagggggcacacaggcctgacccccatgttccgtttgaccatgtgaggagacccacggcagtgctggtggtcctgggggaccagccagaagagctcagccggaaccactggcttcgaggctttgtgttcatttcgccttcggccccttctcgataggcttcccgatgtccttcccccggagcttgaggccgatggctctctcaattttgcccaaaacctggttattcggaatggcccgtccactttcatagtctgcgatgacttgcggcttttcattgattttcgtggccaggtccttctgcgtcaggcctttgctctgccggccccgctggatcactttgcccacctccagggtcatcctgtcgtggtgcagctcctctgtctcccggtctagcttggctgtgtttttagtgatggaatgctgcttgttctggccagcagcccattttttggatgtctccacatcttctcctcgtcgctgagctgctaagatggcctgcttagacttggcctgtgcggccgtggggcccttcttgcgcagcaccgtcacggtgtcccagtcactc
